United States Patent Application Publication US 2005/0228172 A9 - sequence listing, part 29

SEQ ID NO: 92320 - DNA, 1323 bp, Homo sapiens
agggcttaaaacctaggtgataggttgatagatgcagcaaactaccatggcccatgtacacctatgtaacaaatctgcacattcatcacatgtatcccagaacttaaagtaaaattaaaaaaaaaaagaagccagtcataaaagaccacatattatatgattctatttatgtaaaatgtccataatgagcaaatctatagaaacaaaatagcttactggttgcttaatactagggggagggaactgtcatgggggtaatagaggatacaggatttcttctggggaaaatgtatgctctaaaattacagtgatggttgcacaactctgtgaatatactaaacaccattgaattgtacattttaaataaataaattgtatattatgtgaattatgtctcagaaaagctgttcttaaaataacctgggtaagggtgagacaggggagtgtaggtgagcaaataaaggaaacaagattgactaggatttcaccatgctgaagcttgttaatagtaaatgcaggttcatgataccattctctctacttctgtgcatgtttgaaattgcctgtaataaaaataaatataaataaaaaacagaagaccatattagactatcaataaatggcactgttattgttacatcacagagccaagcaccaaatttaagaactcaggcacatacccctgaataacctatcatacaattcccagttttcctttaacttgcctaaagtctctttgcaggatttggcacttttctttccatcctggctccagagggacagagaacaactggtcatagacatagaaatagttcataacccttactcagccccttctttatctctctgtggccagtcagccacccactcttgccaattttccttccaaaagaccgttgtttacccatccttcatacccactgccacttctaaaccaagccctttgcaaattccaccaaggtcacagcaacagctggtcttctccacagcctcacatagactcccagtcccacatccagtgcccacctctcctgcataccaccagcagactctttgcatgtgtgcctgtatgtgttcctctcccctactcaaacatttacaggctctgtatttcttatgggtttccatcatctgatctcatcctatgaatccaaacatttttcacmatttcataatttgtacccattgcactgactagcagttccaccctctgtgttcattcaagtaaccacgtgcttcaggtaaggtgaatcttgtttagtcttactgaactatgttattccatttttcttcccaatgattggtttgggaatgagcattgga

SEQ ID NO: 92321 - DNA, 1323 bp, Homo sapiens
agggcttaaaacctaggtgataggttgatagatgcagcaaactaccatggcccatgtacacctatgtaacaaatctgcacattcatcacatgtatcccagaacttaaagtaaaattaaaaaaaaaaagaagccagtcataaaagaccacatattatatgattctatttatgtaaaatgtccataatgagcaaatctatagaaacaaaatagcttactggttgcttaatactagggggagggaactgtcatgggggtaatagaggatacaggatttcttctggggaaaatgtatgctctaaaattacagtgatggttgcacaactctgtgaatatactaaacaccattgaattgtacattttaaataaataaattgtatattatgtgaattatgtctcagaaaagctgttcttaaaataacctgggtaagggtgagacaggggagtgtaggtgagcaaataaaggaaacaagattgactaggatttcaccatgctgaagcttgttaatagtaaatgcaggttcatgataccattctctctacttctgtgcatgtttgaaattgcctgtaataaaaataaatataaataaaaaacagaagaccatattagactatcaataaatggcactgttattgttacatcacagagccaagcaccaaatttaagaactcaggcacatacccctgaataacctatcatacaattcccagttttcctttaacttgcctaaagtctctttgcaggatttggcacttttctttccatcctggctccagagggacagagaacaactggtcatagacatagaaatagttcataacccttactcagccccttctttatctctctgtggccagtcagccacccactcttgccaattttccttccaaaagaccgttgtttacccatccttcatacccactgccacttctaaaccaagccctttgcaaattccaccaaggtcacagcaacagctggtcttctccacagcctcacatagactcccagtcccacatccagtgcccacctctcctgcataccaccagcagactctttgcatgtgtgcctgtatgtgttcctctcccctactcaaacatttacaggctctgtatttcttatgggtttccatcatctgatctcatcctatgaatccaaacatttttcaccatttcataatttgtacccattgcwctgactagcagttccaccctctgtgttcattcaagtaaccacgtgcttcaggtaaggtgaatcttgtttagtcttactgaactatgttattccatttttcttcccaatgattggtttgggaatgagcattgga

SEQ ID NO: 92322 - DNA, 957 bp, Homo sapiens
tccttcatgttcatgtggcattctccctctgtgcatgtctaaattttctcttttaataacgacaacagtcatattggatcagggccaaccctattccattatgacctcatcttaactcattacatctgcactgaccctatttccaaataaagttacattgtaaggtactggaggttaggtcttcaaattctaaatttggacaggacacacacctactcataacagtcatgatttacmcctggcaattttcaaagagctgtccactctcacagccttcttgaggttaaggattacatcctattctcatgaggctggggtatcttagaaggagctctgctctaaaaggacaagtgactcctatttctttgcctcagttttctcatatttaaatcacaaaggtagagtaaataattccttgagcctttcttagatctgagatccttgcatttttctggaaatcagtgtcccaaggcatgctgtcttttctaggagttctctcatctctaactagcagcaacctgaccactagaataccttgctctttcttttgctaatctgttttatgtctaaaacttatatcctacccctttcttggcctcctcgctctggggttctcattgcccaagatttcacaacttagttaataaaagtacacttgttggcattgtcattgatcaatggtatttctcattttttattcagtaatgtggacaatctcacacagtttgtcaatttacgatttttgctgtgtgtatgcagaggtgcactcataatttaattttgaaaaaccttgaagaagatgttatccaaacagacgaaagggagttcatggttgtaaaaataatgatctagccttctctgactctctgctgttttaaagaactactacgtctggcatctgtccagtatttgtgtggcctgaacccattttattcacccatatgagccacttctttt

SEQ ID NO: 92323 - DNA, 1356 bp, Homo sapiens
taatacctcattgtttcaccttaactatcaggtgatagtatattcagtcttcattattaaagcttagaggtggaacataatttatatctttttcatatccattttatatctaattaaatatgtgagttcatcacagctttgcagaagaccagatattccatttcaaaaaaagagtttggaagttggcttccactgttatggaaataattcaacttatcacccaaattttagtttattaatttccagtgctaatgtttactttggatatataatgtcaaattttgtttttctgtaagatttttaaaaagcataaaacagttactcttaattttggatggagtcatttccagtcccttctgaaataaggcagattatgaataagtaaatggaaactattgggccaattttaggatttctctgtaactaccctgcttgataatttttatatccacttatagtcaagaatgtagtwtctttttctttctcagccatttatatatatatatatatggtagattagatttggtatcaccattaggggagaggtggagaagggaggttatataaattatttgacttctcactagaagaattctttggaggttaaaaatttaggtgctttataaattttttaaaaacccaccaaaaccaagctaaaattttacttatctgccattaaattgttttagataattagtttgaataatggaacaggcaaggttgtattcctggagcttttggggcatcattctaagtaattttgtggtctttgaattaataagtagatttaaggcctaatagagaggtaagtgaggtggtgtagaataggagcttggggaaatgacttttactgtattcctaaatttgcataggaaagggctttatgttgggaaaatgtacagtattttgtcaggtcagctaatagctgtaattatttagcaacaggagcttagcaagaggattgttaccttcatcatcaataaagtagaactatagggaaagaatttaaatgataagcaggtgagctgcaagctgtgggtagttaggtttgaaagatacgtgcatgtgccgggcgcggtggctcacgcctgtaatcccagcactttgggaggccaaggcgggcagatcacgaggtcaggagatcgagaccatcatggctaacacgatgaaaccccatctccactaaaaatacaaaaaattagttgggcgtggtggcaggcgcctgtagtcccagctactcaggagactgaggcaggagaatgttgtgaacctgggaggcggagcttgcagtgagctgagagggcgccatgcactccagcctgggcgacagagcgagactccgtctcaaaaaaaaaa

SEQ ID NO: 92324 - DNA, 768 bp, Homo sapiens
attcattgactttgctcaccaaagacacttcctcataatcaatattcacctttacctttatagtaaattttacaatcgtattgtattttaactgtagaaacttctctgacctagatttataggacttttcactcaagatgcttagtgacgacttcctcaaataaataggtgataatatgctttgggaatgcaaaatgatctctagtaaggcaaataacctaagtagttcatcattatgcatataatccactcttttcaattatccatgccactggtttgctacttcagcatgactaataaaaagttattattattgttgtttcttatttttctctattgaattacaactatgaacaattcacaaagaaaatgaacgattcacaccatctctaatgactactgtcattgatttatttgaagctgatgatacagaattaccacacttcggctaatgtttcagctttgaaattaaatatgcatattattttttttcagggattgaaatacacctcttagacatcattgatattttttatcttgttaacagaatcatcttctgtggataatcacttaagatgcatatttactrcatgtggcagacactgctcatcagctatgaagcagccattccactcctcattttctgtttgtagcaaatatatttaagtaggtggtgagtgtaaatcccttagtcctatggaagagaaggtttttctccagtcccattgttgtatcctgggaataaccatgagtgtacatttactctag

SEQ ID NO: 92325 - DNA, 1025 bp, Homo sapiens
tattttactttataaattacccagtcttgagtatgtctttatcaggtgtgtgaaaaccaactaatacataacctttcactttagtcaaaagagattctagatttgtctctttgtcccttccctcctatgtgttaaaaaattattggaaataatcttctttttctgctttgttccttgggctgcctctccctccgggcttgtcaagtcaatattttccttaaagctatttcagaaccaaggagcaattgatactacagagttaagctctttaccaagttccaaatatttcatctatattgttttatatcctaatttaaagagccagatttttgaaaacaagcataatgtatctgacttttattgtatttctttactgaatctagcatagtagtgggaattcaaatctgctgcctgattagcttgtgatgtggggatcctaagagttgggaggaaaaagacaatgaccaaggattgtggtttttaagtttcccctatgtaacattcagggagaaaactgtaggcaggttggatatcttaaatctacaaacatcctgaaatgggagaacacagaaggatgytcatgcttcaggggtgagttatgcatttgggagtcattcttaccttattcttatgaaacattttataacaggcctcagccctcacatattctttgaagtgagcaatcacatacttttgaaactaatctgttgttccaatcatcgagtgttttctcacaaccataaacaatttatttcctagatttagtactgcatttcattgagtggagtttaccatatggaatactattttacccttccctctcaatcagagacaaaacaagcactgtatgtttgaattgtttcatttcttgatcagttccaagtagttttcttcctaatccttttctctaaatcctcgcataaatggttgaggaggtagatttactggaatcagaaagcatttggccacggcaaactgccctctggcaaatgagaacattgctgccaagggacattttaacaggg

SEQ ID NO: 92326 - DNA, 1025 bp, Homo sapiens
tattttactttataaattacccagtcttgagtatgtctttatcaggtgtgtgaaaaccaactaatacataacctttcactttagtcaaaagagattctagatttgtctctttgtcccttccctcctatgtgttaaaaaattattggaaataatcttctttttctgctttgttccttgggctgcctctccctccgggcttgtcaagtcaatattttccttaaagctatttcagaaccaaggagcaattgatactacagagttaagctctttaccaagttccaaatatttcatctatattgttttatatcctaatttaaagagccagatttttgaaaacaagcataatgtatctgacttttattgtatttctttactgaatctagcatagtagtgggaattcaaatctgctgcctgattagcttgtgatgtggggatcctaagagttgggaggaaaaagacaatgaccaaggattgtggtttttaagtttcccctatgtaacattcagggagaaaactgtaggcaggttggatatcttaaatctacaaacatcctgaaatgggagaacacagaaggatgttcatgcttcaggggtgagttatgcatttgggagtcattcttaccttattcttatgaaacattttataacaggcctcagccctcacatattctttgaagtgagcaatcacatacttttgaaactaatctgttgttccaatcwtcgagtgttttctcacaaccataaacaatttatttcctagatttagtactgcatttcattgagtggagtttaccatatggaatactattttacccttccctctcaatcagagacaaaacaagcactgtatgtttgaattgtttcatttcttgatcagttccaagtagttttcttcctaatccttttctctaaatcctcgcataaatggttgaggaggtagatttactggaatcagaaagcatttggccacggcaaactgccctctggcaaatgagaacattgctgccaagggacattttaacaggg

SEQ ID NO: 92327 - DNA, 1169 bp, Homo sapiens
tctactattactattactgaacatcttacgacctctacaatttgttttaaaagggagtgcattttttgtttgagctgaaccatcagattttcttttcatgcggtatgacatgaggaagaatctatctgtaggcacaaaactrgttcactttctatgggcaagcgcagactttaaagtagattattaaagtacacagaaatagaaaattagatcagaagtgatgttttactgtgaggtcttctttgggccttataaaacgagaaagaactaaccttgttctatttctgagttctgaaaaaaaagcctcatagcaggcatatcacctttaattaggtttctgcttttgggaagcattttaccagccccctttcatttatttttaatgatgttatcactaacaggcaaacagtcccttaataaaacaaaaacagtttctatataaagcctggtgtacatgttctgagtcagtcatctaaaaacaaatgttatgattgtttccgttgtgctcttagaacacttaatggccctactgtgcagatatgcaaaacatcaacctaggaaatataaccgtgtctgttttgcagctttcaataaatgctttcccatattcacctgcagtatcagcagtgaggttaaacctactgggtcatggaaatgacagaaaggtcaattaagtgaatcttttcagcctaagctatgccagttcttgcataaacactgatgacttatgtcaagcagatgtgaatgcaacccaaaatatttgaaagttaaatcagtgtgtgtgtgtgtgtgtgtgtctgcgtgtgtgtgtgtgtgtgtgtgcgcgtgctcgcatgtgtgtgtgtttaatgcttggtgccattccatttttttccaagaaatttcaaattgtcaaaggaacaaaaacctctgtacacagatacccgagttctcaagttttgtctcctcagatgagtttgctaagataatgatggatttgctgtcaaggccaagattggaaatattaatagatagcttgatcttagaatttctgaatacagaaatttttgaaatacagatacagaatagccagaaactaaagattcttttttgagcataataatagaaaatatgatttccccctaaaaatacagtttcttcagggaattggggttcctgattttcttgag

SEQ ID NO: 92328 - DNA, 1457 bp, Homo sapiens
cattacacattgtatacatgtattgaaatatcactttgcatcccataaatatgtacaattgttatgtgccaactaaaaataaaagaaaacataggaagaagaagagacaccagggatgtgtgagagcattgaggagaggccatgtaaggacacagatgaaagccatctacaaggcaaggaaaggggccttacatggaaaccaactctgttgacactttgatcttgaacttctagcctccttaagtaaataaatgtctttctrtaagtcacccagtctctttttgttatagcagccctagcaaacgaatacaatcatcaagtcatttgtaagcacattaaatattgagaagcattgtttaatctcactggcatctatagtaatatctctgtttttattattactctaatgttattgtttcttggctctttttactatctcgatcagtgtttccagaagtttattcatttcattagactttacaaaaattcagtgcgttgcctgtttaattctttttgttgatctttgggattattttattattttcttctattacttttattatttccttttaatgcctttgacattatactattgttctcagaatttttcaggttaatacaactgatactatacaatgggacaaaagtattaattttaaattaggcagatgtgggatttttaccaaatatgttgacaacatatagctatctatttacttatccatatgtcttagaaatgttgaggtttttagttcagccaaaatttgaaaagacttccttctcctcattttccataaactctaagtgcatattgtattggtgcattcttcatgacatcgatgtgaaatgattatgttgcttcagctgcaaggggaggtttaaagctgcttcacaaaagtgtcatagccatgtaaggggcagcctaccatctcttcaaacatcaataagggcctaatttttgttaataaagagagtaaaagagagagtttttttgtactatatatctatattccatagacatttaatcaacaaatcctcttgattgtactttcaggtatgtttttatgtcttctcttaaaaccttagtccaaaatcctatcatccctcacctattatgcaaagactagatttaagtcatccaagtccatgtaggatgatatatagtacttccatatagtatggaaagtattgtcttcccataatagtgagtgttcactaaagaatacatcctaccagtgttaaaaaaaaaagctgtaatacattgctgttgcttgtagaataataactacatttctcaccatgcttgacaagactcttcatatgtcatttattctgacttgccagtctcatcttttgacactctttcttttgttgtgaaagttcaactttcccagatcttggtttaattaatctccactgagtggcctcacacatgctgacctctaaatgattttcca

SEQ ID NO: 92329 - DNA, 2057 bp, Homo sapiens
ctagattatgggttgataggtacagcaaaccaccatggcacacatatacctatgtaacaracctacatattctgtacttgtatcccagaacttaaagtaaaataataaataaataaataaataaataaataaccttctattttaaattgataacaacttaattttaatcacacacaaaatgctatacttttactaacctccatttttgttcttgtaatcagaatgtgacttcttttaatattatatattaattaacagattttgatcttttaactttaattatattaggatttggagtatttggagtcagttatacaacaccatcacattgttacagtaatctatattatgtttatatgtttaccttaaccagcgagatttaaaataatctgtttttgaattaactgattttactgcttgatcaagtctgctgttggagctctcttgaactttttatttcagtcattgtattcttcatctctagaatttccttctattttgcttttttatggttgttgaacttatttgcatcctttggggatttttcttctttcctgattttgtttagttgtctatctatgttctcttgtggcttagtttctttacgataattatttttcctacttaggcatatctcaatttccttggaatagattactaaaaaatgatcacattccattggtggtgtcatgttccttgatattttgtatttcttatagacttgtgttaatgtccatgtatttgaggagacagtaacctctcccagactttgtagactgattttaatggagaaagaccttcaattacaggtaggcttgagggcaccatctgggaagggtgtagcagctatggctctagggaggatgcagtggcacaatctctgtgcagtttcattagctgaggtcaattggtgaaaactgcaggggcccttggtggtcaaggcttcaggtgtccatattggtggcaatgtctgctagggtcttcttgtcctctttttccttgactaggggaggccaaggccaatgggaatccttcttggcatgagacctggtgcacaaatacatttgtagtagtgtgggatgtgtgtctaatgcatgagcacacatgaagctgccaggaagccatggtctggtacacgggcacatctgaggcccctgggtctaggacatgggtgcacttgctgcagcactgtcactagtgttaaggagcaagtatgtggtagtggtgcaggtgtttgaagcacaggtgtttatggagtggctgtggagctggtatctggggcatgggcacacatgggacaaccatcccatccagttgtatatagttacagagagtctcagggtggtgcagcagtggctccttctccaggaggatgtgctggtgtctccttctccagagggtctatggcagaggtaatggctattaagttcctcggcagcaaaggaaagcaagccagtgtggacagtgatagcacttgctgcttggctgataatgatagccctatccttctttgctcctagttgtctccagatgtctcagcaatgactatctcccagtgatctggatgagatgaaactgaagtgtgtccccgggcagtgccttgaaaggctgggaagctgattgctcactgtgtgcttcttctcctcactaggggtactcaaaaaccagtgttcccccttgatgctaagctgtgcctgcctagggaataaaatgatacaggctgaaggaaactgttcttcctacattttgtgtggttattccccatctttttgctccactttgttgtgtaacttcttaactcttgagatcacccagagattactttttcatttgtgaataaatgcctaattgttttttgtgggaggacaaaggctgggttcccccactctaccatcttgcacatgtcactcttgcattatgtttttcatcttttcttcatcttcttcatctctgcctttgtcttttgcttactttttcaacctcactagttatttgaattttgtatgcaagaatatagaggggacaggaagtccacagaacggggagtcagcaaatag

SEQ ID NO: 92330 - DNA, 2057 bp, Homo sapiens
ctagattatgggttgataggtacagcaaaccaccatggcacacatatacctatgtaacaaacctacatattctgtacttgtatcccagaacttaaagtaaaataataaataaayaaataaataaataaataaccttctattttaaattgataacaacttaattttaatcacacacaaaatgctatacttttactaacctccatttttgttcttgtaatcagaatgtgacttcttttaatattatatattaattaacagattttgatcttttaactttaattatattaggatttggagtatttggagtcagttatacaacaccatcacattgttacagtaatctatattatgtttatatgtttaccttaaccagcgagatttaaaataatctgtttttgaattaactgattttactgcttgatcaagtctgctgttggagctctcttgaactttttatttcagtcattgtattcttcatctctagaatttccttctattttgcttttttatggttgttgaacttatttgcatcctttggggatttttcttctttcctgattttgtttagttgtctatctatgttctcttgtggcttagtttctttacgataattatttttcctacttaggcatatctcaatttccttggaatagattactaaaaaatgatcacattccattggtggtgtcatgttccttgatattttgtatttcttatagacttgtgttaatgtccatgtatttgaggagacagtaacctctcccagactttgtagactgattttaatggagaaagaccttcaattacaggtaggcttgagggcaccatctgggaagggtgtagcagctatggctctagggaggatgcagtggcacaatctctgtgcagtttcattagctgaggtcaattggtgaaaactgcaggggcccttggtggtcaaggcttcaggtgtccatattggtggcaatgtctgctagggtcttcttgtcctctttttccttgactaggggaggccaaggccaatgggaatccttcttggcatgagacctggtgcacaaatacatttgtagtagtgtgggatgtgtgtctaatgcatgagcacacatgaagctgccaggaagccatggtctggtacacgggcacatctgaggcccctgggtctaggacatgggtgcacttgctgcagcactgtcactagtgttaaggagcaagtatgtggtagtggtgcaggtgtttgaagcacaggtgtttatggagtggctgtggagctggtatctggggcatgggcacacatgggacaaccatcccatccagttgtatatagttacagagagtctcagggtggtgcagcagtggctccttctccaggaggatgtgctggtgtctccttctccagagggtctatggcagaggtaatggctattaagttcctcggcagcaaaggaaagcaagccagtgtggacagtgatagcacttgctgcttggctgataatgatagccctatccttctttgctcctagttgtctccagatgtctcagcaatgactatctcccagtgatctggatgagatgaaactgaagtgtgtccccgggcagtgccttgaaaggctgggaagctgattgctcactgtgtgcttcttctcctcactaggggtactcaaaaaccagtgttcccccttgatgctaagctgtgcctgcctagggaataaaatgatacaggctgaaggaaactgttcttcctacattttgtgtggttattccccatctttttgctccactttgttgtgtaacttcttaactcttgagatcacccagagattactttttcatttgtgaataaatgcctaattgttttttgtgggaggacaaaggctgggttcccccactctaccatcttgcacatgtcactcttgcattatgtttttcatcttttcttcatcttcttcatctctgcctttgtcttttgcttactttttcaacctcactagttatttgaattttgtatgcaagaatatagaggggacaggaagtccacagaacggggagtcagcaaatag

SEQ ID NO: 92331 - DNA, 2057 bp, Homo sapiens
ctagattatgggttgataggtacagcaaaccaccatggcacacatatacctatgtaacaaacctacatattctgtacttgtatcccagaacttaaagtaaaataataaataaataaataaataaataaataaccttctattttaaattgataacaacttaattttaatcacacacaaaatgctatacttttactaacctccatttttgttcttgtaatcagaatgtgacttcttttaatattatatrttaattaacagattttgatcttttaactttaattatattaggatttggagtatttggagtcagttatacaacaccatcacattgttacagtaatctatattatgtttatatgtttaccttaaccagcgagatttaaaataatctgtttttgaattaactgattttactgcttgatcaagtctgctgttggagctctcttgaactttttatttcagtcattgtattcttcatctctagaatttccttctattttgcttttttatggttgttgaacttatttgcatcctttggggatttttcttctttcctgattttgtttagttgtctatctatgttctcttgtggcttagtttctttacgataattatttttcctacttaggcatatctcaatttccttggaatagattactaaaaaatgatcacattccattggtggtgtcatgttccttgatattttgtatttcttatagacttgtgttaatgtccatgtatttgaggagacagtaacctctcccagactttgtagactgattttaatggagaaagaccttcaattacaggtaggcttgagggcaccatctgggaagggtgtagcagctatggctctagggaggatgcagtggcacaatctctgtgcagtttcattagctgaggtcaattggtgaaaactgcaggggcccttggtggtcaaggcttcaggtgtccatattggtggcaatgtctgctagggtcttcttgtcctctttttccttgactaggggaggccaaggccaatgggaatccttcttggcatgagacctggtgcacaaatacatttgtagtagtgtgggatgtgtgtctaatgcatgagcacacatgaagctgccaggaagccatggtctggtacacgggcacatctgaggcccctgggtctaggacatgggtgcacttgctgcagcactgtcactagtgttaaggagcaagtatgtggtagtggtgcaggtgtttgaagcacaggtgtttatggagtggctgtggagctggtatctggggcatgggcacacatgggacaaccatcccatccagttgtatatagttacagagagtctcagggtggtgcagcagtggctccttctccaggaggatgtgctggtgtctccttctccagagggtctatggcagaggtaatggctattaagttcctcggcagcaaaggaaagcaagccagtgtggacagtgatagcacttgctgcttggctgataatgatagccctatccttctttgctcctagttgtctccagatgtctcagcaatgactatctcccagtgatctggatgagatgaaactgaagtgtgtccccgggcagtgccttgaaaggctgggaagctgattgctcactgtgtgcttcttctcctcactaggggtactcaaaaaccagtgttcccccttgatgctaagctgtgcctgcctagggaataaaatgatacaggctgaaggaaactgttcttcctacattttgtgtggttattccccatctttttgctccactttgttgtgtaacttcttaactcttgagatcacccagagattactttttcatttgtgaataaatgcctaattgttttttgtgggaggacaaaggctgggttcccccactctaccatcttgcacatgtcactcttgcattatgtttttcatcttttcttcatcttcttcatctctgcctttgtcttttgcttactttttcaacctcactagttatttgaattttgtatgcaagaatatagaggggacaggaagtccacagaacggggagtcagcaaatag

SEQ ID NO: 92332 - DNA, 2057 bp, Homo sapiens
ctagattatgggttgataggtacagcaaaccaccatggcacacatatacctatgtaacaaacctacatattctgtacttgtatcccagaacttaaagtaaaataataaataaataaataaataaataaataaccttctattttaaattgataacaacttaattttaatcacacacaaaatgctatacttttactaacctccatttttgttcttgtaatcagaatgtgacttcttttaatattatatattaattaacagattttgatcttttaactttaattatattaggatttggagtatttggagtcagttatacaacaccatcacattgttacagtaatctatattatgtttatatgtttaccttaaccagcgagatttaaaataatctgtttttgaattaactgattttactgcttgatcaagtctgctgttggagctctcttgaactttttatttcagtcattgtattcttcatctctagaatttccttctattttgcttttttatggttgttgaacttatttgcatcctttggggatttttcttctttcctgattttgtttagttgtctatctatgttctcttgtggcttagtttctttacgataattatttttcctacttaggcatatctcaatttccttggaatagattactaaaaaatgatcacattccattggtggtgtcatgttccttgatattttgtatttcttatagacttgtgttaatgtccatgtatttgaggagacagtaacctctcccagactttgtagactgattttaatggagaaagaccttcaattacaggtaggcttgagggcaccatctgggaagggtgtagcagctatggctctagggaggatgcagtggcacaatctctgtgcagtttcattagctgaggtcaattggtgaaaactgcaggggcccttggtggtcaaggcttcaggtgtccatattggtggcaatgtctgctagggtcttcttgtcctctttttccttgactaggggaggccaaggccaatgggaatccttcttggcatgagacctggtgcacaaatacatttgtagtagtgtgggatgtgtgtctaatgcatgagcacacatgaagctgccaggaagccatggtctggwacacgggcacatctgaggcccctgggtctaggacatgggtgcacttgctgcagcactgtcactagtgttaaggagcaagtatgtggtagtggtgcaggtgtttgaagcacaggtgtttatggagtggctgtggagctggtatctggggcatgggcacacatgggacaaccatcccatccagttgtatatagttacagagagtctcagggtggtgcagcagtggctccttctccaggaggatgtgctggtgtctccttctccagagggtctatggcagaggtaatggctattaagttcctcggcagcaaaggaaagcaagccagtgtggacagtgatagcacttgctgcttggctgataatgatagccctatccttctttgctcctagttgtctccagatgtctcagcaatgactatctcccagtgatctggatgagatgaaactgaagtgtgtccccgggcagtgccttgaaaggctgggaagctgattgctcactgtgtgcttcttctcctcactaggggtactcaaaaaccagtgttcccccttgatgctaagctgtgcctgcctagggaataaaatgatacaggctgaaggaaactgttcttcctacattttgtgtggttattccccatctttttgctccactttgttgtgtaacttcttaactcttgagatcacccagagattactttttcatttgtgaataaatgcctaattgttttttgtgggaggacaaaggctgggttcccccactctaccatcttgcacatgtcactcttgcattatgtttttcatcttttcttcatcttcttcatctctgcctttgtcttttgcttactttttcaacctcactagttatttgaattttgtatgcaagaatatagaggggacaggaagtccacagaacggggagtcagcaaatag

SEQ ID NO: 92333 - DNA, 1014 bp, Homo sapiens
  misc_feature (1)...(1014): n = A,T,C or G
atatgctttccagcataaagctttaaaaagtttactaaagtctatctttgtaaagattcttggtagatataccaaaacaaaccaaatcaaaaccaacgacagaaataaaatattgaaagagaaractacatatttaaatgagaaataaaaataagtaaatatttagtaaaaagactctaatgttggataaacttcttcagtaccaattaagtaatgaaggaaaaacagtcaactaaacaaagtagaatttaaaagacaaaataaactccaggcacagaaaagattaaaatgaaaaggaatgttagaagaattatacattaaatttggatcttagttagagataactacttgaaaaaaataaaaataaaaatcatgatttttaaactctagtaggtagactttaagatggtcatcatgatccttttctctggtgttcaaatttatatgaaagatatacccttgagtgtgtctgggccctctgacttgcttctaacaaataaagtaagacgaacatgatgggacgtcatgcccatgattatgtcatgttgtttaagactttgtcttgttagaaaactcactctagagattctctttacaggctggatgctttagactgaatgtttttgctcccccagaatttgtatgttgaattcctaaccaccagtgtggctgtatttggagatgagcttccttgcagagctgtggggaagactctgctacccctgtggtccttgagggcagtgcagcaaatgaaagatgagacatctttagccttaagatctaatggaatttgccttgctaggttttggacttggttggaaaatattaccccctctttccttctgatttttcttttttagaacaggaattactattctttgcctgtcccaacactgtattttagaagcacannnnnnnnnnnnnnnnnnnnnnnnnnnnnnnnnnnnnnnnnnnnnnnnnnnnnnnnnnnnnnnnnnnnnnnnnnnnnnnnnnnnnnnnnnnnnnnnnnnnttg

SEQ ID NO: 92334 - DNA, 1014 bp, Homo sapiens
  misc_feature (1)...(1014): n = A,T,C or G
atatgctttccagcataaagctttaaaaagtttactaaagtctatctttgtaaagattcttggtagatataccaaaacaaaccaaatcaaaaccaacgacagaaataaaatattgaaagagaagactacatatttaaatgagaaataaaaataagtaaatatttagtaaaaagactctaatgttggataaacttcttcagtaccaattaagtaatgaaggaaaaacagtcaactaaacaaagtagaatttaaaagacaaaataaactccaggcacagaaaagattaaaatgaaaaggaatgttagaagaattatacattaaatttggatcttagttagagataactacttgaaaaaaataaaaataaaaatcatgatttttaaactctagtaggtagactttaagatggtcatcatgatccttttctctggtgttcaaatttatatgaaagatatacccttgagtgtgtctgggccctctgacttgcttctaacaaataaagtaagacgaacatgatgggacgtcatgcccatgattatgtcatgttgtttaagactttgtcttgttagaaaactcactctagagattctctttacaggctggatgctttagactgaatgtttttgctcccccagaatttgtatgttgaattcctaaccaccagtgtggctgtatttggagatgagcttccttgcagagctgtggggaagactctgctacccctgtggtccttgaggrcagtgcagcaaatgaaagatgagacatctttagccttaagatctaatggaatttgccttgctaggttttggacttggttggaaaatattaccccctctttccttctgatttttcttttttagaacaggaattactattctttgcctgtcccaacactgtattttagaagcacannnnnnnnnnnnnnnnnnnnnnnnnnnnnnnnnnnnnnnnnnnnnnnnnnnnnnnnnnnnnnnnnnnnnnnnnnnnnnnnnnnnnnnnnnnnnnnnnnnnttg

SEQ ID NO: 92335 - DNA, 721 bp, Homo sapiens
gttgtattaataaatatgctcattaaaataatatacttgtgcatttaaatcagcatttggcagtacctgtctgcatgaaaagacattttcaaagataaaatatgtaaaatctccttacacataagcatttgaattccatcaattttgagtcaattttaattccatcaatataagttttatgggaaaagaaaggacatctctgtctttgagatttctttttattccctatggaattttgatgtatatatgttgatggtgggttaaagaagcttgtgtcgtgtgcttgtatcaaggagacaggatctataaacctctaggtactctacattgtactgttttacattgtgatacactctaggcatcctggagttgagcaatgtgttgaytatactggtcacaggggcaatggttcctattctactgggtgttgaacttctgcctgcatctgttattgattctagaatttggagaacatatggtctcttctttggagttgcttgtacattatggttctccactaatgacttggccacactttattcttttttggcatgttctgaactatggctaggacacaaatttgttccttgccagaaccaactgccacaaagccctcaagtacctggtcactttcttctgcctaaataatctcttatataatcaccccagtatgacacttgctgatatttactatattttgttggtgtattgaagaactttg

SEQ ID NO: 92336 - DNA, 752 bp, Homo sapiens
ccttccttgattctttctagcttgtgtgaatggcttgcaatcgtagttgttccttggcttcaactggtatcattctaatctctgcctttattgtcacatggacttctttctyctctttctccttcctctatatctctatgtttctgtctctctctgtagtcaccctctctttataaggactttaggtgctgaatttagggtccactctaattcaatattatatcatcttaactttattacatctggcaaagactctattttcaaagagagtcatattcacaaactcccactgagcaagattttttggaggaccctattcaacccagtagatcacatcatatcgtatcatattatatcttataattttgtatcatatgatatgaaagagatttttaagcaattcttgctttattaaagtgatgagcaggtaaacggtaaggaacaggtgtagggttacctatatgtcactacttcaacctcagcattagtggcattttggattggatgatccttcattgtgcagaggtattttgtgctttggaggatgtttggccacatcccttgcctctatacactataatccagtacccactggtgagttatgacaatcgaaaatatctccggatattgctaaatgtaccctgaaggtacgatcaccggtagttgagaactaggattaaaaaaccttagatcgtttcctcattttgcttattggaacccattttactattgactcttattcggaccattat

SEQ ID NO: 92337 - DNA, 752 bp, Homo sapiens
ccttccttgattctttctagcttgtgtgaatggcttgcaatcgtagttgttccttggcttcaactggtatcattctaatctctgcctttattgtcacatggacttctttctcctctttctccttcctctatatctctatgtttctgtctctctctgtagtcaccctctctttataaggactttaggtgctgaatttagggtccactctaattcaatattatatcatcttaactttattacatctggcaaagactctattttcaaagagagtcatattcacaaactcccactgagcaagattttttggaggaccctattcaacccagtagatcacatcatatcgtatcatattatatcttataattttgtatcatatgatatgaaagagatttttaagcaattcttgctttattaaagtgatgagcaggtaaacggtaaggaacaggtgtagggttacctatatgtcactacttcaacctcagcattagtggcattttggattggatgatccttcattgtgcagaggtattttgtgctttggaggatgtttggccacatcccttgcctctatacactataatccagtacccactggtgagttatgacaatcgaaaatatctccggatattgctaaatgtaccctgaaggtaygatcaccggtagttgagaactaggattaaaaaaccttagatcgtttcctcattttgcttattggaacccattttactattgactcttattcggaccattat

SEQ ID NO: 92338 - DNA, 525 bp, Homo sapiens
cttctcgcccgcattattgatatcactagggcccacacctgctccccctttgtgttccaccatcattgtcagctgcctgagcgcctcaccagaagctaacaaaatgmcagtaccatgctttctgtatagcctgcagaacgattagccaattaaacctctttcctttgtaacgtacccagtctcaggtatttctttagagcaatgcaaaagcagactactacactgagtcaccaaagatctttctgtcccaactgtgctgtagtctctgtagtaacagctgtcactgagtttatacaacatttttatgatcttacttctataccccattagtggagattacttgacattttcaatttctaaaaaccaaatgagtcaaatacgttacacttaatgcgtataatttttcattgaactaaacactaatttcctctttaatatagtatgctttgtatgacacattgcacattagatattgagacttagacattctttctccctatataggcattcagtatatgaaaaata

SEQ ID NO: 92339 - DNA, 525 bp, Homo sapiens
cttctcgcccgcattattgatatcactagggcccacacctgctccccctttgtgttccaccatcattgtcagctgcctgagcgcctcaccagaagctaacaaaatgacagtaccatgctttctgtatagcctgcagaacgattagccaattaaacctctttcctttgtaacgtacccagtctcaggtatttctttagagcaatgcaaaagcagactactacactgagtcaccaaagatctttctgtcccaactgtgctgtagtctctgtagtaacagctgtcactgagtttatacaacatttttatgatcttacttctataccccattagtkgagattacttgacattttcaatttctaaaaaccaaatgagtcaaatacgttacacttaatgcgtataatttttcattgaactaaacactaatttcctctttaatatagtatgctttgtatgacacattgcacattagatattgagacttagacattctttctccctatataggcattcagtatatgaaaaata

SEQ ID NO: 92340 - DNA, 729 bp, Homo sapiens
aattttttatttttcctttatttagatatcacatagactacagtatagcgatcccagtaggttataacactattgagaagattataactcatgcaatttgggtcaccttttgtgaggcctgaactttgaagatactatttgtcttagaaaaatgtaggctgatgtaaatttaagaaacacaaggattcttcacagagatatctgtaaataattattttggcytcatttaaattgctaatatattttattttagggttactttaatatgaaaagcctaagatggttacaccaagggctgtaagttttaggtggagtggcataactgtttggggtgatgatataggaataatatttttagtgatgaaaaatctgacgaagacactaccgattgataggcactcgattgagttaattaggaagggattgttttcattaataatagagttgtgaagagaggttgtcctatcagtgcgaggaaaatgatacggtgctacagacagctgtcaaggaggtggcaataagagtgattaaaagggctcaggcattggtacacaacgtgtttgtggttatgaagatgaggtctttggagtggaagcctgtgaataaaggtattcctgtaagtgagaggctgccgataataagggaggaagaagtgaagggcagagccttgaatcatccttctatttttcagatgtcttgttcatcattgaggttatggatgatggatcc

SEQ ID NO: 92341 - DNA, 729 bp, Homo sapiens
aattttttatttttcctttatttagatatcacatagactacagtatagcgatcccagtaggttataacactattgagaagattataactcatgcaatttgggtcaccttttgtgaggcctgaactttgaagatactatttgtcttagaaaaatgtaggctgatgtaaatttaagaaacacaaggattcttcacagagatatctgtaaataattattttggcttcatttaaattgctaatatattttattttaggkttactttaatatgaaaagcctaagatggttacaccaagggctgtaagttttaggtggagtggcataactgtttggggtgatgatataggaataatatttttagtgatgaaaaatctgacgaagacactaccgattgataggcactcgattgagttaattaggaagggattgttttcattaataatagagttgtgaagagaggttgtcctatcagtgcgaggaaaatgatacggtgctacagacagctgtcaaggaggtggcaataagagtgattaaaagggctcaggcattggtacacaacgtgtttgtggttatgaagatgaggtctttggagtggaagcctgtgaataaaggtattcctgtaagtgagaggctgccgataataagggaggaagaagtgaagggcagagccttgaatcatccttctatttttcagatgtcttgttcatcattgaggttatggatgatggatcc

SEQ ID NO: 92342 - DNA, 729 bp, Homo sapiens
aattttttatttttcctttatttagatatcacatagactacagtatagcgatcccagtaggttataacactattgagaagattataactcatgcaatttgggtcaccttttgtgaggcctgaactttgaagatactatttgtcttagaaaaatgtaggctgatgtaaatttaagaaacacaaggattcttcacagagatatctgtaaataattattttggcttcatttaaattgctaatatattttattttagggttactttaatatgaaaagcctaagatggttacaccaagggctgtaagttttaggtggagtggcataactgtttggggtgatgatataggaataatatttttagtgatgaaaaatctgacgaagacactaccgattgataggcactygattgagttaattaggaagggattgttttcattaataatagagttgtgaagagaggttgtcctatcagtgcgaggaaaatgatacggtgctacagacagctgtcaaggaggtggcaataagagtgattaaaagggctcaggcattggtacacaacgtgtttgtggttatgaagatgaggtctttggagtggaagcctgtgaataaaggtattcctgtaagtgagaggctgccgataataagggaggaagaagtgaagggcagagccttgaatcatccttctatttttcagatgtcttgttcatcattgaggttatggatgatggatcc

SEQ ID NO: 92343 - DNA, 729 bp, Homo sapiens
aattttttatttttcctttatttagatatcacatagactacagtatagcgatcccagtaggttataacactattgagaagattataactcatgcaatttgggtcaccttttgtgaggcctgaactttgaagatactatttgtcttagaaaaatgtaggctgatgtaaatttaagaaacacaaggattcttcacagagatatctgtaaataattattttggcttcatttaaattgctaatatattttattttagggttactttaatatgaaaagcctaagatggttacaccaagggctgtaagttttaggtggagtggcataactgtttggggtgatgatataggaataatatttttagtgatgaaaaatctgacgaagacactaccgattgataggcactcgattgagttaattaggaagggattgttttcattaataatagagttgtgargagaggttgtcctatcagtgcgaggaaaatgatacggtgctacagacagctgtcaaggaggtggcaataagagtgattaaaagggctcaggcattggtacacaacgtgtttgtggttatgaagatgaggtctttggagtggaagcctgtgaataaaggtattcctgtaagtgagaggctgccgataataagggaggaagaagtgaagggcagagccttgaatcatccttctatttttcagatgtcttgttcatcattgaggttatggatgatggatcc

SEQ ID NO: 92344 - DNA, 729 bp, Homo sapiens
aattttttatttttcctttatttagatatcacatagactacagtatagcgatcccagtaggttataacactattgagaagattataactcatgcaatttgggtcaccttttgtgaggcctgaactttgaagatactatttgtcttagaaaaatgtaggctgatgtaaatttaagaaacacaaggattcttcacagagatatctgtaaataattattttggcttcatttaaattgctaatatattttattttagggttactttaatatgaaaagcctaagatggttacaccaagggctgtaagttttaggtggagtggcataactgtttggggtgatgatataggaataatatttttagtgatgaaaaatctgacgaagacactaccgattgataggcactcgattgagttaattaggaagggattgttttcattaataatagagttgtgaagmgaggttgtcctatcagtgcgaggaaaatgatacggtgctacagacagctgtcaaggaggtggcaataagagtgattaaaagggctcaggcattggtacacaacgtgtttgtggttatgaagatgaggtctttggagtggaagcctgtgaataaaggtattcctgtaagtgagaggctgccgataataagggaggaagaagtgaagggcagagccttgaatcatccttctatttttcagatgtcttgttcatcattgaggttatggatgatggatcc

SEQ ID NO: 92345 - DNA, 928 bp, Homo sapiens
ttaatgagaaagatatataatagatcaaattgtgaatgtcatggatcacattaacttttaagatggtagtaatacattaactgtgctatttccaaatgttcatttaatttatttgtttattatgtaattttttgtttattcagcgctccatggtatttcagaaaagctaatgcttcctttttccaagtcacatatttggggttggtaaatcaaaaaattatgaaaggaattttaacctacctcccaaaaatgtgccttcttctcctcttccttctctccctttttatttttgctcttctttcttttccttttccctctcaattattatkatcattatcatcatcatcatcatcatcatcatcatcatcaatccattacccttagaagtcatggtagatcatgtctctttttaaacgtccattattttgcatttattaaaaacttaaaagatgattaaacactgctttaaatcacatttcaccattcatttcatttcatatttcaaaactgtgttgatcttaaaatttaatgatacacttataatttttttaccttttaggccacatagtataattagatgtgatttgtaaaagtatttaacatataattttctaacatacattaaactacaattttaggggagtaaaatgtggtaaccagggactgggacaatggagcggtgagtgtgttggggagatattggtcaaagaatacaaaatttcagtgagctgggagaaataagttcaagagatccatatcacatcatagtgactatagttaacaatattatctcttctgaaaaaatactaagaaagtaattttcaatgtcctcatcacaaaataactgtgcagtaatgaatacatgaattaattagatttaaccattttgctatatatgtatatatttcaaacagcatgttgcacccaa

SEQ ID NO: 92346 - DNA, 890 bp, Homo sapiens
aaagcacactgaagttccggcagtctgactgaaagatgactcatctaccaagactcaacttaagcaggacttcctcagtaaggcctcctctagtcttcagcaaaagtaagtgcttctgcctcagggtctatggaagctgagacataccactaacactacatctatcacatactattgtcattgtcttcacactgatgaatctcatccataggacctcagttggaggtgaatggacaataatcatgctaaaaacacctgcacaactgcaacaagaaatttttttcttggtctttctgaattttgcctgctaagacctcctacttacccctacacacaaatttgtcttttaactgccctttgcacatatattggtttaatatttttcctttgctgctgtgmtacctgaactgcaaaattgaatctctggattacatgttatagtaacacaatctctaatattttcaggtgaataaattttttctctcctaaaacaatttgaggataagccggacactataaaaacacacatatattacagggcctcagtcctttatctacagttctaaaatctgaactctgaaaataaaaagtttgttttgctttgtttttgattatttttgtttatgttgcttttattttttgttaactctcatttggcagcacactgtaatgtcactggaactcatttgctggcaaaaccaaaccaaaactgatatgtgaatagttatggtctttatttattctgtggtatttgaaaagacatattttatataaagaaatagtaatgtgtttaattgtaagatgctgtccaaaccctactgagatgttttatatcataaagtacattttccttgttaccttgctaaaatccaaaggattccattttccat

SEQ ID NO: 92347 - DNA, 2139 bp, Homo sapiens
attagtgtacaatgtgtgcatgacaccaaaatggctttggagcagattaacaagaccacaacacccttatctcaaaaaaattatattctaaaaccaatagtacaggatgaaaacaaatgtgagcattgaataatagattttctttccataaccttaataaaatacctaatcttgtacaaaacaagtatgcaaatgtgtatgtgtctatacatttttcttcatctctccattatgcaggttagaaatagatcaatggcattgttataggcataatcagaagcaaactggcattagctgagctatgaatattagtttgaaatgttcaatgtaattttttatttttgtttttttctcatattaaatattatctagggagaaagtatcattctttctggaatacctgccactccaggtcttgctctccagagcaaatcccctggtcatcttttgagaggcctttggatttcagaagagatatgagaggcacagttcattcatttgacctgtaacccatctagctgctctgacttaatctcttttctcatcttggcttacctgtgacttgcacatggaacataggcttctgcttttcttgtctttttaatccaactcccatcaacgatgccagagtaatcatctacaaagcaagcaatcataccacacatctatctaaatttactcattggcttatttgtcttccctgattgcaaattctgaaaaaacacagttcatttctcattacacttccatcctaaggcttgtacataatacacactcaatacctgtttgttaatcacatggctggattgatctgacaacatcttgatccttcacttttgactcagtgttatcccaggttttcatttaaattttctgtttgtgttttaaattttagcccttaccatatcatggtaattctcattccattttccctcttgatttgcagtgctaggcttactcaatctcatcaagctatagattgtcttccacgtagggtacctggttactataatgcatattggagtagtctcatacaatttttctacctacatcttttttttattgttgctgtaacacataatcacatacttactagcttaaaataaaatgaatttatcctcttagagttctggaagacagaagtttcaaaacactattacaggactaaaatcaagatgttggcagaaccatctccttcgggaggctccaggagagaatctgcttcttttttcaacttttagagggcactggcatgctttgactcgtggccatatcacaatgtctgcttctgtcttcacctccccttcccctctctgtagtcaaatcttcttcgtctccttgtaagtacccttctgattatattgggcccaccatgtaatcaaggataacattcccatctcaaaatctttaaattaatcacatttgtaatgttccctttaccatgaaaggtaacgcatttacaggtttcggggattcttacattgacatctttgggaccattattcatcatatcttattacccttgtttttatttaaattggcaagtaaaaactatacatatttatggtgaataatatgatattttcatctatgtatagatgtgaaatgtatgtatagattgtgaaatggctaagttaagctatttaacatacgcattacctcacatacttttttggtgagaacacttaaaatctaccttcttagctattttcaagtatacatttattgttattaactatagtcaccatgatatacaatagakcccttgaacgtttatttatcatgtgcaactaaaattttgtgtcctttgaccaacatcttcccaatcccccctcctcctccagcacctggtaatcatcatttttctctgtgtttctataagttccaatttttagattccacatgtaagtgagcatccttcttgaaacaatttcataaggcaactatggttgtccaaaaaggattcctttatgtcccccatatggcatatcttcattttgtttctttaatgatttattcttttttctttttcaacatcaatatatggccataataaaaatttcaagcaacacagaaatatataatatatacagctgcctttgtcacctgcttcccagcaatggccactcttaaaaattc

SEQ ID NO: 92348 - DNA, 1914 bp, Homo sapiens
  misc_feature (1)...(1914): n = A,T,C or G
aaaattcagataaattcaatagaaagcttccacaagccttagtgacaaatacatgtgaagtatttggctttctttggattatggtaacattttttgccaggcctggctgcttgtaatagttttgaagtcctaaagtcataatgcagtgcaatgtcacatattaaggttagaagacaattctccatgacatttcatttctgcattttgtatcagcttttttcctatactaaattccaagtacgtttatatagcaagcagctttggaagacagaaagagtctctctccagaacagaggacaaatttgtttactggccagtttagaagaaataatatcttcctccaaaacagaaaaaaaaatgtagacaggtttgctaatagtcatttttaaaagattagggtttcttaagctcagagttcttcagctgtgacataactcaactgtgtgcaaatccccctgagcccagctcaggttcaactccgtggagcttggtgggtaagaggaactgatgcactgcctgctctgtgatgcataatagagtaataaactcctttttctctaacccaggagcttcatgtctcctgtcatcatctaggaaagtggtatcttgcaatcggtaaaatctcagacccagcacagttcttgaaatgtaaaatgactcttcttttactttcatttcttgggaagcatgtttttattatctgtcactaccacacattcttacagaactttctgagagttcctccagtaatagaagggcttatgaatgctcatggaagtggataaaaatgtatcrtaagtggagatgtttcttaatcatactatactagttgtctttcaaattttctgttgtattaaatctctaaaagcataagagaattttctgagatgactaatctggtaaaggaaagtgcaacatgataaaacaattctgaccttaaattagcttaaatttttaaaaagtgattaatcattattcacattcttgcacataagatgctgaatccgctgaaacactctataatgaacgaagaccaatactaaaatatagtgcataactattggaaatgtaagggttctacttgatatacaattatgccctactcaaaaattagggagatccctaaggaaactttagtacctttgctttagaaaaaagctaaagtttttaactaccgtacctatccaaggtatatcaaatgcaataaacggggtggcgtatagattctaactacctttctaatttagggcttccatgacccatcgacattccggtgtgcatgggcaacaggttccttcttctaactcacaactttattatcaggctcctctccctctgnnnnnnnnnnnnnnnnnnnnnnnnnnnnnnnnnnnnnnnnnnnnnnnnnnnnnnnnnnnnnnnnnnnnnnnnnnnnnnnnnnnnnnnnnnnnnnnnnnnnaataattagggacgattttacggaaactactattacttctgttttagtaagaagctaaatgtttttaactactgtaagtaatccaaggtatataatatgcaataaaaggggttgggttattgatctgagttacatttttatatttagtgtctcaatggtccagtgactatttgtgtaggatgtggtaaaaggtttttttttttaattacagaaatatatcatcaggttccttccaactctaagacctaatatttttgcaactgtcagaaatttttaaaaatatatacaaatacttctaattttgaattttttgtaacaaaattttaattgcatggttatattttacatgcccgtaaattagttctcaattggaatcatcttgcattcattgtgacacaatattcttcagtttcattgcttacatatgctaaaaactaaagtaagagttgagatatactggggcatttcaggaataa

SEQ ID NO: 92349 - DNA, 846 bp, Homo sapiens
tgcatgtaaatgacaagaaggctctctgtatcctgaaaacattcaattcagagtgacctgtggccataaattaccagaacgaagcttcagatcccagtcttgtaatttcatcaaggccaacaagatgcartcttgaaaaccgtttgcatggtgtgaggacgaattgatgcccttgttctttcagacggctgagcttgatgcacagagtctgactacttttgtgtctctgtgtagccgtatatggtcattgtaaataattaagtagaaatttgttacccttttgtcaaatgtatttctgatgttgctcttcctagcttccattaagaaatcccttgattaaattttaaagtcttaaacaatttgagcgtctgagagcactggatacaaactacaatttaaatgttttgcaggggaaagtcatattctctttgggagtaggggaaataatgttaggtatttagtatgcagccccatgattccttttcaagacacaatattacagatttgattaccaaccctgtagctggtccttgtaggtcatttattttctcaactactgtcttgtagattttaaaaatatgttgcttaaaatatttgagaatattttaagttaagcaaaatatgcttgtaactagaaatttaaattcttagtcactccagctcttacataacatgataataagaaaatatggaacaaatgtgttttttttttgtaatttacaaccgtaattcttttttacatgtttatttacagtattctaaaataatttttagacaaggaatcgaaccaaaaaggaaaggaactagatagtgaaatccaattttccttatgctttagaaaatgag

SEQ ID NO: 92350 - DNA, 846 bp, Homo sapiens
tgcatgtaaatgacaagaaggctctctgtatcctgaaaacattcaattcagagtgacctgtggccataaattaccagaacgaagcttcagatcccagtcttgtaatttcatcaaggccaacaagatgcaatcttgaaaaccgtttgcatggtgtgaggacgaattgatgcccttgttctttcagacggctgagcttgatgcacagagtctgactacttttgtgtctctgtgtagccktatatggtcattgtaaataattaagtagaaatttgttacccttttgtcaaatgtatttctgatgttgctcttcctagcttccattaagaaatcccttgattaaattttaaagtcttaaacaatttgagcgtctgagagcactggatacaaactacaatttaaatgttttgcaggggaaagtcatattctctttgggagtaggggaaataatgttaggtatttagtatgcagccccatgattccttttcaagacacaatattacagatttgattaccaaccctgtagctggtccttgtaggtcatttattttctcaactactgtcttgtagattttaaaaatatgttgcttaaaatatttgagaatattttaagttaagcaaaatatgcttgtaactagaaatttaaattcttagtcactccagctcttacataacatgataataagaaaatatggaacaaatgtgttttttttttgtaatttacaaccgtaattcttttttacatgtttatttacagtattctaaaataatttttagacaaggaatcgaaccaaaaaggaaaggaactagatagtgaaatccaattttccttatgctttagaaaatgag

SEQ ID NO: 92351 - DNA, 1338 bp, Homo sapiens
tccttctctagtctcatttcctttcttttctcctttcctctctcacctgtgttctccctaaccctgacaacatacacacattctcccatttccacatcacattgaattgcttctgtgtcttatgcctggaaatccattctcttagtttcccaggagaacccttctaacttttctatgacagtttattgttttttacctgaagtctgtctttcctgcttaggtagatttgacctctcaacattttttatctttaccacgcttggtacataatttcataaagcagcggtcctcaacatttttggcaccagggactggttttctggaagacaatttttccacggtggtagtggcgggggaaggtttcaggatgaaactgttctaccttcagatcactagtcatcaccttctcataaggagcatgcaatctagatccctcgtatgcacagttcacaatagggttcatgctcctatgagaatctgatgcagccactgctctgrcaggaggcggagcgcaggtgataatgcttgcatgcctgcagttcacctcttgctgtgcagcccagttcctaacaggttgaggaccaatacgggtctgtggcccaggagttggggatccctgtcgcaaagcacccaagccactgcattgcaccatgtgtctgcacctatgtcatcttctacaatgggtccgttaaggagaagaacagagttaaattcacctctaatttcccagtatctaatggagtgtgtggtctatcaaacacaaaatgtatgttgattacagattggatgaaagaataatgggaaactttaatattcagctacatgtttgtatatttataaactttatatttgtgggcataaattccgactctctaccattttacactccttaaaactactaatactgtgacaggtatttggtaattaattttactcttttagatgtgttgtagcccatgttaaaaactaactgtttgagtcaatgttttctgagggaaccataattcaaacttcatgttgggtcttgccactaaatgtagtgaacagttcaggattttttgactgtccagcctctgaaccttcttaggtttccactatgtatcttggtgagagacagagcctgcatccttctagagatttggaaagcccagttcatttagattcagtctcatgcttgccatcatctagcccagagacttgagatgtaggcttagctaaccagaccaagattctactggcatttgaactttgaagcagcaacatacagtgaaatgcattcatttgtacagaaaccacaccagaagtttgtacagaagtttcccagtgtggatggtggca

SEQ ID NO: 92352 - DNA, 1338 bp, Homo sapiens
tccttctctagtctcatttcctttcttttctcctttcctctctcacctgtgttctccctaaccctgacaacatacacacattctcccatttccacatcacattgaattgcttctgtgtcttatgcctggaaatccattctcttagtttcccaggagaacccttctaacttttctatgacagtttattgttttttacctgaagtctgtctttcctgcttaggtagatttgacctctcaacattttttatctttaccacgcttggtacataatttcataaagcagcggtcctcaacatttttggcaccagggactggttttctggaagacaatttttccacggtggtagtggcgggggaaggtttcaggatgaaactgttctaccttcagatcactagtcatcaccttctcataaggagcatgcaatctagatccctcgtatgcacagttcacaatagggttcatgctcctatgagaatctgatgcagccactgctctgacaggaggcggagcgcaggtgataatgcttgcatgcctgcagttcacctcttgctgtgcagcccagttcctaacaggttgaggaccaatacgggtctgtggcccaggagttggggatccctgtcrcaaagcacccaagccactgcattgcaccatgtgtctgcacctatgtcatcttctacaatgggtccgttaaggagaagaacagagttaaattcacctctaatttcccagtatctaatggagtgtgtggtctatcaaacacaaaatgtatgttgattacagattggatgaaagaataatgggaaactttaatattcagctacatgtttgtatatttataaactttatatttgtgggcataaattccgactctctaccattttacactccttaaaactactaatactgtgacaggtatttggtaattaattttactcttttagatgtgttgtagcccatgttaaaaactaactgtttgagtcaatgttttctgagggaaccataattcaaacttcatgttgggtcttgccactaaatgtagtgaacagttcaggattttttgactgtccagcctctgaaccttcttaggtttccactatgtatcttggtgagagacagagcctgcatccttctagagatttggaaagcccagttcatttagattcagtctcatgcttgccatcatctagcccagagacttgagatgtaggcttagctaaccagaccaagattctactggcatttgaactttgaagcagcaacatacagtgaaatgcattcatttgtacagaaaccacaccagaagtttgtacagaagtttcccagtgtggatggtggca

SEQ ID NO: 92353 - DNA, 1338 bp, Homo sapiens
tccttctctagtctcatttcctttcttttctcctttcctctctcacctgtgttctccctaaccctgacaacatacacacattctcccatttccacatcacattgaattgcttctgtgtcttatgcctggaaatccattctcttagtttcccaggagaacccttctaacttttctatgacagtttattgttttttacctgaagtctgtctttcctgcttaggtagatttgacctctcaacattttttatctttaccacgcttggtacataatttcataaagcagcggtcctcaacatttttggcaccagggactggttttctggaagacaatttttccacggtggtagtggcgggggaaggtttcaggatgaaactgttctaccttcagatcactagtcatcaccttctcataaggagcatgcaatctagatccctcgtatgcacagttcacaatagggttcatgctcctatgagaatctgatgcagccactgctctgacaggaggcggagcgcaggtgataatgcttgcatgcctgcagttcacctcttgctgtgcagcccagttcctaacaggttgaggaccaatacgggtctgtggcccaggagttggggatccctgtcgyaaagcacccaagccactgcattgcaccatgtgtctgcacctatgtcatcttctacaatgggtccgttaaggagaagaacagagttaaattcacctctaatttcccagtatctaatggagtgtgtggtctatcaaacacaaaatgtatgttgattacagattggatgaaagaataatgggaaactttaatattcagctacatgtttgtatatttataaactttatatttgtgggcataaattccgactctctaccattttacactccttaaaactactaatactgtgacaggtatttggtaattaattttactcttttagatgtgttgtagcccatgttaaaaactaactgtttgagtcaatgttttctgagggaaccataattcaaacttcatgttgggtcttgccactaaatgtagtgaacagttcaggattttttgactgtccagcctctgaaccttcttaggtttccactatgtatcttggtgagagacagagcctgcatccttctagagatttggaaagcccagttcatttagattcagtctcatgcttgccatcatctagcccagagacttgagatgtaggcttagctaaccagaccaagattctactggcatttgaactttgaagcagcaacatacagtgaaatgcattcatttgtacagaaaccacaccagaagtttgtacagaagtttcccagtgtggatggtggca

SEQ ID NO: 92354 - DNA, 1591 bp, Homo sapiens
gcgttggccaaagctatctcaagtaatgaacatagaagcaaagtgttcttctaacacaccaccagggagcagactctgggtaaatgacataagtaatttatggacaataaccattgctttgccttcagatatttctttatctcttttgcaagcctttccccaggtgccatctgaaagggaaatagtaggcggctaatgaaggtgttctcaacggtattatttgctgcctcaagaaaaaggaatggagcaattgtctgcaatcataaccagatgttgcaaagctctataagccttaatggctgttgtttcaatacagctttttaggaggggaaaaaatcaataacactaaaataaattatctatgggaagaatttactggccatttttcatgagaaaattactgtacagagacttaattgtgctttctgggtatggtttaaaagtcaaaaagctaacgaattatgtttgtacttgcatgtttggctcttgtgagtttatgaattatcactgggacatctgtagagcctttactactgaaaactacatgcgatgttgaattttaagcaactgcaaatatgaaagaaaaatgccatactctttagctgagaacatgtagcagtcctaaatggaacggatatgggaacttaagacttaaatgtatcaaaactatagattcttctcttaagttggacctttggtgacaacaagaatagtgagcaatccacgcatgaagctatctagatattttccggctactcagacatcagattcatgggcagactgcccatgaatctaactagtaggtgctgggatctgagttatgttttgaaagcaaaaccttacagtctctactactgtttccaaagggtggcccttggaccacatgtctcaatcacttgggatgcttattcaaagttcagattccttggccccaccccacgcacttgaattagaatctctgtgggtgtattctgcacagatatgtttcccgagtcattgatacacactcatagtattgattattgacaatgtctctcttcttaaacattcttcttagggccagatttaattctaatcaaaatgtgtagtacatatttacatgcacractttgtctttctctcctatctctccccctcctatcctcggcttttcccaattcatttgacagcatctcctcgccacacccctatccttttctagacaatccattatccagtaccttgctttttactgttctctcctaacaccttctgctctctatgactgcagacactcagaatttggctattatgttccttgaaccctcaaactccattgttttgttaaaacaactgtcttggggttttttcggtggtggtggtggttttttttttttgagacagagtcttgttctgtcacccaggctgaagtgcagtggcgtgatctctgcccactacaaactccgcctcccgggttcaagcaattctcctgcctcagcctcctgaggagctgggactacaggtgcacatcaccatgcccagttatttttgtatttttagtagagaaagggtttcaccatgtcgcccaggctggtcttgaactcctgagtcg

SEQ ID NO: 92355 - DNA, 1591 bp, Homo sapiens
gcgttggccaaagctatctcaagtaatgaacatagaagcaaagtgttcttctaacacaccaccagggagcagactctgggtaaatgacataagtaatttatggacaataaccattgctttgccttcagatatttctttatctcttttgcaagcctttccccaggtgccatctgaaagggaaatagtaggcggctaatgaaggtgttctcaacggtattatttgctgcctcaagaaaaaggaatggagcaattgtctgcaatcataaccagatgttgcaaagctctataagccttaatggctgttgtttcaatacagctttttaggaggggaaaaaatcaataacactaaaataaattatctatgggaagaatttactggccatttttcatgagaaaattactgtacagagacttaattgtgctttctgggtatggtttaaaagtcaaaaagctaacgaattatgtttgtacttgcatgtttggctcttgtgagtttatgaattatcactgggacatctgtagagcctttactactgaaaactacatgcgatgttgaattttaagcaactgcaaatatgaaagaaaaatgccatactctttagctgagaacatgtagcagtcctaaatggaacggatatgggaacttaagacttaaatgtatcaaaactatagattcttctcttaagttggacctttggtgacaacaagaatagtgagcaatccacgcatgaagctatctagatattttccggctactcagacatcagattcatgggcagactgcccatgaatctaactagtaggtgctgggatctgagttatgttttgaaagcaaaaccttacagtctctactactgtttccaaagggtggcccttggaccacatgtctcaatcacttgggatgcttattcaaagttcagattccttggccccaccccacgcacttgaattagaatctctgtgggtgtattctgcacagatatgtttcccgagtcattgatacacactcatagtattgattattgacaatgtctctcttcttaaacattcttcttagggccagatttaattctaatcaaaatgtgtagtacatatttacatgcacgactttgtctttctctcmtatctctccccctcctatcctcggcttttcccaattcatttgacagcatctcctcgccacacccctatccttttctagacaatccattatccagtaccttgctttttactgttctctcctaacaccttctgctctctatgactgcagacactcagaatttggctattatgttccttgaaccctcaaactccattgttttgttaaaacaactgtcttggggttttttcggtggtggtggtggttttttttttttgagacagagtcttgttctgtcacccaggctgaagtgcagtggcgtgatctctgcccactacaaactccgcctcccgggttcaagcaattctcctgcctcagcctcctgaggagctgggactacaggtgcacatcaccatgcccagttatttttgtatttttagtagagaaagggtttcaccatgtcgcccaggctggtcttgaactcctgagtcg

SEQ ID NO: 92356 - DNA, 1591 bp, Homo sapiens
gcgttggccaaagctatctcaagtaatgaacatagaagcaaagtgttcttctaacacaccaccagggagcagactctgggtaaatgacataagtaatttatggacaataaccattgctttgccttcagatatttctttatctcttttgcaagcctttccccaggtgccatctgaaagggaaatagtaggcggctaatgaaggtgttctcaacggtattatttgctgcctcaagaaaaaggaatggagcaattgtctgcaatcataaccagatgttgcaaagctctataagccttaatggctgttgtttcaatacagctttttaggaggggaaaaaatcaataacactaaaataaattatctatgggaagaatttactggccatttttcatgagaaaattactgtacagagacttaattgtgctttctgggtatggtttaaaagtcaaaaagctaacgaattatgtttgtacttgcatgtttggctcttgtgagtttatgaattatcactgggacatctgtagagcctttactactgaaaactacatgcgatgttgaattttaagcaactgcaaatatgaaagaaaaatgccatactctttagctgagaacatgtagcagtcctaaatggaacggatatgggaacttaagacttaaatgtatcaaaactatagattcttctcttaagttggacctttggtgacaacaagaatagtgagcaatccacgcatgaagctatctagatattttccggctactcagacatcagattcatgggcagactgcccatgaatctaactagtaggtgctgggatctgagttatgttttgaaagcaaaaccttacagtctctactactgtttccaaagggtggcccttggaccacatgtctcaatcacttgggatgcttattcaaagttcagattccttggccccaccccacgcacttgaattagaatctctgtgggtgtattctgcacagatatgtttcccgagtcattgatacacactcatagtattgattattgacaatgtctctcttcttaaacattcttcttagggccagatttaattctaatcaaaatgtgtagtacatatttacatgcacgactttgtctttctctcctatctctccccctcytatcctcggcttttcccaattcatttgacagcatctcctcgccacacccctatccttttctagacaatccattatccagtaccttgctttttactgttctctcctaacaccttctgctctctatgactgcagacactcagaatttggctattatgttccttgaaccctcaaactccattgttttgttaaaacaactgtcttggggttttttcggtggtggtggtggttttttttttttgagacagagtcttgttctgtcacccaggctgaagtgcagtggcgtgatctctgcccactacaaactccgcctcccgggttcaagcaattctcctgcctcagcctcctgaggagctgggactacaggtgcacatcaccatgcccagttatttttgtatttttagtagagaaagggtttcaccatgtcgcccaggctggtcttgaactcctgagtcg

SEQ ID NO: 92357 - DNA, 1591 bp, Homo sapiens
gcgttggccaaagctatctcaagtaatgaacatagaagcaaagtgttcttctaacacaccaccagggagcagactctgggtaaatgacataagtaatttatggacaataaccattgctttgccttcagatatttctttatctcttttgcaagcctttccccaggtgccatctgaaagggaaatagtaggcggctaatgaaggtgttctcaacggtattatttgctgcctcaagaaaaaggaatggagcaattgtctgcaatcataaccagatgttgcaaagctctataagccttaatggctgttgtttcaatacagctttttaggaggggaaaaaatcaataacactaaaataaattatctatgggaagaatttactggccatttttcatgagaaaattactgtacagagacttaattgtgctttctgggtatggtttaaaagtcaaaaagctaacgaattatgtttgtacttgcatgtttggctcttgtgagtttatgaattatcactgggacatctgtagagcctttactactgaaaactacatgcgatgttgaattttaagcaactgcaaatatgaaagaaaaatgccatactctttagctgagaacatgtagcagtcctaaatggaacggatatgggaacttaagacttaaatgtatcaaaactatagattcttctcttaagttggacctttggtgacaacaagaatagtgagcaatccacgcatgaagctatctagatattttccggctactcagacatcagattcatgggcagactgcccatgaatctaactagtaggtgctgggatctgagttatgttttgaaagcaaaaccttacagtctctactactgtttccaaagggtggcccttggaccacatgtctcaatcacttgggatgcttattcaaagttcagattccttggccccaccccacgcacttgaattagaatctctgtgggtgtattctgcacagatatgtttcccgagtcattgatacacactcatagtattgattattgacaatgtctctcttcttaaacattcttcttagggccagatttaattctaatcaaaatgtgtagtacatatttacatgcacgactttgtctttctctcctatctctccccctcctatcctcggcttttcccaattcatttgacagcatctcctcgccacacccctatccttttctagacaatccattatccagtaccttgctttttactgttctctcctaacaccttctgctctctatgactgcagacactcagaatttggctattatgttccttgaaccctcaaactccattgttttgttaaaacaactgtcttggggttttttcggtggtggtggtggttttttttttttgagacagagtcttgttctgtcacccaggctgaagtgcagtggcgtgatctctgcccactacaaactccgcctcccgggttcaagcaattctcctgcctcagcctcctgaggagctgggactacaggtgcacatcaccatgcccmgttatttttgtatttttagtagagaaagggtttcaccatgtcgcccaggctggtcttgaactcctgagtcg

SEQ ID NO: 92358 - DNA, 739 bp, Homo sapiens
tgcagctcctatttccgtccttgggttatttgctgaaagcacccatgtgatgattgtcttattactggaattgcccaagtaaaattttcaggaatggagaaagcgtatttgaaaattttagtctgcttttcttttgaaatgtgaagcatgattttcttgggtgagactagaaatcaaaggccctttaattgattgctttccatcagaaataagaagcgtcacgatcttgttgttttagtgaaggataaaacattacccttaggcaagaaactacaggaaaaaaggaaaataaacattatagttawgttacaggtaaagaaacaaggtaaaccacattaaggagtatcccttcttatccaggcggcatttagtgttaagtgctggaatctgttaatccaataataagatttaggaagaagaatctaatatcttatatttaaatagtaatctttctccccatggacattacatatatttttgaaatttgtattttaaaaaatctacctgcaaatactttatgttcaacatgcttttttgatccctgagaaatttttttaaatattttgtttcagtgacatttcttccaggattcaattccttttcttgaagagtttggaatgaaccaattacacatgggtattctggcgaagagtggtaggaatctttcatatcagtcacctggcctccttcatttcaatttaaaaatacttctgttaccttatttggcagcttgtctctg

SEQ ID NO: 92359 - DNA, 606 bp, Homo sapiens
aaataatttttctctgcagttgaatatataatataatgatgtgcgatattaagtttgaattttttatagacttgtattacaatgtatttttagccagagttcttttgagagttcttccctccccaacccccaaggcaacatctaaatttgatcatacagtttgtcattttagggatttcttcccttcactttttgaattgaatctattgtctcagctttttctgttttctgaggtgactgaaaaaatatagaagctcaacagacatgtatttgaaaagcttccatgctgattctgatctgtagctttgtagcacattacaatggaccataatccttttttttttttttttgagagagtgagtctcattctgtcacccaggttgaagtgcagtggcgtgatcttggctcattgcaacctccgcctcccaggttcaagtgattctcctgcctcagcctccagagtagctgggattacaagcrcccgccaccacacccagctaatttttgtatttttagtagagacggggtttctccacattggccaggctggtcttgaactcctgacctcaggtgatctgccggccttggcctcccaaagggctggga

SEQ ID NO: 92360 - DNA, 1298 bp, Homo sapiens
aaaaaaaagtcgggggagatgcaatatttagcatttcctcaaactttttttggccatgaaatccaccacccccctcctttttcagagcatttcatgaagttcacatttcaaataatacattttgaaaaacatttatcttgtctaattgaagctcaaagagatagagtcaatgacttttcaaagtcaggtagcagatagttttaaagctgcaagtactgataagtgtgagccattagttaattcgcatttataaagaagtggtctgtcacttttggcaaatgtcttgacatctgttgctctacagttgtcaactagaaaattaggcatagagtttcacattattataagcatgttttcacacaaaaacatgtacattgatgtttattgcaattttatgtgtaataaccaaaaacaacccagattttcttcattgggtaaatgattaaacaaaccatagtacattcataccgtgagtgctactcagcaataaaaaagaacaaactatgggtacaggcagcaacttataattccagagaattatgctgaatgaaaaaggccaatttaaaaaggttttgtaccaaaagattccatttatataacgttcttgaagtgacataattatagaaatggagaacagattagtggtggctgtgttaaggagggggtgaggatgggagagaattgggcgtggctgtgagaaacatgagggatccttgtgatgatggaaatgttctrtatcacagctatcgatgtcagtatcccagttgtgatattgtgctatagttttgcaagatgttaccactgggggaaattgggtgaagggcacatggaatctctgtattatttcaactgcatgtaaatctacaattatctcaaaataaaaataaaagttaaaaaaacacaaactgctatatctgaactgaaatttactggaccaaattatactaattaatatcatgaataaaattatttgtggacacactgtaatcatatcactctgagaaggaagtaatgacttaaagtttcagatattctttgtgtatttattgtctgttgaggaagaagaaaatatagatgatcattgagcacttgtgaatacaaaaaatacttaaaccaaacttaacttttttcaaaaaagaatgacttaaagttgtatgtcaccatttaatacatatcatagggaaatgggaaaggtggtctttactcataaatacatgaccgagagaagatccacatataaaattccctgccctcttctcctccttcttttgactgttgtctgcagatgcttcaaggaa

SEQ ID NO: 92361 - DNA, 1298 bp, Homo sapiens
aaaaaaaagtcgggggagatgcaatatttagcatttcctcaaactttttttggccatgaaatccaccacccccctcctttttcagagcatttcatgaagttcacatttcaaataatacattttgaaaaacatttatcttgtctaattgaagctcaaagagatagagtcaatgacttttcaaagtcaggtagcagatagttttaaagctgcaagtactgataagtgtgagccattagttaattcgcatttataaagaagtggtctgtcacttttggcaaatgtcttgacatctgttgctctacagttgtcaactagaaaattaggcatagagtttcacattattataagcatgttttcacacaaaaacatgtacattgatgtttattgcaattttatgtgtaataaccaaaaacaacccagattttcttcattgggtaaatgattaaacaaaccatagtacattcataccgtgagtgctactcagcaataaaaaagaacaaactatgggtacaggcagcaacttataattccagagaattatgctgaatgaaaaaggccaatttaaaaaggttttgtaccaaaagattccatttatataacgttcttgaagtgacataattatagaaatggagaacagattagtggtggctgtgttaaggagggggtgaggatgggagagaattgggcgtggctgtgagaaacatgagggatccttgtgatgatggaaatgttctatatcacagctatcgatgtcagtatcccagttgtgatattgtgctatagttttgcaagatgttaccactgggggaaattgggtgaagggcacatggaatctctgtattatttcaactgcatgtaaatctacaattatctcaaaataaaaataaaagttaaaaaaacacaaactgctatatctgaactgaaatttactggaccaaattatactaattaatatcatgaataaaattatttgtggacacactgtaatcatatcactctgagaaggaagtaatgacttaaagtttcagatattctttgtgtatttattgtctgttgaggaagaagaaaatatagatgatcattgagcacttgtgaatacaaaaaatacttaaaccaaacttaacttttttcaaaaaagaatgacttaaagttgtatgtcaccatttaatacatatcatagggaaatgggaaaggtggtctttactcataaatacatgaccgagagaagatccacatataaaattccctgccctcttctcctccttcwtttgactgttgtctgcagatgcttcaaggaa

SEQ ID NO: 92362 - DNA, 2193 bp, Homo sapiens
tgcattctggtagaagtaacaaaaatatccttcaataaaggaataattaagtaaattgtgatatatccatataatagttaaataagttgttttacatccataagcactcatcaaatatcttttgtttaattttatagaaaaaattacatgctctatgtaagttaatgggtcatcatcaaatgtctttttaaagtatatttgaacacataggaatctgttcaaggcaaaatgttaggtggaaaaaagtaatacataatacgtatacttaatgatagcagaaataataaaaaattgggatgacatatttcaaaatgctagcagtgattatctttggatgataggattatagatgatcaatatttgattctttttttttttaagacagagtcttgccctgtcacccaggatggatgcagtggtgtgatcttggctcactgcaacctctacctcccgggttcaagcgattctcctgcctcagcctcctgagtagctgggattataggcgcgtgccaccacacctgtctaatttttgtgttttcagtagagacagcgtttcaccatgttggccaggctggtctcgaactcttgaccttgtgatcagcccacctcagactcccacagtgctgggattacaggtgtgagccactgcacccagcctgagtctaagttttctattttataaattttttgcaataaacatataaacacattaattttatgattaaatgtggaagttactctttaaaggaaaaggcattgatttacataaaggaatggtggaatttcaggctgcgaggagtgggcttttttttctctctctctttttagacagggttgcactctgttgtccaggttggagtgtagtgacacaatcataccttattgtagccttcaactcctgggctcaagcgatcttcctgcctcagccttccaaacagccaggactacaggcaagcaccactatgcccagctaattttttttttttaatagtagagatgggatctcaatatgttgcccagactggtcttgaattcctcctgcttcggcctcccagagtattgggattacaggcatgagccactgtgcccagccagtgtgggcatttgaatgtatatgagagccttctattatattgcacataataggcaatggtaattaacaacaggtttcatagaataataagtaatgaacctttattgtatacttaccatttgctaggcatgatgcattagcacactttatattcattgtttctctttcagtctttttaacagcaccatgtactagaattatctgaagaggcaagtgaagtttagaaaagtatgttgattaagttaaaacaagctgttctaacacaaacctgaaatctcacaaaagggaagattatttcttcatcatgtaaaggttattttgtaatcgtgtaaaattctattggcagcaccagtggggakggggggaggtttccatttcaggcactgatggaggccctgctgtctttaacacatggcttccagggctgccctggacattcctatcaagccagcagccagcacaattgagagactggaggcctgtgcagtttctgtggaccagccctggtactggtaaaatttccaatcacatttcagtggcaagagcgcaatcatgtggtcactcctcactgcaagaaggctaggaaagagtctagttgtatcctcagaagaaaagagaaaaggatttggtaaacagctcactaatttctgccgtgtgaggtatcttactagagatcacacacccagcaagtgacagagccaggatttgaatacagtcagtcctgttctaaagctgaccatcttaaccacagggctatgcctccacattgcagaagaccaaaagtttaaaaactgactcccttagttattggcttatagagcagcagattcctcgtctttggaaatgagatattcaaccttttgcttttacttacttttaaaaaggaaattttaacattctctgccagattgatacattcattataattgataagcccacactaacatatcataatcacccaaagtccatagtttacattagaatttattcttagggttgttcattatgagtttggacaaatgtataatgacatatatctatcattatagtaacttctgtattccatctattcatcttccccccaacttgataatggggag

SEQ ID NO: 92363 - DNA, 2193 bp, Homo sapiens
tgcattctggtagaagtaacaaaaatatccttcaataaaggaataattaagtaaattgtgatatatccatataatagttaaataagttgttttacatccataagcactcatcaaatatcttttgtttaattttatagaaaaaattacatgctctatgtaagttaatgggtcatcatcaaatgtctttttaaagtatatttgaacacataggaatctgttcaaggcaaaatgttaggtggaaaaaagtaatacataatacgtatacttaatgatagcagaaataataaaaaattgggatgacatatttcaaaatgctagcagtgattatctttggatgataggattatagatgatcaatatttgattctttttttttttaagacagagtcttgccctgtcacccaggatggatgcagtggtgtgatcttggctcactgcaacctctacctcccgggttcaagcgattctcctgcctcagcctcctgagtagctgggattataggcgcgtgccaccacacctgtctaatttttgtgttttcagtagagacagcgtttcaccatgttggccaggctggtctcgaactcttgaccttgtgatcagcccacctcagactcccacagtgctgggattacaggtgtgagccactgcacccagcctgagtctaagttttctattttataaattttttgcaataaacatataaacacattaattttatgattaaatgtggaagttactctttaaaggaaaaggcattgatttacataaaggaatggtggaatttcaggctgcgaggagtgggcttttttttctctctctctttttagacagggttgcactctgttgtccaggttggagtgtagtgacacaatcataccttattgtagccttcaactcctgggctcaagcgatcttcctgcctcagccttccaaacagccaggactacaggcaagcaccactatgcccagctaattttttttttttaatagtagagatgggatctcaatatgttgcccagactggtcttgaattcctcctgcttcggcctcccagagtattgggattacaggcatgagccactgtgcccagccagtgtgggcatttgaatgtatatgagagccttctattatattgcacataataggcaatggtaattaacaacaggtttcatagaataataagtaatgaacctttattgtatacttaccatttgctaggcatgatgcattagcacactttatattcattgtttctctttcagtctttttaacagcaccatgtactagaattatctgaagaggcaagtgaagtttagaaaagtatgttgattaagttaaaacaagctgttctaacacaaacctgaaatctcacaaaagggaagattatttcttcatcatgtaaaggttattttgtaatcgtgtaaaattctattggcagcaccagtggggatggggggaggtttccatttcaggcactgatggaggccctgctgtctttaacacatggcttccagggctgccctggacattcctatcaagccagcagccagcacaattgagagactggaggcctgtgcagtttctgtggaccagccctggtactggtaaaatttccaatcacatttcagtggcaagagcgcaatcatgtggtcactcctcactgcaagaaggctaggaaagagtctagttgtatcctcagaagaaaagagaaaaggatttggtaaacagctcactaatttctgccgtgtgaggtatcttactagagatcacacacccagcaagtgacagagccaggatttgaatacagtcagtcctgttctaaagctgaccatcttaaccacagggctatgcctccacattgcagaagaccaaaagtttaaaaactgactcccttagttattggcttatagagcagcagattcctcgtctttggaaatgagatattcaaccttttgcttttacttacttttaaaaaggaaattttaacattctctgccagattgatacattcattataattgataagcccacactaacatatcataatcacccaaagtccatagtttacatyagaatttattcttagggttgttcattatgagtttggacaaatgtataatgacatatatctatcattatagtaacttctgtattccatctattcatcttccccccaacttgataatggggag

SEQ ID NO: 92364 - DNA, 595 bp, Homo sapiens
ttccttagcttcacggtaaatccacttctgccaaaacctggcaggattctccagcagctctctttctagcaatcaccacataccacatcccagagtcacagtgtctcaatgggcaggaatgaattgacttttgtttcccttcgtcagtggggacacgtcctgaagaggtggagtgaagccccaattgagggcaaagatatagacagcagctagccatttgaaatgcattcaagtctctaagatcagataaatttactttccagagaaccaaaasaatttaaagagatgacggaggaactgcttttaacagtctttgaacaagttgccgaagagtcaatatccacagatcagaaggaaaattgttacctcacatttcaaaggtagattctggaaattacaggctgataatcttcacattagctaccagcaaatttctggaacagattatcaaacagtttgttaaaatatgtgaaaaggggagacatgattattatgttctaatatgcattcaccaaaaataaatgatcacaaattaacttcatttttacttttcattgaaatttggtgttaggttgtttgcattgctataaaggaa

SEQ ID NO: 92365 - DNA, 595 bp, Homo sapiens
ttccttagcttcacggtaaatccacttctgccaaaacctggcaggattctccagcagctctctttctagcaatcaccacataccacatcccagagtcacagtgtctcaatgggcaggaatgaattgacttttgtttcccttcgtcagtggggacacgtcctgaagaggtggagtgaagccccaattgagggcaaagatatagacagcagctagccatttgaaatgcattcaagtctctaagatcagataaatttactttccagagaaccaaaacaatttaaagagatgacggaggaactgcttttaacagtctttgaacaagttgccgaagartcaatatccacagatcagaaggaaaattgttacctcacatttcaaaggtagattctggaaattacaggctgataatcttcacattagctaccagcaaatttctggaacagattatcaaacagtttgttaaaatatgtgaaaaggggagacatgattattatgttctaatatgcattcaccaaaaataaatgatcacaaattaacttcatttttacttttcattgaaatttggtgttaggttgtttgcattgctataaaggaa

SEQ ID NO: 92366 - DNA, 1112 bp, Homo sapiens
cttcctctagatagtcaagttcgaccgtcttctcagcgctccgccagggccgtgggccgacccacggcggggccgatccgagggcctcactaaaccatccaatcggtagtagcgacgggcggtgtgtacaaagggcagggacttaatcaacgcaagcttatgacccgcacttactgggaattcctcgttcatggggaataattgcaatccccgatccccatcacgaatggggttcaacgggttacccgcgcctgccggcgtagggtaggcacacgctgagccagtcagtgtagcgcgcgtgcagccccggacatctaagggcatcacagacctgttattgctcaatctcgggtggctgaacgccacttgtccctctaagaagttgggggacgccgaccgctcgggggtcgcgtaactagttagcatgccagagtctcgttcgttatcggaattaaccagacaaatcgctccaccaactaagaacggccatgcaccaccacccacggaatcgagaaagagctatcaatctgtcaatcctgtccgtgtccgggccgggtgaggtttcccgtgttgagtcaaattaagccgcaggctccactcctggtggtgcccttccgtcaattcctttaagtttcagctttgcaaccatactccccccggaacccaaagactttggtttcccggaagctgcccggcgggtcatgggaataacgccgccgcatcgccggtcggcatcgtttatggtcggaactacgacggtatctgatcgtcttcgaacctccgactttcgttcttgattaakgaaaacattcttggcaaatgctttcgctctggtccgtcttgcgccggtccaagaatttcacctctagcggcgcaatacgaatgcccccggccgtccctcttaatcatggcctcagttccgaaaaccaacaaaatagaaccgcggtcctattccattattcctagctgcggtatccaggcggctcgggcctgctttgaacactctaattttttcaaagtaaacgcttcgggccccgcgggacactcagctaagagcatcgagggggcgccgagaggcaaggggcggggacggattactagaatgttatctt

SEQ ID NO: 92367 - DNA, 2600 bp, Homo sapiens
  misc_feature (1)...(2600): n = A,T,C or G
tccctcccgtcagcccgtccgcggcccgtccgtccgtccgtccgtcgtcctcctcgcttgcggggcgccgggcccgtcctcgcaaggccccccggccggccgtccggccgcgtcggggcctcgccgcgctctaccttacctacctggttgatcctgccagtagcatatgcttgtctcaaagattaagccatgcatgtctaagtacgcacggccggtacagtgaaactgcgaatggctcattaaatcagttatggttcctttggtcgctcgctcctctcctacttggataactgtggtaattctagagctaatacatgccgacgggcgctgacccccttcgcgggggggatgcgtgcatttatcagatcaaaaccaacccggtcagcccctctccggccccggccggggggcgggcgccggcggctttggtgactctagataacctcgggccgatcgcacgccccccgtggcggcgacgacccattcgaacgtctgccctatcaactttcgatggtagtcgccgtgcctaccatggtgaccacgggtgacggggaatcagggttcgattccggagagggagcctgagaaacggctaccacatccaaggaaggcagcaggcgcgcaaattacccactcccgacccggggaggtagtgacgaaaaataacaatacaggactctttcgaggccctgtaattggaatgagtccactttaaatcctttaacgaggatccattggagggcaagtctggtgccagcagccgcggtaattccagctccaatagcgtatattaaagttgctgcagttaaaaagctcgtagttggatcttgggagcgggcggnnnnnnnnnnnnnnnnnnnnnnnnnnnnnnnnnnnnnnnnnnnnnnnnnnnnnnnnnnnnnnnnnnnnnnnnnnnnnnnnnnnnnnnnnnnnnnnnnnnnccgcccacgtcgcacgaacgcctgtccgggagggaccaccgggccgcgctcgggcgcacgcgcgcgccgacggggcgacgccacgcggggaggacgggctctccccgacgccgacgcccgggacggacgcctcggggaagggccgcggcaggcccgggaagcgaggcgcacccgggggacgcgccgacccggttcggaagagcgggccgggagaagacgagagaccacgggcgaggccggggcgacggggaaggcgcgagaaaggcggccggcggggaaggggacgccacggggacccctcgagcgcggccgaccgcggccgggacacacgcgcggggcctcaccgccgccggcggcaccgcgcggcacccggggcggccgaccggccctcggcgatccccgsggctccccccaccaccgccgccgccgcagtcgcggccggtcccccggaaccgtctcctcccccgcacgcgccgcaggccgacccccggaaccctccgggaagcccaccgggccccacgcggggcgccaccgacccggtccccaaggcgcgcgccgggggacgcggacgccgggccgatcagtggccggcggcggcgccccacgaggcggtgccgggttcggtcccaggcggggccaccaacggacgtgaagccggtgagccgctcggggggaagaagaggatcggcgggcggcgggcggggaagagggcacagacgggcgagggccggggaccgcgagggcaagggcacccgggagcccgcagaggcggcggctcggggagaaacctcaggcacggccgggccaccaggaaaacacggccgcgggatcccaccgccacagacacgagggcggtcccgcggcgccccgcctgggacgccggacggccctcggcccccaccgagaaccgcctcgcgagccccggggccccgccaccgggggccccggagcgaccgcagccacgaacccgacacgccaccaccaccgtcgctcgtgattctcgtccatcctccgacccggtcccgctccgggagaccggcgcgcccccaccgtgggacgctttcccagggccaggcgggcccgaccccgtgccacgcaaacgcggtcgtcggcaccggtcacgactcggcacgggagcgggcggagagccgactcgcggcggagggggtcacgcgccggacagagcgccgggcgcgcacacccaccgcccgccggccgccgcgtcccaacccgctgggacgccgggcccggcccggcgggatcctcccccgactcggaagggggaggcgcgggccacagtaggcgacgagccgcactcggccaccaccgcggtggccggcggaaccctcgcttctcccccccaaccccgtcgagggggaagcggaggagggtcctctgcgagcgggtcgctacggcagcgctaccataacggaggcagagacagaggcggcggcccgggggatccggtacccccaaggcacgcctctcagatcgctagagaaggcttttctcaccgagggtgggtcacactccccccacccgccagccgctcctcctcgggcccgcagaggcgccgagggacgcctggggaagggagggggccctgcggtacgaggaaacacctgcgcgcggccacctcgagcgttcgcgttcagggcg

SEQ ID NO: 92368 - DNA, 2600 bp, Homo sapiens
  misc_feature (1)...(2600): n = A,T,C or G
tccctcccgtcagcccgtccgcggcccgtccgtccgtccgtccgtcgtcctcctcgcttgcggggcgccgggcccgtcctcgcaaggccccccggccggccgtccggccgcgtcggggcctcgccgcgctctaccttacctacctggttgatcctgccagtagcatatgcttgtctcaaagattaagccatgcatgtctaagtacgcacggccggtacagtgaaactgcgaatggctcattaaatcagttatggttcctttggtcgctcgctcctctcctacttggataactgtggtaattctagagctaatacatgccgacgggcgctgacccccttcgcgggggggatgcgtgcatttatcagatcaaaaccaacccggtcagcccctctccggccccggccggggggcgggcgccggcggctttggtgactctagataacctcgggccgatcgcacgccccccgtggcggcgacgacccattcgaacgtctgccctatcaactttcgatggtagtcgccgtgcctaccatggtgaccacgggtgacggggaatcagggttcgattccggagagggagcctgagaaacggctaccacatccaaggaaggcagcaggcgcgcaaattacccactcccgacccggggaggtagtgacgaaaaataacaatacaggactctttcgaggccctgtaattggaatgagtccactttaaatcctttaacgaggatccattggagggcaagtctggtgccagcagccgcggtaattccagctccaatagcgtatattaaagttgctgcagttaaaaagctcgtagttggatcttgggagcgggcggnnnnnnnnnnnnnnnnnnnnnnnnnnnnnnnnnnnnnnnnnnnnnnnnnnnnnnnnnnnnnnnnnnnnnnnnnnnnnnnnnnnnnnnnnnnnnnnnnnnnccgcccacgtcgcacgaacgcctgtccgggagggaccaccgggccgcgctcgggcgcacgcgcgcgccgacggggcgacgccacgcggggaggacgggctctccccgacgccgacgcccgggacggacgcctcggggaagggccgcggcaggcccgggaagcgaggcgcacccgggggacgcgccgacccggttcggaagagcgggccgggagaagacgagagaccacgggcgaggccggggcgacggggaaggcgcgagaaaggcggccggcggggaaggggacgccacggggacccctcgagcgcggccgaccgcggccgggacacacgcgcggggcctcaccgccgccggcggcaccgcgcggcacccggggcggccgaccggccctcggcgatccccgcggctccccccaccaccgccgccgccgcagtcgcggccggtcccccggaaccgtctcctcccccgcacgcgccgcaggccgacccccggaaccctccgggaagcccaccgggccccacgcggggcgccaccgacccggtccccaaggcgcgcgccgggggacgcggacgccgggccgatcagtggccggcggcggcgccccacgaggcggtgccgggttcggtcccaggcggggccrccaacggacgtgaagccggtgagccgctcggggggaagaagaggatcggcgggcggcgggcggggaagagggcacagacgggcgagggccggggaccgcgagggcaagggcacccgggagcccgcagaggcggcggctcggggagaaacctcaggcacggccgggccaccaggaaaacacggccgcgggatcccaccgccacagacacgagggcggtcccgcggcgccccgcctgggacgccggacggccctcggcccccaccgagaaccgcctcgcgagccccggggccccgccaccgggggccccggagcgaccgcagccacgaacccgacacgccaccaccaccgtcgctcgtgattctcgtccatcctccgacccggtcccgctccgggagaccggcgcgcccccaccgtgggacgctttcccagggccaggcgggcccgaccccgtgccacgcaaacgcggtcgtcggcaccggtcacgactcggcacgggagcgggcggagagccgactcgcggcggagggggtcacgcgccggacagagcgccgggcgcgcacacccaccgcccgccggccgccgcgtcccaacccgctgggacgccgggcccggcccggcgggatcctcccccgactcggaagggggaggcgcgggccacagtaggcgacgagccgcactcggccaccaccgcggtggccggcggaaccctcgcttctcccccccaaccccgtcgagggggaagcggaggagggtcctctgcgagcgggtcgctacggcagcgctaccataacggaggcagagacagaggcggcggcccgggggatccggtacccccaaggcacgcctctcagatcgctagagaaggcttttctcaccgagggtgggtcacactccccccacccgccagccgctcctcctcgggcccgcagaggcgccgagggacgcctggggaagggagggggccctgcggtacgaggaaacacctgcgcgcggccacctcgagcgttcgcgttcagggcg

SEQ ID NO: 92369 - DNA, 963 bp, Homo sapiens
tcgcccaggtgggagtgcagtggtgcagtctcggctcactgcactctgcctcctgggttcacgccatcttcctgcttcagcctcctgagtagctgggactacaggcgcctgtcaccacgcccggctaattttttttctctgtgtgtgtgtgkttttttttttagtagagacagagtttcaccgtgttagctaggatggtctcgatctcctgacctcgtgatccactcgcctcggcctcccaaagtgctaggattacaggtgtaagccaccgcgcccagccgctacagggaacatcttatctgtgtcctaataggctgtaacgctttgctatgacttccctaatacagtaccacaggctgaagttctttaacaacaaaaactgaatgtcgcacaattctggaagttagaaatccaacctcaagctactggctgtgtggtttctctgaggtctccatccttggcttgtagatcgtcatctactatatctgtgttcacaagatcttctcttgtgcttttctgtccttcctgcctcttctaataagggctccagtcatctggaattaggatacaccccaattaattcacttaaacctaactacatttgcagaggctatatgttcaaatatagtcatgttctgaggcactaggtgttaggacatgaacatataatttttaggaagggaatgcaatctagctcacaacatttactaatcccttgtagattatagtctcccaggaaaatgattactcagtgaaacagtaggaaagtgtaaaggtttaataggagaagccggaatatattccaaaagggttgtgaaagccgtactgtaaatagtagtttctgaatttatctgcttttatgtatccagaacctcttggttgtcaacattcttttaatttttttgtcaatctgctatctatgtggcaaaaaaacatgtttctatttcaatttttcaactgata

SEQ ID NO: 92370 - DNA, 963 bp, Homo sapiens
tcgcccaggtgggagtgcagtggtgcagtctcggctcactgcactctgcctcctgggttcacgccatcttcctgcttcagcctcctgagtagctgggactacaggcgcctgtcaccacgcccggctaattttttttctctgtgtgtgtgtggttttttttttagtagagacagagtttcaccgtgttagctaggatggtctcgatctcctgacctcgtgatccactcgcytcggcctcccaaagtgctaggattacaggtgtaagccaccgcgcccagccgctacagggaacatcttatctgtgtcctaataggctgtaacgctttgctatgacttccctaatacagtaccacaggctgaagttctttaacaacaaaaactgaatgtcgcacaattctggaagttagaaatccaacctcaagctactggctgtgtggtttctctgaggtctccatccttggcttgtagatcgtcatctactatatctgtgttcacaagatcttctcttgtgcttttctgtccttcctgcctcttctaataagggctccagtcatctggaattaggatacaccccaattaattcacttaaacctaactacatttgcagaggctatatgttcaaatatagtcatgttctgaggcactaggtgttaggacatgaacatataatttttaggaagggaatgcaatctagctcacaacatttactaatcccttgtagattatagtctcccaggaaaatgattactcagtgaaacagtaggaaagtgtaaaggtttaataggagaagccggaatatattccaaaagggttgtgaaagccgtactgtaaatagtagtttctgaatttatctgcttttatgtatccagaacctcttggttgtcaacattcttttaatttttttgtcaatctgctatctatgtggcaaaaaaacatgtttctatttcaatttttcaactgata

SEQ ID NO: 92371 - DNA, 963 bp, Homo sapiens
tcgcccaggtgggagtgcagtggtgcagtctcggctcactgcactctgcctcctgggttcacgccatcttcctgcttcagcctcctgagtagctgggactacaggcgcctgtcaccacgcccggctaattttttttctctgtgtgtgtgtggttttttttttagtagagacagagtttcaccgtgttagctaggatggtctcgatctcctgacctcgtgatccactcgcctcggcctcccaaagtgctaggattacaggtgtaagccaccgcgcccagccgctacagggaacatcttatctgtgtcctaataggctgtaacgctttgctatgacttccctaatacagtaccacaggctgaagttctttaacaacaaaaactgaatgtcgcacaattctggaagttagaaatccaacctcaagctactggctgtgtggtttctctgaggtctccatccttggcttgtagatcgtcatctaytatatctgtgttcacaagatcttctcttgtgcttttctgtccttcctgcctcttctaataagggctccagtcatctggaattaggatacaccccaattaattcacttaaacctaactacatttgcagaggctatatgttcaaatatagtcatgttctgaggcactaggtgttaggacatgaacatataatttttaggaagggaatgcaatctagctcacaacatttactaatcccttgtagattatagtctcccaggaaaatgattactcagtgaaacagtaggaaagtgtaaaggtttaataggagaagccggaatatattccaaaagggttgtgaaagccgtactgtaaatagtagtttctgaatttatctgcttttatgtatccagaacctcttggttgtcaacattcttttaatttttttgtcaatctgctatctatgtggcaaaaaaacatgtttctatttcaatttttcaactgata

SEQ ID NO: 92372 - DNA, 963 bp, Homo sapiens
tcgcccaggtgggagtgcagtggtgcagtctcggctcactgcactctgcctcctgggttcacgccatcttcctgcttcagcctcctgagtagctgggactacaggcgcctgtcaccacgcccggctaattttttttctctgtgtgtgtgtggttttttttttagtagagacagagtttcaccgtgttagctaggatggtctcgatctcctgacctcgtgatccactcgcctcggcctcccaaagtgctaggattacaggtgtaagccaccgcgcccagccgctacagggaacatcttatctgtgtcctaataggctgtaacgctttgctatgacttccctaatacagtaccacaggctgaagttctttaacaacaaaaactgaatgtcgcacaattctggaagttagaaatccaacctcaagctactggctgtgtggtttctctgaggtctccatccttggcttgtagatcgtcatctactatatctgtgttcacaagatcttctcttgtgcttttctgtccttcctgcctcttctaataagggctccagtcatctggaattaggatacaccccaattaattcacttaaacctaactacatttgcagaggctatatgttcaaatatagtcatgttctgaggcactaggtgttaggacatgaacatataatttttaggaagggaatgcaatctagctcacaacatttactaatcccttgtagattatagtctcccaggaaaatgattactcagtgaaacagtagraaagtgtaaaggtttaataggagaagccggaatatattccaaaagggttgtgaaagccgtactgtaaatagtagtttctgaatttatctgcttttatgtatccagaacctcttggttgtcaacattcttttaatttttttgtcaatctgctatctatgtggcaaaaaaacatgtttctatttcaatttttcaactgata

SEQ ID NO: 92373 - DNA, 2233 bp, Homo sapiens
ttatatttatctcaatgaaacaaggaaggataaaatgaagagtatttctgacatttctttatggctaatcttaaagtaacacaaccctaaatctcaatttcatgtgtaaaataatcaggttatgaaaaataaatatttgtcgaagtttcctgtgaactgtgcaccctttttactcctgatgctgctttaaccaaaatgactactgactcttccaattagcttaaagactgcyttcaaggtcctcaggtctccaaggacagacaaagttacctttcgatgtggagtgagcatgacagactgtttaatgtacatgacacgagatcatttgcaaaatggtactggacattgcttgcagctttccactttgagttcagcagttccccactgtgctgtccttcagtacttttatataattctccagctttatccctattctccacttttgtcccttcaagcagggaatctgatggagatctgttccaactccaaacatttccatattatttccatttttatttgcctgtaactctaaaatagttatcatgaaacaaatctcatgttgcctttccttccatagaggtagtaaatatagagtggttaagagcatgacttccatagttttatcgagtagatttgaattgtggctccatccttgctatttgtatatccttgaccaagttattgaacgtctgaatttcagtttccttatctatataattaaagtaacaatactacataattagatagaaatattgtgaggcataaatagggaaattgtgataaaacacttataatagtgcctagaacatggtaggcctttgcttaccattttctcttttacataatactactagggaaatagaattccagggcagagatgtatagacagctggatggtttctgaggacaaacatttcatattataagattactagctttaagtatataaattgtgcttgctctttctatactaacaaatacgcatgtaaaaaccattttataaactttaaatgctatgaaatttttttttaaaaaaaaataccgattattctcaatactctggaaagcattaacacctaatgttcaattttaaatcacagctttagtggcataaacataacctcctttatatttctccaaataccttcgaagatttatttttagggaaagtgagtaatatgggtattttgttaaataataaactttttatttacaaaattactttctcgctcaactcactttttctctgaaatgcatttataaagcaaaaattacagccttttttgtctttgtagtataagatttcccaaggttgatgggttctacaaaaaagaagttttgattttcatgaaataaatgttataggagctttcatatataaaaatgcaggtactaagttagtaactccaagtcatggcttgcttatattatttgaccacacttatttctcagctttatctttttttattttcaaaaatatttgtttatttttaaaattgacatttaaaatggtacatatttatcatgtacagtaccatactgtcagaaaaacagacacacagaacaatggaacagaatagagagcccagaaataaatccacatatttacagccaacttatttttgacaaaggtgccaagaacacacaaaaggcaaaggacagtctctgtaataaatattgttggtacaactggatatctacatgcaggagaatgatatcagtctcttacctttcaccatatacaaaaatcaactcaaactggattaaagacctgaaactaagaaactactagaagaaaacatagagaaaaacctccgtgacattagtctgaacaatgattttatagacatgacccaaaaacacaggcagcagaagaaaaaatagacaaatggcagtatgtcaaactgaaaagcttctgcacagtaaagaaaacaatcagcagagtaaagagacagtctacagaatgggagaaaatattcacacatcatctccagctttcttactctctactctttttcctcccacttttaatttacaattttttgaaccagagaaaatttcaaataatagtgtattaaatacccatatccctagattcagttattcacattttatcacattttcttaatatctacctattgatttatttatcctggaccacttaaaataagttgcagacatcttaatattttaccctaaacacacatcaaatccaaaaaagaattgcaatgca

SEQ ID NO: 92374 - DNA, 2233 bp, Homo sapiens
ttatatttatctcaatgaaacaaggaaggataaaatgaagagtatttctgacatttctttatggctaatcttaaagtaacacaaccctaaatctcaatttcatgtgtaaaataatcaggttatgaaaaataaatatttgtcgaagtttcctgtgaactgtgcaccctttttactcctgatgctgctttaaccaaaatgactactgactcttccaattagcttaaagactgctttcaaggtcctcaggtctccaaggacagacaaagttacctttcgatgtggagtgagcatgacagactgtttaatgtacatgacacgagatcatttgcaaaatggtactggacattgcttgcagctttccactttgagttcagcagttccccactgtgctgtccttcagtacttttatataattctccagctttatccctattctccacttttgtcccttcaagcagggaatctgatggagatctgttccaactccaaacatttccatattatttccatttttatttgcctgtaactctaaaatagttatcatgaaacaaatctcatgttgcctttccttccatagaggtagtaaatatagagtggttaagagcatgacttccatagttttatcgagtagatttgaattgtggctccatccttgctatttgtatatccttgaccaagttattgaacgtctgaatttcagtttccttatctatataattaaagtaacaatactacataattagatagaaatattgtgaggcataaatagggaaattgtgataaaacacttataatagtgcctagaacatggtaggcctttgcttaccattttctcttttacataatactactagggaaatagaattccagggcagagatgtatagacagctggatggtttctgaggacaaacatttcatattataagattactagctttaagtatataaattgtgcttgctctttctatactaacaaatacgcatgtaaaaaccattttataaactttaaatgctatgaaatttttttttaaaaaaaaataccrattattctcaatactctggaaagcattaacacctaatgttcaattttaaatcacagctttagtggcataaacataacctcctttatatttctccaaataccttcgaagatttatttttagggaaagtgagtaatatgggtattttgttaaataataaactttttatttacaaaattactttctcgctcaactcactttttctctgaaatgcatttataaagcaaaaattacagccttttttgtctttgtagtataagatttcccaaggttgatgggttctacaaaaaagaagttttgattttcatgaaataaatgttataggagctttcatatataaaaatgcaggtactaagttagtaactccaagtcatggcttgcttatattatttgaccacacttatttctcagctttatctttttttattttcaaaaatatttgtttatttttaaaattgacatttaaaatggtacatatttatcatgtacagtaccatactgtcagaaaaacagacacacagaacaatggaacagaatagagagcccagaaataaatccacatatttacagccaacttatttttgacaaaggtgccaagaacacacaaaaggcaaaggacagtctctgtaataaatattgttggtacaactggatatctacatgcaggagaatgatatcagtctcttacctttcaccatatacaaaaatcaactcaaactggattaaagacctgaaactaagaaactactagaagaaaacatagagaaaaacctccgtgacattagtctgaacaatgattttatagacatgacccaaaaacacaggcagcagaagaaaaaatagacaaatggcagtatgtcaaactgaaaagcttctgcacagtaaagaaaacaatcagcagagtaaagagacagtctacagaatgggagaaaatattcacacatcatctccagctttcttactctctactctttttcctcccacttttaatttacaattttttgaaccagagaaaatttcaaataatagtgtattaaatacccatatccctagattcagttattcacattttatcacattttcttaatatctacctattgatttatttatcctggaccacttaaaataagttgcagacatcttaatattttaccctaaacacacatcaaatccaaaaaagaattgcaatgca

SEQ ID NO: 92375 - DNA, 1099 bp, Homo sapiens
ctataagccaagtagcaccaaggattgctggcagcagcagaaactagaggagaaaaggaaggattccttccctagagctgccagagaacagatgtctttaccaacaccttgatttcagacttttatcctctagaactatgagaaagtagacttctggtgttctaagtgacccagcctgtggtagtttattagggcagccctaagaaactaacagaaggacactataaatacccctttgaattttttattttggtgtcattttatagccctaaacattagctaattatctttcatcaaaatttatgttttagtgtatttattattatgtataaacgataatactgctcagaaccaaaatataaacatgcctaccagcaaaggacctgccaggctttaggtttgacttccatgatacttctctatttatgcttcagtttaggcataagagcacacggagctttaattttctttcttttttttttttgagacagagtcttgctctgtcacccaggctggagtgcagtggcgcgatcctggctcactacaagctccgcctcccaggttcaagcgattctcctgtctcagcctcccaagtagctgggattacaggtgcacatcacaatgtccagctaattttttttttttgtatttttagtagagatggggttttgccatgttggccaagctggactcgaactcctgaccccaggtgatccgccctcctcggcctcccaaagtgctgggattacaggcgtgagccaccgcgcctggccacatctttaatggaataaaatagacaggcttgtagtattcaaaattagtggtgatttgtgggtaatttrcaggattttgcttttctacttttctttctgggatcctcaatgcttaagcatttctctaaaaattagtagtggttaatatatctacttactattttgtgacattgttagataaataaataataagaattgtctctcaagtatctttcaggtccctcctgcactaggggagagactggtgaaacagatgccaggcagaaagggtgggatggtggacacaccctactttgcaaattgttaaacgctcttcatgactttgt

SEQ ID NO: 92376 - DNA, 429 bp, Homo sapiens
tcagggtatgcatatggcctaaaggcaaggactatgcaaaaccactgtgtagagtgtctagtgcaaagccatcccatctggagccggcagtccatacaaagctttggatttactgtccctaatttgtcaataaaatactctgacattagggtaccctcctaaaawatatatatatatatatatatttttttttttttttttaagagacagtgtctccctatgttgcccaggcaggagtgcaatggctatttacaggcgtgatcatagcacactatagtctcaaactcctgggctcacatgatcttcttgctttagccttctgagtagctgggactacaggtgtgtgcccctactcttgacttcccttcaaaaaatactgagaagtgtaagtcacaaccttaaacatggactgggaaattgagtaaacag

SEQ ID NO: 92377 - DNA, 429 bp, Homo sapiens
tcagggtatgcatatggcctaaaggcaaggactatgcaaaaccactgtgtagagtgtctagtgcaaagccatcccatctggagccggcagtccatacaaagctttggatttactgtccctaatttgtcaataaaatactctgacattagggtaccctcctaaaatatatatatatatatatatatwtttttttttttttttaagagacagtgtctccctatgttgcccaggcaggagtgcaatggctatttacaggcgtgatcatagcacactatagtctcaaactcctgggctcacatgatcttcttgctttagccttctgagtagctgggactacaggtgtgtgcccctactcttgacttcccttcaaaaaatactgagaagtgtaagtcacaaccttaaacatggactgggaaattgagtaaacag

SEQ ID NO: 92378 - DNA, 1761 bp, Homo sapiens
cttcagagccctgcaggctgttcctcacccaccccctcccagcctcctctcctcctcctacttcagcctcttcttcccagcctcctcctcagggcttcaaggactctgcttcctctgcctgtgccctttgcttttctaatatgtcaggcccctcctctctcaggctcccagatttccacagggttgaagccctgacctaattaaaccttttcttaacaactattacttccttggtgaggccttcattggccaccaaaacaactactatccttttcccttgctttatttatcttgtaagcactcatcgccatgcaatatgctctctacttcttttgtctggtttatgtctgtcatcttccagtagaacatgtgttctatgagggcaggcaattttgtttattttcatttctagtgcctaaacaccgtctggcacattactcaggcttaataaatagttgttaaataaatgaacaaatgaatggtctggtattatactgttatacaatttaactattatagttttacaacgtttgaaaagagaggtttgttttacccaaagactaggactttttggaagtgttcaatattatcatcttgatgcacctacatcaagggcaaaatacttcaggagaaaagaagagggcagaagacttcagtggaaatatttagggctttcaacacataaagtatttaattttgaagacctatgcatctttaaattcctaggaaatgtatttagaggaattctcttttgataaatttctttcttagattattgaaagaactctatatagaaaatgcatagaaagggaagttcaaggaagtggaattaaaaatagcatatttaaggaagtgatttcattgactctactgcatagaaaagtcactagaagggtctatggccatactacctgaatgtgcccagtcttgcctgatcttggaaaagtcacaaaaaggaaattcacccatgggatcatcgaggctccagatctttggaaaaattaaaagtccatggaataatccagggagcaacatgactgggtgagttcatagaggaaagaagacaattttgtgggtaagagtggagaggagaaacagcattagagtaacatccactttagaaagcagtgagtgttgggaataatttccttcttacaaaacagtctgtccatcttttggaggggagctaaccgagggaatgcctgaagagcagggtttaattggtagaagacaaataacttttacagaattctaatcaaagtaattaccaaacatcacagaaatttctcacactgaagggaattgatggcacaggtctttttctttcttatgaatctaagtaattctggccgaaatgtcacgggggaaataaaaagtcatggtgccctaagttattttatccattccattagtaacactctttcatcagcagggcgggccttcagaaaaggggtcatgcaccaattatcatctgttgcacacacaacttgcaggacattcctgacgttccacatttccaggacacaactgagatactgcaaaaaacaaaccagttactttccctctgcccgcagaagaccccttgaacagcatcttactcttcagcagctcctayagaaaaccaagttatcaatgagctcctaaataattggtatcactttttactgtttctgatttttctcaggtagagacactagttataggatatacaatctttattttgatagcattgttggattgacagaaattcaacttggtatg

SEQ ID NO: 92379 - DNA, 1761 bp, Homo sapiens
cttcagagccctgcaggctgttcctcacccaccccctcccagcctcctctcctcctcctacttcagcctcttcttcccagcctcctcctcagggcttcaaggactctgcttcctctgcctgtgccctttgcttttctaatatgtcaggcccctcctctctcaggctcccagatttccacagggttgaagccctgacctaattaaaccttttcttaacaactattacttccttggtgaggccttcattggccaccaaaacaactactatccttttcccttgctttatttatcttgtaagcactcatcgccatgcaatatgctctctacttcttttgtctggtttatgtctgtcatcttccagtagaacatgtgttctatgagggcaggcaattttgtttattttcatttctagtgcctaaacaccgtctggcacattactcaggcttaataaatagttgttaaataaatgaacaaatgaatggtctggtattatactgttatacaatttaactattatagttttacaacgtttgaaaagagaggtttgttttacccaaagactaggactttttggaagtgttcaatattatcatcttgatgcacctacatcaagggcaaaatacttcaggagaaaagaagagggcagaagacttcagtggaaatatttagggctttcaacacataaagtatttaattttgaagacctatgcatctttaaattcctaggaaatgtatttagaggaattctcttttgataaatttctttcttagattattgaaagaactctatatagaaaatgcatagaaagggaagttcaaggaagtggaattaaaaatagcatatttaaggaagtgatttcattgactctactgcatagaaaagtcactagaagggtctatggccatactacctgaatgtgcccagtcttgcctgatcttggaaaagtcacaaaaaggaaattcacccatgggatcatcgaggctccagatctttggaaaaattaaaagtccatggaataatccagggagcaacatgactgggtgagttcatagaggaaagaagacaattttgtgggtaagagtggagaggagaaacagcattagagtaacatccactttagaaagcagtgagtgttgggaataatttccttcttacaaaacagtctgtccatcttttggaggggagctaaccgagggaatgcctgaagagcagggtttaattggtagaagacaaataacttttacagaattctaatcaaagtaattaccaaacatcacagaaatttctcacactgaagggaattgatggcacaggtctttttctttcttatgaatctaagtaattctggccgaaatgtcacgggggaaataaaaagtcatggtgccctaagttattttatccattccattagtaacactctttcatcagcagggcgggccttcagaaaaggggtcatgcaccaattatcatctgttgcacacacaacttgcaggacattcctgacgttccacatttccaggacacaactgagatactgcaaaaaacaaaccagttactttccctctgcccgcagaagaccccttgaacagcatcttactcttcagcagctcctatagaaaaccaagttatcaatgagctcctaaataattggtatcactttttaytgtttctgatttttctcaggtagagacactagttataggatatacaatctttattttgatagcattgttggattgacagaaattcaacttggtatg

SEQ ID NO: 92380 - DNA, 2974 bp, Homo sapiens
catagcaaaccagtctcaggggagttccttggtaattattacatcgaagctgtggaatggacgagcctaatggggctggatttgggagccagttgtggaccatctccaagacagaaagaatatggaatgatccatgttagacaacactcactaattccctcagtgctcataaacctgtggccactgggctcaatgccacttgctgagaataggaagattaatatattatagaatttggggcagtgtaggagatttgaagggtgggaaattggccctctgccactagatgagcactgagtggtatgttcactctgcctagggcttgtcagccatctggtatacccctctcagttacccctgagttataccatgctgctgggatctctccacaaatgcttcttctttctaaacacagattttacctttgtgttttggcaagtaaggggatattttgtacccaaatggcccctagctggagtcattcttcaagatttcctgaactgaaaggatcctgagagaaatggaaatcagaaaatcaagttatctgctcagtggactagagtccatgaggttaggctgcagccctagcaagggtgggcatggaggaatcacactcacttatctgcagtgtatgctccagaggccttcactgaacatgtgctgtaaaagaaaaagggttgcaggaaggttgagaaggcaagctcatcaactgtgcatgggaagggagcaaagctgacaggcaggactgatggggtgacattccctttttaccaaaaaagaaatctgtgcacatagccatagtccaacagtattaaagtgacacaatatcatctaatcccagattccctaatcttacttgcctgaggcagcaattacagtagtcctcccttatccgcagtttcactttccacagtttcagttatcggggtcaactgaggccaaacatattaaatggaacattccagaaataagcaattcataagttctaaattgcacaccattctgagtagtgtgatgaaatttctcgctgtcttgctctgtcccactcaggatctgaatcatccttttatccagcatctccatgttgtagacgctccctgctggtggtccctgacattgtctgctcctggcacccagccacaaacatgctcacggtgcaaagatccaggatcatctgaggcagataattctccatccaataacttgtcagaaggtcaatggcaggctaacgctgcatctcaatgcctacatcacgtaccccaacttcctctacatcgcacaacagcacaagaaaaagggcaggtacagtacaattagataaagagagaaagagagagaaaacacattcacataacctttagtacattactttgttataattgttctattttattattagttattattgattgttaatctcttactgagattaagtaagagattatttacttgtctaagtaagttagtaaatttcattctaagataaatgaaattttaccttagctctgtatatatatagaaagaaaacatagtatatacaggatttgctcttgaaacatatctctcatggataagagaaaactactatcagtttcttgtgtatccttctatttttatgcatatgcaaatacaaatacaaatatataaatgcatgtatgtatatgcataaaatatatatacatacacaattttaatttttctagtttaaaaaaatttttttagttaaacatttttaatttttaagttaatttaatttaaaattaatttttttacacaaatgagagcatatttatgaaattcttttttgtactctttttttcttttttgactagtcagttacactctaccttggagagcaaggtagaacttaacagtgatttttccctaaggccatggattttcactgtgctcattcatggaagaatagaaagggggaaattcggcttggtcrgtccccataacttggagtattagatggttgtagagagctcggtttgatatataacagctgtgacattgctgttacaactccacccatcacctcaaaattgcattaacaaagtgatgggattcaggacagaggaggcgatagctcaaatcatgcacttgaggaggatacggatccactggaatgttatctaagagagtggccaggattggtcaagggactaaacatcatgtcaaatgagttctgagtgacaaactgacagatggaaccaaccaaccaacaaaccaacccccgaaactagagatccatgaaagtggtggtgggagtttacttatataattttgttttaacttggctagggaatgtgggatcctggtagctgcatgaatgtggaagagagaggagacgtctgcggtgaggactgattgtgtggaattaggatcactgagtggaggctacagagaaactgctgaacacgaagagcattccaaggacatcactgcctgtgggcggcatcatcagcttagataagtggtaggcccccggcactgcaagtattggagggtaagctgcctaggcacatgaagcaaaggccatgaagtgatatttctcaatctttgcttttaacacaactagtgttctctatgatcatactagttgtttcacagaacatgttcgataggacattaaagtttagaaatattagtttaaaccaagttcagcagtgatgtttactgtagactttctcaggaaggggatgaaatgcactgccttgcacgttgatgacataacacctgctcaggcatgcatgtccacctgtcatattacatgatgaagggggagcatttccgggctcagtgggattccatggaacacagtttgggaaaccatgttactgcaggatggaggtaacactggatgatcatctgggtccaggactgtgactccagaggatgaaatgtctatctggcatattccaccttgggtcaggaatagccggcatcagtcacatgcatccccagtggc

SEQ ID NO: 92381 - DNA, 2974 bp, Homo sapiens
catagcaaaccagtctcaggggagttccttggtaattattacatcgaagctgtggaatggacgagcctaatggggctggatttgggagccagttgtggaccatctccaagacagaaagaatatggaatgatccatgttagacaacactcactaattccctcagtgctcataaacctgtggccactgggctcaatgccacttgctgagaataggaagattaatatattatagaatttggggcagtgtaggagatttgaagggtgggaaattggccctctgccactagatgagcactgagtggtatgttcactctgcctagggcttgtcagccatctggtatacccctctcagttacccctgagttataccatgctgctgggatctctccacaaatgcttcttctttctaaacacagattttacctttgtgttttggcaagtaaggggatattttgtacccaaatggcccctagctggagtcattcttcaagatttcctgaactgaaaggatcctgagagaaatggaaatcagaaaatcaagttatctgctcagtggactagagtccatgaggttaggctgcagccctagcaagggtgggcatggaggaatcacactcacttatctgcagtgtatgctccagaggccttcactgaacatgtgctgtaaaagaaaaagggttgcaggaaggttgagaaggcaagctcatcaactgtgcatgggaagggagcaaagctgacaggcaggactgatggggtgacattccctttttaccaaaaaagaaatctgtgcacatagccatagtccaacagtattaaagtgacacaatatcatctaatcccagattccctaatcttacttgcctgaggcagcaattacagtagtcctcccttatccgcagtttcactttccacagtttcagttatcggggtcaactgaggccaaacatattaaatggaacattccagaaataagcaattcataagttctaaattgcacaccattctgagtagtgtgatgaaatttctcgctgtcttgctctgtcccactcaggatctgaatcatccttttatccagcatctccatgttgtagacgctccctgctggtggtccctgacattgtctgctcctggcacccagccacaaacatgctcacggtgcaaagatccaggatcatctgaggcagataattctccatccaataacttgtcagaaggtcaatggcaggctaacgctgcatctcaatgcctacatcacgtaccccaacttcctctacatcgcacaacagcacaagaaaaagggcaggtacagtacaattagataaagagagaaagagagagaaaacacattcacataacctttagtacattactttgttataattgttctattttattattagttattattgattgttaatctcttactgagattaagtaagagattatttacttgtctaagtaagttagtaaatttcattctaagataaatgaaattttaccttagctctgtatatatatagaaagaaaacatagtatatacaggatttgctcttgaaacatatctctcatggataagagaaaactactatcagtttcttgtgtatccttctatttttatgcatatgcaaatacaaatacaaatatataaatgcatgtatgtatatgcataaaatatatatacatacacaattttaatttttctagtttaaaaaaatttttttagttaaacatttttaatttttaagttaatttaatttaaaattaatttttttacacaaatgagagcatatttatgaaattcttttttgtactctttttttcttttttgactagtcagttacactctaccttggagagcaaggtagaacttaacagtgatttttccctaaggccatggattttcactgtgctcattcatggaagaatagaaagggggaaattcggcttggtcggtccccataacttggagtattagatggttgtagagagctcggtttgatatataacagctgtgacattgctgttacaactccacccatcacctcaaaattgcattaacaaagtgatgggattcaggacagaggaggcgatagctcaaatcatgcacttgaggaggatacggatccactggaatgttatctaagagagtggccaggattggtcaagggactaaacatcatgtcaaatgagttctgagtgacaaactgacagatggaaccaaccaaccaacaaaccaacccccgaaactagagatccatgaaagtggtggtgggagtttacttatataattttgttttaacttggctagggaatgtgggatcctggtagctgcatgaatgtggaagagagaggagacgtctgcggtgaggactgattgtgtggaattaggatcactgagtggaggctacagagaaactgctgaacacgaagagcattccaaggacatcactgcctgtgggcggcatcatcagcttagataagtggtaggcccccggcactgcaagtattggagggtaagctgcctaggcacatgaagcaaaggccatgaagtgatatttctcaatctttgcttttaacacaactagtgttctctatgatcatactagttgtttcacagaacatgttcgataggacattaaagtttagaaatattagtttaaaccaagttcagcagtgatgtttactgtagactttctcaggaaggggatgaaatgcactgccttgcacrttgatgacataacacctgctcaggcatgcatgtccacctgtcatattacatgatgaagggggagcatttccgggctcagtgggattccatggaacacagtttgggaaaccatgttactgcaggatggaggtaacactggatgatcatctgggtccaggactgtgactccagaggatgaaatgtctatctggcatattccaccttgggtcaggaatagccggcatcagtcacatgcatccccagtggc

SEQ ID NO: 92382 - DNA, 962 bp, Homo sapiens
tgcatccagtgtccactccatgcaatcagccgtgctgaggggaccccatcaccgtgggggtccagctttctcagctgtgtttgtgcctcccacaagtgatgggaataaggaagctgaaacccagtgccctgtgccccccatgccagactccctgtgtgagctacacctccggcttctagaataagccccctttccaattcacaggaggataccacctgggctctccatgccagccctcatgggctcagtagaccacctccccaaagaatccacttttctcaggtctcaccttcaccagcgctttttaagcaaatccttactgatgcctaagttaggggtcttttctgttttacgcttccctgatgcctgaatgcaccacaatctatgaaaatacccacttctcacacggcagccgccagactgcaggcttcatggaattagagtgagtgtgtcttgctccccacactcctgcggtgcaggagaggcatcacagctgttgttggccaagtaaatgaggggagaatgcaagcatgccagggctcaggytttctttctgatgccaggtcattttgaagggttggcccattgtcgattcccagtgctaggatagcagtgtggtgtgccggagatacaggggatgcgacccagtgacttctccccatcctttagctgaggggcaggctcagcttccaggtcacttcctgctcccttggtctctgagctttgttaaggggctcagcagaggcagatgtgggtcttattctagctctgtggacctcaggaaacaggaggtggagagagggagcaaaatggggaactttcagggtggaggggcgggctttgtcctgtccctcaaaagctagcttcttccacacactctcccagtctaatcctcttgaccgttggcagtaataagcttcagtgttgcagctgggagactggaactcagagagatcaaggga

SEQ ID NO: 92383 - DNA, 1575 bp, Homo sapiens
cacgagaggctctggaattacctcctggtggaggtaagcaaaacttaggcaagagcctgaaccatctgggagctgcctggagcaggagaatttctaatccgttatcatgagaataagacctaagtaatcaaaaatgctgtcaacgtgaattttgagtttcagtgaaaaccagaccaattagttaaaggattaaattggtgaatatgatagtttctactgctaccaacagactgtcagagagcagcggtcctcaattgggggcaactgtggccctgccccagggacatctgggagtgtctggaggcactgtgggttgtcacagctcagggggttgacactggtgcccagtgtactggagcccggctgctgctaacattctaggatgcacagcacaggcccccacagctcctcacagccaagtaggggctggccctgaatgctcacagtgccgggtatgagaaacccagccatagaggyttgcttttgcaaggccctttagaatctgttctttcaatggtatttcccaaatgccctgtgaggtaagacaggtagttatcattgtgcccatttcacagggggccaaggctcagagctggcaagtgacctgcttaggcccatggagcaaaggacaggggaacagctctctctccaccaccagctcctttagggtcacctggccaggcctgggaacttttctactcagtatctgctagttttgaaaaaagaaataaaaacataacatttattaagagtctactgtttgtcaggcacaaagaccaaaattgttgctctcagggacattacaggctggcagggaagcagtcaacaaacaaggtaatgtgtaaaacacatggcacaccagattgcaggggtggaggagaagaggcgtggaagagaggaggtgtggtggagctgaactaacgttttaggcagtgtgaccagagaagacctcagccgggtggcatttgagtgaagacctgaaccaagtgaggaagccagccatgttgctgtctggggaagagggtccaggtgcagggtcagcaggggcaaagggcaggcctggcatgcatgaggtccagcatggctgacagagcactagggagagggagagagcagaagaggccacagacaagagttggggaaaggtgggtggggcacatcgtagactcgcgaaggtcatttgaaggaccttggctttcatcagaaaaataggtagccactgcaggatctgagcagcagctcggctgagtctttggattttaactggatcactctggctgctgtgtggaggacggactgaaggaagaggcactgaatgtgttcagtttcatttttgccaatcctaatttcctcaatacctctttttaaaaatgaattctgtgatgatgtgaggaaaagatatggttgtgcaggagtaccaaggagagcccgaagaatggagctcattggtgagccagaagaaaagcagctatcagacaggaggatgtgggcagaaaactgagcgtgctggccggggcttcctcatggatcaggggctccagccgtgcttggagcaggtggtgaacgcagaaccca

SEQ ID NO: 92384 - DNA, 1575 bp, Homo sapiens
cacgagaggctctggaattacctcctggtggaggtaagcaaaacttaggcaagagcctgaaccatctgggagctgcctggagcaggagaatttctaatccgttatcatgagaataagacctaagtaatcaaaaatgctgtcaacgtgaattttgagtttcagtgaaaaccagaccaattagttaaaggattaaattggtgaatatgatagtttctactgctaccaacagactgtcagagagcagcggtcctcaattgggggcaactgtggccctgccccagggacatctgggagtgtctggaggcactgtgggttgtcacagctcagggggttgacactggtgcccagtgtactggagcccggctgctgctaacattctaggatgcacagcacaggcccccacagctcctcacagccaagtaggggctggccctgaatgctcacagtgccgggtatgagaaacccagccatagaggtttgcttttgcaaggccctttagaatctgttctttcaatggtatttcccaaatgccctgtgaggtaagacaggtagttatcattgtgcccatttcacagggggccaaggctcagagctggcaagtgacctgcttaggcccatggagcaaaggacaggggaacagctctctctccaccaccagctcctttagggtcacctggccaggcctgggaacttttctactcagtatctgctagttttgaaaaaagaaataaaaacataacatttattaagagtctactgtttgtcaggcacaaagaccaaaattgttgctctcagggacattacaggctggcagggaagcagtcaacaaacaaggtaatgtgtaaaacacatggcacaccagattgcaggggtggaggagaagaggcgtggaagagaggaggtgtggtggagctgaactaacgttttaggcagtgtgaccagagaagacctcagccgggtggcatttgagtgaagacctgaaccaagtgaggaagccagccatgttgctgtctggggaagagggtccaggtgcagggtcagcaggggcaaagggcaggcctggcatgcatgaggtccagcatggctgacagagcactagggagagggagagagcagaagaggccacagacaagagtkggggaaaggtgggtggggcacatcgtagactcgcgaaggtcatttgaaggaccttggctttcatcagaaaaataggtagccactgcaggatctgagcagcagctcggctgagtctttggattttaactggatcactctggctgctgtgtggaggacggactgaaggaagaggcactgaatgtgttcagtttcatttttgccaatcctaatttcctcaatacctctttttaaaaatgaattctgtgatgatgtgaggaaaagatatggttgtgcaggagtaccaaggagagcccgaagaatggagctcattggtgagccagaagaaaagcagctatcagacaggaggatgtgggcagaaaactgagcgtgctggccggggcttcctcatggatcaggggctccagccgtgcttggagcaggtggtgaacgcagaaccca

SEQ ID NO: 92385 - DNA, 1575 bp, Homo sapiens
cacgagaggctctggaattacctcctggtggaggtaagcaaaacttaggcaagagcctgaaccatctgggagctgcctggagcaggagaatttctaatccgttatcatgagaataagacctaagtaatcaaaaatgctgtcaacgtgaattttgagtttcagtgaaaaccagaccaattagttaaaggattaaattggtgaatatgatagtttctactgctaccaacagactgtcagagagcagcggtcctcaattgggggcaactgtggccctgccccagggacatctgggagtgtctggaggcactgtgggttgtcacagctcagggggttgacactggtgcccagtgtactggagcccggctgctgctaacattctaggatgcacagcacaggcccccacagctcctcacagccaagtaggggctggccctgaatgctcacagtgccgggtatgagaaacccagccatagaggtttgcttttgcaaggccctttagaatctgttctttcaatggtatttcccaaatgccctgtgaggtaagacaggtagttatcattgtgcccatttcacagggggccaaggctcagagctggcaagtgacctgcttaggcccatggagcaaaggacaggggaacagctctctctccaccaccagctcctttagggtcacctggccaggcctgggaacttttctactcagtatctgctagttttgaaaaaagaaataaaaacataacatttattaagagtctactgtttgtcaggcacaaagaccaaaattgttgctctcagggacattacaggctggcagggaagcagtcaacaaacaaggtaatgtgtaaaacacatggcacaccagattgcaggggtggaggagaagaggcgtggaagagaggaggtgtggtggagctgaactaacgttttaggcagtgtgaccagagaagacctcagccgggtggcatttgagtgaagacctgaaccaagtgaggaagccagccatgttgctgtctggggaagagggtccaggtgcagggtcagcaggggcaaagggcaggcctggcatgcatgaggtccagcatggctgacagagcactagggagagggagagagcagaagaggccacagacaagagttggggaaaggtgggtggggcacatcgtagactcgcgaaggtcatttgaaggaccttggctttcatcagaaaaataggtagccactgcaggatctgagcagcagctcggctgagtctttggattttaactggatcactctggctgctgtgtggaggacggactgaaggaagaggcactgaatgtgttcagtttcatttttgccaatcctaatttcctcaatacctctttttaaaaatgaattctgtgatgatgtgaggaaaagatatggttgtgcaggagtaccaaggagagcccgaagaatggagctcattggtgagccagaagaaaagcagctatcagacaggaggatgtgggcagaaaactgagcgtgctggccggggcttcckcatggatcaggggctccagccgtgcttggagcaggtggtgaacgcagaaccca

SEQ ID NO: 92386 - DNA, 831 bp, Homo sapiens
ctccttcctccacacacacatagtgagactcctctgggagtgtgcgtttgattagtgtcgaagcattttcagcatcactcattgtttttattagtgcttatccattttttccccctggataacccaaacatagagtttcacctgagcatcattagaatttcaagttgctgctacaaatatgtacttattcagcatatactttttgagtgcctaccaaactgtagccatggggatgaggacaaagacctggccctttcttggagattatcttctggggtgagagatgggtcagcaaagggcaagtagaattcagcgtgggaagggctctgagtgrgttaatcacagggcatcacaggagtgtgtgcaggggtctcaatcttgaccagggaagttgaggtgagtggcctaggctgaggcagcaggaggatacggagggaaataagcatgggagagagtttagagggcagagttgcttggaccgtggactgtgtggatgtggggtgcaatgctgtgggaggacaatgtgcagggagaccctgctggggccaccttgtagaggggccccctgtcctttttataagagacaagaggcaggttgtttggaggagcagggcggggaagagaatgagttcagcttcagaacacattggttttgttgccaaaggaatatttaagtggagctttccagttgagagtttgaattccgggagcaccgagagggagacttacatttcaaagttatcagcacatatatgatccacaaatgggagtagataagtgaatccagagacaaggttcagtgagaaaaaaagttgtcctaagacaggatcc

SEQ ID NO: 92387 - DNA, 663 bp, Homo sapiens
tgtattgttgcagaatgtaccaaaataagagtataccagagtttatacattcccctaatgatgggcatgtaggttttttcrtattttttacccagaacaaacaatgccacagtgaacattcttgcaaatatactagtttatctttttctaggatatcatcatatatatatgataatagatatatatttgtatataatatataatatagatatattaatgtatataatatatatccatatattatatatgataatatagatatatatatggatgtaagcttgtgaaaattttagaagggtcatctgtcactttataatttcatagtttacaaaaatttaaataatattcaaaaatcagaaggcacgagcaccagcccaccagaaaggaggcaccacagagccagggcaggtgtttgccagaagtatttggtattctgtgcgtactttttctttctgcccaaatacccacacagggatttgagttttcagtgctggcattcagaaaacatttttactctcttgaaaatattcctgtgattgtatttgatgattcacactagcagtggtgcaaatcctaggccaaacagcacataagccgaagactgtgtgtgtgtgttgcacaggtacattatggctgttataaaaacaaatatttattattact

SEQ ID NO: 92388 - DNA, 1132 bp, Homo sapiens
acctacatacatacagtgaggatcacagggaggcaaaagggaccttcaatagagaaacactgccttgctagaagacggaaaggagaaggagaccaggaatgagaatacagccctctgcatagttatgattgatagcttccaaagttgtttttctatttactcattcattcgatcactacacatttattgaacataagccaaatatcaggcactgtgcatacaaagtcggcatacaaagatgaattaggcactgacaccatctttgggctacttggaatctagagaagttattttcaagcaaaaaacactgaaaagaggaaaggaagttttttttttttaatggtgtgattgaaagtgaaaaggaggtcagctctaatggaaagtagaaaaataaaatgtgggccgggcgcggtggctcacgcctgtaatcccaacactctgggaggccgaggccggcggatcacgaggtcaggagatcgagaccatcctggctaacatggtgaaaccctgtctctactaaaaatacaaaataaaatattagccaggcatggtggcrggcacctgtagtcccagctattcgggaggctgaggcaggagaatggcttgaacccgggaggcggaggttgcagtgagccgagatcgtgccactgcactccagcctgggcgacagagcaagactccgtcccccctcctcaaaaaaaagaaaaagaagatgtgttcagaagcattcaaatgcaggaagagacatcaaccacaatagaaaatgagtgtaggggtgccaaggataggcctgctactgctttcaaatatgaagaaggtcagattttcacaaagtgaaatcagctcgcagaaaaggaaagtttttcaccttccttgctctgtagcctggagggatagggcaacaggggacaaatgctgtccatttcccttttgttctagcactgaatggagtacctcttttagggcagatactcgctctgttttggttcaactgaaatgtccacccagatcccactcttgctgggtcagagcagtaggaagcaatgggtggagaggggaggattggcagcattttcctgatggccactaaaattctccagagagccatcttctgtcacacacgcagcatgca

SEQ ID NO: 92389 - DNA, 670 bp, Homo sapiens
ttttcacttgacattaaaccttgccttcacttctctagccaggctggactactccctaacacagttttaagtccccttttcacatgttttgccttacttgcttaatttttcaataaatatttctaaagcacctactacgtaccaggtataaagcatggcacttgtcaagaatgacttcctctctcagtctgtcatttctcacccaaatttcaaatttcctatccagtgcattctgtccattaacatggtgtagacttttccagcactcattattctttgttaatttaattctgtctccttaatgaygtagaagttgcttataggctttagacctctgtatactttgccgcactgagtagatgctaagctagccaaaaatagttactagtagaggaacatcaatgaaatcctaaatcttattagaactgcagtccaactaaggtctccaacctttacttagaaagtgaagagaaattgttaggaaactgatgaataattgtcgccatctgtgcagatgtaagtgaggaacatggagtcacttttgctctttaaaaacgtatggtgttgatatgtgtctgaggacagcgggggtaggatgcatgcagaggaaaggaatgtacttttatcttacacaacctggtccaaatcccttggttttctaccttagtat

SEQ ID NO: 92390 - DNA, 670 bp, Homo sapiens
ttttcacttgacattaaaccttgccttcacttctctagccaggctggactactccctaacacagttttaagtccccttttcacatgttttgccttacttgcttaatttttcaataaatatttctaaagcacctactacgtaccaggtataaagcatggcacttgtcaagaatgacttcctctctcagtctgtcatttctcacccaaatttcaaatttcctatccagtgcattctgtccattaacatggtgtagacttttccagcactcattattctttgttaatttaattctgtctccttaatgatgtagaagttgcttataggctttagacctctgtatactttgccgcactgagtagatgctaagctagccaaaaatagttactagtagaggaacatcaatgaaatcctaaatcttattagaactgcagtccaactaaggtctccaacctttacttagaaagtgaagagaaattgttaggaaactgatgaataattgtcgccatctgtgcagatgtaagtgaggaacatggagtcacttttgctctttaaaaacgtatggtgttgatatgtgtctgaggacagcgggggtrggatgcatgcagaggaaaggaatgtacttttatcttacacaacctggtccaaatcccttggttttctaccttagtat

SEQ ID NO: 92391 - DNA, 1158 bp, Homo sapiens
aatagcttgtcctgcgttcttgtggctatcctaactagataaggccatgttaatggcttgagaaacatcagtgtgtgtggaatgaacacaggacgttggaggatttgaattcaggctctgccatgtgctagtttgagtgatctagaacaagctggtttaccacctctctttaagttttggtttccccagtcagtaaaatagaaagtggtgaaacctaacttgtgggtataaggaggataagaaatactgtatttgaatgcctagtacagtgtcagggttgaataaagtacgacttcaccttattccctagtaattattgtcctcatgaccaaacctgcctcctctcaaaggcagtggccacaacagcacatccarcttttatttaggaagacatctttgtcttttttcagagcatgaggagcacagcagccgcaaggaaatggtcctggtggaggggctgtgctctgagcaggggcgccggggctgaacgctggctagttcctctgagaggaagcccttggagaatgaactagggaggcaggaagagttctgggtatatggaaagtcagaaaacatctgggtcctatgaaaggacatcaaagatctgaaggcccagctgcagaatgccaacaaggtcattcaaaacttcaagagccgggtccagtccctctcagttacaagtgattattcatctagtctggaaagaccctggaagctgagagctcttgacaccctggaggggtcttcacctcatagtgtcactgatgaggatgaggtgtggctgtctgatggcactggggctttctactctccaggacttcaggccaaaaaggacctgaagagtctcatccagagagtatcccagctggaggcccagctcccaaaaaattgactagaagggaagctggctgaggagctgagatcagcctcgtggcctgggtaaggatggcactgtctgggcactttctggattgaaaatgtgtaagtttgtgcttggtgtagggtagctcaggcagttggaagaaacaacatgtctgggtattcacaaggacactgatttaaatggtagatataggtctgtggaaaagacaggtaggcaagcaggagggcataggatgatgtcccagtatctgggagataccagatctcagggatttc

SEQ ID NO: 92392 - DNA, 1158 bp, Homo sapiens
aatagcttgtcctgcgttcttgtggctatcctaactagataaggccatgttaatggcttgagaaacatcagtgtgtgtggaatgaacacaggacgttggaggatttgaattcaggctctgccatgtgctagtttgagtgatctagaacaagctggtttaccacctctctttaagttttggtttccccagtcagtaaaatagaaagtggtgaaacctaacttgtgggtataaggaggataagaaatactgtatttgaatgcctagtacagtgtcagggttgaataaagtacgacttcaccttattccctagtaattattgtcctcatgaccaaacctgcctcctctcaaaggcagtggccacaacagcacatccaacttttatttaggaagacatctttgtcttttttcagagcatgaggagcacagcagccgcaaggaaatggtcctggtggaggggctgtgctctgagcaggggcgccggggctgaacrctggctagttcctctgagaggaagcccttggagaatgaactagggaggcaggaagagttctgggtatatggaaagtcagaaaacatctgggtcctatgaaaggacatcaaagatctgaaggcccagctgcagaatgccaacaaggtcattcaaaacttcaagagccgggtccagtccctctcagttacaagtgattattcatctagtctggaaagaccctggaagctgagagctcttgacaccctggaggggtcttcacctcatagtgtcactgatgaggatgaggtgtggctgtctgatggcactggggctttctactctccaggacttcaggccaaaaaggacctgaagagtctcatccagagagtatcccagctggaggcccagctcccaaaaaattgactagaagggaagctggctgaggagctgagatcagcctcgtggcctgggtaaggatggcactgtctgggcactttctggattgaaaatgtgtaagtttgtgcttggtgtagggtagctcaggcagttggaagaaacaacatgtctgggtattcacaaggacactgatttaaatggtagatataggtctgtggaaaagacaggtaggcaagcaggagggcataggatgatgtcccagtatctgggagataccagatctcagggatttc

SEQ ID NO: 92393 - DNA, 600 bp, Homo sapiens
ctcctcagcatgagaataggacactgtgagagatcttcttcaggaggcctgaaggctgatcatgatagagattcctgggtttttgtcccagaaactgtgggtaaaattccctattctggtagatcgttatcccaagatcatttgtcccaagtttgtgcaaatggttatgccatatttttccaatcgatttaaagcaaatgcccccaaatggttgctgggagaaaaactgcaatattcagccctgtctcatcaaatactcagattcttcatggtagcgaggattttagatgctgaaattagagtgaaggatgaaatctacaagatctacaaaattgagacaaaatcagagttgtgtgaatttgtcacatctgcccagatccaacatcttgagagtrggattagggtgccacaggcatggcctgagactaggaagagagccctgctcactgacccatcccttgcctgggcttccaagtggaactagagtttcattcaacctacatgtgcctataggtcctccctgtggcaatgacatctctcagctcagtaagggccatttgcagtaggaatatgaccctaaccagaagactcagtggatcc

SEQ ID NO: 92394 - DNA, 736 bp, Homo sapiens
tgtgttccgcacgggggctccaccagggcagggatggtggtgagggtcgctcgtgggtcccctcgcggggagcagggtctggyactcaccagggcgcacgactaggacttgtggaatgaattcatcgtcgcctttagcttttagtcctttgaagagccctgagagtggaaatcaagagattttttccacggggaagttctttttacaaagcgttgatttctcggcacccggcagggagggcaactggcagggtctctggcgcaccttctgcgcggtggagccacgggggctcagctgggcggtggtgcggccgtggggtggtaggtcaagagctgggaaaggaaaaagcaaaagctgggaaagaagccggggagcggtggaccagacatccagacctcctgaaaggctcatgaaggggcacaggcaggatcttctggaagtgagaattgttttgtttgtttgtttgtttattgtagtagaatggggaaatggagagagaacctgaaagagccccaaactcgaggacctattgctccccaagaataacatcttccagaagaactagacagaaaactaggcgtctgggaactctgaaatccttggaggagtagcatcatcatgaccctctgtgttccttttggcaaaggacttgctcccattgtttgcttgttcaattgtctgtccgttaaataaataaaacccttttcctatatctttaaaattacgttggttttat

SEQ ID NO: 92395 - DNA, 689 bp, Homo sapiens
cttgaggaagagtgaagccttcaatgctaccacaagtgtatgctgtaaatcttccttcaggccttccccagaaggcyctgaagccatttatgtgggtgactgaggaaagggaaatactcagagcttctgtggcttgttggatgctggctctgaagaatgctaaactgagggccctgcggtggccatgaaaatgcactacttgcatctccagctgcaggaggcctaacgaatcagcagcctcagctgctaccctccgaatggaggacttgatgacatttcccctggatctgcactagcccgtgaggaggaaagcctcctatcaagtcctcccaacagaacacccatgatgactcatgaggatgttgaaggtgttttcctgtggcaactgtgagtgtctttcttcaaagtctgttttgttcctgcacattaactgatttatataaaataagagaataaatgcctagactcccatgagtctatcttttactgataaactctagttctgaggacagaagcctgatggagtcagtatagggggaatttataacctggcatccagttcagagacttggagcttctcgactgaggggagatcgggtccctttggggaagaaagaagccttcaatgttgtcacaagtgtatcctggaaatcttcctctaagccttcctagagggacctgataacatg

SEQ ID NO: 92396 - DNA, 760 bp, Homo sapiens
cgcacacggcgcttagttctggaactgcatacccaggggaggatgcgggagcccgaagcccgggtatgtgtccccgaagcccgggtgtgggtccccatggttttcgtgttgggggtgggcgcggaacgctaagcctgggcctattgggagccatagtcttcttgatggctggtgcttattgggcttttttcagtcgaatttcgaaatgcagttgaatttcttactttggaaacgataatagaaatggctgacctaagattttcatgatgatattttgccttttttggtgyatatgcagtttctgtggtgtagtggttattatgttcgcttcacatatgaaaggtctctggttcgagactgcgtgggaacatcgtgttttgttttgttttgtttttttgtccctaaatttagtgagtttaatcgaggttgggaaacaaacagaaaagtagttgaacctgtggctacactttagacctcctcaatctagagagatcgttgaccaggctacagtttccactggtctgccagcaagaggcctgcttaatattagctttggttccagaaattccttcaggttctcttcattctcttctatcgcctgtattttcacaggctgacactgaaagtggatgacatcttagtgcatttcctaagggtcccgcttggcttcgctttactctggtaagttgcagatctggctgatttgcaagacaacaaaaacaaaatattttttaaaaaggttctaaatctgcatctggaa

SEQ ID NO: 92397 - DNA, 760 bp, Homo sapiens
cgcacacggcgcttagttctggaactgcatacccaggggaggatgcgggagcccgaagcccgggtatgtgtccccgaagcccgggtgtgggtccccatggttttcgtgttgggggtgggcgcggaacgctaagcctgggcctattgggagccatagtcttcttgatggctggtgcttattgggcttttttcagtcgaatttcgaaatgcagttgaatttcttactttggaaacgataatagaaatggctgacctaagattttcatgatgatattttgccttttttggtgcatatgcagtttctgtggtgtagtggttattatgttcgcttcacatatgaaaggtctctggttcgagactgcgtgggaacatcgtgttttgttttgttttgtttttttgtccctaaatttagtgagtttaatcgaggttgggaaacaaacagaaaagtagttgaacctgtggctacactttagacctcctcaatctagasagatcgttgaccaggctacagtttccactggtctgccagcaagaggcctgcttaatattagctttggttccagaaattccttcaggttctcttcattctcttctatcgcctgtattttcacaggctgacactgaaagtggatgacatcttagtgcatttcctaagggtcccgcttggcttcgctttactctggtaagttgcagatctggctgatttgcaagacaacaaaaacaaaatattttttaaaaaggttctaaatctgcatctggaa

SEQ ID NO: 92398 - DNA, 723 bp, Homo sapiens
tccctggatttgaactttacttacctaaactaccagttaggttaccttcttagaacctctaaggcagcagtttgaggttgacgatggaagatttaggattagaaaaaagaaacgtgaatgaatttctgatgttttattataggggtttgtaatgcaggtagaaagaaagacctttttcagagttaagagtttgatccgacaaatgagctattttgatatttataacgttgtctagtaaaagtttcctgtaaaaacacatttggtttggatgtctttgttagcttttagtcgacacttgaaaaaaccgcttggaacggtttctaagtctttgtggatactsttttctgttatcctgcaggcggttgttacgcagaggcattggtggttcagtggtagaattctcgcctcccacgcgggagacccgggttcaattcccggccaatgcaagagggtctttttcaccccgctgttgctctttatctgtcttttacgctgaaaatcatactgcataacctaatagtgcatttaggggcttggccaccacaaggtaaagtgacgacaacactcacgaaagtagcggcaggagacattcaggagactaactcaggaccccatgcagttgttggactcaaacagcttagcaagctgacaagcatgaagtgtttccggtgagtcactgcagttttcatactggtacctgtgactttcatctattcactggaa

SEQ ID NO: 92399 - DNA, 723 bp, Homo sapiens
tccctggatttgaactttacttacctaaactaccagttaggttaccttcttagaacctctaaggcagcagtttgaggttgacgatggaagatttaggattagaaaaaagaaacgtgaatgaatttctgatgttttattataggggtttgtaatgcaggtagaaagaaagacctttttcagagttaagagtttgatccgacaaatgagctattttgatatttataacgttgtctagtaaaagtttcctgtaaaaacacatttggtttggatgtctttgttagcttttagtcgacacttgaaaaaaccgcttggaacggtttctaagtctttgtggatactgttttctgttatcctgcaggcggttgttacgcagaggcattggtggttcagtggtagaattctcgcctcccacgcgggagacccgggttcaattcccggccaatgcaaragggtctttttcaccccgctgttgctctttatctgtcttttacgctgaaaatcatactgcataacctaatagtgcatttaggggcttggccaccacaaggtaaagtgacgacaacactcacgaaagtagcggcaggagacattcaggagactaactcaggaccccatgcagttgttggactcaaacagcttagcaagctgacaagcatgaagtgtttccggtgagtcactgcagttttcatactggtacctgtgactttcatctattcactggaa

SEQ ID NO: 92400 - DNA, 1472 bp, Homo sapiens
cccttgagcccaggaggcagaggttgtggtcagctgagatcatgctgctgcactccagcctgggcaacagagcaagactctgtctcaaaaaaaaaaaaaaaaaaaaaaagaagaaaccagaaaaatgaaatacctgagactgggtatttataagaaaagaggtttcattggttcacggttctgcaggctgtacaggaagcataacaccagcatctgcttctaaggaagcttacaatcattgtggaaggagaagcaggagcaggggccacacactttttaaataaccagatcttgcatgaactcactcactatcacaagagcagcaccaaggggatggggctaaaccaytcatgagaactccaccccatgatccaattacctcccaccaggccccacctctgacactggggattccaattcaacatgagatttaggtggggacacagacccaaactatatcacaaagttttccaggtgtcctactccacagacttccacttgttggtcagaactgtatggcgagggccatcctactagaagacatctaggtaaagaggttgtaaagggagtccaccaaccaaaatgtgggtcaaggagaaaaagtccaacagaggagaggggtagcatgaatgtggctgactgaaggcagggaagaggacctctcaccaccacctcaggaggttgtcattactattggggcaggagagggaggggtgggtgatgaagacgccttggccatctttgcagttttgcttcggggatgtttatagcaaatgggtttgccacgtgtctttttcattcattccacaaacatttttccagggtctagtccatattcccagaagattttcaaagaagcacataactcactggactacatgggctaaaatacgtacaaatgccccttgatttataatggagtgatgccctaataaattcattgttaagtaaaaaatattgtaagtcaaaccattgtaagtctgggactatctgtatttggtctttgtctctggttcctggcacagagctcctaaaatgcctggcatttcccgagtgattaggaacatacctgaggtatgctaattaggggactcaggatggggctggtccctagaaagaccaaaggacgtcgggaaccaaatgagggtgggaactctcagccctacccccaacctccaggaagggagaagagctggagattgggttataaaaactcttcaacaaggttcagagaccttccaggttggtgaacagatggaggtgctgctagcagggtggcacacatggagagagcatggaggtgctgcacctctctgcctctaggcttcatcctatgcatgtattccatttgcctattcctgagctgcattctttacaataactggtaaagaatgcagttcaggagtagaaagtgttctgtgagctgttatagcaaattatagaacttgaagggaggttataggagccctgaa

SEQ ID NO: 92401 - DNA, 1472 bp, Homo sapiens
cccttgagcccaggaggcagaggttgtggtcagctgagatcatgctgctgcactccagcctgggcaacagagcaagactctgtctcaaaaaaaaaaaaaaaaaaaaaaagaagaaaccagaaaaatgaaatacctgagactgggtatttataagaaaagaggtttcattggttcacggttctgcaggctgtacaggaagcataacaccagcatctgcttctaaggaagcttacaatcattgtggaaggagaagcaggagcaggggccacacactttttaaataaccagatcttgcatgaactcactcactatcacaagagcagcaccaaggggatggggctaaaccattcatgagaactccaccccatgatccaattacctcccaccaggccccacctctgacactggggattccaattcaacatgasatttaggtggggacacagacccaaactatatcacaaagttttccaggtgtcctactccacagacttccacttgttggtcagaactgtatggcgagggccatcctactagaagacatctaggtaaagaggttgtaaagggagtccaccaaccaaaatgtgggtcaaggagaaaaagtccaacagaggagaggggtagcatgaatgtggctgactgaaggcagggaagaggacctctcaccaccacctcaggaggttgtcattactattggggcaggagagggaggggtgggtgatgaagacgccttggccatctttgcagttttgcttcggggatgtttatagcaaatgggtttgccacgtgtctttttcattcattccacaaacatttttccagggtctagtccatattcccagaagattttcaaagaagcacataactcactggactacatgggctaaaatacgtacaaatgccccttgatttataatggagtgatgccctaataaattcattgttaagtaaaaaatattgtaagtcaaaccattgtaagtctgggactatctgtatttggtctttgtctctggttcctggcacagagctcctaaaatgcctggcatttcccgagtgattaggaacatacctgaggtatgctaattaggggactcaggatggggctggtccctagaaagaccaaaggacgtcgggaaccaaatgagggtgggaactctcagccctacccccaacctccaggaagggagaagagctggagattgggttataaaaactcttcaacaaggttcagagaccttccaggttggtgaacagatggaggtgctgctagcagggtggcacacatggagagagcatggaggtgctgcacctctctgcctctaggcttcatcctatgcatgtattccatttgcctattcctgagctgcattctttacaataactggtaaagaatgcagttcaggagtagaaagtgttctgtgagctgttatagcaaattatagaacttgaagggaggttataggagccctgaa

SEQ ID NO: 92402 - DNA, 722 bp, Homo sapiens
tgttaaactagtttcactactaatggttgtgacctgcagtttcaataacactggtaaagaaacttaaatagatacttcagaatttaatcatgtcacaggaaacccagattatattttacctctatcatacaacgagttctctcttgctgaaatctttgtaaaaatggtccaacaagatggtatacataaagcaactggaattcggtcttcactataggaagaagtacttcagtaagaaacctaaaatttgaagataaaaatctcctgtgacttgaaattatttaaattgtttgaattttgttcatacagtatwtacaaagtattacaataaaatataattttttaaagttccttttaatttggtaacaataatatttctaattaatctcacatctctcactggctattactttcacttgattatttttatttatttatttttttgagacggagtctcacactgttgcctgggctggagtgcagtggcgtgatcttggctcactgcaacctccgcctcctgggttcaagtgattctcctgctgactagctgggattacaggtgcacaccaccacgcctggctaattcttttatttttagtagagacggggtttcaccatgttggccaggatggtctcaatctcctgaccttgtgatccacccatctcggcctcccaaattgctgggattacaggcatgagtcaccgcgcccagccgcaagttg

SEQ ID NO: 92403 - DNA, 629 bp, Homo sapiens
aaaaaaattctaaagattagcatggtttaaccacagagagcatgtttaccatacaccaaatactctgctaaacacttcctatatgataayatagattaggtgcatgtggcaagacagaggaactgtgaatacacttattttacacatgcaggtcagagaagttgtcacttagccaaggttacaggattcaagagtgggaaagctggaatttaaagccagattcaaaacttcagagcctatgttctttaattactcatgtaattacttcttctttacaccaccttatagtttttttgctctgtaaaccaaaaataaaattctaaggccccccaaccatctgaatgaccccctcctcttgaccctcctcctccaaaattaacctgaaaaacttcaggccatgatgataagggggaactggacatgcctcattataccctcctcccttttgaaattactgatagaacagactctaagtctagcaagaaatatttacaatctattttttctgaagcctgctatgatgaaactttggtctccacaaccccttatcatagcctagatatttctgtctattaataataactcttccaactaattaccaatcagaaaatctttgatcccatctatga

SEQ ID NO: 92404 - DNA, 1110 bp, Homo sapiens
cttcgttctacacatctagagggaaagagggacagagacagagatagagagaaagagagatgcagcttactgctattttgcctggtgccctggggaacaggtgctgttgggccgacagtgatcaatacaaccttccctggaccctaaatggaatagagcactcaggagataatttctctaaattaagtggtatgtgaatttggaaagtatctggcagagaaaaagaaaaaaaaataaccgtattgggggtgatggccattggttgggggcttctctcctgagtatcacaactccattcttaattataattataatacttrccattccattttatacaacataacactgtagcattaatgtatgtattcaacagtaatataatgaaggtattagtttatgaaccaagttttacttttaaaacatatttttttaaaaaataatttttatacacttgcaaaggggattgcatttaacaaaaagattttgtcttgaagaaggtgaatgttttgagtcttgaagagcaagaactggctgaaacaaataaaaaagtaaaaacataaaataatttttaaaaacgtaggccaagtgtggtggcttacacctgtaatcccagcattttgggaggcccaggtgggaggatcgcttgatcccaggagttcaagacaagcctgagcaacatataaaaaaattaaaaaattagccaggcattgtggtgtaagcctgtaatctcagctacttggggaggctgagatggcagcatggcttgagcctgggaggttgaagctgcagtgagctgaaatcataccactgcactccagcctgaacaacagggcgagaccctgtctcaaaaacaaaacaaaacaacaacaacaaaaacttttaaagctcataactacagaacaccataaatatgatattttattattattctttgaattctttttcagaattgagtaatgtatagcttcaatataattcaactttcaactactcattgtgtgcctctcctgggcaggtcctggaacacaaagatgacagggcaaggtccctgctttagagaagcggacagtcttattctttattttcaaactgcaataaattcagttcaaa

SEQ ID NO: 92405 - DNA, 688 bp, Homo sapiens
atgtaagtatttctctattttcacagaaatgtcactctaaatcagtacctagggagggtcatcattttctttatctacaaatcaagacacagtatgagtggctgcacccaatttggtaagtcctctattattgaggatgttttcctgtttcccttgtcattgttgttgctgttttgttttgagacagagtttcactcttttgagtcaagtggtgtgatctcagctcactgtagcctcccgagtagctgggattataggtgcccaccaccacgcctagctaatttttgtatttttagtagagatgaggttttascatgttggccaggctggtcttagctcctgaccgcaggtgatccatctgcctcagcctcccaaaatgctgagattacaggcgtgagccaccatgcttggctgctttcatcatttcagactgagcttggagaagaacctgaggaaaaacatgactttaaaattttgatgaatggagaaatctctttccattcaccttcctttcctctatttcattcttattttaaaatatgcaaacaaaggtatggatacatcaattattaaataaacgtctgtgtgatatctatccaggtgaagaaatagagcactatcaccaccaagaagtcctctgtatgcccctaactgatcctaaagtcttccttcccctttttagtaacag

SEQ ID NO: 92406 - DNA, 563 bp, Homo sapiens
caccacaccttcaaatagcagactcatggaaaggggattccaagattctccccctccagctacggcattgctttacaatatttaaaattccttgactaaagagcaagtctaaattgcaagtactcctaggacagggactggcttagatccatgacagctccctctctgaaagaagggcrtgccttactccaccagaccaaacaaaactaaagtgacttctctgctacccccagagaggggcactggggatggtaaaagcatttctgtccctgcacccagggatgaagtagagaaatgccacttaaccatagccaggacccaaagaattgtgagtggaaagagtgacaaaaacagagaaggacagaactgtaagccaccgcacttcatttaggaagttagtgctagggtaacaggaaggatcgggtgggctttcaggggagtggaacctgttagagaaagaacaaaactgagtggagacgcaaggcaggagaccatttataggtgaattagcagcagagggtgggtggtggctgtgcctggggcaggggtggtggggtgaggaa

SEQ ID NO: 92407 - DNA, 563 bp, Homo sapiens
caccacaccttcaaatagcagactcatggaaaggggattccaagattctccccctccagctacggcattgctttacaatatttaaaattccttgactaaagagcaagtctaaattgcaagtactcctaggacagggactggcttagatccatgacagctccctctctgaaagaagggcatgccttactccaccagaccaaayaaaactaaagtgacttctctgctacccccagagaggggcactggggatggtaaaagcatttctgtccctgcacccagggatgaagtagagaaatgccacttaaccatagccaggacccaaagaattgtgagtggaaagagtgacaaaaacagagaaggacagaactgtaagccaccgcacttcatttaggaagttagtgctagggtaacaggaaggatcgggtgggctttcaggggagtggaacctgttagagaaagaacaaaactgagtggagacgcaaggcaggagaccatttataggtgaattagcagcagagggtgggtggtggctgtgcctggggcaggggtggtggggtgaggaa

SEQ ID NO: 92408 - DNA, 563 bp, Homo sapiens
caccacaccttcaaatagcagactcatggaaaggggattccaagattctccccctccagctacggcattgctttacaatatttaaaattccttgactaaagagcaagtctaaattgcaagtactcctaggacagggactggcttagatccatgacagctccctctctgaaagaagggcatgccttactccaccagaccaaacaaaactaaagtgayttctctgctacccccagagaggggcactggggatggtaaaagcatttctgtccctgcacccagggatgaagtagagaaatgccacttaaccatagccaggacccaaagaattgtgagtggaaagagtgacaaaaacagagaaggacagaactgtaagccaccgcacttcatttaggaagttagtgctagggtaacaggaaggatcgggtgggctttcaggggagtggaacctgttagagaaagaacaaaactgagtggagacgcaaggcaggagaccatttataggtgaattagcagcagagggtgggtggtggctgtgcctggggcaggggtggtggggtgaggaa

SEQ ID NO: 92409 - DNA, 712 bp, Homo sapiens
aagggctctgagcccagccctctggccagggcctggtgcagtggcagaggcttgggtccctgccaggtctcctgaaacgtctccagggtctgctggggcagccacctgggtgctcagttgctctgttaaacagcaaaattcccaagtcctcatctcaatgagccactgaggccgatgaagagggcctgtctcatttaggacatgagtggccaggcgggtgccacaggcccttttcctggtgacaacaaagccattgcatggctccaggaaggtcacatcatttcccgggcttcgtaggcacctgcggggcggaaacagttcagcagggccctcctgatcacaaggacgaggtcataccggctgctgcacggcagggctgcactctgccagggagtgtcctgtgagggaggggctgcactgccactttactgatgaggaaattaaggttcagagagatcatgtcatttgttagaggccagacagcctcctcagcccattttaaggttgtttctgtggtatttgccataaagccataggttcattgatttgttcttaagtagttatgagcccttcctgcatatcaggcagggacaaacaggaaagtccctgcctttggyaagtgcgggggaaatgaaatgattctgctcagcctcatccattggtctgaacaatcacgtctcatgaccgcagggacacggcttcccctgaacgc

SEQ ID NO: 92410 - DNA, 1876 bp, Homo sapiens
cttactctgtagcaagttctgtatgcataagcctctctttgttcttattttggtggcctctgtttatttacacaaagagaaataactgctattcccataaatcatggctttcaaaatggtcacagttcactgggcatgcttgctcatgcctgtaattctaccactttgagagaccgaggcgggcagatcatgaggtcaggagatcgaggccatcctggccaacccagtgaaaccccatctctaccaaaaatacaaaaagaaaaaaaaagccatgattggtggcatgcacctataatcccagctacttaggaggctgaggcaggagaatcacctgaatccaggaggcagaggttgcagtgagccgagatcacgccactgcactccagcctggatgacagagtaagaccgtctcaaaaaacccaaactggtcaggctcggtggctcacgcctgtaatcccagcacttttggaggctgaggcaggtggatcacaaggtcaagaattcaacaccagcctggccaagatggctaatccccaactctactaaaaaatacaaaaattatccaggcacggtggcaggcacctgtgatcctagctacttgggaggctgaggcaggagaatcgcttcaacccaggaggcagaggttgcagtgagctgagatctcaccactgcactccagcctgggcaatagagtgagaatctgtctcaaaaaaaaaaaaaaaatggggaaactccatctctactaaaaatacaaaattagccaggcatggtggcacatgcctgtaatcccagctacttgggaggctgaggcaagagaatcgcttgaacctgggaggcagaggttttggggaggtggaggttgaggtgagccaagatcgtggcattgcactgcagcctgggcaacaagagtaaaactctctctaacaaacaaacaaacaaacaaacaaaacaaaacaaagaaaaatacacacaacttatttcctggtttgtgataatctgtgaaatatattttgaaatgaattggaattcaatacagtactattcacaccccaaatactcctaatatttcctttcccagatgatgacctggtactcttcctagggcttgacttctccctacaggtccccagtacaagtatttgtgattctgagtcaattcattgtctacatgtgtgacaatgcaatgctcttgttgtagagtaccaagatgaggcaggtccaaactgcacatttgtagagaacatagtatatgtgcaattgaacatgtatgtggttgtgatactgaaaacaatacgaacttatgccaggtgcaatggctgatgcctgtaatcttagcaatttgggaggccgaggcatggagatcacctgaggtcaggagtttgagagcagcctggccaacctgctgaaaccccgtctctactaaaagtacaaaaaattagctgggcgtggtggcaggcacctgtaattccacctactcrggaggctgaggtgggagaatcgcttgaacccaggagatggaggttgcaatgagccaagatcacaccactgcattccagcctgggtgacaagagtaaaactgcgtcaagaaaaaaaaaaaaaaattggccttgggcgtttctttacgttggctcctgtgttctatttatagcatgcctttatcagggggttggggtgtgggactaattaccaactttctggcacataaagtgttttgattcatctggtattttccctgacccagacgtgaaataaaccatttatttaaagatccttggcttctttcattgaaaagtattatttacaaagcaccaaaatcttgggctgggtgaggtggctcaggtctgtaatctcaacactttgggaggctgaggcagga

SEQ ID NO: 92411 - DNA, 1876 bp, Homo sapiens
cttactctgtagcaagttctgtatgcataagcctctctttgttcttattttggtggcctctgtttatttacacaaagagaaataactgctattcccataaatcatggctttcaaaatggtcacagttcactgggcatgcttgctcatgcctgtaattctaccactttgagagaccgaggcgggcagatcatgaggtcaggagatcgaggccatcctggccaacccagtgaaaccccatctctaccaaaaatacaaaaagaaaaaaaaagccatgattggtggcatgcacctataatcccagctacttaggaggctgaggcaggagaatcacctgaatccaggaggcagaggttgcagtgagccgagatcacgccactgcactccagcctggatgacagagtaagaccgtctcaaaaaacccaaactggtcaggctcggtggctcacgcctgtaatcccagcacttttggaggctgaggcaggtggatcacaaggtcaagaattcaacaccagcctggccaagatggctaatccccaactctactaaaaaatacaaaaattatccaggcacggtggcaggcacctgtgatcctagctacttgggaggctgaggcaggagaatcgcttcaacccaggaggcagaggttgcagtgagctgagatctcaccactgcactccagcctgggcaatagagtgagaatctgtctcaaaaaaaaaaaaaaaatggggaaactccatctctactaaaaatacaaaattagccaggcatggtggcacatgcctgtaatcccagctacttgggaggctgaggcaagagaatcgcttgaacctgggaggcagaggttttggggaggtggaggttgaggtgagccaagatcgtggcattgcactgcagcctgggcaacaagagtaaaactctctctaacaaacaaacaaacaaacaaacaaaacaaaacaaagaaaaatacacacaacttatttcctggtttgtgataatctgtgaaatatattttgaaatgaattggaattcaatacagtactattcacaccccaaatactcctaatatttcctttcccagatgatgacctggtactcttcctagggcttgacttctccctacaggtccccagtacaagtatttgtgattctgagtcaattcattgtctacatgtgtgacaatgcaatgctcttgttgtagagtaccaagatgaggcaggtccaaactgcacatttgtagagaacatagtatatgtgcaattgaacatgtatgtggttgtgatactgaaaacaatacgaacttatgccaggtgcaatggctgatgcctgtaatcttagcaatttgggaggccgaggcatggagatcacctgaggtcaggagtttgagagcagcctggccaacctgctgaaaccccgtctctactaaaagtacaaaaaattagctgggcgtggtggcaggcacctgtaattccacctactcgggaggctgaggygggagaatcgcttgaacccaggagatggaggttgcaatgagccaagatcacaccactgcattccagcctgggtgacaagagtaaaactgcgtcaagaaaaaaaaaaaaaaattggccttgggcgtttctttacgttggctcctgtgttctatttatagcatgcctttatcagggggttggggtgtgggactaattaccaactttctggcacataaagtgttttgattcatctggtattttccctgacccagacgtgaaataaaccatttatttaaagatccttggcttctttcattgaaaagtattatttacaaagcaccaaaatcttgggctgggtgaggtggctcaggtctgtaatctcaacactttgggaggctgaggcagga

SEQ ID NO: 92412 - DNA, 1876 bp, Homo sapiens
cttactctgtagcaagttctgtatgcataagcctctctttgttcttattttggtggcctctgtttatttacacaaagagaaataactgctattcccataaatcatggctttcaaaatggtcacagttcactgggcatgcttgctcatgcctgtaattctaccactttgagagaccgaggcgggcagatcatgaggtcaggagatcgaggccatcctggccaacccagtgaaaccccatctctaccaaaaatacaaaaagaaaaaaaaagccatgattggtggcatgcacctataatcccagctacttaggaggctgaggcaggagaatcacctgaatccaggaggcagaggttgcagtgagccgagatcacgccactgcactccagcctggatgacagagtaagaccgtctcaaaaaacccaaactggtcaggctcggtggctcacgcctgtaatcccagcacttttggaggctgaggcaggtggatcacaaggtcaagaattcaacaccagcctggccaagatggctaatccccaactctactaaaaaatacaaaaattatccaggcacggtggcaggcacctgtgatcctagctacttgggaggctgaggcaggagaatcgcttcaacccaggaggcagaggttgcagtgagctgagatctcaccactgcactccagcctgggcaatagagtgagaatctgtctcaaaaaaaaaaaaaaaatggggaaactccatctctactaaaaatacaaaattagccaggcatggtggcacatgcctgtaatcccagctacttgggaggctgaggcaagagaatcgcttgaacctgggaggcagaggttttggggaggtggaggttgaggtgagccaagatcgtggcattgcactgcagcctgggcaacaagagtaaaactctctctaacaaacaaacaaacaaacaaacaaaacaaaacaaagaaaaatacacacaacttatttcctggtttgtgataatctgtgaaatatattttgaaatgaattggaattcaatacagtactattcacaccccaaatactcctaatatttcctttcccagatgatgacctggtactcttcctagggcttgacttctccctacaggtccccagtacaagtatttgtgattctgagtcaattcattgtctacatgtgtgacaatgcaatgctcttgttgtagagtaccaagatgaggcaggtccaaactgcacatttgtagagaacatagtatatgtgcaattgaacatgtatgtggttgtgatactgaaaacaatacgaacttatgccaggtgcaatggctgatgcctgtaatcttagcaatttgggaggccgaggcatggagatcacctgaggtcaggagtttgagagcagcctggccaacctgctgaaaccccgtctctactaaaagtacaaaaaattagctgggcgtggtggcaggcacctgtaattccacctactcgggaggctgaggtgggagaatcgcttgaacccaggagatggaggttgcaatgagccaagatcacaccactgcattccagcctgggtgacaagagtaaaactgcgtcaagaaaaaaaaaaaaaaattggccttgggcgtttctttacgttggctcctgtgttctatttatagcatgcctttatcagggggttggggtgtgggactaattaccaactttctggcacataaagtgttttgattcatctggtattttccctgacccagacgtgraataaaccatttatttaaagatccttggcttctttcattgaaaagtattatttacaaagcaccaaaatcttgggctgggtgaggtggctcaggtctgtaatctcaacactttgggaggctgaggcagga

SEQ ID NO: 92413 - DNA, 1032 bp, Homo sapiens
aacaaaagttccagaatcttaaagatgccttgtaagtcccttctcctattctatagttactctatgtggtcttttaaagattggtgtcttctacttacctcctaggcattcatctaggtctatgccatctattattctttctcacttacattgatcagttcttctctcttcttaacttaattctgtcaccctgcaagaatcctactgtgtaaatgtatgttagactccagatctgaacaaggtaaaaattgcacttccatctcttctctagctcctggggacataaatcaggatcatcacttttctttacatattatgtgataaagagaaactttgtctggcttggagacgtagagtggtaagtcttggtccagttaaaacagcctctaacttatatgttggttatccttagaattacattttcttccagagttttcaaaatttaaggcctgcagctgccaaattatttccacttctacgttcaataggaaaaacccattcaacatgtctaaagtttaactccttatttatttattattattattcttagttatgtataccagtaacccagtaactcagttgcccaagctagaaacctgatattcatcctggaggtcctgcaaatctctaactcctctgtcttyccttatttataaccatagtcaatccatccctggccctattcagccacctcttaaataactcccaactttaccctcctctttcagtctctactctcttcccttcctgagttcaactttggcaaaatcctatttgacacctttccctaaaagaatccacagtaatatacagacaaagggcagaatcaagtcttatcaataggaacaattttgtgaagcagtttttataatgtaaatgtcaagtattttatctaaggtacgtaaggctggagccatagtatttcaatgtacacatcattaaaacaaaataatatgaatattagttaaaataattcagaattgtaatgtttaagaacaaaaataatacagaagctaacatttattgagcaat

SEQ ID NO: 92414 - DNA, 1032 bp, Homo sapiens
aacaaaagttccagaatcttaaagatgccttgtaagtcccttctcctattctatagttactctatgtggtcttttaaagattggtgtcttctacttacctcctaggcattcatctaggtctatgccatctattattctttctcacttacattgatcagttcttctctcttcttaacttaattctgtcaccctgcaagaatcctactgtgtaaatgtatgttagactccagatctgaacaaggtaaaaattgcacttccatctcttctctagctcctggggacataaatcaggatcatcacttttctttacatattatgtgataaagagaaactttgtctggcttggagacgtagagtggtaagtcttggtccagttaaaacagcctctaacttatatgttggttatccttagaattacattttcttccagagttttcaaaatttaaggcctgcagctgccaaattatttccacttctacgttcaataggaaaaacccattcaacatgtctaaagtttaactccttatttatttattattattattcttagttatgtataccagtaacccagtaactcagttgcccaagctagaaacctgatattcatcctggaggtcctgcaaatctctaactcctctgtcttcccttatttataaccatagtcaatccatccctggccctattcagccacctcttaaataactcccaactttaccctcctctttcagtctctactctcttcccttyctgagttcaactttggcaaaatcctatttgacacctttccctaaaagaatccacagtaatatacagacaaagggcagaatcaagtcttatcaataggaacaattttgtgaagcagtttttataatgtaaatgtcaagtattttatctaaggtacgtaaggctggagccatagtatttcaatgtacacatcattaaaacaaaataatatgaatattagttaaaataattcagaattgtaatgtttaagaacaaaaataatacagaagctaacatttattgagcaat

SEQ ID NO: 92415 - DNA, 746 bp, Homo sapiens
aacattctaagctctcactaaaatatttacttgattaatgctttatgcaacagtgggcaagcctggtgacattgtgagctgtaaagattttagtttcagacttcctggatgaaagcatagcagtgtggttagaggttctaccataccagcactccttagcttgtttttgcaaataaacttttaattttaatatgcaaagcaaatcctaacatcaaaaagtcattatcaaatatttgcattaatattagcaaaggaaatagtcgcaaatagaaaacatgataaaagattgaagtgtggtatgtgatacagatatatttactggttgaaaaaagttaaatagcaacattgtttaatttaagggaaataaacatttcactttacgcaagcatgcttatttcaagcatctatagattcactkttaagaatatatcatatgccagttgttaaacatctctttttatattaaatcagtatatttaactcttaaaagtgcagatatttcacatatagacatatactggcttatgaaaacctaaatttcaaaaagaatttcaccatttgtattagttatctattgccatgaaaaagttactcacaaactcagtagcttaaagtaacaaacatttattaactcacacttcctgtgggtttggtatctgggcacggctttgctgggctttctggctcgcgttttctcacaaagtgtcagcctggtagcagtctcattctaaggttcaactgagata

SEQ ID NO: 92416 - DNA, 1384 bp, Homo sapiens
ttttactttctcttcagtaaaagtaaaaaaaataataatgaaagaaaaataaagcagtcttgcaaccttaatactcagggagacactttgagtcctaaatgagtcatgtgttttagattaaacaatctataactcctctactctttctgtgtgagcagcatttttaaaactctacatttgtcttcctaactcccaactttcaacttgcaagtctttccactcataagttttgtgtacgttgtaaagggatacagaattctaatagagttctgcccttcttttctctgtgtaaataaacctggaatttatgcattaacagggtcatagctagctggaaattataacctaagttattaatgaattgggtataagaggaaaatgatccataattgaaatggctttctctgtgggagtaatgtttcctcttgcattgaccaggcatcctgcactcagagccaaaacttgccctggagtgaaagacaaacaaaacatctttttttttttttttttttttttttttttcataatcagaagttacctctgtagatcttagacttcttcagtgaaaccatgcacttttgaattattagtaagttagggtaattggcattattcatcactgcaaacatttattatttctttgtagtcagaacatttaaattctgtattgtagctattttgaaatatacaatatattattatctatagttatgctactgtgcaatagaacactataagttattcttcctatctaattgtatctttgtacctattggcttgtatctctccatttttctctcccccaacgctcctgcactctggtaaccacaatacaattactactcagttgagttccttatatattattgacattaactccttgtcagacatayagcttgcaaatattttctgtcatttatttacaatagcggtgtgagagcataaacaactgctggtagtattttgtataatagtagaaaataccacagaaattatgcaaattcagtacctttgaccgacagagcagtatttaaaagatttgaatcaaaaaggcctgaggagagtctgtctcactcccactttccacagttctaaacattccatattgtcttaagcatggctgttttccacttacacgttaacctttggactctgaagccatatcccttagaaatacttttgaaaaaatttttgtaaaaaaaaatgtaatccacttcaagttgatttttgtataggtgaaagataagggtccagtttcattcttctacatgtagatacccaattttggagtatccacttcaaaagcaccacttttgaagagactcttcttttttcccaatgtgtgttcttggtatatttgttaaaaatctgtagcctatagatg

SEQ ID NO: 92417 - DNA, 1384 bp, Homo sapiens
ttttactttctcttcagtaaaagtaaaaaaaataataatgaaagaaaaataaagcagtcttgcaaccttaatactcagggagacactttgagtcctaaatgagtcatgtgttttagattaaacaatctataactcctctactctttctgtgtgagcagcatttttaaaactctacatttgtcttcctaactcccaactttcaacttgcaagtctttccactcataagttttgtgtacgttgtaaagggatacagaattctaatagagttctgcccttcttttctctgtgtaaataaacctggaatttatgcattaacagggtcatagctagctggaaattataacctaagttattaatgaattgggtataagaggaaaatgatccataattgaaatggctttctctgtgggagtaatgtttcctcttgcattgaccaggcatcctgcactcagagccaaaacttgccctggagtgaaagacaaacaaaacatctttttttttttttttttttttttttttttcataatcagaagttacctctgtagatcttagacttcttcagtgaaaccatgcacttttgaattattagtaagttagggtaattggcattattcatcactgcaaacatttattatttctttgtagtcagaacatttaaattctgtattgtagctattttgaaatatacaatatattattatctatagttatgctactgtgcaatagaacactataagttattcttcctatctaattgtatctttgtacctattggcttgtatctctccatttttctctcccccaacgctcctgcactctggtaaccacaatacaattactactcagttgagttccttatatattattgacattaactccttgtcagacatacagcttgcaaatattttctgtcatttatttacaatagcrgtgtgagagcataaacaactgctggtagtattttgtataatagtagaaaataccacagaaattatgcaaattcagtacctttgaccgacagagcagtatttaaaagatttgaatcaaaaaggcctgaggagagtctgtctcactcccactttccacagttctaaacattccatattgtcttaagcatggctgttttccacttacacgttaacctttggactctgaagccatatcccttagaaatacttttgaaaaaatttttgtaaaaaaaaatgtaatccacttcaagttgatttttgtataggtgaaagataagggtccagtttcattcttctacatgtagatacccaattttggagtatccacttcaaaagcaccacttttgaagagactcttcttttttcccaatgtgtgttcttggtatatttgttaaaaatctgtagcctatagatg

SEQ ID NO: 92418 - DNA, 1384 bp, Homo sapiens
ttttactttctcttcagtaaaagtaaaaaaaataataatgaaagaaaaataaagcagtcttgcaaccttaatactcagggagacactttgagtcctaaatgagtcatgtgttttagattaaacaatctataactcctctactctttctgtgtgagcagcatttttaaaactctacatttgtcttcctaactcccaactttcaacttgcaagtctttccactcataagttttgtgtacgttgtaaagggatacagaattctaatagagttctgcccttcttttctctgtgtaaataaacctggaatttatgcattaacagggtcatagctagctggaaattataacctaagttattaatgaattgggtataagaggaaaatgatccataattgaaatggctttctctgtgggagtaatgtttcctcttgcattgaccaggcatcctgcactcagagccaaaacttgccctggagtgaaagacaaacaaaacatctttttttttttttttttttttttttttttcataatcagaagttacctctgtagatcttagacttcttcagtgaaaccatgcacttttgaattattagtaagttagggtaattggcattattcatcactgcaaacatttattatttctttgtagtcagaacatttaaattctgtattgtagctattttgaaatatacaatatattattatctatagttatgctactgtgcaatagaacactataagttattcttcctatctaattgtatctttgtacctattggcttgtatctctccatttttctctcccccaacgctcctgcactctggtaaccacaatacaattactactcagttgagttccttatatattattgacattaactccttgtcagacatacagcttgcaaatattttctgtcatttatttacaatagcggtgtgagagcataaacaactgctggtagtattttgtataatagtagaaaataccacagaaattatgcaaattcagtacctttgaccracagagcagtatttaaaagatttgaatcaaaaaggcctgaggagagtctgtctcactcccactttccacagttctaaacattccatattgtcttaagcatggctgttttccacttacacgttaacctttggactctgaagccatatcccttagaaatacttttgaaaaaatttttgtaaaaaaaaatgtaatccacttcaagttgatttttgtataggtgaaagataagggtccagtttcattcttctacatgtagatacccaattttggagtatccacttcaaaagcaccacttttgaagagactcttcttttttcccaatgtgtgttcttggtatatttgttaaaaatctgtagcctatagatg

SEQ ID NO: 92419 - DNA, 1384 bp, Homo sapiens
ttttactttctcttcagtaaaagtaaaaaaaataataatgaaagaaaaataaagcagtcttgcaaccttaatactcagggagacactttgagtcctaaatgagtcatgtgttttagattaaacaatctataactcctctactctttctgtgtgagcagcatttttaaaactctacatttgtcttcctaactcccaactttcaacttgcaagtctttccactcataagttttgtgtacgttgtaaagggatacagaattctaatagagttctgcccttcttttctctgtgtaaataaacctggaatttatgcattaacagggtcatagctagctggaaattataacctaagttattaatgaattgggtataagaggaaaatgatccataattgaaatggctttctctgtgggagtaatgtttcctcttgcattgaccaggcatcctgcactcagagccaaaacttgccctggagtgaaagacaaacaaaacatctttttttttttttttttttttttttttttcataatcagaagttacctctgtagatcttagacttcttcagtgaaaccatgcacttttgaattattagtaagttagggtaattggcattattcatcactgcaaacatttattatttctttgtagtcagaacatttaaattctgtattgtagctattttgaaatatacaatatattattatctatagttatgctactgtgcaatagaacactataagttattcttcctatctaattgtatctttgtacctattggcttgtatctctccatttttctctcccccaacgctcctgcactctggtaaccacaatacaattactactcagttgagttccttatatattattgacattaactccttgtcagacatacagcttgcaaatattttctgtcatttatttacaatagcggtgtgagagcataaacaactgctggtagtattttgtataatagtagaaaataccacagaaattatgcaaattcagtacctttgaccgacagagcagtatttaaaagatttgaatcaaaaaggcctgaggagagtctgtctcactcccactttccacagttctaaacattccatattgtcttaagcatggctgttttccacttacacgttaacctttggactctgaagccatatcccttagaaatacttttgaaaaaatttttgtaaaaaaaaatgtaatccacttcaagtwgatttttgtataggtgaaagataagggtccagtttcattcttctacatgtagatacccaattttggagtatccacttcaaaagcaccacttttgaagagactcttcttttttcccaatgtgtgttcttggtatatttgttaaaaatctgtagcctatagatg

SEQ ID NO: 92420 - DNA, 873 bp, Homo sapiens
atctcctatatacttacttaggtttgaaacagcctctctgcatatgccataatttcatatctatcaattttgaaaaggaaactggcagagttgggaacttttgtgcttcttctagcttgatttcactaaaaattcttaatcattctttaatataaataagaaatagggccaggcackgtggctcacgcctgtaatctcaacactttgggaggctgaggtgggtggatcacaaggtcaggagatggagaccatcctggctaacatggtgaaaccccatctctactaaaaatacaaaaaattagccgggcatggtggcgggtgcctgtagtcccagctactcaggagtctgaggcaggagaatggcatgaacccagttggcggaggttgcagtgagccgagattgtgccactgccctccagcctgggcgacagagcgagactccgtctcagaaaaaaataaataaataaataaaaataaaaaggaaataaaaaagtaggattgaagcactggacaagaattggatagagaatccaaggctcatggaagcaggtttaagggaggaggctctgcagtacttgtctgcgagctacagattgtagatcacccaagcgaatgaccaaaatgtcaatttatctgcgggggtagaaatcaaagagatgataaaataggatatccctcctgtagcctggaaccaaatctctgtcaccttttggcatgttcacaacccaaactctctgtgcttcagttccctcacctaaaaaatgtggctaatagtaataccactttcataacaagtgtgaaaattatggtataccagcacttggaacattgtacgtatcccgtaaacttcagaagtcattcaacctaaactgt

SEQ ID NO: 92421 - DNA, 873 bp, Homo sapiens
atctcctatatacttacttaggtttgaaacagcctctctgcatatgccataatttcatatctatcaattttgaaaaggaaactggcagagttgggaacttttgtgcttcttctagcttgatttcactaaaaattcttaatcattctttaatataaataagaaatagggccaggcacggtggctcacgcctgtaatctcaacactttgggaggctgaggtgggtggatcacaaggtcaggagatggagaccatcctggctaacatggtgaaaccccatctctactaaaaatacaaaaaattagccgggcatggtggcgggtgcctgtagtcccagctactcaggagkctgaggcaggagaatggcatgaacccagttggcggaggttgcagtgagccgagattgtgccactgccctccagcctgggcgacagagcgagactccgtctcagaaaaaaataaataaataaataaaaataaaaaggaaataaaaaagtaggattgaagcactggacaagaattggatagagaatccaaggctcatggaagcaggtttaagggaggaggctctgcagtacttgtctgcgagctacagattgtagatcacccaagcgaatgaccaaaatgtcaatttatctgcgggggtagaaatcaaagagatgataaaataggatatccctcctgtagcctggaaccaaatctctgtcaccttttggcatgttcacaacccaaactctctgtgcttcagttccctcacctaaaaaatgtggctaatagtaataccactttcataacaagtgtgaaaattatggtataccagcacttggaacattgtacgtatcccgtaaacttcagaagtcattcaacctaaactgt

SEQ ID NO: 92422 - DNA, 873 bp, Homo sapiens
atctcctatatacttacttaggtttgaaacagcctctctgcatatgccataatttcatatctatcaattttgaaaaggaaactggcagagttgggaacttttgtgcttcttctagcttgatttcactaaaaattcttaatcattctttaatataaataagaaatagggccaggcacggtggctcacgcctgtaatctcaacactttgggaggctgaggtgggtggatcacaaggtcaggagatggagaccatcctggctaacatggtgaaaccccatctctactaaaaatacaaaaaattagccgggcatggtggcgggtgcctgtagtcccagctactcaggagtctgaggcaggagaatggcatgaacccagttggcggaggttgcagtgagccgagattgtgccactgccctccagcctgggcgacagagcgagactccgtctcagaaaaaaawaaataaataaataaaaataaaaaggaaataaaaaagtaggattgaagcactggacaagaattggatagagaatccaaggctcatggaagcaggtttaagggaggaggctctgcagtacttgtctgcgagctacagattgtagatcacccaagcgaatgaccaaaatgtcaatttatctgcgggggtagaaatcaaagagatgataaaataggatatccctcctgtagcctggaaccaaatctctgtcaccttttggcatgttcacaacccaaactctctgtgcttcagttccctcacctaaaaaatgtggctaatagtaataccactttcataacaagtgtgaaaattatggtataccagcacttggaacattgtacgtatcccgtaaacttcagaagtcattcaacctaaactgt

SEQ ID NO: 92423 - DNA, 167 bp, Homo sapiens
ttccctgagctgtgtcttttctttttcctttgcttttatgattccttttgagtactccaaagtagagtmagaagttaaactcccttgtcacagtgagaggggatgtattagtctgccaatgactcgccatagcaaattaccaccaactgggtggctgagaacagcag

SEQ ID NO: 92424 - DNA, 1001 bp, Homo sapiens
tataattgtatatacaattagttgcacaatggctacaattacaggagctaatattccctggcagaagcaaagctgccaaaaaccaaactggagattagtgtattaatttggttcacagtagattcttctctagtatttctcttgaaagccccaatagaacttaaacaattccaacttagcttgaatcagagaatgacatgtttaaagaaatgcagcattaagcatccaatttgaaaatgtatgttggcgtacacataaataatcttacagtagataaaagtcacacgaacctctcttattttaactgtacatacatagcaggccaaaatcatagacctttctattcagcctaagatttaatgctttggatttatgagaaggtctgtttctggatttgtctcttccacaatttctgcttgagtttcatgaaaaaagtattggccaaaggtggaaaatacaaactcaactaaaccaaagtttcagccttgctgtctcagcttcatttgtgtgcttgcttattaatctctgctttacaaggaaagcgtgaatatgttgtgtgcctcatcactctttggttctctgcatgacctcctatacctttgctcctgaaaggagctttttggcagctgaaaaggtatctttttggcagcacagctgtgcaaggatgctaacatactctccaatcggacacaatgtgttctcttgaccatctaaacaaatgtagaaagatccagctgatttcagccaatagctaattttgatattttcaagttgtaaaaattttatattaatgtatacattgcaatacatggagtgtgggatgcacattccatgtgcacattwaaaaaaaacctttgtactgcagtttttttaaaaatggaatttgaaacttatagacaaattgtgtattgcactatcctaaaatgccacaaaagttacagcttgaaagtaacaatgatagagataagaaatggatattaattaaatggtattttgcaaac

SEQ ID NO: 92425 - DNA, 1739 bp, Homo sapiens
caagccagggacacaccaggggactgggatggttttcagggccaggtaaacataacattttgtgcacaattccatggagttcacaaatcaggtggtccctctctggttaagaatttcttatggatcagaacaaggatctctgaaggatatgctcacagagtgggctgctggtaggtgattagccgggattggaggttggtgggggaagaagtagaaasgggacaggctggatggagtgcaagatgaagagccaaatctggccagcctcactgtcttgcccggggctgatctggacattttaccttagggctgactcagtgctgtggttaacaggtcagaggtaaccgcctcgctcttggaggaatgggaagaatgctggcctgtgggtgaccaaatactgtatagacatacatgcatctctgttttcttctcgttaaactgggatgccaccttcccagaatggcctgtggttgggaggctgggttctgcagctgcagcactgcctcgctccccatccagctctgctgctttctttcgatggaaacatgaacatctctaagcctggacaacctcttaataaacaacagaaatacattggagagaaatacagcaggggtgggagtgaggagaaacctttaagagacttacctgttgaagatcagaacctgcattctccatgctgcgagttgatttttttttaaacgaagtgcccatgtggatctgacatctgctttctgagtttgtgtggatgagacacacactctagagtctgtcagagaagattctagagaatagaactggtctcacctgggatcatgcaagacaaatcaatagcagctgttaagataattgtatataggactatagtcttgggaaaccacaatatgctaatcacttgatttaattttgtgactatctgcagatgtggatatgaatttaaattgcaacctcacaatgttgtgtctacaggtacaggttaaactgaaggaaggtggaagggtttaagagcctatctgttaaatttcaagtctcaagtaagccaagtcaatgtaagtcattgctgatttggagcaagtctttgtaaaacgtacctgatttgctttagcattgtgagttctcttaattgatgcttgcctaattttgtgggacttggtttcaaattttacaatggcttttgactccactccccattcttgtacataataggtacaacaaaaattgcttgaataaactagtagagcgaaagtatttccatagctcctaaagaccagattctgaatatggtaaatatggcagcaaccaaagggccaagccaaaactaggttctgctcagtcattctacctctcttgggagcctttaaaataatgaacctacagctttttttgggttaagaatgcctctgagtcttgatgaaattattgctccctctctagatgatgcaggtaaacacacattttgtgcaaaattccagggagttcacaaatcaggtggtccatcactttgggaggctgaggtgggcagatcacttgaggtcaggagttccagaccagcctgaccaacatggtgaaaccctgtctctaccaagaatataaaaaattagacaggcatggtggcatgtgcctgtaatcccagctacttgggaggcagaagttgcggtgagctgaaatcacaccactgcactccagcctgggtgacagagcaagactgcgtctaaaaaaaaaaaagaagaattttttaa

SEQ ID NO: 92426 - DNA, 1102 bp, Homo sapiens
cataaattggaacgccttgattaacagtgatgtcagcttctacttagtgcctgcaaagaaagtttctttcgtgtgagaagtttacgacggctgccccaggatgctaaatgggtttttatctcagggacagggaggggtggctggggaactaaagagtagtggatgatcttaacaaatgaaaaaggataatgataccaattcaggcttcccaaacaaagatgactaaccacactaagagaaagctagcagtgtgcaagcacgtgatatactaaatgttgttgttgtgtgtgtaaaatgacatttctaaaaacattttgcctctatgagaaaacaaaatataaatttgttcttttctcctttccctgtggaaaagtctgtactactattaaataaggccagaacattttatctttttatttgacagattctcccgctctccttattgaaaataacttaactccaggaactgcacagcctctccacagattctaaataatcatgactccatagattatccacgagcagctgtgaggggcacaaagattttcctagaacagagtggggagcattctgcagcagcctagaggcagcttttccccagccctcaagtgatttttaagagccagccggtctggaaaatgtcgaatttgtttgtaggaaaggtaaacactgccaaaatccacaagttccttccgtagggggctgtagagcaaattggtctacagattaagatagttgagacaacttatgttggagaagtgaaccccttcggcactggggatttcccccagaactgtattagaaagctgataaatctctgctggaggaattacgaactgtatactcaagaggtaaaggaaattagaatggatctcttctataaatatcttagacaaagtgaatttttaagtgaaaaagtaggccrggaggtttagtgaattgggttaaatgtctcagccacaagggctagattgcttgttctgtgtgacttcactgtgattagaactatacgaaatggtttcataggtgattggttacaagtcaagtaaaatgctttgattaaagtggaactggtaaaaatttcctgcatgtcctgtaattg

SEQ ID NO: 92427 - DNA, 582 bp, Homo sapiens
aaacccaggtctcccgacccccaagccatgttcttttgctgaactatgtagtctgagatgaaagtgacctaaggtctcacagcaaatagtgacaactccgggccttaagtcactacctgactcttccagtgctcttcccctccacaagccacctccctaaggtggaagtatgacaccgtaacaggacgaagagaacatttttggtaggcggacccttccaggatgccttcaaatgacatctcttttggtggcttycctggtctgccaataaaagtgggtcttagcacctgagctgaagatagagagagtggaaagaatgggggttatttgggtttccatcaaaaataattcagaacattaggacccagttctcacccagattctgcacagtttctatacccttgcgtgctcaatgctttgaaagaaggaaatgggtgctctggccagaatgactctgcaaaaggatgtgtccaggtgcctatccctggctgctccttgccccaggacaccccagctcccaagcctgcaggtgaaggcaagcagagaaaaggacccaaagaaaaacagaagacccaggaacca

SEQ ID NO: 92428 - DNA, 665 bp, Homo sapiens
tttgaagtaaatgaaactgagctctgagcatggccacattgggtagttctaagttattttctgttttgttctctgtgattctccaaactatctttaaattcttactaaaagttacatctgaaactcgactccactgtgggaaattgaagggccaatatcacacttggaaaagaataacgaatacttagaagcagtggttttaccaccatcataaattgatgtccccacctatagctgtattcccagctaaatctaggcctgggacattaaacctccacgaggaaagtggtgcaatgattcagatactggtgtttrcaaagtgttttacatacagaattgttagaattgtctttagaagataggtttatctaacatcttgcatctattatatgtactaataccattttcttatggggtctcctagttgacttaagttactttttcttgctccctgtatgttgctttgtggaaatgcttttcactgggaaaggcagtagttacctaaccttaaagttcagcaatactggattgcagttttgacccagggtagacaaccagtttcttatacctttggacatatgatggtccaaaggcagataaaagagcataacagtgtcaatcaatgttcttttcagtcccccgacccagtggatattggaaggtct

SEQ ID NO: 92429 - DNA, 1003 bp, Homo sapiens
actgcaatggtagaaaatacctattcagccttcactcagagcttgtttgtccttattttaggcttagttttaataggcttgatgatctgattggctagagattaggagcagtatatggaagtcaaacattgtcactggtaaaggatggcatgttgactgcaaatgtaatcactgacagcctgaaagtgaagaaggaaatagataaactataaaaatcagaagcaagatcttaaagatcaaaatataggccactggaggaaacaagagtgcaggggtaagcaaatgtaagcatctcagtagcttcagaagctgttactgtgtttcccccaatttacagtagctattttttgatctttctactcagaatctaagttctactagggctgagaccatgcctgccccatatgatactgttatctccaggacttaatgttgtacttgactcatagaagaggctccctaagtattttcctagtaaatggaaataaataaatgagtaggtttgctatggtgatctatgtttatgataatgaccctgagatatttctgattaaaaacagaggcagttggtttttttgcattttagatatatgtaatctcaaaaaatgttggtgtataaagccttattaaacatgcttaatatatattcattcattcctcagtgacctcctctctaacactgctgcactctcccctgcctagtttatatttaaattgtcttaaaatcatgggatttaattttcagattataaatactcatatatgtagatatatactaaaatattttgaatcatctrccaatgtatactataccattgctatgtaaacacagcatcttttaaggtcttgaaaaatgttcagatagatttttgtctatagatagtagaaatctgtgtataccaatttgaagctatctctttctgtatagctaatgcttttatagttaattgttctttaatagatcataatgatttccttgggtcatgatatatttattaaaata

SEQ ID NO: 92430 - DNA, 674 bp, Homo sapiens
gcattttaatttgtgcttaactagttctcgcaccataccagatcctcagattggcactttagagatgattagctaagtgttcctctgtgttagccacagggtctaggaaagataaggagaatcaataggaccaagccagtttatgatgagaaaattcattctccatcaacggtgttggccaactcatsatgctgcctgttctgagaagaagcagctctgctcatgtttctctgtgcctcattaatgtgtcagtggttctgccctggctgtcaaatgactttactgttgtgtttttttagttttcaggactttatctcctgtctttcttcaccatcctcattgggctggtgctctactcctccacctccacctacatagcccaggacccccgagtgtataagcagttccgcaatccttcaggacctgttgtggacttaccgaccacagctcaggtggaaccctcagtcacctacaccagcctgggccaggagaccgaagaggagcctcatgttcgtgtggcctagggtgaggcccgccctgccaactgaggccaactcattggccatgtttttgcccatcatctctgtattgtacatagagaaaggtatttactaggtgcagtttacacaggtggactgcaaggtagcaaatcctccaaaagcttgtgaaaggaa

SEQ ID NO: 92431 - DNA, 578 bp, Homo sapiens
ttgggccctcacttgataaatagaagggtttatcagccttacagctagacagtaggaagctacttcagaggccaagagatagatagccataatgatatctacaagcacaatgaactgcagctaagtcatccaagtcaaggtttgccacccttcagctggttagcatggagacacaataccagttctcagtagtgttcagcccaatcgacccctcccattttccaagacactcccctcccactatggtyttgtctagtctcaacttccttctcttctcctgcatcccctggggatgaggtggagaaagaattggtatgaatagatttgctcattcaaagaactgattgttccaactgaaacctcataactttacaccaaggtgtaacaacaattctgatttctgttcatggttggtgttcttgtttcttttatgaaaagggaaattggagctgggcatggtggtacatgcctgtaatcctggagctttgggagtccaaggcaggaggattgcttgagcccaggagtttgagacaagcctgtgcaacatagtgagaccttctctctaaaaacaaaactta

SEQ ID NO: 92432 - DNA, 520 bp, Homo sapiens
taattgcaaagagaacacttttyagcagcaattagaagaaaaattaaaagtaaaatactgttagctgacaatgtttgcaaaccacacatgatgaaataggctgtattcagagtggtagactaaaggaaaacaaagttcctagaaagaggctggacttctcttgtatgagtcagaagcatcaccctgcaactttacaatatgtctaagactaagagctaataaatataactcaggacctaaaggaaggaagaatacagtaaaacttatccaagaatatctctgcaaggtggggactaggtcggttgccaacatctttatgaaagaataaactataatcagaagtttgcctttaaaaatttattttgctggttggaagggaaaaattactgttcctacttctagaactataaacttacaacatattcagccaatttaacaatttagttaggattatatgtggtttgtgactgactgttttttcttcttgtgtcttaatgcttttcaatgttgttgcattatt

SEQ ID NO: 92433 - DNA, 471 bp, Homo sapiens
tgaggcaggagaatcacttgaactcagaaggtggaggctgcggtgagccgagactgcgccactgcactccagtgcgcgggcaacaagagcaaaactccatttcaaaaaaaaaaaaaatcacttctcaaactaaagttctttacctggttatttggatggtgaaggaaaactgttacacatcctgttgatgaagcagcgacaattctttcctggtcaaaaaactaaagagaaaatttctgcttgttaaagattcagaaatattagcagggaggaagtccatttgtttatttaactcaattagtagcaaatcttataacaattttaaaaagcaaagagccatgagtgcwaaggaaataaaatgtgttaatgaagctgaaaggccaaactgccatacaaagtattttcatgaataaacaatattttttcctagacacattcacccacaattgatttaatttgggaccaacacaa

SEQ ID NO: 92434 - DNA, 539 bp, Homo sapiens
gaatactttttttcatgataccaaaaaaaaaaaaaggctactattgaatttatcagtctccagacaatctaggtgaataagatttaaactaaaaataggcatttttattttagaataatccaatacatgagtgttaaggtgtatgttgagggatttgcttctatttstacacatgaagaacaatgaataaatctgacaaaattgagccatctcagttaactgaattataacctctaagggctaattcaatatgcttaagtattttccagaggaaagaaagcaacatttcaagacttcacaactccacatctataattcatcttgtgtagtgaggagtaccttgttttccagaaagtcttgcttggctggttagtttccagagatgccctttaacactaagttcagagggaaagattcgaaagtttctccatatgttgatgtggagctattaatgtggtattgcctctaaaaatgtcaaggtactatttaatattctcatttaattaaatagagagtgttataggacatacatttgccca

SEQ ID NO: 92435 - DNA, 680 bp, Homo sapiens
cttatattattattgtattctatattactcttatattattatcatgtgtattgggatggctaaaataaaagtattggtgagactatggaagcacatttaatgtagtaggcactatactagaatcagttaaaacgcaatagaaggaagtggagaaagccattgtaggaacctccttcgagaattatttgtttcattttgggtgggttctactgataagtctacaattaattaatcttttytttgtctacatctaatctgctgtttatcccagtctgtatatttttcaccggacgcgttttggtttttatatctgggacttcaacttgggcctttttaaaacatattttgtgcctctgcttaacactttgaacatatatagttgttgcaataattattttaatatatttatcttccaattctgtttcagcactgggtattaattatgtaattgccacactaccctgaatgcacccaatgtattatctcattatgggtcatatgttcctgcctctttgcatgcctatcttgaattgtatgccagacattgtatattttatctcattcagtgctggatatttttctctcataataaatccacttgggctttgttctgggacatagtttagttacttggaaatggtttgatactttcaggtcctgatattaaaatttgctaggta

SEQ ID NO: 92436 - DNA, 680 bp, Homo sapiens
cttatattattattgtattctatattactcttatattattatcatgtgtattgggatggctaaaataaaagtattggtgagactatggaagcacatttaatgtagtaggcactatactagaatcagttaaaacgcaatagaaggaagtggagaaagccattgtaggaacctccttcgagaattatttgtttcattttgggtgggttctactgataagtctacaattaattaatcttttctttgtctacatctaatctgctgtttatcccagtctgtatatttttcaccggaygcgttttggtttttatatctgggacttcaacttgggcctttttaaaacatattttgtgcctctgcttaacactttgaacatatatagttgttgcaataattattttaatatatttatcttccaattctgtttcagcactgggtattaattatgtaattgccacactaccctgaatgcacccaatgtattatctcattatgggtcatatgttcctgcctctttgcatgcctatcttgaattgtatgccagacattgtatattttatctcattcagtgctggatatttttctctcataataaatccacttgggctttgttctgggacatagtttagttacttggaaatggtttgatactttcaggtcctgatattaaaatttgctaggta

SEQ ID NO: 92437 - DNA, 680 bp, Homo sapiens
cttatattattattgtattctatattactcttatattattatcatgtgtattgggatggctaaaataaaagtattggtgagactatggaagcacatttaatgtagtaggcactatactagaatcagttaaaacgcaatagaaggaagtggagaaagccattgtaggaacctccttcgagaattatttgtttcattttgggtgggttctactgataagtctacaattaattaatcttttctttgtctacatctaatctgctgtttatcccagtctgtatatttttcaccggacgcgttttggtttttatatctgggacttcaacttgggcctttttaaaacatattttgtgcctctgcttaacactttgaacatatatagttgttgcaataattattttaatatatttatcttccaattctgtttcagcactgggtattaattatgtaattgccacactaccctgaatgcacccaatgtattatctcattatgggtcatatgttcctgcctctttgcaygcctatcttgaattgtatgccagacattgtatattttatctcattcagtgctggatatttttctctcataataaatccacttgggctttgttctgggacatagtttagttacttggaaatggtttgatactttcaggtcctgatattaaaatttgctaggta

SEQ ID NO: 92438 - DNA, 1070 bp, Homo sapiens
attgtaatattaggggaaaagcatggtccagattttacacatctacggattataactttaaataagctgagcttgattgtagtgatagggacaggaggcagggagattctgggaagatgagggcaggtctctggcgagggcccaccctcaatccgaaaaatatgaagctgtggcccaaagtgagaacttacatccctgttttcctgtttgaatgttcccttttccaaaaaaaaaatccatggcctgatgtacccaccatcctgtgcccataaaaaccccaagctcagccatcatagagaagagaagcaggtgggtgtaggagactgtggttggatgacattggagagaagtggcttgacttcagagggagagcttgatggcataacttcggagaagaaattggccagaggtggccggacttcaggggaagattagcttcccacactatctccttttcaggtccctttccattggcaagaaaatcatccgcatttaccatccttcaattcattcatgagacctcatttctcctaggacattggacaagagcttggataccaccaagcgaaagactgtcatactgaccctttgccctcgctgttggaaggcagccacctcacatgaaaaggcagagggtccactgagttgttaacccttccaccatccatggacggccgagctaaagagcactgtaacactccctctggggctaccgggtttgcgggcacccccacagatgctgctgcagggctggcacatagttaactcctgccagcacccaaagattctgccygctcctgtacctgctcacctgagtgaccccttccatgaggggtggatgcagggggtccaactgagtgcagttcacccctgccggcaccagagcagccagatggctcaaacgctggtgtactcctgttcacgcctcactggctcaggcactccctcctgcgaggagttgagagctgtgggctgagtaaacccggcactaccttcacgagtcccaccaagaggtcaggggaatatcctgcttcgttaagtcctgaaactaagtataaacatgtacttca

SEQ ID NO: 92439 - DNA, 674 bp, Homo sapiens
aaaatagatttagaaaagggcgttgtggctggaatgcagcttgcagtgtggagggcagggatgggagggtaaagagggctctttgaaagaccagtgtcactttcctgatcaagtttcttaagctgatacttccctggaaggagtcagaacttgggtttgtaggagtagccctggcctccagctgcattgtgctagactcaggtttgaagccccaaatctaagtagtcccccctttgataaattcccggcygggtgcagtggctcacagctgtaatcccagcactttgggaggccgaggcagttggatcacctgaggtcaggagttcaagaccagcctggccaacacggtgaaaccccatctctgctaaaaatacaaaaattagctgggcgtggtggcaggcgcctgtaatcccagctactcgggaggctgaggcaggagaatcgcttgaacccaggaggcgagatcatgccattgcactccagcctgggtgacagagtgaaactctgtctcaaaaaaaaaaaaaaagaaaagaaaattcccttactgtgcctacttgcccctctgcccttcctttctgacttcatgtgcctcagggcgtaggaaagcatccacagtagaaagataaattgagaaattgctccttcccagtcttcagaccagagacacagtttag

SEQ ID NO: 92440 - DNA, 674 bp, Homo sapiens
aaaatagatttagaaaagggcgttgtggctggaatgcagcttgcagtgtggagggcagggatgggagggtaaagagggctctttgaaagaccagtgtcactttcctgatcaagtttcttaagctgatacttccctggaaggagtcagaacttgggtttgtaggagtagccctggcctccagctgcattgtgctagactcaggtttgaagccccaaatctaagtagtcccccctttgataaattcccggccgggtgcagtggctcacagctgtaatcccagcactttgggaggccgaggcagttggatcacctgaggtcaggagttcragaccagcctggccaacacggtgaaaccccatctctgctaaaaatacaaaaattagctgggcgtggtggcaggcgcctgtaatcccagctactcgggaggctgaggcaggagaatcgcttgaacccaggaggcgagatcatgccattgcactccagcctgggtgacagagtgaaactctgtctcaaaaaaaaaaaaaaagaaaagaaaattcccttactgtgcctacttgcccctctgcccttcctttctgacttcatgtgcctcagggcgtaggaaagcatccacagtagaaagataaattgagaaattgctccttcccagtcttcagaccagagacacagtttag

SEQ ID NO: 92441 - DNA, 674 bp, Homo sapiens
aaaatagatttagaaaagggcgttgtggctggaatgcagcttgcagtgtggagggcagggatgggagggtaaagagggctctttgaaagaccagtgtcactttcctgatcaagtttcttaagctgatacttccctggaaggagtcagaacttgggtttgtaggagtagccctggcctccagctgcattgtgctagactcaggtttgaagccccaaatctaagtagtcccccctttgataaattcccggccgggtgcagtggctcacagctgtaatcccagcactttgggaggccgaggcagttggatcacctgaggtcaggagttcaagaccagcctggccaacacggtgaaaccccatctctgctaaaaatacaaaaattagctgggygtggtggcaggcgcctgtaatcccagctactcgggaggctgaggcaggagaatcgcttgaacccaggaggcgagatcatgccattgcactccagcctgggtgacagagtgaaactctgtctcaaaaaaaaaaaaaaagaaaagaaaattcccttactgtgcctacttgcccctctgcccttcctttctgacttcatgtgcctcagggcgtaggaaagcatccacagtagaaagataaattgagaaattgctccttcccagtcttcagaccagagacacagtttag

SEQ ID NO: 92442 - DNA, 674 bp, Homo sapiens
aaaatagatttagaaaagggcgttgtggctggaatgcagcttgcagtgtggagggcagggatgggagggtaaagagggctctttgaaagaccagtgtcactttcctgatcaagtttcttaagctgatacttccctggaaggagtcagaacttgggtttgtaggagtagccctggcctccagctgcattgtgctagactcaggtttgaagccccaaatctaagtagtcccccctttgataaattcccggccgggtgcagtggctcacagctgtaatcccagcactttgggaggccgaggcagttggatcacctgaggtcaggagttcaagaccagcctggccaacacggtgaaaccccatctctgctaaaaatacaaaaattagctgggcgtggtggcaggcgcctgtaatcccagctactcgggaggctgaggcaggagaaycgcttgaacccaggaggcgagatcatgccattgcactccagcctgggtgacagagtgaaactctgtctcaaaaaaaaaaaaaaagaaaagaaaattcccttactgtgcctacttgcccctctgcccttcctttctgacttcatgtgcctcagggcgtaggaaagcatccacagtagaaagataaattgagaaattgctccttcccagtcttcagaccagagacacagtttag

SEQ ID NO: 92443 - DNA, 674 bp, Homo sapiens
aaaatagatttagaaaagggcgttgtggctggaatgcagcttgcagtgtggagggcagggatgggagggtaaagagggctctttgaaagaccagtgtcactttcctgatcaagtttcttaagctgatacttccctggaaggagtcagaacttgggtttgtaggagtagccctggcctccagctgcattgtgctagactcaggtttgaagccccaaatctaagtagtcccccctttgataaattcccggccgggtgcagtggctcacagctgtaatcccagcactttgggaggccgaggcagttggatcacctgaggtcaggagttcaagaccagcctggccaacacggtgaaaccccatctctgctaaaaatacaaaaattagctgggcgtggtggcaggcgcctgtaatcccagctactcgggaggctgaggcaggagaatcgcttgaacccaggaggcgagatcatgccattgcactccagcctgggtgacagagtgaaactctgtctcaaaaaaaaaaaaaaagaaaaraaaattcccttactgtgcctacttgcccctctgcccttcctttctgacttcatgtgcctcagggcgtaggaaagcatccacagtagaaagataaattgagaaattgctccttcccagtcttcagaccagagacacagtttag

SEQ ID NO: 92444 - DNA, 674 bp, Homo sapiens
aaaatagatttagaaaagggcgttgtggctggaatgcagcttgcagtgtggagggcagggatgggagggtaaagagggctctttgaaagaccagtgtcactttcctgatcaagtttcttaagctgatacttccctggaaggagtcagaacttgggtttgtaggagtagccctggcctccagctgcattgtgctagactcaggtttgaagccccaaatctaagtagtcccccctttgataaattcccggccgggtgcagtggctcacagctgtaatcccagcactttgggaggccgaggcagttggatcacctgaggtcaggagttcaagaccagcctggccaacacggtgaaaccccatctctgctaaaaatacaaaaattagctgggcgtggtggcaggcgcctgtaatcccagctactcgggaggctgaggcaggagaatcgcttgaacccaggaggcgagatcatgccattgcactccagcctgggtgacagagtgaaactctgtctcaaaaaaaaaaaaaaagaaaagaaaattcccttactgtgcctacttgcccctctgcccttcctktctgacttcatgtgcctcagggcgtaggaaagcatccacagtagaaagataaattgagaaattgctccttcccagtcttcagaccagagacacagtttag

SEQ ID NO: 92445 - DNA, 683 bp, Homo sapiens
tggccttctttagatggggccccttactctatttcttcatccttttctgtgtttgagcwgaaaagaaggaaagttgtaggacctgagatctttgcatgttttagggagacagtcccagggaagggtgctccacacaaaaagtagttttgacaaacaggaagcaatcttgctgcaatggagaaggagcaattcccacagctgtggttcccaacttcactgctgggcttttggctacctgatgtatacaaggaagaaattgaagatttttctgtaggtcagaatgggggaaaccaaagtcatattaaatgataataggtggcatctggagaacttgcaagaggatgtaacagacacatcctaattgcacagcttttaatgttgccccatatggcatttctttgcttatgactggacagacaaagatattgagccaattgcatgtttaaatgctgaggtaacgtgttgtttttatttgcttggcgtgggttgtgcatgctccttcttctggtaacaatgctaactgcccctcacccactcagcctgattactctctgccttgccatggagtggatgttagacgcaggtctggtaaatcctagtttccaaatgccagcaaagtgactgcccaggtttgggtacatggccaaggcagcccactctaaggtgtgccataggaaattggc

SEQ ID NO: 92446 - DNA, 683 bp, Homo sapiens
tggccttctttagatggggccccttactctatttcttcatccttttctgtgtttgagctgaaaagaaggaaagttgtaggacctgagatctttgcatgttttagggagacagtcccagggaagggtgctccacacaaaaagtagttttgacaaacaggaagcaatcttgctgcaatggagaaggagcaattcccacagctgtggttcccaacttcactgctgggcttttggctacctgatgtatacaaggaagaaattgaagatttttctgtaggtcagaatgggggaaaccaaagtcatattaaatgataatasgtggcatctggagaacttgcaagaggatgtaacagacacatcctaattgcacagcttttaatgttgccccatatggcatttctttgcttatgactggacagacaaagatattgagccaattgcatgtttaaatgctgaggtaacgtgttgtttttatttgcttggcgtgggttgtgcatgctccttcttctggtaacaatgctaactgcccctcacccactcagcctgattactctctgccttgccatggagtggatgttagacgcaggtctggtaaatcctagtttccaaatgccagcaaagtgactgcccaggtttgggtacatggccaaggcagcccactctaaggtgtgccataggaaattggc

SEQ ID NO: 92447 - DNA, 722 bp, Homo sapiens
tatatcaattatcatttaaattcaaggccatcttcttcaacttaaatcagatggaccactggaggtgactttttttttttctagttttcagcacagcttattcctagacatcccttgagcagcccacctgtgcagccacaagtttttccttcttccctccccctccccagtcccctttccctaccgagtaccttcctgttctgcaaacacagctatgtcttctcttcttcattattcaacaatgagaggtgtctattaaaaaaagctargggcaaagtgcattatttgtatttataatggcccctctttctcacctgaagatgaatttgccttttttaaaaaactggttttggggaataaataattctccggagtagtctgaaattcacaaagaagtagcctctgggagactgtaatgggaattttggttccaaagtttttatttgtctcttatgattttactgttttcaaaatttcattggaaaaaaatgggggcaaagtaaggcaatttccaactctcttttttttaaaaaaataattttttagcagtttaatcactgttgtaccttcattaggagaaaagaatacgatttaattaccgtgagtcactgcaagggccaaagcaaagctgtctggaggtttgcaggcatcgggcttcgtgcacttcagctgcctgcacagacacgcccttgaccaggagtaacgatggaggcccaggaaaa

SEQ ID NO: 92448 - DNA, 1462 bp, Homo sapiens
aatggggaagcaggattcagaccaggctggttagccccatggcctggcttttcatccctaagaggcccaataaaggatgtacagaggaaaaagaaaagcccccaaaatctcatcctcttccagatcctccagtgcccccacctctgaacatgcttctgtggggaagaccttgctcagggaatcacagccacagctggacccgcggaccccacagctccttatcctccttagcaccagatcacctgggaaccgtggcctygtctgagttttcaagacagcttgctgtcctctgaactccagggccacgtttctggctccccaaagggtggttccttttctcttctccaccatgacgcttggacaagctgctgctatgtgaacacagatggactctggcaagtgcttttattggaaaatggtcattctgatctaaggcttccctttagaagtaggaggcaaatagcccagaggttaagggcttcaggttaggggttaaattaactggggttcaaatcccatcgccatcctctgctagctgggtggccttggacatgtgccctaaattgtctgtgtgcctcagttccctcactggtaaaaagggaatcatactgcctacttcatagagttggtgggagaatttaacataaagtgcttagcttagcacgaggctcataagaagtgttcaataaatggtagctattattatcatttattacaacgaggtccaaattagaaagcacaatctgcccttcctctccaatgctctcaaaagccacggctccaaggatcctaagaaagaaagctctttacatttcatattttatgttcaaaattcatgtgatttttacattctacttctgtgttttctgggagaaagcatttccatcttaaacccaaggcaaatggttaatatcttagcatataaaaagttttctaaaataacaagaataaaagattcataaacctgattttgaaaatagatgccaaacacagagtttagattaaaagaaaggtaaatggccacttgatatataaaaataggctctgcctcagtcctgataagagaaagataactggctgggtgcggtggctcatgcctgtaatcccagcactttgggaggctgaggtgggtggatcacgacgtcaggagatcgagaccatcctggctaacatggtgaaaccctgtctctactaaagatacaaaaaattggccgagcgtggtggcgggcgcctgtagtcccagctactctggaggctgaggcaggagaatggcgtgaacctgggaggcggaccttgcagtgagccaggatcgcgccactgcactccaacctgggcgacagagcgagattccgactcaaaaaaaaaaaaaaaaaaaaaaaaaagataactaaaactaccctgaaatgtcattttttacccatcatttaaaaaatgcagacattgtaaaacacagtctgttgga

SEQ ID NO: 92449 - DNA, 1462 bp, Homo sapiens
aatggggaagcaggattcagaccaggctggttagccccatggcctggcttttcatccctaagaggcccaataaaggatgtacagaggaaaaagaaaagcccccaaaatctcatcctcttccagatcctccagtgcccccacctctgaacatgcttctgtggggaagaccttgctcagggaatcacagccacagctggacccgcggaccccacagctccttatcctccttagcaccagatcacctgggaaccgtggccttgtctgagttttcaagacagcttgctgtcctctgaactccagggccacgtttctggctccccaaagggtggttccttttctcttctccaccatgacgcttggacaagctgctgctatgtgaacacagatggactctggcaagtgcttttattggaaaatggtcattctgatctaaggcttccctttagaagtaggaggcaaatagcccagaggttaagggcttcaggttaggggttaaattaactggggttcaaatcccatcgccatcctctgctagctgggtggccttggacatgtgccctaaattgtctgtgtgcctcagttccctcactggtaaaaagggaatcatactgcctacttcatagagttggtgggagaatttaacataaagtgcttagcttagcacgaggctcataagaagtgttcaataaatggtagctattattatcatttattacaacgaggtccaaattagaaagcacaatctgcccttcctctccaatgctctcaaaagccacggctccaaggatcctaagaaagaaagctctttacatttcatattttatgttcaaaattcatgtgatttttacattctacttctgtgttttctgggagaaagcatttccatcttaaacccaaggcaaatggttaatatcttagcatataaaaagttttctaaaataacaagaataaaagattcataaacctgattttgaaaatagatgccaaacacagagtttagattaaaagaaaggtaaatggccacttgatatataaaaataggctctgcctcagtcctgataagagaaagataactggctgggtgcggtggctcatgcctgtaatcccagcactttgggaggctgaggtgggtggatcacgacgtcaggagatcgagaccatcctggctaacatggtgaaaccctgtctctactaaagatacaaaaaattggccgagcgtggtggcgggcgcctgtagtcccagctactctggaggctgaggcaggagaatggcgtgaacctgggaggcggascttgcagtgagccaggatcgcgccactgcactccaacctgggcgacagagcgagattccgactcaaaaaaaaaaaaaaaaaaaaaaaaaagataactaaaactaccctgaaatgtcattttttacccatcatttaaaaaatgcagacattgtaaaacacagtctgttgga

SEQ ID NO: 92450 - DNA, 1126 bp, Homo sapiens
atgagagaacatagacaacatcacaggaaataataaaagaaatccagaacattatagaatttagcagaaggctatattcactcagcagtcctgtttctgaatctgtactgaggcagaggcactgggccctgtgctaggaggctagcaaggttaagacatgactttaagagcaatacaagtgtgaggcttacagtgtgcttgggcttgagagacagaaacaggtcaaaatcstggtctaaccatttaccctgtggccttaagaaaatgactgaacacttgaaagactagtgtcctcatttgcaaaatggatatattaaaagtgtcaggatgtgttccttgtaagtttctgtgaagattctatcaggtaatgcatgcaacacactttgcacaattacctggatcagagtaaatttttatcctttttattataattataaataaattacaaagattataaaaatatgtacatatgaaaacatgacttataaaagcttggcagtccgtggataaagaaaaaattaagcaaaacctcaaagaaataatcagacctagaacatggaatatttttcaagacaactggaattatcttttcaaagagtcaatgtcattaaaaccaagtaaaggggcaatttcaatttaaagatataacaaagaaatgcagtccgtgaaacttgttgggatcctggttagaaaacaaatgagctataaaagacatttgccatagattaagtatgaacatgaccgggacataagacaagaaattacatcatactcttagctgtgatagtgatccatactttcaatgttcatattttctttttctctttcttttttttttttttttttttgagatggagtctcgctctgtcgtccaggctggagggcattggcacgatcctgactcgctacaagctccgcctcccaggttcatgccattctcctgcctcagcctcctgagtagctgggactacaggcgcccaccaccacaccaggctaattttttgtatttttagtaaagacggggtttcaccgtgttagccaggatggtctcgatttcctgacctcatgatttggctgccttggccttccaaagtgctgggattacaaggcatgagccaccaccccc

SEQ ID NO: 92451 - DNA, 1632 bp, Homo sapiens
agagtcttccttgaaaatgctttcaggaggctgtgctgtccctggcagggcaaggtgctttgtagcaggattttcccctcttatggtggttctttagaaaggccattacttggctatgcctgtaatctcagcactttgggaggctgaggcgggtgaatcacgaggtcaggagatagataccatcctggttaacatggtgaaaccccatctctactaaaaatacaaaaaaaaaaaaaaaagccaggcatggtggcacgggcctgtagtcccagctactcgrgaggctgagcagaagaatcgctggaaccagggaggcagaggttgcaatgagccaagatgatgccactgccttcagcctgggcgacagagcaagacttcgtcaaaaaaaaaaaaaaaaaaaaggctattgcaagatccaggcatatacatagtaaaccatagataccacatcaatgattgatgggaatttactaaacagaatgccatttaggatacgatgaaatcatgcctagtgtaacatctgccttcttaaaaacaaattcagagtatcattaaaaaaaaaagtacaagaaaaataagaccatatgtagaagtttgtaactaagaacatatgtcagtgaaaagaaaacctaatagcatattttattactaattgtttaaatcaatatgtaatacataagccttttgtcccaaatgctgttgccttccatagcatctaaaaataaataccatctttcattgaatctaagactccatcaatcataagatgagctgttattttatgttcagcactgccccgctcattcaccctcctattcttttctgcctgcttctggcagccagatcattcttccaaaacacagatctgattaggcccaatccctgcttgtggccctttggtggcttctggggtcctcagaattaagtccagatgctgtggcctggcacccatgccctgcactgtgggaatcctctgtgtcctcccactcggcccttgtggcagtgagacccagccatctgcaggtcctcagatcgccatgcgcccctttccttattttatgcactatcaataaagaaaaatatgctgccaattaactgtgacccctgattgtaaagcattatgactgccctgcctcttcacctccaccaggagagtctgaacatagagtttctctctagaatagtggttctcaactgggggtgcttttgcttcccccttgcccgaggggatgtgggcaacgtctagagacattttcacttgtcacaactggggtactggtggtactggcatctcgtgggtagagctcagggttgctgccaaatctcctccaatgcacagggcaactttcaacaaccgagagtcatcagcccaaaatgccagtagcaccagtgttgagaaatggtgctctagaacgtacaagaattgcttgcacatctcctccaatgcacagggcaactttcaacaaccaagagtcatcagcccaaaatgccagtagcaccagtgttgagaaacggtgctctagaacgtacaagaattgcttgcactttttgtattctgctgccatgagtactatcatcttctggattttctttgcttttttttctgtagagcattgatcttaagcactgggc

SEQ ID NO: 92452 - DNA, 1632 bp, Homo sapiens
agagtcttccttgaaaatgctttcaggaggctgtgctgtccctggcagggcaaggtgctttgtagcaggattttcccctcttatggtggttctttagaaaggccattacttggctatgcctgtaatctcagcactttgggaggctgaggcgggtgaatcacgaggtcaggagatagataccatcctggttaacatggtgaaaccccatctctactaaaaatacaaaaaaaaaaaaaaaagccaggcatggtggcacgggcctgtagtcccagctactcgagaggctgagcagaagaatcgctggaaccagggaggcagaggttgcaatgagccaagatgatgccactgccttcagcctgggcracagagcaagacttcgtcaaaaaaaaaaaaaaaaaaaaggctattgcaagatccaggcatatacatagtaaaccatagataccacatcaatgattgatgggaatttactaaacagaatgccatttaggatacgatgaaatcatgcctagtgtaacatctgccttcttaaaaacaaattcagagtatcattaaaaaaaaaagtacaagaaaaataagaccatatgtagaagtttgtaactaagaacatatgtcagtgaaaagaaaacctaatagcatattttattactaattgtttaaatcaatatgtaatacataagccttttgtcccaaatgctgttgccttccatagcatctaaaaataaataccatctttcattgaatctaagactccatcaatcataagatgagctgttattttatgttcagcactgccccgctcattcaccctcctattcttttctgcctgcttctggcagccagatcattcttccaaaacacagatctgattaggcccaatccctgcttgtggccctttggtggcttctggggtcctcagaattaagtccagatgctgtggcctggcacccatgccctgcactgtgggaatcctctgtgtcctcccactcggcccttgtggcagtgagacccagccatctgcaggtcctcagatcgccatgcgcccctttccttattttatgcactatcaataaagaaaaatatgctgccaattaactgtgacccctgattgtaaagcattatgactgccctgcctcttcacctccaccaggagagtctgaacatagagtttctctctagaatagtggttctcaactgggggtgcttttgcttcccccttgcccgaggggatgtgggcaacgtctagagacattttcacttgtcacaactggggtactggtggtactggcatctcgtgggtagagctcagggttgctgccaaatctcctccaatgcacagggcaactttcaacaaccgagagtcatcagcccaaaatgccagtagcaccagtgttgagaaatggtgctctagaacgtacaagaattgcttgcacatctcctccaatgcacagggcaactttcaacaaccaagagtcatcagcccaaaatgccagtagcaccagtgttgagaaacggtgctctagaacgtacaagaattgcttgcactttttgtattctgctgccatgagtactatcatcttctggattttctttgcttttttttctgtagagcattgatcttaagcactgggc

SEQ ID NO: 92453 - DNA, 1632 bp, Homo sapiens
agagtcttccttgaaaatgctttcaggaggctgtgctgtccctggcagggcaaggtgctttgtagcaggattttcccctcttatggtggttctttagaaaggccattacttggctatgcctgtaatctcagcactttgggaggctgaggcgggtgaatcacgaggtcaggagatagataccatcctggttaacatggtgaaaccccatctctactaaaaatacaaaaaaaaaaaaaaaagccaggcatggtggcacgggcctgtagtcccagctactcgagaggctgagcagaagaatcgctggaaccagggaggcagaggttgcaatgagccaagatgatgccactgccttcagcctgggcgacagagcaagacttcrtcaaaaaaaaaaaaaaaaaaaaggctattgcaagatccaggcatatacatagtaaaccatagataccacatcaatgattgatgggaatttactaaacagaatgccatttaggatacgatgaaatcatgcctagtgtaacatctgccttcttaaaaacaaattcagagtatcattaaaaaaaaaagtacaagaaaaataagaccatatgtagaagtttgtaactaagaacatatgtcagtgaaaagaaaacctaatagcatattttattactaattgtttaaatcaatatgtaatacataagccttttgtcccaaatgctgttgccttccatagcatctaaaaataaataccatctttcattgaatctaagactccatcaatcataagatgagctgttattttatgttcagcactgccccgctcattcaccctcctattcttttctgcctgcttctggcagccagatcattcttccaaaacacagatctgattaggcccaatccctgcttgtggccctttggtggcttctggggtcctcagaattaagtccagatgctgtggcctggcacccatgccctgcactgtgggaatcctctgtgtcctcccactcggcccttgtggcagtgagacccagccatctgcaggtcctcagatcgccatgcgcccctttccttattttatgcactatcaataaagaaaaatatgctgccaattaactgtgacccctgattgtaaagcattatgactgccctgcctcttcacctccaccaggagagtctgaacatagagtttctctctagaatagtggttctcaactgggggtgcttttgcttcccccttgcccgaggggatgtgggcaacgtctagagacattttcacttgtcacaactggggtactggtggtactggcatctcgtgggtagagctcagggttgctgccaaatctcctccaatgcacagggcaactttcaacaaccgagagtcatcagcccaaaatgccagtagcaccagtgttgagaaatggtgctctagaacgtacaagaattgcttgcacatctcctccaatgcacagggcaactttcaacaaccaagagtcatcagcccaaaatgccagtagcaccagtgttgagaaacggtgctctagaacgtacaagaattgcttgcactttttgtattctgctgccatgagtactatcatcttctggattttctttgcttttttttctgtagagcattgatcttaagcactgggc

SEQ ID NO: 92454 - DNA, 677 bp, Homo sapiens
aacgttaacagttaatttagcattatgtacacttgcgttggagaggagggcacttaatatcaaataaggagcttcctgcaaaatgcagggttatttttaagctcctacatatttttgggttttttgcagggaacacagatgacatcgtggggtttcactgccttgctaaagctttttcacatgaaaagcaaactttggaaggcaaagcaattatcatggaaaagcaacatcagaatcattcctcagaaatgtttcatttttcagaaatgttagtgaaatgagtgttctttgacaggaagaccatattatttcagcgctggagcgaggaggtgctgctgcttttggtcctatgcctcccgaggaggctcagttkgcagcctggaggtgaaatggacagaaagggcctgtgggtcacagctatttttttaatgctccttggataaatgttccccctccccaagggaggactgccagggattagaaccaaaaactgacagctaaaaacggtgcacttcccaagtacctcggtcctcctggctgagaaaagagatttgcatggaattgtggagactgtgaagtcatcctaggaagggatgacccagcagagagcaaacgtgacctccagagccctgcttcctggcaaagcaacctggaattttcaaaatctgtcatgcagt

SEQ ID NO: 92455 - DNA, 666 bp, Homo sapiens
caatacatactatatgaatacacattatataaacccagttgtcaaaagtggacaaaactgggctgggcgcagtggctcacgcctgtaatcccagcactttgggaggctgaggcgggtggatcacgaggtcaggagatggagaccatcctggctaacatggtgaaaccccgtctctactaaaaatacaaaaaattagccgggcgtggtggcgggcgcctgtagtcccagctactcgggaggctgaggcaggagaatggcgtgaacccgggagacggagcttgcagtgagccaagatcgtgccactgcactccagcctgggtgacagagtgagactctgtccaaaaaaaaaaaaggacaaaactaaagtgtattcatcataggaatataaatctgtgtgataagactatgcaagggaataaatccaaaattcacagtagtgatcaccttactagcatgggatggaaaggagatgcaatcagagtaaggaatacaatggggtctcaaaggtactagtgatttaattacccatgttgggggtggggattcaggagttccstttattaagtcatccatgtacatggggattcaggagtgccctttattaagtcatccatgtacattatacagtcatccgtcagtatctgtgggttccatatccatggatcc

SEQ ID NO: 92456 - DNA, 732 bp, Homo sapiens
tctctagaggcctcggagaaagcacaaccttgccaacacctcgattgcagacttccggcctccagactgtgagatgatcaatttctgctcttttcagcctctgcgtttgtggtactttgttttggcagccctgggaagctaatgtaacataggatggatatgttttttcttgtttgggtctggttgmctattcctctgttttaatgatctgttttaatgatcaataagtccagttcaaatgtaggagacattgaaccttcccattattcccaatagaaaatttttgagataaaattagacactttgataccaaaagtgccaaatcaggaactgtgactggccactgtaaaaactcatattttcctgaaagtctgtgtccatgaggaccctggcagctccacttcccactccacggcctcagacactgagatgctttccaccatgacactcagagaaggatgtaacgtctcagctgccacagctctcatgaattgtagaggtttataaaacttagtgggatgcagctgcacttattaataagcgctatccatggctagaaccaaagactgtgttagtggaagatgaagtcttcattccttggcttatgacaacgttaactgttttttaaggaccactggtggaagtggtgaaagaaagcaccaatgccaggttctattttacttgagtaaagaaaatcagattaaaataatgagtgacaatccaggacctcgg

SEQ ID NO: 92457 - DNA, 732 bp, Homo sapiens
tctctagaggcctcggagaaagcacaaccttgccaacacctcgattgcagacttccggcctccagactgtgagatgatcaatttctgctcttttcagcctctgcgtttgtggtactttgttttggcagccctgggaagctaatgtaacataggatggatatgttttttcttgtttgggtctggttgactattcctctgttttaatgatctgttttaatgatcaataagtccagttcaaatgtaggagacattgaaccttcccattattcccaatagaaaatttttgagataaaattagacactttgataccaaaagtgccaaatcaggaactgtgactggccactgtaaaaactcatattttcctgaaagtctgtgtccatgaggaccctggcagctccacttcccactccayggcctcagacactgagatgctttccaccatgacactcagagaaggatgtaacgtctcagctgccacagctctcatgaattgtagaggtttataaaacttagtgggatgcagctgcacttattaataagcgctatccatggctagaaccaaagactgtgttagtggaagatgaagtcttcattccttggcttatgacaacgttaactgttttttaaggaccactggtggaagtggtgaaagaaagcaccaatgccaggttctattttacttgagtaaagaaaatcagattaaaataatgagtgacaatccaggacctcgg

SEQ ID NO: 92458 - DNA, 732 bp, Homo sapiens
tctctagaggcctcggagaaagcacaaccttgccaacacctcgattgcagacttccggcctccagactgtgagatgatcaatttctgctcttttcagcctctgcgtttgtggtactttgttttggcagccctgggaagctaatgtaacataggatggatatgttttttcttgtttgggtctggttgactattcctctgttttaatgatctgttttaatgatcaataagtccagttcaaatgtaggagacattgaaccttcccattattcccaatagaaaatttttgagataaaattagacactttgataccaaaagtgccaaatcaggaactgtgactggccactgtaaaaactcatattttcctgaaagtctgtgtccatgaggaccctggcagctccacttcccactccacggcctcagacactgagatgctttccaccrtgacactcagagaaggatgtaacgtctcagctgccacagctctcatgaattgtagaggtttataaaacttagtgggatgcagctgcacttattaataagcgctatccatggctagaaccaaagactgtgttagtggaagatgaagtcttcattccttggcttatgacaacgttaactgttttttaaggaccactggtggaagtggtgaaagaaagcaccaatgccaggttctattttacttgagtaaagaaaatcagattaaaataatgagtgacaatccaggacctcgg

SEQ ID NO: 92459 - DNA, 553 bp, Homo sapiens
cagcaagataaacactacaagtcaaagagaattaaatgagaagtgcttatcagtgtcagaatgctttgttactcagggattgtgtagtcttggctggctgattgaaattgcaactgggtaaaattcctaagcgctggcattgcctgatagcacagccccccacttcttgggttcgggacacctgactgtcactcagcttcccactttgactttaactctagacttcagattctccaaacatgaaacaattatgggttataggctgttgggggtggggtgctaggtatgggggacacagagataaatgagacacagcctttcctcacaagaagctcagagaagaagagaaagtcaggcaaaaattatatagggagtgctctgtgtaatagggcatatgtaagggccagtagttgcgtgatggggtggtaatcagttctttttagtagtgggagagtaggggatgatgaatgattctcagaggaggkcgtagttgggtgagtctcaaaggcctcttagaagttaatcgagtgggtggcatgagaagagggggatt

SEQ ID NO: 92460 - DNA, 1070 bp, Homo sapiens
cttggtgtttcttcactgattgtggcccgtaagttctaaagatatatcagccttattgtttttatcattaatagaatgtctgcgcagaacagtgactgacttgaatggatacttgcagcactctagtggacattctgcttaagtgcgaagacaccttgtagtaaaataaatcatagtacatgacacaagatgttcttgaaaaaacaatctctacctaaatactgatatttcacttaaatctattcttcttgcactgtatgtaattaaatttaaaattagtgtatttatcctgttaattctttttaaatgctgcgcatttttggaaataacacttgagaaatatggaagtgcaaagtgatcaaggaggtgaggaattctaaaggttaaggagttcattgaagttaaagatgttagaccagtctgaaaggcattttgaggtcaatattgtgttgaattataaacgaaggcagatgaatagctttatatttctgaagttcaattaattttgtgcctgtaattttgtttggctgaggtagagtcctcaaacttagaagagaaaaagtcaattgaaggaataccatctatagaatatgtcaaattgtttaccaaaggttttattttacaagatggttgatcattgaggaatgaggaagaagtagtggttttgtggtggggggtggtaatataaattgctcaagaaatagatgagggagaaaatatattaaacataaaatatattaaatagaaaaaaatagatacagaaacaygtgaataaaaatccagtgacaaattcatattctgataaaaatctatatatatctattaaattatatgtttgtctatgtagtggatacttttgattaacttgcaaatgttttctttcattttaccattgattgactttaaactttctgaaagataataattgttgaaaaatgttttaaataattcatcagctgagatttaaaatatcattcttgccatttggtaatgaaatacatttggtgataaaatgaaagctgacaattgggcagataaaatgatgtttagataagcttatctgttttctt

SEQ ID NO: 92461 - DNA, 740 bp, Homo sapiens
gactttttcaaagtgtaggaagtaaaaatgatccacaaaaaaagtcatatatatagcaaaactatctcttaaaaataaaggaaaaggaaagaatttcctagaaaagcaaaatctgaatcagttgataccaaaatcagaaagatgtcacaagaaagaaaaactataaacaaatacttcttatgaatttagatgaaaaaaatcctcaaccaaatattacaaaactaaatttaggaacatcttaaaagattaaatgccataaccaagtgggatttgtcccaggaatgcagagttggttttgcatctgaaacatcaattggtgtaatatgccatattaaagaataaaggaaaaaattcacatgatcatcttaatggatgcagaaaaamgatttgccaaaatcaattacccctttcttgataaaatcacacacaatctgaccaacgacatttatgaaaaatcagtagttaacatcattcttaatggcaaggttgtctgctctcaccataccactcaacattttactggaggttctagccagggctatttggtcttgttccccaccccccaaaaaaattccagattgtaaagaaagaactaaaacaatttgtatatgcaggtgatatgatcttgtatatagaaaattctaaggtattcataaaaaaactgttagtcttgataaatgagtcaagtcaatttggcaggataaaagaccaatatacaaaatcaattgtacttatatgca

SEQ ID NO: 92462 - DNA, 676 bp, Homo sapiens
gttgacttaagttactttttcttgctccctgtatgttgctttgtggaaatgcttttcactgggaaaggcagtagttacctaaccttaaagttcagcaatactggattgcagttttgacccagggtagacaaccagtttcttatacctttggacatatgatggtccaaaggcagataaaagagcataacagtgtcaatcaatgttcttttcagtcccccgacccagtggatattggaaggtctacagaactctcatgtattaacgaccttgagtcttgaactgtcccatggtcatattttccaccaatgtaaatactgggacaaaaagcaagctataaaatgcagagatacaagagaaaaaaggaggatgtttttgaagacaacttggaattaagtctaataatgtcttgaccttcccatgtatgtaatccaataaactattttatgtaattctgtcaaattcagcttaatcagaaataggacttgcaaatattttcctcattctgtgggttgccttyggattctctttgtagtttcttttcacgcaaagatgtttcaatttttatgaagtccaatttatctgtctttttttctcctttcattgtgcttttttttgtcacttgtgttgattttcagcaattttagccctgtggctacaggacgtaagattctccttc

SEQ ID NO: 92463 - DNA, 718 bp, Homo sapiens
gattgaaaatgaagatcatatcacaaagtgtactgtgttcatttatcttgacaaatgtagtttggtaacaattctttaataatgcttcaggtagaccagtaaatttcttctaacacattttgtgaaaataggttagtgtgaatgataattagttctcagctaatgatttgctgccgagaaatggaggaagactgctagatatgcaatgagaattatgaggtttgcaggctgtggaaatgayacttaacaggtttcacttaatgggagaactatcttttcttttttggagtaggatgaaatttcatgactataattttaaaagcctatggtgaaatgagtgtcactgtaactgaatatgaaatattaatgaatgaaaaacagttgcaataactaaatatatctatgactgcagggaaaaagctcagtatacaaagtatttgtattcacaaaggctattttatactattttacattcaatacctatctttagtttttctatgaaggaaaattttgtctttttgcttccatctatctgatatagactttcttgcaaaagctttgctatgttaacagaagttcataaaattaaaaaagaaactaattttgattcacattagactttaggaaaagcattttacaaggtcccccatgataagcattaccgtatgattaaacacatgattttgaaaaaagatagttcattcataaacagtgtttg

SEQ ID NO: 92464 - DNA, 846 bp, Homo sapiens
tggtggcctaaggcctcagggcaattttaagatataactcttctagcagaaaagctgctgagaaaagagaggagaagaattggcaaaaggggaaaataaatcagacagctgaccgtgagcgtgaagggaatgtagctattttcctccttgttccaagcctaggattgaaaaaacagtcgtctcgggaataaataatttatcactggaattgatgaagtggaggtggtttggggaggagggagagtgcaaagccagatgcctccacgcagataataaaatgttaataataaaatgttctcccttgctgttgtctaagtggtgaatgaaaaagaatccagggataagaaaaacccctgaaggggttaggggaaattagtgctgatacttcccattaaagtcgcagtaataacgataacaaccgaacatttatagaatgtacttcatgcctgggattccactgggctttgaaacaggaggatctgattcacacccactcccaagaaaatgaattaggttccagcgctcaggggtgggtgagggacttcccaaaagagcttaaattcattagatgagagagttaagtgtggtcagaggtgatctagtccagcgtccttttcggaggagtccagagaagttgaaggattggctccggatcacatcactccttaatggagttgctgtggatagtactcaagtctatttcctttgggtcccagctgtcactttgcagctgtgtgcctttgggaaagtcaccwaacctctctcagcctcagtttcctaataaaatgtggacagtcgtagcatctgcgtcaaaggattgctgtaatgattaaataggttaatgca

SEQ ID NO: 92465 - DNA, 2029 bp, Homo sapiens
ggtagtaatttcaatccccattttcacagacagatacaggtgcttaagaagataaaacaacttacatgtgtttacacagcaagtgccagaaatgggattcaaactcaggcctgctttcaaatatggacctcttccactctaccaggatgccgtcccaaatttttttttttttttttggttttgagacggagtttcactcttgttgcccaggctggagtggtttgatcttggctcagtgcaacctctgcctctcggtttcaagcgattctcctgccttagcctcctgagtagctgggactacaggtgtgcatcaccacccctggctaatttttgtatttttaatagagacggggtttcaccatgttgaccaggctggtattgaactcctgacctcaggagatctgcctgccttggcctcccaaagtgctgggattacaggcgtgagccaccgcacccagccaaccttcccaaaagttttaatactcatgcttcagttatgcaattgtgtcaggaagtgatgcatcctttctaaattatgttttgagataatcaaagcttagccttttaagcaccaacattttgtaaacttttgtagacaaaaatattcgtagaatgtgttacatatttttcactttcttaaacagagcatgctggacagattttaaactttgcttgatgattcatgtcatgtttaagagcatcaattattatgtaatgccatattatagggagtttaagtatcttgcccaaggctagacagctgttaaatggggaaactgttcaaatgcaggcagtctggctacagagcccatgttcttagcaactatgctatcatgcctcaccaagtgctcaaaagaattagagatcgctgtgggctggagatgagtcgtcccaatagtattggttgctctggcaaagagcagggaggcagaatctgaagccatccagcaaacttagcaggggtggagatcagggtccactttgctgacatttcagaatagagaaatgccatgtcatagcaaaagtccaggaagaaccagatcagagatagaggggtgaaacaaaaagtggatattggccaagtgtgactcatgcctctaatcccagtgctttgggaggctgaactgggaggattgcttgaagccaggagttcgagaccagcctgggcaacatgatgagaccctgtctctataaacaatttttacaaagaaaatattagccaggcatgctggcatgcacctgttgtcccaactactcaggatcctgaggcaggaggatcgcttgagcccaggagtttgaggctgtaggaagccatgattgtgccactgcactccaacctgtgtgacagagtragaccctgtctctaaaacaaaacaaaacaaaacaaacagacaaacaaacaaaacccaaaacatgactatcaaggaatctatgcataagaacctgagatgaaaatcacatgttagagtttcttgtgggaggaggagtgctgataaatggcacctgtttttcctgctcaagttctgaaaaacctgacaggtccagagtagcagatgggccacagttctcctttatttttgttcaaggttaaattggaagccatagctcactgcaagaaccaaatggacctgtgaagtaattccaaaattcaacatacttaccccacactcatgtaggcactggaccaggtaaaacttacagcatggagaaacagaggactcttggtgcttgcagttaagttcacttccaagagggaaaagggtgtagctgatccaagaatgcctatgaccataagaagtacattgcccgatgtgcagcaagtcagtataccaacactgagggttgcagcagagaaagaggtttaatcgtaaggccgctgaacaaggagacaggaggaaacctcaaatccacctccccaaggagtttggggctaggaatatacataaatgcaagtataggacttgcatttatatatatttctatattcctatatttgcatatatgtataatatatatattatatatataa

SEQ ID NO: 92466 - DNA, 1446 bp, Homo sapiens
cattctgttgcccaggctgaagtgcagtggtgccatcatagcttactgcagccttgagtccctgggctcaagtgatccttctccccagkctcctaaatggctaaggtgtgcattgccagagccagctaatttttgtattttatgtagagatgaggtctcactatattcctcaggctggtctcaaactcttgacctccagtgatcctcccaccttggttccccgaaatattgggattacagatgtgagccactgcatgcgtgcttatttgttaattatacctcaaataacctgtggagggtaagagcataagccttctggggaggtttggcacttggctgtgatgcaggccttctgacttttttttttctttttaaaataattaaaatagagatgggggtctcacaagtccaggctggtctcaaactcctggtctcaagtgatcctaccacctcagcctcccaaagtgctgggattacaggtgtgagccatggtgcccagccatgactttgttgctcagctcatctttgcctcacactggctgatgtcagctgctgcgataggtgaggttttaaggggggtggagagggattggcagggggcagttttgccatcagagtggaggtgaggggtctgttgtggtggcagtcagcagctgcctgaggatctgggagagacctagcaggcagtgaggacagtggatggcaaggggcctcagagctctgtgacctcataattttcctgtgggaccacaaaggtggcttccacagtgcatagtggttatcagctgtgcctccctcttagaggtcctcggagtccagagtcctcgaagggaaatctgacacaaagaagcaggtgtgagaccggcccctttctcccatgccttagacagggctccagggactgcttcaggggagatgtcagagggcagcagggaccgggaagggaggaagaaagcagagtgacagtgagaggtgggaaaactacaagaggaattgtttgtacgcttggatctggacttttagaactggtcaggacctgacagatcctccagcccagttctcccggctctcaaacactggcatcatttataattccctggaaaatcaccagcaggtaaatgaaggagaaaagaaaagaacaaaatccaccgggaaccagagacttccaggctccaaagacaggcaatctccaccaggaagtaagtataaaatcaacttacagtacttctttctttagcacttaaaatggattttatctcattaatgtccaacagagacaagggcaactcctggaggagctgtttcctcaccccatacggcagctagttcctcatttgtccttcagaggcatgtagaatcgttcattcactgaatatttattgagcatgtactctgcgctgagcactgttctagatgctcagagtggtgaataaatcagctgaggga

SEQ ID NO: 92467 - DNA, 1446 bp, Homo sapiens
cattctgttgcccaggctgaagtgcagtggtgccatcatagcttactgcagccttgagtccctgggctcaagtgatccttctccccaggctcctaaatggctaaggtgtgcatygccagagccagctaatttttgtattttatgtagagatgaggtctcactatattcctcaggctggtctcaaactcttgacctccagtgatcctcccaccttggttccccgaaatattgggattacagatgtgagccactgcatgcgtgcttatttgttaattatacctcaaataacctgtggagggtaagagcataagccttctggggaggtttggcacttggctgtgatgcaggccttctgacttttttttttctttttaaaataattaaaatagagatgggggtctcacaagtccaggctggtctcaaactcctggtctcaagtgatcctaccacctcagcctcccaaagtgctgggattacaggtgtgagccatggtgcccagccatgactttgttgctcagctcatctttgcctcacactggctgatgtcagctgctgcgataggtgaggttttaaggggggtggagagggattggcagggggcagttttgccatcagagtggaggtgaggggtctgttgtggtggcagtcagcagctgcctgaggatctgggagagacctagcaggcagtgaggacagtggatggcaaggggcctcagagctctgtgacctcataattttcctgtgggaccacaaaggtggcttccacagtgcatagtggttatcagctgtgcctccctcttagaggtcctcggagtccagagtcctcgaagggaaatctgacacaaagaagcaggtgtgagaccggcccctttctcccatgccttagacagggctccagggactgcttcaggggagatgtcagagggcagcagggaccgggaagggaggaagaaagcagagtgacagtgagaggtgggaaaactacaagaggaattgtttgtacgcttggatctggacttttagaactggtcaggacctgacagatcctccagcccagttctcccggctctcaaacactggcatcatttataattccctggaaaatcaccagcaggtaaatgaaggagaaaagaaaagaacaaaatccaccgggaaccagagacttccaggctccaaagacaggcaatctccaccaggaagtaagtataaaatcaacttacagtacttctttctttagcacttaaaatggattttatctcattaatgtccaacagagacaagggcaactcctggaggagctgtttcctcaccccatacggcagctagttcctcatttgtccttcagaggcatgtagaatcgttcattcactgaatatttattgagcatgtactctgcgctgagcactgttctagatgctcagagtggtgaataaatcagctgaggga

SEQ ID NO: 92468 - DNA, 1446 bp, Homo sapiens
cattctgttgcccaggctgaagtgcagtggtgccatcatagcttactgcagccttgagtccctgggctcaagtgatccttctccccaggctcctaaatggctaaggtgtgcattgccagagccagctaatttttgtattttatgtagagatgaggtctcactatattcctcaggctggtctcaaactcttgacctccagtgatcctcccaccttggttccccgaaatattgggattacagatgtgagccactgcatgcgtgcttatttgttaattatacytcaaataacctgtggagggtaagagcataagccttctggggaggtttggcacttggctgtgatgcaggccttctgacttttttttttctttttaaaataattaaaatagagatgggggtctcacaagtccaggctggtctcaaactcctggtctcaagtgatcctaccacctcagcctcccaaagtgctgggattacaggtgtgagccatggtgcccagccatgactttgttgctcagctcatctttgcctcacactggctgatgtcagctgctgcgataggtgaggttttaaggggggtggagagggattggcagggggcagttttgccatcagagtggaggtgaggggtctgttgtggtggcagtcagcagctgcctgaggatctgggagagacctagcaggcagtgaggacagtggatggcaaggggcctcagagctctgtgacctcataattttcctgtgggaccacaaaggtggcttccacagtgcatagtggttatcagctgtgcctccctcttagaggtcctcggagtccagagtcctcgaagggaaatctgacacaaagaagcaggtgtgagaccggcccctttctcccatgccttagacagggctccagggactgcttcaggggagatgtcagagggcagcagggaccgggaagggaggaagaaagcagagtgacagtgagaggtgggaaaactacaagaggaattgtttgtacgcttggatctggacttttagaactggtcaggacctgacagatcctccagcccagttctcccggctctcaaacactggcatcatttataattccctggaaaatcaccagcaggtaaatgaaggagaaaagaaaagaacaaaatccaccgggaaccagagacttccaggctccaaagacaggcaatctccaccaggaagtaagtataaaatcaacttacagtacttctttctttagcacttaaaatggattttatctcattaatgtccaacagagacaagggcaactcctggaggagctgtttcctcaccccatacggcagctagttcctcatttgtccttcagaggcatgtagaatcgttcattcactgaatatttattgagcatgtactctgcgctgagcactgttctagatgctcagagtggtgaataaatcagctgaggga

SEQ ID NO: 92469 - DNA, 587 bp, Homo sapiens
aaaagcaacaagatctttacagagaaagctgagatttttaacttgaactctaattaagcagtggaaagaaaatgatttccatgaaacacttccctgaaaatgtaatggatgttagtgagaaaaaataagagaggacagaagcaaatggaaacacattccatgcttattgatargaacaatcaatatcatgaaaatggccatactgctcaaagtaatttatagattcaatgtgatccccatcaagctacaattgactttcttcacagaattaggaaaaaaaaacactttaaatttcatacagaaccaaaaaaagagcccatataaccaagacaatcctaaggaaaaataacaaagctggaggcatcacactacctgacttcaaactatactacaaggctatagtaaccaaagcagcatggtactggaaccaaaacagatatatagaccaatggaacagaacgagggctcagaaataacaccacacttctacaaccatctgatctttgacaaacctgacaagaaagggcaatggggaaaggattccctatttaataaatggtgttgggaaaactgtctagctatatgca

SEQ ID NO: 92470 - DNA, 737 bp, Homo sapiens
atgctttatataaatacttaatcgattgaaaaaaattcatgatatatataggtaagtaccaatagtggtaattcagaataatcctttttgatggaaatggggagagagaagaaaagatagagaaagaaatgagaaggacagtcaccaaaattgtacatattttacccctagatagtgattttattgcccttttatgatttgtatatttttcaaattttttcagtgaacatatattactttaatcatcacaaaatgtaataattttttaaatactcatctgattttcttcctatatttaatcaaagtgctggtcatcatatttattcatacaacaaatatttatgaaagtcttctgtgcaaggcattgttttgggctctcaaggtacagcagtaaacaaggctgacaattatcctacatgttttcattcaagtgacagaaaacataaaccattaaacaaaaacacaaataagtcatttcagaatgcaataaatactawaaaataaaaaagaacagatgatgtgatagagaataagaggtgtgtgcaggggggagaggtgagcagttaatttcaaaaggatgctctaagtggacattacttaggagacatttgtgttgaggcctgaagtatggaaaagaaccattcaatgagactgtgaaagggtgatgacagaaagaatggtaatacagtattccaaagatggcaacaagctcagcaaattcagaatacagacagagg

SEQ ID NO: 92471 - DNA, 960 bp, Homo sapiens
tttctagtactttgttttagactttctgattctatgttcagaaattacaatgatagtgtaactatgatgcrcataggtgttgtttctctttaatatacctacattaaaaatatacaacgtttaaatctatagcttgatgtctttagtggactttgaaaattgttcaactatttaaattttaaattgtctttctctttttctgggactccaattatactcgttttatatatatgtgttccacaggtctcatattctcttcaggattttctttcctttttttccagagatgtagtttagttttttgttttgttttgttttgttcagaagggcttttctttggatattggatttttatttttagttactgtagttttaagcttctattatttcctttttatttgataccttttagagcttccaattttctgccaaaattctcttttgctccattttcttgaaaatattgattatagttatttttaaattcatgaatgaacacttcaatattgtgatctcccatgtgcccatttctacactctatatatttttgcttttgtgcattttttctagtataggaatgtcatcaaatataccacattcatctacagattaaatgtaattacaatcaaaatttcaagagagttgttgcttaaatcaacaaaacagattctgaaattggtaaaggaaaacaaaagacttggcaatattgaaaaagaacaaagcaggaggactcaatctaaaagataaaaatatttatttccaaaattataaatcagaaaatgtgatgttggtacagggctaggaaaatggatgaagaaaaaaaaagaatccagcagtggataatgaattgttgttccaggaaattgagctacattaaatgaatatcaactaggaaaaaaaaattagccactctcactccacacataaataaatcccaggcagattataggtgtaagtgtg

SEQ ID NO: 92472 - DNA, 960 bp, Homo sapiens
tttctagtactttgttttagactttctgattctatgttcagaaattacaatgatagtgtaactatgatgcacataggtgttgtttctctttaatatacctacattaaaaatatacaacgtttaaatctatagcttgatgtctttagtggactttgaaaattgttcaactatttaaattttaaattgtctttctctttttctgggactccaattatactcgttttatatatatgtgttccacaggtctcatattctyttcaggattttctttcctttttttccagagatgtagtttagttttttgttttgttttgttttgttcagaagggcttttctttggatattggatttttatttttagttactgtagttttaagcttctattatttcctttttatttgataccttttagagcttccaattttctgccaaaattctcttttgctccattttcttgaaaatattgattatagttatttttaaattcatgaatgaacacttcaatattgtgatctcccatgtgcccatttctacactctatatatttttgcttttgtgcattttttctagtataggaatgtcatcaaatataccacattcatctacagattaaatgtaattacaatcaaaatttcaagagagttgttgcttaaatcaacaaaacagattctgaaattggtaaaggaaaacaaaagacttggcaatattgaaaaagaacaaagcaggaggactcaatctaaaagataaaaatatttatttccaaaattataaatcagaaaatgtgatgttggtacagggctaggaaaatggatgaagaaaaaaaaagaatccagcagtggataatgaattgttgttccaggaaattgagctacattaaatgaatatcaactaggaaaaaaaaattagccactctcactccacacataaataaatcccaggcagattataggtgtaagtgtg

SEQ ID NO: 92473 - DNA, 960 bp, Homo sapiens
tttctagtactttgttttagactttctgattctatgttcagaaattacaatgatagtgtaactatgatgcacataggtgttgtttctctttaatatacctacattaaaaatatacaacgtttaaatctatagcttgatgtctttagtggactttgaaaattgttcaactatttaaattttaaattgtctttctctttttctgggactccaattatactcgttttatatatatgtgttccacaggtctcatattctcttcaggattttctttcctttttttccagagatgtagtttagttttttgttttgttttgttttgttcagaagggcttttctttggatattggatttttatttttagttactgtagttttaagcttctattatttcctttttatttgataccttttagagcttccaattttctgccaaaattctcttttgctccattttcttgaaaatattgattatagttatttttaaattcatgaatgaacacttcaatattgtgatctcccatgtgcccatttctacactctatatatttttgcttttgtgcattttttctagtataggaatgtcatcaaatataccacattcatctacagattaaatgtaattacaatcaaaatttcaasagagttgttgcttaaatcaacaaaacagattctgaaattggtaaaggaaaacaaaagacttggcaatattgaaaaagaacaaagcaggaggactcaatctaaaagataaaaatatttatttccaaaattataaatcagaaaatgtgatgttggtacagggctaggaaaatggatgaagaaaaaaaaagaatccagcagtggataatgaattgttgttccaggaaattgagctacattaaatgaatatcaactaggaaaaaaaaattagccactctcactccacacataaataaatcccaggcagattataggtgtaagtgtg

SEQ ID NO: 92474 - DNA, 960 bp, Homo sapiens
tttctagtactttgttttagactttctgattctatgttcagaaattacaatgatagtgtaactatgatgcacataggtgttgtttctctttaatatacctacattaaaaatatacaacgtttaaatctatagcttgatgtctttagtggactttgaaaattgttcaactatttaaattttaaattgtctttctctttttctgggactccaattatactcgttttatatatatgtgttccacaggtctcatattctcttcaggattttctttcctttttttccagagatgtagtttagttttttgttttgttttgttttgttcagaagggcttttctttggatattggatttttatttttagttactgtagttttaagcttctattatttcctttttatttgataccttttagagcttccaattttctgccaaaattctcttttgctccattttcttgaaaatattgattatagttatttttaaattcatgaatgaacacttcaatattgtgatctcccatgtgcccatttctacactctatatatttttgcttttgtgcattttttctagtataggaatgtcatcaaatataccacattcatctacagattaaatgtaattacaatcaaaatttcaagagagttgttgcttaaatcaacaaaacagattctgaaattggtaaaggaaaacmaaagacttggcaatattgaaaaagaacaaagcaggaggactcaatctaaaagataaaaatatttatttccaaaattataaatcagaaaatgtgatgttggtacagggctaggaaaatggatgaagaaaaaaaaagaatccagcagtggataatgaattgttgttccaggaaattgagctacattaaatgaatatcaactaggaaaaaaaaattagccactctcactccacacataaataaatcccaggcagattataggtgtaagtgtg

SEQ ID NO: 92475 - DNA, 686 bp, Homo sapiens
gtaaaagacttctttagggggattttggtgtcagtatttttcgagtctgggaaaaattgttctcctactgcagatttataactctagtctgagacttctaaatgccttatgccaacattgtaaattttattgtgatgctgttaagttacagtttaaggtataatttttttaaaagcatttcatcttgtagtttgggataatagttataaagctggtctctatagaaaccattttaacttatgatcttagaacgccrggtaataatgcagaggattattggccaaaactttttttttaatgagaaatattttactgaattgactctttctaaactcaagtctggggaggagcgtgtgctcttaagatgactaccttttaatcagagattatcactctccatttccattagtctctctttttttggcatgtgatgtatgctaaattaaataggatttattggttcagctagattctgaattaccctcttttcctgtggattaggagagtgcatttttagcccttttccttgaaatccatcaggatcttttatgtggactatctagtattctgcacacttccaatgcttaataaatattacattacaatattagcataataataaatcatcttaaagtactacctgggctattgagatcccattcagtttgagccaagacatcaaaaag

SEQ ID NO: 92476 - DNA, 1140 bp, Homo sapiens
  misc_feature (1)...(1140): n = A,T,C or G
agcattttttcattacatgtttacatctttgagaacaagctattattatctgcatttgcggagaatttgctttggaaagatgaaagtccagaggcaatgagaccattcaatatcctgttaattggtccaattttgacatgatgaccatttggtccaagagggtagcaatacaagagtgaaaaagcacacactttactttgtcattcaataaacactggatgtgtgctacataccacatgctggtgaataagacattctccttgcttaagagttagactgcaagtctggctggcaatttcagggttatgtgatgagtgttgtggtggcagtaagcacagagtgtctgggagccctgaggaggagaaaccagttcagctttgggtatccggagtacttttcatagacatggagagatattttaaattaaattaattttttttttttttttttttttttttttctgtagagccagagtctcaccctgttgcccagactggtctcaaactccagggttcaagcgatcctcccacctcggcctccgaaagtactgcaannnnnnnnnnnnnnnnnnnnnnnnnnnnnnnnnnnnnnnnnnnnnnnnnnnnnnnnnnnnnnnnnnnnnnnnnnnnnnnnnnnnnnnnnnnnnnnnnnnncatgttggctggtctcgatctcctgatctcaggtgatctgcccaccttggcctcccaaatgctctgcctcctgcctggcggacagactgggactggcgtgaaccaccgcgcccgacctartgtcacatttctgatccagagaactctcaacaccatcagcctcattttatagacaaggaaatcggagtcaaggatgccccagtaaatggcaggctcaggagctgcccctggatctgtctggctcccaagtctgccttctttctgtgatgccacactggctgcttctcatttcactcattaattccctgttacccacattccctccacaaccaatctattgtgtttcacatgagtccttttgtttgcatgtgctcttgtaaaatgcaattggtgttccacgggcaggtatttcttactcatgtgaacggtcctgcaagatctctcacctgcttcctactcgttgttcatactcagcactatgttttga

SEQ ID NO: 92477 - DNA, 704 bp, Homo sapiens
ttatgttactcactcagaacctgacaccacggtacatgcccagccaatgtcagccagttgtataaagactatctccactgtgggaaaactgcaagtcctactgccatggggccactggctcatctccatagacagccaggccaggcactgttagctctggcattattacataaaatacattcactcctaggaaaagaacaaattcgcacctgatagagcatgtgacaaggagaatcacatctgcctgaatggaaagaaaggaaaacaaggaaaattacataatatcttggatattagccttgtacaattcctgccctacagctctttattatttttttttcctttttttttttttgagacagagtctcactctgtttcccaggctggagtgcagtggggcaatctcagctcactgcaacctccacctcccgagcggttcaagcaattctcctgcctcagcctgggattacaggtgcccaccaccacgcccagttaatttttgtatttttagtagagatggggttttaccatgttagccaagctggtctcgaactcctgacctcaagtgatycacctgccttggtctcccaaaatgctaggattacaggcatgagccactacacccggcctattatttttctttaactatttttttcctttttttttttttttaatagagaaaggagtctcgctcacttgcccag

SEQ ID NO: 92478 - DNA, 1543 bp, Homo sapiens
aaaaaaaaaaaggcttaagatctcttagagtctattgagatctatgtatctattaatatatgtaaggattttatatatatacaaagatcaacttttgtgtgtgtatgatacataaatagtatcatcatgtatgtatctttcaccaactattttcacttaacattacgtcttggcatctactttcagctagtagaattggtggggtgacaggtctgtaggctttaatatccttcctctacaaattctgaatgaagaaattattacacagacccatctttattaccaggacttgaatctcatttatrtagtccattgaaactaaaatgttatctttcaatatgtccccccaaaaaagacagtattctggatcttgaattttctgggagatgcatttttggagcatccttcttgaggggataaagcagtttaagtcattgtccctgagcataattcatttataatatcccacatgaattcttgtcctttaagtagctactcctgggactttgcccccctctttttcaacatgcttaatgtcacactggcctgaagagcaactttactgctgcaggggtaacttatatttcatctcataaagcaccaaatctgcattattttttacctcaattccggatgaattttggtgattaaaatgagaaaaacatggctcgtggtcctcaagtggatttttggatcccggttcaaaagtggaataaatctattttagaaatgtgagttcatattactttataataacatcctcaggtgatgggcatgcacgtgggcccagggtagggagtgccgtggtgaagagtctgatgatgtccatcaggagtttcagagttagcctcacagttcagtatctttttttttttttttgagatggagtcttgctctgtcgcccaggctggagtgcagtggcacaatctcagctcactgcaagctccgcctcccgggttcacgccattctcctgcctcagcctcccaagtagctgggactacaggcacccaccaccatgcccggctaattttttgtatttttagtagagacggggtttcactgtgttagtcaggatggtcttgatctcctgaccttgtgatccgcccacttcagcctcccaaagtgctaggattacaggcatgagccaccgcgcccagccacagttgagtatcttaataatgttttatcattatttagggtttagggtttaagattggagttattagagtttagagcccttgggatcatagtcaaagttacatttgggaacaagaaagtctcagcgtagtctctgtcactcttcttgtatcattgggattattagggtgaaggtatctgatcattaagaagagagatgtagggttcggattctggtcacgatgtatgtggatctgctccaacttcttcacagagtttagagctcaggatcatttgtttgtggtaattaggcctttagggttgtcattgtcaaggggttcagggtcaaacatccattaatttatcatcatttggaatttggggtcttctgttgcaacaccaaca

SEQ ID NO: 92479 - DNA, 2340 bp, Homo sapiens
gcatagcaaaagaacttattgacagagtaaacaggcaatctacagaatgggaaaaaatttttgcaaactacccatccctcaaaggtctgatatccagcatctataaggaacttaaacaaatctacaagaaaaaaaccaagcaacctcataaaagaagtaggcaaaggacatgaacagacacttttctgtttttttgagactgagtctcactccrtcgctcaggctggagtgcagtgacgcaatctcagcttattgcaacctccgcctcccaggttcaagcaattctcgtgcctcagcctcccaagtagctgggactacaggtgcctgccaccacgccccactaatttttgtacttttagtagagacagggtttcaccatattgcccaggctggtctcaaactcctgacctagtgacctgcatgcctcagcctcccaaagtgctgggattacaggcatgagccaccgcgcctggccgaacagacactttaaaagaagacatacatggagccaacaaacaaatgaaaaaaagctcacatcactgatcattagagaaatgcaaatcaaaaccacaatgggaacaaatttatttctgagtaagagctcacttccttatccctcccctgtcacagatcccatgacccaaacccctcccactaggccccacctcccaacactgccacactggggatcaaatttcaacatgagttttggtgggaacaaaccacatccaaaccattgcaccatggtacccagcatatattataacatttattgtgtaagttaagagataggatgaaatttccataagctgtcttcagcagacaaatggtatctttctgcaactgtatcagatcacattcattcaatcaaaacaattattgaatttttaataggtgaggttttagcagtatagaaaataaacataatcaatacctccttggagcttacactttactgtggacatgcaaataaatgtataatttcaataggaggaagtgctaagaagaaaatgtacaggactgtatgctagagagtgagggtgagggcatgtcttgtctagttagggaggcctccttggggaggtgccctgtgagctgagccgatgcatacatggtgataagagtgaattgtatgcagatcccaggggagagcagtctgggctcaggcacagcaagtgtgaaggtttgaacagggagcaagcactacctgttcaaggaacagagagaaggccagggtggctggagtgtggtgaacaagggtgagagtggtaggagaggggaccagggaggctgtcagggttcaagtgctataatgtgctgcaggccattgtaaggagtctgtattttattctacaggcagtgggacacaaccaagggtttttatcaggggtacagccagatttgtagccaccagcttcacatgtacatcactgaaacgtttcttttaaatggaaataatttttctttgtattttatagaatagaccagaggactgccatttcgccaaaggatgcttttgaaactcggcaggacttaaatgaggtacgtgcaatcattactggttataagaacatgaattagccaatcatgagatttactattctttttcacagtactaggaattcattctcatgaaaacttagtatttttgcttttaagtgaacttgtaatacttatagttctttgttcaattggtaatgtttttcctttttccggagcaaacatttaaaatactgtttgtgaggtggcttgcgatgtcttggccctaacccaagtccagcagtcattttgttacactcttttcagctttgcttcaggattgtataaccgtggcgatgacagttaacatttgcaaaattttctcttaattttattttgtctacatctctgtttttcctaacagcttctgcaatttcaaacataatcatacttactgtttatccactaagaatgatatagtttagtgtttgcaatgtgattttcttagtagacttcaagacgtgaagccgtattttccaatccaaatcatttcccaccaaactggacatcatgatgttaattagcttgttctggattttctttggaatatgtaattgaattctcctgtatgaaattaatgtaatataattatgatatctattataatgaatgccattgtttaagacattggtttggaatactctctctggctcttcttgtcctcattgtaaattaagtagtagtaggtggtatttagtacgtctgattaaggtcatagcaaagagaatgaaaagacctgatgatcagatgccaaaaagagaaatgatgggctttacgcaaattgttatttgacgttttgaa

SEQ ID NO: 92480 - DNA, 2340 bp, Homo sapiens
gcatagcaaaagaacttattgacagagtaaacaggcaatctacagaatgggaaaaaatttttgcaaactacccatccctcaaaggtctgatatccagcatctataaggaacttaaacaaatctacaagaaaaaaaccaagcaacctcataaaagaagtaggcaaaggacatgaacagacacttttctgtttttttgagactgagtctcactccgtcgctcaggctggagtgcagtgacgcaatctcagcttattgcaacctccgcctcccaggttcaagcaattctcgtgcctcagcctcccaagtagctgggactacaggtgcctgccaccacgccccactaatttttgtacttttagtagagacagggtttcaccatattgcccaggctggtctcaaactcctgacctagtgacctgcatgcctcagcctcccaaagtgctgggattacaggcatgagccaccgcgcctggccgaacagacactttaaaagaagacatacatggagccaacaaacaaatgaaaaaaagctcacatcactgatcattagagaaatgcaaatcaaaaccacaatgggaacaaatttatttctgagtaagagctcacttccttatccctcccctgtcacagatcccatgacccaaacccctcccactaggccccacctcccaacactgccacactggggatcaaatttcaacatgagttttggtgggaacaaaccacatccaaaccattgcaccatggtacccagcatatattataacatttattgtgtaagttaagagataggatgaaatttccataagctgtcttcagcagacaaatggtatctttctgcaactgtatcagatcacattcattcaatcaaaacaattattgaatttttaataggtgaggttttagcagtatagaaaataaacataatcaatacctccttggagcktacactttactgtggacatgcaaataaatgtataatttcaataggaggaagtgctaagaagaaaatgtacaggactgtatgctagagagtgagggtgagggcatgtcttgtctagttagggaggcctccttggggaggtgccctgtgagctgagccgatgcatacatggtgataagagtgaattgtatgcagatcccaggggagagcagtctgggctcaggcacagcaagtgtgaaggtttgaacagggagcaagcactacctgttcaaggaacagagagaaggccagggtggctggagtgtggtgaacaagggtgagagtggtaggagaggggaccagggaggctgtcagggttcaagtgctataatgtgctgcaggccattgtaaggagtctgtattttattctacaggcagtgggacacaaccaagggtttttatcaggggtacagccagatttgtagccaccagcttcacatgtacatcactgaaacgtttcttttaaatggaaataatttttctttgtattttatagaatagaccagaggactgccatttcgccaaaggatgcttttgaaactcggcaggacttaaatgaggtacgtgcaatcattactggttataagaacatgaattagccaatcatgagatttactattctttttcacagtactaggaattcattctcatgaaaacttagtatttttgcttttaagtgaacttgtaatacttatagttctttgttcaattggtaatgtttttcctttttccggagcaaacatttaaaatactgtttgtgaggtggcttgcgatgtcttggccctaacccaagtccagcagtcattttgttacactcttttcagctttgcttcaggattgtataaccgtggcgatgacagttaacatttgcaaaattttctcttaattttattttgtctacatctctgtttttcctaacagcttctgcaatttcaaacataatcatacttactgtttatccactaagaatgatatagtttagtgtttgcaatgtgattttcttagtagacttcaagacgtgaagccgtattttccaatccaaatcatttcccaccaaactggacatcatgatgttaattagcttgttctggattttctttggaatatgtaattgaattctcctgtatgaaattaatgtaatataattatgatatctattataatgaatgccattgtttaagacattggtttggaatactctctctggctcttcttgtcctcattgtaaattaagtagtagtaggtggtatttagtacgtctgattaaggtcatagcaaagagaatgaaaagacctgatgatcagatgccaaaaagagaaatgatgggctttacgcaaattgttatttgacgttttgaa

SEQ ID NO: 92481 - DNA, 775 bp, Homo sapiens
tcagcctcccaaagtgctgggattacaggcgtgagccaccgtgcccagccctattattaattttttagagacagtctcgctgtgttgcccaggctagtttcaaacgcttgggctcaagtaatcctcctgcctcagtctcctaaagtgctggattaggggcatgagccaccatgcccagctgctagttgcaattaatttattaatcaggatagctaagcacagtcatttatggtgggtggagggagacagagggagagggagattgtgtttcatgatgaaaagatcattttgagtatttttgccaaaataataatcatagaataagatggagatccttgcatatgaataatcttctcaatcatgttgttctcagtgttgctacgttatttggcagataactttttgccaggaggataattataacacatttttttttgaaagagtkttctaattgagaagtttctttcctgactaatgacttaacaaataaaccattgttacaacaaactgtgtcataacagcaaagttgcaataactatgaatctaagatagtttcaagttctctgtagtagagtgtactttcaagtctatccaaaacaaaaacgttagctctaatatatatttgtttttaataatatattgctcttaatattaaatatatgttgagtcattatttcgcctcctttcttagcatctcgatagttcttttggggatattgattttgcaggatgctttaatgtatttgttgttgtttagaaataaggcagtcttttg

SEQ ID NO: 92482 - DNA, 966 bp, Homo sapiens
tcagtgcatctaaattaggctgayttaggtataactgtatcttaaaaattatatatatttgatttaagtatgagttttcattttcataagcagaattgtcctataaattgtattgtttaaaatttaacattggagggctgggcgcagtggctcacgtctgtaatcccagcactttgggaggccgaggcgggcagatcacgaggtcgggagatcgagaccatcctggctaacatggtgaaacccggtctctactaaaaaatacaaaaaaaaaaaagttagccgggcgtggtggcgggcgcctgtggtcccagctacttggaggctgaggcaggagaatggcgtgaacccgggaggcggagcttacagtaagcagaaatcgcgcctgggtgactgagctagactccgtctcaaaaaaaaaaaaaaaaaaaaatttaacactggagttcttagatatacccatgttcctatagtaaatataactcattatattagaggcatgccatttatcacatgttatcatacgtgtgtgtgcatgtgtacttatgttaacttatgtgtgtgtgtgtgtatatacatatatatatacatacatatatatatatatatatacacacaccacagttataaatctattcctccagtggctgacttgtagattgcctatacttcttggctaccaaggattacaacccgtgatgaatgcctttatcagtatctccttgcagacttgtgggaaaggtttggcgaggatctatattttgctgtgcgaatgactactggacatgggagatttgcatatatgtttttaccagatattaacaaataacctaatgtctgcacatttacattcccactagcaaaattgaagttttcaatttctctatattcttatatttcatagcgttctgactttaaattttcatcaatctgctacttgcaaaagggtatgcttttttgtattaatat

SEQ ID NO: 92483 - DNA, 1253 bp, Homo sapiens
acactttttgttcattctcgttctatctcagtctcctctctttttatctctacacatacacacacacagacatttttttgctacatagaaaagtaaattttaggcatcaggttactaaaatatatcatgtttaaatacgtcaatgtgcattccctaagacaaagaacatccctctacataaacacaacaataacaatggtatgcaagaaatgcaatatgtacacaatcatacgtattacattttcaaatattcccaagtatctaacttacattttgaaaatgtctgattaaaatcacagcaatgtgaagttattgtttctatagagagaaaaattccataggctaagtgaaataaaataatttatgaatggaaatgtttgtaaaccaattttttatattcaataaatttcaaactattttatctgcattccccattttgattttgtctcttaaactcataaagctttatctgaattaagttgtgttacaaatgtttctttaaattatttgtgtaattaaaaggggaataaggcatgatgggattaagtgaggaaaaatatgatatctattagtagaataaaaggatctagaaccagaaataccagttgacccagcwatcccattactgggtatatacccaaaggattataaatcattctactattaagacacatatacatgtatgtttattgcagcaccgttcacaatagcaaatacttggaaccaactcaaatgcccatccatgatagactggataaagaaaatgtgaaacatatacatcatggaataccatgcagccataaaaaagaatgagttcatgtcctttgcagggtcatggatgaagctggaaaccatcactctcagcaaactaacacaagaacagaaaaccaaacaccacatgttctcactcataagtgggagttgaacaatgagaacacatggacacagggaggggaacatcaagcaccagggcctgtcagaggatggggggctaggggagggatagcattaggagaaatacctaatgtagatgataggttgatgggtacagcaaaccaccatggcacgtgtatacctatgtaacaaacctgcgtgttctgcacatgtatcccatgacttaaagtataataaaagacaaaataataataaataaataaaaattaaaaacggtgaatacgaatgagacaggagaatttccttgaccccttcatgggaacccttgtgaagggggtggctcatttacttggccacca

SEQ ID NO: 92484 - DNA, 705 bp, Homo sapiens
ggcaagagataggggtctagtttcattcttacacatacgaatatccagttttcccaacaccgtttgttgaagatcgtcctttctccaatatatagaaccaatgtacattagatattcctttatatgaagtgcttattcatttattttatctatatttcaagtagcttttctgtcatcttattattattgttttacaatgtaaatatttaaatagacacatccatccatatatacataggtacatagacagagacatgtacagatacatatattgataaacacatgcaaacatattttgaaaactagtcctttctcagatatcttcatttttaatgtaatcttccatgtagtctgtctttttattttttaaccatgactattgaggaataaaggtcttcatgtaaatagcatcaaatttatcattagttatttaatacattatttaggacattttaactactctaatgttgtgaaggtgttcttctgtgcatcaggayccatttttggacacttcagtaaagaaaaattaaaaaatagacaaataaataatctatttaaattttgtttggcatttccattattgtaaaatgtacatttttacattttaaagttccccaagttagcttattacaattcatgtcaatagaaacatgacagaggtaaagaattgtgctgtgttattagtgacattgcttgcatatgtca

SEQ ID NO: 92485 - DNA, 540 bp, Homo sapiens
actggatcaggctgggcgcagtggctcacacctgtaatctcagcactttgggaggcccaggcgggaggatcacttgaggtcaggagctcgagaccagactggctaacatggtgaaaccccatctctggtaaaaaacagaaaaattagccaggcgtggtggtgggcgcctgtwatcccagctacttgggaggctgaggcaggagaatggcttgaacccagaaggcagaggttgcagggagctgagatgataccactgcactccagcctgggcaacagagaaggactgtctcaaaaacaaaacaaaactgaatcagacatacctattgcccagataggacatgaacatccatttataatttttattctgatccagtagtcctcagagcatggttctagaaaccagcagtgtgtcacctgggcagttgttagaaatgcagattcttcaaccttacctcaaaccttctgactcagaaactgtagggggtggagctcaaactgttataaccgttcctccaaatggtttgcatacagactaaaatt

SEQ ID NO: 92486 - DNA, 540 bp, Homo sapiens
actggatcaggctgggcgcagtggctcacacctgtaatctcagcactttgggaggcccaggcgggaggatcacttgaggtcaggagctcgagaccagactggctaacatggtgaaaccccatctctggtaaaaaacagaaaaattagccaggcgtggtggtgggcgcctgtaatcccagctwcttgggaggctgaggcaggagaatggcttgaacccagaaggcagaggttgcagggagctgagatgataccactgcactccagcctgggcaacagagaaggactgtctcaaaaacaaaacaaaactgaatcagacatacctattgcccagataggacatgaacatccatttataatttttattctgatccagtagtcctcagagcatggttctagaaaccagcagtgtgtcacctgggcagttgttagaaatgcagattcttcaaccttacctcaaaccttctgactcagaaactgtagggggtggagctcaaactgttataaccgttcctccaaatggtttgcatacagactaaaatt

SEQ ID NO: 92487 - DNA, 1127 bp, Homo sapiens
gcatccttaactttctgttctttttactgtttttttttttaatttttatgtatttcactattcatttaaatgacattcaggaaaagataacatagatattactgaggcatcatttttgcctggcgaggtgtcagagtattggcaatggaaagtggttggctcttgggggataaaaaagaatttactgacaacagtaagggtttgaaaaagacaactgtattaattagaacacagcagaagagtgcaatggagctcttcagcaagaaaagactgggcacgccttgatggatttttcttagggttattcatagaacttaaagcagaagctgaagggtaatttggaccatattagtcacataggtcatgataaatcattacatttgtagacattttagtaccttgatgtcagcaaagattgcacaatgagttttggcatgtattcattatggagatgtatagaaattctagttacttatgaatttttgggaagaaagcctggtacagaatgcaggctttagataataaggaattctgattacttctgaattcctcagataaggagttttgcctctggatggtctgcttgatggccaccaggtgacctttgctttcctgaattttgcctacaaaggcttctgatcctcactttttaatatcttttatttttccatacacattcggtattcaaaaattttgaatcatttctagtttccattgccaaacaaacctcaattaattcacactgcataatatgttcttacaaycagattattgcttatcatgacttatagtaataaggaaatattttgaaattccctcccatactgtgctcttttccatcttactttcacatgtcctgtttccttagggtggaatgccttttccttactttactcagttggcatatgactgacaattcagcttcctaagtgtctctctgtttgataacattttgtgttctttccataagaagtggccaagccttccactgtgccttcaaataattttttaaaacaattttattttactttaagttctgggatacatgtgcagaacgtgcaggtttgttacatagttatacatgtgccatggtggtttgctgcacctatcaatctgtcatctaggtt

SEQ ID NO: 92488 - DNA, 1274 bp, Homo sapiens
tgcattttaaaatctcatatatgctattcttaattgaatttaactaaatttaattattattatgtgaatttttagatttgcttaaatatattactactgattttatactttgcatagccacagtttaagattggtacaggtgttggatgtccaaggagtataaatgaaagccttgtctaggattttctacagatattaagggttgatttcacttttgaaatattcttttattatatgacaggcttttaatcctataagctgctctacactgctcttggaaaggacaaatacaaattcttttgagtgtagtttgtcagagcagagtgaaccctatcttcgatgaccccagttcttccgcagctttctgcagcagctgagaactgatcacctttctactgtgacttacttagaggcctagactcaatgaaacctttcagaatgatagaatttggacatctcactatgactaaaatgtttgatgatctttcccacataatagcacagaaaatcaaataagccacttaacaattttttaaaagtctacagaagtattctaggaatacgttgtcacatatatactaaaatatataatcattcatctcttaaactagattataaaatatagtttggatagatacaaaaaatgctaaaatgtagatcaaatattcaagttctaggtagaaattctctttgatttctctttatctcatcaaaattttatctactatgccacagaaaatatcatattcttaatttgtctaactgctttcaagattttcccttgtctttggttttctgcagtatgaatatgataggcctgggtgtatttttgtttatctgtttgttttagtatttaatgtttataygactcagtgttctttgatctttctggatatgtagtttgccatctgttactatttttggaaaattctcagccattgtcacttcaaatatttattctctttgttgtctttgtcttttctttctggtatgtcgattacgggtatgttatgccttttgaaattgtaccacagttcttggatgttcttttctctatttttttctttgtatttcaattttgtacgtttctgttgacatatacatattttcaagttcactgatttttttctcagctatgtctagcctactgataggtcatcaaaaggattatttatttttgttgctgctttttttatttctaccatttacttttattttcaatctctacatttatgtttgcatagtttcatttctatactctatatagaaaaaaa

SEQ ID NO: 92489 - DNA, 1274 bp, Homo sapiens
tgcattttaaaatctcatatatgctattcttaattgaatttaactaaatttaattattattatgtgaatttttagatttgcttaaatatattactactgattttatactttgcatagccacagtttaagattggtacaggtgttggatgtccaaggagtataaatgaaagccttgtctaggattttctacagatattaagggttgatttcacttttgaaatattcttttattatatgacaggcttttaatcctataagctgctctacactgctcttggaaaggacaaatacaaattcttttgagtgtagtttgtcagagcagagtgaaccctatcttcgatgaccccagttcttccgcagctttctgcagcagctgagaactgatcacctttctactgtgacttacttagaggcctagactcaatgaaacctttcagaatgatagaatttggacatctcactatgactaaaatgtttgatgatctttcccacataatagcacagaaaatcaaataagccacttaacaattttttaaaagtctacagaagtattctaggaatacgttgtcacatatatactaaaatatataatcattcatctcttaaactagattataaaatatagtttggatagatacaaaaaatgctaaaatgtagatcaaatattcaagttctaggtagaaattctctttgatttctctttatctcatcaaaattttatctactatgccacagaaaatatcatattcttaatttgtctaactgctttcaagattttcccttgtctttggttttctgcagtatgaatatgataggcctgggtgtatttttgtttatctgtttgttttagtatttaatgtttatacgactcagtgttctttgatctttctggatatgtagtttgccatctgttactatttttggaaaattctcagccattgtcacttcaaatatttattctctttgttgtctttgtcttttctttctggtatgtcgattaygggtatgttatgccttttgaaattgtaccacagttcttggatgttcttttctctatttttttctttgtatttcaattttgtacgtttctgttgacatatacatattttcaagttcactgatttttttctcagctatgtctagcctactgataggtcatcaaaaggattatttatttttgttgctgctttttttatttctaccatttacttttattttcaatctctacatttatgtttgcatagtttcatttctatactctatatagaaaaaaa

SEQ ID NO: 92490 - DNA, 1393 bp, Homo sapiens
taacaaatgtaccatactcctgtgagatgttatcaacaggaaaaattgaaggagaggtgcatggagctctgtactatccttgcaatttttctgtaaatctaaaactgttgtaaaaaataaagtcaggggaggagcaaaaagaaaaaacgtttattttttattgaaaagaaaaaccctcattctccacagccacatccatatttcagaattgttcttagaaacttccagaaacaattcatttactgtatataacattatggcctagattaaactgatcagtaattattaatgcttaacgttagtgcggaagctcaaaaattatatactagagtgtttgtgtaactctaaatcttaagatacatgtcagtgatacccgaagcttctttttttttttattttatagagaaaacataattgacaaaatggtcacatactttttaaactttgttttcgacatctttgggaattgtaaccattgaaccccatgttcctgattcaagctcctctgtgcatctcttaagagttgttgaattgaagtcataatgcctgggatggaagaaaaggcttccaaggggctgatctcacaaatcagcggataggctgaccagttactctgtttgttctcaggcatgtgaaagcgttctctggtcctaaacatcctgttctagttgtgccccatttgttgaggggttgagggtggcattgatgcagtctccatgctttaactaggctgctattacctattacctgcctgcctcagcttccaactaccacccaggttaagagggcatgtctgatgaagaaaccacctcccttagtcaagatgattcaacttcattctactctcatcccctttctccaggtggaaatctgagggtctgaggaggagacagagagagaaaggggacgcaaaaaggctcaattctcaggcttctgtcccaacaacatcagtattatcttcataaatttaaaaaatatatagctttatattatatataaagtcatatatataactatatataactataactatatatataactatatatataactatatatataactatatatataactatatatataactatatatatataaaacaatgtagaaagactggtcaacgtgagtttcatkattatccagaaagccagcaggagttggatgagctcattcacagagaccactgggttttaggagcagggatttttatccctctggactgggagagttgggaaaaatgaaaggatccaagctttaccaaattcagactcacattttagttcccagccaaaggtcatgttgaagcacagtgagaagcagtttccctgaggaagggggttggacttggaggttggttcccctatttagattcagacaatgggagggaa

SEQ ID NO: 92491 - DNA, 507 bp, Homo sapiens
cggggtcactaatccagaaggtcagctggagggggcccttagagatgtgttcacctgaggaaactgaggcccagaatgggaaggggtgacactccttccaccgctgggggccctgctgctgcctcccattttgtctttcctcgggcctcctgatctttgcaacctcattttcatgccttggtgttttggrgcaaaggtggaccacttgtttcatgtttggaccacttgtttcttgggaaataaatagatttatggtcttaggatctggcttggttagaattgtgtaactccttagtggaatgggttggaggagagaacccagaaaattttgagggaaactcttcccgatttgaaagcaaagccgccctcaccaaaaagtgctccttccgctgcagcctcttcattccgaatggggtgaatcctttggctggagcccttcgtgtgtctccctcctcctcagcacctgcagcttctcagtctccccaggtgggatgggaaggtggggga

SEQ ID NO: 92492 - DNA, 507 bp, Homo sapiens
cggggtcactaatccagaaggtcagctggagggggcccttagagatgtgttcacctgaggaaactgaggcccagaatgggaaggggtgacactccttccaccgctgggggccctgctgctgcctcccattttgtctttcctcgggcctcctgatctttgcaacctcattttcatgccttggtgttttggggcaaaggtggaccacttgtttcatgtttggaccacttgtttcttgggaaataaatagatttatggtcttaggatctggcttggttagaattgtgtaactccttagtggaatgggttggaggagagaacccagaaaattttgagggaaactcttcccgatttgraagcaaagccgccctcaccaaaaagtgctccttccgctgcagcctcttcattccgaatggggtgaatcctttggctggagcccttcgtgtgtctccctcctcctcagcacctgcagcttctcagtctccccaggtgggatgggaaggtggggga

SEQ ID NO: 92493 - DNA, 1562 bp, Homo sapiens
gggggattttgccagtgcttctctttgctgaaacactcaccctgcttgttcaccagcatacgtgatccaaaaatggccactctggaccctgtgtctacctaacctcccatctccacagacaactggaaaccaactcctgatcaaatgctcaagagaaagaaggttagaaaaaatctcatgggtcagatacttatgctcagtccaattatccaacaaaggctggggttagtagatcacgcactaacagaagggatccatcacttctgctgccttggtggggatggaaaagaacaaggctctctaagaagaaattatgaggaaagaaaatgcaccaataaaagtcagttacttagacagctggatgtggtgcctcacacctgtaatcccartgttttgggaggccaaggaaggaggatcacttaaagaccaagagtttgagaccagcctgggcaacattagtgagaccctgtctctacaaaaattttgaaaagaaaattagccaggtgtggtgctgcgtgcctgtattcccagctactctaaagcctgagacaggaggattgcttgagcccaggcggtcgaggcttcagtgagctatgatcataccactgcactccagcctggatggtagagtgagacttggcctctaaaaaaaaagacagttacttaaaggatagccattgtgcagcttcttgaaatgttaatatcactagatagtttatggggaaaacgttatttacatagtagcacagataggatattgatcaaggtggtagtttctgtatgcatatgtaactttatttctattgaaaatctctagcagtgaccacaaaatattttaaaaataacaactgttaatatttagaaaaatttagttaataaaataagttaatacttagaaaaattatttatcccaggaatttagggaggatttgacattaggcaatatattgaggcattttactgcaaaaagttataaagtgaaaacaatagaagctaaaagatacttcttaaatttaattttcattctctataaaaattcataaaaagttaggaatagaaagaatcagcacaaatctgtttaaagtatcttgcagaaactgatagtaagcattattaatattaaaaacaaaaaattcctattgctgcaagacagtaaatttcctcagattttcctcaagtcgtcaaaattcctttgacctctcttacagcccccaattaataagtagcaggaactgaggtaagtaattcaggccaattaaatttaaactaaatatgacccaataatttaaacagtttctctgggtataactcattatttgatgagatattgactgtctttccatttccttgccttttccccagctcttcagatggctcctggggtatgaggaggccttactcactgtgtgacacaggaaaaaagggacttcctggcttcttacacgcccctgagtgtgtactgcctgccatatgaggtgtgcacattctgcagtgtctgtatttaaccttggtgtcttgtagaactctagtcttctcttcctccttggctctgccagggctcg

SEQ ID NO: 92494 - DNA, 627 bp, Homo sapiens
ttagactaaacagaatcaaactactgatcccatatacttacaggttgaactatgaaatttgtsaaggcttcaaaattgtgagctttatttaaagtttgaataaataataaaagtgaacttcacttaattggtgttattattattcatgttccttattatttgattttggtaaattaattgcctactatgttttattcacatggttaggtgttggaatatacagatgaataagacacagtctctgccacagtgtggtgagcattgtcactacttatggctatggaatatctgaatctcttttgtagagttggctatattttactatatggattttattggtagtaagagaccattccctgtcataggaggttaatataccagattcttgctttttgagacttcttataacagactcaggcatatgatctactttctgcccttcagtgacattggtactggctttgccacaaaagctcacaccagaaaaatggaagcgtggatctctgacaaacaggagtaggatttctctgacaagaattctataggattgagttttccatacagtagtggtagcagagacagccataacatctggtgattggtaagaaagggtgacaatgattgccc

SEQ ID NO: 92495 - DNA, 733 bp, Homo sapiens
ggggatagattaaaaaaaaaaaatccattactgttaagcagcaaaagtccttgttgagaaccagaggttgatatcatctcacctttgaaaaaaaaaaaactgtgaggctaagttaaatgatcctgtattaattccgggtgtctgggaaaataaaacaattaaaaaaggttttcctacactgacatttcaattccgtagctggacagcagtgagaatattgaacataaaatttccaagatgttcaaaacattttcaataatgtaatgtcactactgtttaaatatgaaaataaaaagacaagcaaaattttaaaagagcatgtcaaaggcattttatgatgactttttaagaaattctgcaatccaaatatggctgatttaaatgcccactgaaataaaagatgactatgagcctgcagacaactcttctttctattattgaaaccagaaatttgaattgatacaaaaacaaaaactcatctttgatgaagaacacttagtttygaaatatgcacgattagaactgtacctgctacacctctctgaaaaagtcagtaaaaacaccaccacacaccaataactgaccaaagaattctgattttaaaagcacctactcacttcttgcatactagtgtaagcataagacatatatggtttgtaacatagtccttaatttttactgaacagttactgctacaaaccaaaagtgcatatatgggatacagaactctaga

SEQ ID NO: 92496 - DNA, 958 bp, Homo sapiens
catttggggaggcctaggaaggagaatcatttgaaccaaggaatttgagagcagcctgggcatcgtggtgaaaccccacctttacaaaaaatacaaaacttagccagttgtggcaacaggcacctgtaagtcccagctacttgagaggctaaggtgggaggactgcttgagcaacctccacaacagcaacctctgttgtggaggttgtgctttagtcctctgtatatgacttaatattcaaagcctagatttggaaattctggaaaaacccttttattgctcattaagccaggctcttacaaataataaaaaaaaacttcttttgagattatcatctcaccatagacttcaaaaatacctattttgaaattcaaagcagaacattgatttctttggtcttggcagtgtctgccctctgctgcccttggaaataagatcaggcttaagtctgaaccttcacagcagaagggctgccagggacaaaccttcattactcagaggaacaatgcaataggttatacttaagctattatattatcccaaaataaatgtctttattctccttggcgcagattccagcaatgaaggtgatggctttggacggaactcccattgtcctagttaccaaggcaagtaacaatgacattttgtttaactgctttctctgatttcatattcaattaaatatcaagtattgtcaattccatcactrtacttttccaaccacttttccctcctcccagtttccattaattctccccttacttctcacctagaagtctttacaccttcagtttctttcagagattctttcttcaggtttggaatgtgcaacttggggtgctgtaaaccttagatccaattctacctctacatttgctagtttgtgaatttgagcaagtttttaaacctatatttcctcgcccttataaggctctcaggaggacaaaataagata

SEQ ID NO: 92497 - DNA, 958 bp, Homo sapiens
catttggggaggcctaggaaggagaatcatttgaaccaaggaatttgagagcagcctgggcatcgtggtgaaaccccacctttacaaaaaatacaaaacttagccagttgtggcaacaggcacctgtaagtcccagctacttgagaggctaaggtgggaggactgcttgagcaacctccacaacagcaacctctgttgtggaggttgtgctttagtcctctgtatatgacttaatattcaaagcctagatttggaaattctggaaaaacccttttattgctcattaagccaggctcttacaaataataaaaaaaaacttcttttgagattatcatctcaccatagacttcaaaaatacctattttgaaattcaaagcagaacattgatttctttggtcttggcagtgtctgccctctgctgcccttggaaataagatcaggcttaagtctgaaccttcacagcagaagggctgccagggacaaaccttcattactcagaggaacaatgcaataggttatacttaagctattatattatcccaaaataaatgtctttattctccttggcgcagattccagcaatgaaggtgatggctttggacggaactcccattgtcctagttaccaaggcaagtaacaatgacattttgtttaactgctttctctgatttcatattcaattaaatatcaagtattgtcaattccatcactgtacttttccaaccacttttccctcctcccagtttccattaattctccccttacttctcacctagaagtctttacaccttcagtttctttcagagattctttcttcaggtttggaaygtgcaacttggggtgctgtaaaccttagatccaattctacctctacatttgctagtttgtgaatttgagcaagtttttaaacctatatttcctcgcccttataaggctctcaggaggacaaaataagata

SEQ ID NO: 92498 - DNA, 778 bp, Homo sapiens
ctgcaccaacagcactgaattcaggtttcagtttacataccacttacagccatttggagattgtatttatttatttattatttatttatttatttgagacagagtctcattgtgtcgccaggctagagtgctgtggcatgatcttggctcactgcaacctccaactccctggttcaagggattctcctgcctccgccttccaagtagctgggattatagtcatgcgccaccatgcctggctartttttgtatttttagtagagataggatttcactatgttggccaggatggtctcgatctcctgacctcgtgatccgcctgcctcggcctccccaaagtgctgggattacaggtgtgagcaccatgcccggcccacttatttatttatttattttttttgggacagagtctcactctgttgccaggctggagtgcagtggcacgatctcggctcactgcaacctccgcctccaggttcaagcgattctcctgcctcagcctcccaagtagctgggatcacaggcgcccaccaacacacctgcctaatttctgtatttttagtagagacgggtttcaccatgttggccaggatggtctcgatctcttgacctcgtgatctgcctgcctcgggctccaaaactgctgggattacaggcgtgagccaccgcacccggcttttttttaatatttaatttttttgagacagtgtctcactctgttgcctaagcagctggagtgcagtggcaggatcacagctcactgcagcctcaacctccc

SEQ ID NO: 92499 - DNA, 619 bp, Homo sapiens
tgttaagagtgaccttatttttttccccttactctgagttatatacactcttacccttgaggttcaatacaactgtcatggccagaactcttccactttctgcttgttsctgcttagattatttctagtatgtttcagtataatctccgtagagcaattttgaggataagtcacttccttgttgcttcagtccagcttctcctatatcaataatcctacctagttaactagttaaagctatattctggccctcttactttgtaaccttccagttataaagttttggtttttcatgttttcttttactctaggaacttggtggtgattctgagcaattttttttccttagcattaatttacagaaatacacgtattctccttgttttggtggaagctgcagctgccaatcatctctcaaaccctgtgggtagctgctaagctgtatttcagaggaatgtcacaatcataccactggggagaaagagtaagcacagtgcttattaggtgccaaactggggtacctggaggcagaaacctctgttggctcttggtgtcacgtgtgcctctaaatgatgccacttcagtctgaggatcgctcttaagccttctgtccttactg

SEQ ID NO: 92500 - DNA, 666 bp, Homo sapiens
aatgaggaggaacaaacatgattaaacctaaaggaaatcatctaaataccaattctgatttcttgttataaatatcacattttaaaaaccactatgataaagttattactagcagtctgtgcaggtgatgagaaatggcaaatagaagggaaaaataaccaggtgaagatagcattactttctggcaagggagccccacattttctttttttagttaaggatgctttcacggataacagtgagagccagtgggggtgtgttttcagagtgccaacgctggcctatactgttgcctcagacactgactcagtgcagccctacagaagtgtgccttgaattaagtaagaaggctatcacatgagctttatcctcattaatgactgacctgatacaccacagaatgcaagctttggaggactgttcacaggccctgtaaatatcaggcaggcattttaaatgctctgtcccataaatatgtttaaagtaaccaaagtatgtcatgggagttcacaaaagttgtttaaatcgatgttytaagtcaaagtccaacaaataaggcttaaaaccttcaggagctctggaaaagccagattcagtgatataacaaaggattaaatgataccaatcagagctaggaactttgtctgaactgcattccctacggta

SEQ ID NO: 92501 - DNA, 1331 bp, Homo sapiens
ttattcattaagcaaataagtactaggtacccattaagttcaaggcacagatctacgggctgtgcaggattttttttaaaaggaatttgtcataaatcctacccttaatcagcttatagtttttaataagccagattctatttggtttgtgccaaggaaaaactcagctaaaattaaagacatctaggagaagtctcttctttccagaatcaccttcttgagcactcattctgaaggttccagcaactctgaatcctttttgcaattccctggttctcaaactcatgggagatgaacagattgtgaggataaaacaaaatgggaaaacagacgtggcaccatggggattgtggggatttgggaaacccatgtctgacatttcagagcagggtaagtacccactaaagatgtctctaaaagtcttggtatatttctgacgccatccccttccactccaaggctcccagctttggacctcttgaatatacgtactcgttgtaaatacgacaagctttaactggaaggtagtaatggtaaccttcctttgagtccttactgtgaaccaggcagaatgctattttgtatgcatattctcagtttaccactcatgagatacgtccttttagtattttatttcttttcttttcttttttttttttgagatggagtcttgctctgtcacccaggctggatgaagtggtgccatcttggctcactacaacatctgctgcccggattcaagatagtctgctgcctcagcctcccgagtagtggtattacagrcatgtgccactatgcctggctaatttttgtatttttagtagagacgggcaccatgttggccaggctggtttcgaactcctgacctcaagtgatcgactcacctcagcctcccaagtgctgggattataggcgtgagccactgcacctggcctccttttagtatttctgttttactggtaagaaaactgagattggggtgtaccttactcagtcactcagctattatttaatttgaactcaggtctttttgactccagaggcagagtttttacccattatattataccaattttgagtttcagagcttctgatattttatcgctgggcttcagataattccttcaaaattcccatctaatgctctaattggacaaagatttgttttcttttacagttgagtcttaagggagtacaagaaaagaaagcaaaaattccacataaaaagcagactagttggacaggtaagaaacagctgcatcctctttatgtaaagtaacatggcccagtttacggtttgggatgcctcagcgtgttaccacttgtctatt

SEQ ID NO: 92502 - DNA, 1539 bp, Homo sapiens
ggcttttttggaaagtgtgtggggtgctcatatctggccccaaattaaagataacgagtactgacattggagaaggagtcaagactccaagattcgtaggacacacgtcacatgtagggtctcttcatattcaacccttacaacatcccctctatagagatgtttggcactgggctccataaaattactacaacgtacaaagtgttagagctcagacgaaagaaggaaaggctttgtaaggaaaattggaggaaaggaggaagctggggaaaactctatagagtattcacagacatagtgaacaactagtctctatctactctgatgagtgtgcaaatggaaaacggattgagatcttagccctacagtgtaggttactaaatgatggcatggatttcttacggcttctggagaagtgctgggtttagggagctttacatcagcactggttctcagtcattcaaaataattaggttatggttactccttggaatatagcatggagtatcaccaccagggcttctgaatcaagacaagaacagcaataacaacagcaggaacagcaatagtgatcatttattgaagacttactatgtacctgaaactaaagctgcaaagaartctgaaagttaggtactaacttctttgcttcctgagaaaactaagacagaaagtttaaatgatttgcttgaggtcacactactagaaaaggacaaagccaggatgtaaacctaaatgatttccaagcccatcttcttcccacaggggcaccatcctcactgtaccatggtttgcctttatgcaaaactgcaacttactatccccaacagctcactaatataaaacagttctatttcacatatagcctttaaagcatgaacctggattatacacacctgagagggaagtctcgtctaactcattttaaaaagaaatctttgctctttcctatggtgtaacactcaatgagaccttaagcaattttttattattgatgatgatgatatcttatggatttttttctactcatttactccttgacttgtgcactaaaatggcaaagcatatgagcaactgcattcatgtttcgttaaaagactgtcatcatcacctgctttctaccattactagaaagaaaatgtgacttccttcatctctgtcctcctctgcaacattcatacagagataacctggctgctactgcatttttccagcttaaaaatttaaagccaataaatccaagtactaccaggttattctgctagacttgtccttcatccagttcagctacagaaggggataatgatctgtcataaaggtaaattcattaccacgaaataatatcatcatacttctactacccattttcacagcaaggcatgctctctctgtaatgctgtatcttagtcctctggggagcagtttactgctgacacaataataataacaacaacaagaactgacatttataggaagacaagacagcctgtattttctaactcttgacaaagaagggctcccacctctacttcagatgca

SEQ ID NO: 92503 - DNA, 601 bp, Homo sapiens
ctgctgccttcagcactctggcctattttagtactcaggatctcgggtagctcctaggtttactggaaatggattttatgtttctgtatctcattctccatgttgcttctcatgatttttgagaggagggaggaaaatgctaattttattctaccatacacaaaccagaagtccaaaaaaaacaatttttttctttttttgagacagggtcttgctctgtcgcccaagctggagtgcagtggtatgctctgggctcactgtaacctctgcytcccaagttcaagcgattcttgtgcctcagcctccgaagtagctgggattacaagcacaggccaccataccgggctatttttgtatttttagcagagacggggtttcatcatgttggccaggctggtcttgaactcctgacctcaggtgatccacccacctcagcctcccaaggtgttgggattacaggcgtgagccactgtgcctgacccaacaaaaacaattttgaagaggaacaagaataagctttcaccaccagctatcatgattaaaactatggtcttggcacatggatagctgtgtgtctttgtccctctttatccatcctaat

SEQ ID NO: 92504 - DNA, 601 bp, Homo sapiens
ctgctgccttcagcactctggcctattttagtactcaggatctcgggtagctcctaggtttactggaaatggattttatgtttctgtatctcattctccatgttgcttctcatgatttttgagaggagggaggaaaatgctaattttattctaccatacacaaaccagaagtccaaaaaaaacaatttttttctttttttgagacagggtcttgctctgtcgcccaagctggagtgcagtggtatgctctgggctcactgtaacctctgcctcccaagttcaagcgattcttgtgcctcagcctccgaagtagctgggattacaagcacaggccaccataccrggctatttttgtatttttagcagagacggggtttcatcatgttggccaggctggtcttgaactcctgacctcaggtgatccacccacctcagcctcccaaggtgttgggattacaggcgtgagccactgtgcctgacccaacaaaaacaattttgaagaggaacaagaataagctttcaccaccagctatcatgattaaaactatggtcttggcacatggatagctgtgtgtctttgtccctctttatccatcctaat

SEQ ID NO: 92505 - DNA, 652 bp, Homo sapiens
tttccccatttcttaaatagttttaaagccatttttactaactaaattgtgcatagaaaagagatacgtacttctacatttttgaaactctargcttctgcaatgtttacagtgcccttgattgctagagctgaatgggcactttggcatacttcctgcatttcatgagtaaattgaggctcagcaagctagtcacatattcccagtcccacaagtagttgggagatgcagaggaatccacttctgtcactagaggctgccttcagctcctaggagccacaagttcctctacatattgctgtttattttatcaatccagcatagggaatcttaagaacatcccatcatttttgccatgttggttagaagcaagtcacccatcctatccacactcaaagaaagagaattacacaaaatcatgaacatcagaaggtggggatcatggaagataaggatggtggcagcacaatagtctgcccaccaaatttttcaaaaaataggtttttataagtatctgtttttaagttaaatttattttatttaacttgtacaacagcactgcctttcatggatgagaaaactagtttgtagtatatctaaggccaaacatcaaatattcaaagttaaaatacctttatggaactcttgcttt

SEQ ID NO: 92506 - DNA, 585 bp, Homo sapiens
acccagtttaccagcatgtcagaaactttcattttccctccacacaagatcaccactatcctgacttttcatactatatatactgttttcaaatgttatgtaaataaaattataccacatttacttgtgtatgactcctttcactcaatattgtgcctgtgtttcattcatattgtcagttgtagctataatttgtttgttcttattgctcataatactctgttcggtgaacatacaactttatccattttaatgtctgtaggcatttgttcattttgttccatgcttccatgcaattacaagtagtactactatgaatattcttttacttgtattttggtgaacataagtatacagtcctattgaatataaacycaggaatgagattgaatttatagagtatgcactagccacttctggcagatccgccataattttcaattgtagttgtaccaatttttatttcttaccagaaatttatgagaattctagttgctctacatattcatcaatacctagtattttctcttatgtgagccattcttctaggcccgtagttatattgaattatagttataattggca

SEQ ID NO: 92507 - DNA, 760 bp, Homo sapiens
tggcaccacctcggctcactgcagcgtctgcctgccgggttcaagggatcctcctgcctcagcctcccaagttgctgggattacaggcatgcgccaccatgcctggctaatttttgcatttyggtagagacagtgtttcactatgttggtcaggcggtctcgaattcctgaccttgtgatcggcccacctctacctcacaaagtgctgggactacaggcgtgagccaccgtgcccaggacccttttgtatttttacatgaaaactataaatgcctctaacctaccactgtatctgctccctgctgtcctgggccatctgaaacttacccttgggtgtgtaattctccagctgaatgtcaagcagttgctctgtaagtatgtccaccacctctctcagtactgggttctgtgctttccaggccattgtgacatttagtttcttccccaggggactgacgggtgtgactgtcttgttgccacagtcatagtgaagaaaagtcttttcatccacctggccttgaaccgcacaccaccgtggtccaggtctgaacttagggatgacggtgatgtcatagcaaagagagtgagggtctgtggagaaaggcaggtgaggggtgggtggggaggaaaagacccctagttagcccccctccacgctgtgtcaataagaggatgcctctggcaggctgggctggcccaggaaggagtgccccctccagaactgtggtgtctacaagtttaaggcgagtgcttgcccctt

SEQ ID NO: 92508 - DNA, 760 bp, Homo sapiens
tggcaccacctcggctcactgcagcgtctgcctgccgggttcaagggatcctcctgcctcagcctcccaagttgctgggattacaggcatgcgccaccatgcctggctaatttttgcatttcggtagagacagtgtttcacyatgttggtcaggcggtctcgaattcctgaccttgtgatcggcccacctctacctcacaaagtgctgggactacaggcgtgagccaccgtgcccaggacccttttgtatttttacatgaaaactataaatgcctctaacctaccactgtatctgctccctgctgtcctgggccatctgaaacttacccttgggtgtgtaattctccagctgaatgtcaagcagttgctctgtaagtatgtccaccacctctctcagtactgggttctgtgctttccaggccattgtgacatttagtttcttccccaggggactgacgggtgtgactgtcttgttgccacagtcatagtgaagaaaagtcttttcatccacctggccttgaaccgcacaccaccgtggtccaggtctgaacttagggatgacggtgatgtcatagcaaagagagtgagggtctgtggagaaaggcaggtgaggggtgggtggggaggaaaagacccctagttagcccccctccacgctgtgtcaataagaggatgcctctggcaggctgggctggcccaggaaggagtgccccctccagaactgtggtgtctacaagtttaaggcgagtgcttgcccctt

SEQ ID NO: 92509 - DNA, 760 bp, Homo sapiens
tggcaccacctcggctcactgcagcgtctgcctgccgggttcaagggatcctcctgcctcagcctcccaagttgctgggattacaggcatgcgccaccatgcctggctaatttttgcatttcggtagagacagtgtttcactatgttggtcaggcggtctcgaattcctgaccttgtgatcggcccacctctacctcacaaagtgctgggactacaggcgtgagccaccgtgcccaggacccttttgtatttttacatgaaaactataaatgcctctaacctaccactgtatctgytccctgctgtcctgggccatctgaaacttacccttgggtgtgtaattctccagctgaatgtcaagcagttgctctgtaagtatgtccaccacctctctcagtactgggttctgtgctttccaggccattgtgacatttagtttcttccccaggggactgacgggtgtgactgtcttgttgccacagtcatagtgaagaaaagtcttttcatccacctggccttgaaccgcacaccaccgtggtccaggtctgaacttagggatgacggtgatgtcatagcaaagagagtgagggtctgtggagaaaggcaggtgaggggtgggtggggaggaaaagacccctagttagcccccctccacgctgtgtcaataagaggatgcctctggcaggctgggctggcccaggaaggagtgccccctccagaactgtggtgtctacaagtttaaggcgagtgcttgcccctt

SEQ ID NO: 92510 - DNA, 760 bp, Homo sapiens
tggcaccacctcggctcactgcagcgtctgcctgccgggttcaagggatcctcctgcctcagcctcccaagttgctgggattacaggcatgcgccaccatgcctggctaatttttgcatttcggtagagacagtgtttcactatgttggtcaggcggtctcgaattcctgaccttgtgatcggcccacctctacctcacaaagtgctgggactacaggcgtgagccaccgtgcccaggacccttttgtatttttacatgaaaactataaatgcctctaacctaccactgtatctgctccctgctgtcctgggccatctgaaacttacccttgggtgtgtaattctccagctgaatgtcamgcagttgctctgtaagtatgtccaccacctctctcagtactgggttctgtgctttccaggccattgtgacatttagtttcttccccaggggactgacgggtgtgactgtcttgttgccacagtcatagtgaagaaaagtcttttcatccacctggccttgaaccgcacaccaccgtggtccaggtctgaacttagggatgacggtgatgtcatagcaaagagagtgagggtctgtggagaaaggcaggtgaggggtgggtggggaggaaaagacccctagttagcccccctccacgctgtgtcaataagaggatgcctctggcaggctgggctggcccaggaaggagtgccccctccagaactgtggtgtctacaagtttaaggcgagtgcttgcccctt

SEQ ID NO: 92511 - DNA, 760 bp, Homo sapiens
tggcaccacctcggctcactgcagcgtctgcctgccgggttcaagggatcctcctgcctcagcctcccaagttgctgggattacaggcatgcgccaccatgcctggctaatttttgcatttcggtagagacagtgtttcactatgttggtcaggcggtctcgaattcctgaccttgtgatcggcccacctctacctcacaaagtgctgggactacaggcgtgagccaccgtgcccaggacccttttgtatttttacatgaaaactataaatgcctctaacctaccactgtatctgctccctgctgtcctgggccatctgaaacttacccttgggtgtgtaattctccagctgaatgtcaagcagttgctctgtaagtatgtccaccacctctctcagtactgggttctgtgctttccaggccattgtgacatttagtttcttccccaggggactgacrggtgtgactgtcttgttgccacagtcatagtgaagaaaagtcttttcatccacctggccttgaaccgcacaccaccgtggtccaggtctgaacttagggatgacggtgatgtcatagcaaagagagtgagggtctgtggagaaaggcaggtgaggggtgggtggggaggaaaagacccctagttagcccccctccacgctgtgtcaataagaggatgcctctggcaggctgggctggcccaggaaggagtgccccctccagaactgtggtgtctacaagtttaaggcgagtgcttgcccctt

SEQ ID NO: 92512 - DNA, 814 bp, Homo sapiens
ttctgtagagacagggtctcaccacgttgccacggctcatctccaactcctagccccaagcaatcctcggcattggcttcccaaagttctgggattacagacatgaaccaccactcctggccccaaaagttattgctttttagtttttacttttcacatggttgtatgacattatgtagatttttaaaattctgtataagtaatttggggaatgctatataatataatgttttctttagccacagcttcctaaagatagaagtggtattaaaatgttgtgcattcgtcaaatcttgaagaagtttcaaatttttaggttgattctaacctctcattttggttgacacaataatccataaaaacaagtaaagcgcccactctgatctggaaggggtaaggaggtgaaagtattgataagccaaagtgacagcctcttttgtagacatgatcctgcctaaatatctcatgcccctcaaaagagggccctgaackccctgcttctgcagagctccatgcagtccttgaagcactctctggctgtctctgcaagtggctgaacagctcctcctggtctctgtggggctgcagaggctccaggtccccatggctcaggggctgtcatgctcaccaggtcccatcaagggtgcaccccactgtgggtggtggaggagaccaggtgtagctgctcctgcctctacacctctcctgactggccaatcttaacaggaggaaggagtagggatgagtggagccatggaggttggtgctggaaagaacagaaatgaagaccttcgtccaatcccccaaatgatgg

SEQ ID NO: 92513 - DNA, 1496 bp, Homo sapiens
tgggtgcagctcccagggtgaggaaaggctgagagtgaagggaaaagaaggtggtttgtctacaagcccacccaaggccagggaacgtggatagaaagagctctctttggacagggttcccccaggtcctctagacccttctatgagagggaggagcaggccctcagtgagggtgcagacccctcattaccagcctcagttgtgagcccccctgggctgtaacaggacctgggctggctctgtggtgtggtgaaggagggtggaggttggaacagggtacagagccaggggtagtgttggagggaaaagcatgtttcttatttgtgggagaggttccgaaatggggagggcctgggaaggatcacccaggagaacagacccaggtttttctcagccacttaaaccaatgcttcatcttttctcaaggtggaaagtgatatcaagaagcctctgttagcctggtctgggtcctgctctcccttcagggaggccgcctgtctactcaccactgtgcctttctggaaagcaggagttcaagccttagcaagcccagaggcccccagcagaygatgaggacattgtcggctcaacatctcaggccactcattaccttcgctcatgatcccagcagccatttttcttaacaccttctgccactttctgtcggtgctaatggatggaactcctgcacaagttttaactgaacaagaaatcccagcaaaaggcatttttttttctacttctttgattgtagaaaagcagacacttctctgaaacatgaccttattcttccaaacagtatcgctagtaaaatagcatgctggacttcagacctcagggatccttttgatgcactgaccaggaattgtgataatccttttcatttttatggctttttacagtttctcattctgtcaaccatattgaagtgaagtggcatagtcttcactcactgtaatctccagctcctgggctcaagtgatcctctagactcagcctctagaatagctgggactacaggcacatgccaccaggactggcaaactgttttatttttaggtagaggtagggtcttcctatgttgcccaggatggtcttcaaatcttggtctcgagcaatgctaccaccttggcctcccaatgctctgggattacagacatgaaccacagtgcctgttgtagaaatttttaattatttaatatgaaaatattacattcatgattattttatttagtaaataaaataatagagagcccagaaatcaacctgcacacctaccgccatctaatcttcaatagaaatgggcaatgtgggaaagactccctattcgaaaattagtgctggaatatctggccaaccatatgcagaagaatgaaactgaacccctacttctccccatatatgtaaaataattcaatatggatgaaagatttaaatataagtactaaaactgtaaaaatcctggaatataacctaagaaataccaatgtggacat

SEQ ID NO: 92514 - DNA, 1496 bp, Homo sapiens
tgggtgcagctcccagggtgaggaaaggctgagagtgaagggaaaagaaggtggtttgtctacaagcccacccaaggccagggaacgtggatagaaagagctctctttggacagggttcccccaggtcctctagacccttctatgagagggaggagcaggccctcagtgagggtgcagacccctcattaccagcctcagttgtgagcccccctgggctgtaacaggacctgggctggctctgtggtgtggtgaaggagggtggaggttggaacagggtacagagccaggggtagtgttggagggaaaagcatgtttcttatttgtgggagaggttccgaaatggggagggcctgggaaggatcacccaggagaacagacccaggtttttctcagccacttaaaccaatgcttcatcttttctcaaggtggaaagtgatatcaagaagcctctgttagcctggtctgggtcctgctctcccttcagggaggccgcctgtctactcaccactgtgcctttctggaaagcaggagttcaagccttagcaagcccagaggcccccagcagacgatgaggacattgtcggctcaacatctcaggccactcattaccttcgctcatgatcccagcagccatttttcttaacaccttctgccactttctstcggtgctaatggatggaactcctgcacaagttttaactgaacaagaaatcccagcaaaaggcatttttttttctacttctttgattgtagaaaagcagacacttctctgaaacatgaccttattcttccaaacagtatcgctagtaaaatagcatgctggacttcagacctcagggatccttttgatgcactgaccaggaattgtgataatccttttcatttttatggctttttacagtttctcattctgtcaaccatattgaagtgaagtggcatagtcttcactcactgtaatctccagctcctgggctcaagtgatcctctagactcagcctctagaatagctgggactacaggcacatgccaccaggactggcaaactgttttatttttaggtagaggtagggtcttcctatgttgcccaggatggtcttcaaatcttggtctcgagcaatgctaccaccttggcctcccaatgctctgggattacagacatgaaccacagtgcctgttgtagaaatttttaattatttaatatgaaaatattacattcatgattattttatttagtaaataaaataatagagagcccagaaatcaacctgcacacctaccgccatctaatcttcaatagaaatgggcaatgtgggaaagactccctattcgaaaattagtgctggaatatctggccaaccatatgcagaagaatgaaactgaacccctacttctccccatatatgtaaaataattcaatatggatgaaagatttaaatataagtactaaaactgtaaaaatcctggaatataacctaagaaataccaatgtggacat

SEQ ID NO: 92515 - DNA, 1496 bp, Homo sapiens
tgggtgcagctcccagggtgaggaaaggctgagagtgaagggaaaagaaggtggtttgtctacaagcccacccaaggccagggaacgtggatagaaagagctctctttggacagggttcccccaggtcctctagacccttctatgagagggaggagcaggccctcagtgagggtgcagacccctcattaccagcctcagttgtgagcccccctgggctgtaacaggacctgggctggctctgtggtgtggtgaaggagggtggaggttggaacagggtacagagccaggggtagtgttggagggaaaagcatgtttcttatttgtgggagaggttccgaaatggggagggcctgggaaggatcacccaggagaacagacccaggtttttctcagccacttaaaccaatgcttcatcttttctcaaggtggaaagtgatatcaagaagcctctgttagcctggtctgggtcctgctctcccttcagggaggccgcctgtctactcaccactgtgcctttctggaaagcaggagttcaagccttagcaagcccagaggcccccagcagacgatgaggacattgtcggctcaacatctcaggccactcattaccttcgctcatgatcccagcagccatttttcttaacaccttctgccactttctgtcggtgctaawggatggaactcctgcacaagttttaactgaacaagaaatcccagcaaaaggcatttttttttctacttctttgattgtagaaaagcagacacttctctgaaacatgaccttattcttccaaacagtatcgctagtaaaatagcatgctggacttcagacctcagggatccttttgatgcactgaccaggaattgtgataatccttttcatttttatggctttttacagtttctcattctgtcaaccatattgaagtgaagtggcatagtcttcactcactgtaatctccagctcctgggctcaagtgatcctctagactcagcctctagaatagctgggactacaggcacatgccaccaggactggcaaactgttttatttttaggtagaggtagggtcttcctatgttgcccaggatggtcttcaaatcttggtctcgagcaatgctaccaccttggcctcccaatgctctgggattacagacatgaaccacagtgcctgttgtagaaatttttaattatttaatatgaaaatattacattcatgattattttatttagtaaataaaataatagagagcccagaaatcaacctgcacacctaccgccatctaatcttcaatagaaatgggcaatgtgggaaagactccctattcgaaaattagtgctggaatatctggccaaccatatgcagaagaatgaaactgaacccctacttctccccatatatgtaaaataattcaatatggatgaaagatttaaatataagtactaaaactgtaaaaatcctggaatataacctaagaaataccaatgtggacat

SEQ ID NO: 92516 - DNA, 927 bp, Homo sapiens
ctaaattttctctattaagctgttaaattttacatttaattaagcatgagttaaaattgtaagtttccaaaaccataactcaaataataaatgaagtgccaccttcatcatattaaaccaatgttctgaatattcattgttcagggttttatgatattaaaagtgaacatcttagttcactagtggtatggaagctagagctagtttttgttgttgttttgacacggagtctcgctctgttgctaggctggagttcagtggcgcgatctcagctcactgcaacctccgcctcctgggtccaagtgatgctcctgcctcaacctcccaggtagctaggactacaggcatatgccaccacgtccagctaatatttgtatttttagtagagacagtgtttcatcatgttggccaggatggtctcgatctcttgacctcgtgatccgcccgcctcagcctcccaaagtgctgggactgcaggcgtgagccactgtgcccagccattgttgtttttaattacacttgaattctatctttttttgcatgttaatgaatcttagcctggcaaagtgccagacacagtccagtggactcaaagagaagcaggcagttcataggacacaatgcctctggagagtaataggggtctacatatacacaacttcccagtcatagattaggagaaacactcacttttatttactttgacatatttaggaaatcactattagacattaattaaagaatgattgagactaattatttgcacaaggctctgtgtgtacaaatgaaataatcagaccatggatgatccacttatttctactctctaatggyggaaatagctgcaaactgaaattgtcattctctgagtctagttattattgcacctcagttgattggttacatcatatagacacaggcaaatct

SEQ ID NO: 92517 - DNA, 676 bp, Homo sapiens
gaaaaacgaagagataaaagtctaggatgttttaactgagtgagagtttgagagtggttttgccttctgccatgtcactgtaaaagagggccacttatctcagacagcattgccagcaacatgtccatggcatagcctcctgcaagtctctaccagcaaaacataagagttctctgtggctgctatgctctgacctctttgcttgttccccagtgtgagaaaaataaaaaaatcatcataggaagaaacacaggtaattcaggaaacatgcaaagatactttcgctttctttgttgggaaaggccaaaacatggtggcttcttccagcaatcattccagaccactgcttagtacatttttttttttgagatggagtctcgctctgtcacccaggctgggtgcagtggcgcaatctcggctcacagcaagctctgcctcccgggttcatgccattctcctgcctcagcctccggagtagctgggactacaggtgcccaccacsatgcccagctaattttctgtattttttttttttagtagagatggggtttcaccatgttagccaggatggtctcgctctcctgacctggtgatctgcccgcctcggcttcccaaagtgctgggattacaggcatgagccactgcacccagccactgcttagtacatttaaaatga

SEQ ID NO: 92518 - DNA, 1148 bp, Homo sapiens
agccatttatatacttttttctttatggcttctggttttgaggcatagaaaggtctttctagctctaaagttaatcagaaattctatgttttctttttgcttttttwaaaattttactttaagtccttggatacatgtgctgaacgtgcaggtttgttacataggtatacatgggccatggtggtttgctgcacctatcaacccgtcatctaggttttaagctccacatgcattaggtatttgtcctaatgctcttcctcctctttccccatgcccccaacaggccccggtgtgtgatgttcccctccctgtgtccatgtgttctcattgtttagctcccacttatgagtgagaacatgcagtgtttggttttctgttcctgtgttagtttgctgaggatgatggttttcagcttcatccaggtccctgcaaaggacatgaactcattcttttttatggctgcatagtattccaagttgcatatgtgccacattttctttatccagtatatcattgatgggcttttgggttgcttccaagtctttgctatcgtaagtagtgctgcaataaacaaatgtatgcatgtgtctttatagtagaatgatttataatcctttgggtatatacccagtaatgggattgctgggtcaaatggtatttctagttctagatcctcgaggagtcgccacactgtcttccacaatggttgagctaatttacactcccaccaacagtgtaaacgtgttcctatttctccacatcctcaccagcatttgttatttccagactttttaatgattgccattctaactggcatgagatggtatctccttgtggttttgatttgcatttctcagctcattgcaacctctgcctcccaggttcaagcaattctcctgcctcagcctccagagtagctgggattacaggggcacgccaccaaagcccagctaatttttgtatttttagcagaaacagggcttcaccatgttggccagtctggtctcaaactcctgatctcaagtgatccatccacctcagcctccccaaagtgctggattataggcgtgagccaccacggctggccattctcctgtgtttcttctggggcttttatactttcattttttaaaaccatagtttttgga

SEQ ID NO: 92519 - DNA, 1399 bp, Homo sapiens
  misc_feature (1)...(1399): n = A,T,C or G
tcagaaccacttattcacagttgtccgtgagcttgtctgggcatcatccaggtgctacactggcagcagtgaacggatgcagctgctcacccacttagagagggctattgcatcagaggctcacttcacacaaacacatgcagcagcacactatcagttgtatatactgtcattcactgacaggtagaataggtggcaagtcactgtcataccagtcttgaggttcagttttctagaatggggattgatgatcagtgatgggtgtctgtaatgtctgatgtccacaggaagtctcaggaacggatcgttggaaactaagagctctgcaggccgagctagcacctttccccctgcccctgtccctggggagcctgtgactccacccagcaaagcgggccggcgtagcttctgggatatgctggtaatggaagaagtggtgaagtgggcatctacctttctgcctgcctcctagctcctcccacactccctcctgcttcccagtcccccataggccttgccacagtgtcctttcatataaaactgctctgtcctgccagacaccatggcgtgtacctttagtcccagctcctcaggaggatgaaatgggaggattttgcttcaggccaagagttcaaggctgtagtaygttgtgatcatgcctgttaatgcactccagcctgggcaacacacaaacactctgtctcaaaaaagcaaaacaaaaactgctctgtcttttggactggagtttgtagaatgtggcagttctcactgatgtagagggagccttaacttactatgtgccttcacttccatttttcttgtcggatcctcacaacagcttgcaagataagtagagcttttacagtgaggaaggtgaggctcaggaaagttaggtaacctgcccaaggctccttagccagcccctggggaagccagggtctgaacccagacctctgaatcctcctagctcactgctgttccatagtgcccccatcccacacctttcctcttcccagtagcccttcctcattcactgcattgcccccagagtaaaacagagtgtggggatttgggttcccccaaaacaactgatgacattgtcctggatcggccagaagacactcggggccggaggcgtcacaaaaccgagagtgttcggactcctggtggagctgagcgggcgccaggctcagattctggagcccagagacaaaagtatgtgtgtggtggtggtgtgccctgggagggtatgggtgtgaagtcacagatgggccttggtctggataacatacaagtggtattgtttggacatgaggttcttactcccactgtcttcaagcgccggaccacacacgttgaaanaggtgaggtgggggacccttcatcctatggtttgccc

SEQ ID NO: 92520 - DNA, 540 bp, Homo sapiens
catttaaaaagttatgactaaaagctaatctatttttttcagttccccttgtctaaaccttaacacccttctgttatcaaacatctttaagagatgtgatgatatgattaattacagtatagcattctttatttacattctagtttaccctcagtactgataatatttcttcatcttttggagtaaagtcctttccatagcttcttaaatcacatgtttaaaatgatctcagttatattggtaaggcagaaacttaaaggtcttatttttctttctaatcagtaccaagaccagtgtgcagttcccagtaagtactcaacaaatttttttcaataaatatttttgaattatattccraatataattatattcggaatataattcagaatattcagaggtagacactagctctatttctaaacactgatattaacatttcactgaatatattattgacatatgctttgaaaggataaaacatatttcaattcatgtttatgagctaattttgcagttctctatcatcagctgactgtgtga

SEQ ID NO: 92521 - DNA, 540 bp, Homo sapiens
catttaaaaagttatgactaaaagctaatctatttttttcagttccccttgtctaaaccttaacacccttctgttatcaaacatctttaagagatgtgatgatatgattaattacagtatagcattctttatttacattctagtttaccctcagtactgataatatttcttcatcttttggagtaaagtcctttccatagcttcttaaatcacatgtttaaaatgatctcagttatattggtaaggcagaaacttaaaggtcttatttttctttctaatcagtaccaagaccagtgtgcagttcccagtaagtactcaacaaatttttttcaataaatatttttgaattatattccgaatataattatattcrgaatataattcagaatattcagaggtagacactagctctatttctaaacactgatattaacatttcactgaatatattattgacatatgctttgaaaggataaaacatatttcaattcatgtttatgagctaattttgcagttctctatcatcagctgactgtgtga

SEQ ID NO: 92522 - DNA, 741 bp, Homo sapiens
ggcatgtcatgttcaggaaacatggctccaagcctcctgagtagtggttttattgcgagctgaagcaagaagtgggatatagaaacatgaaacatgattttactttatctgctagaaaataacatgatggatgcctttctctgagttcccacatgccctgcgcaggcctcagtcataatacttgctgatttacttgccagtccccattaccggaatgtctgcatattgaaagtgcttggcatacagaaagtgtgcaataattgctttttgaatgagtagatagtaagctgaccgatccatttggtgggtgacaatggtgatcataatagctttggccaaataaagcaaagcaactctcagggaaagaggctacatsttttaaaaaatattttaaaataacaatagctactgtaatcaaatagtagattttgatgtatttggctttagcagaagtgtaattcgatcggaagtcttgaacaacatagatgatgctgttttatactccaagggccaagctgccaaactcacatgcttcttctcatttctagaaaacagcaataatcaactcccaacaaatcctcaaaaaacagtttttccaaggttaaagcacacacagagatcaggaataaagaaaggatgtttctgtctttcattagtgcactacatttctaaggcacctacaattatattttctagaattcataaaagtattatgctaaatataaaaattgattgcaaatt

SEQ ID NO: 92523 - DNA, 741 bp, Homo sapiens
ggcatgtcatgttcaggaaacatggctccaagcctcctgagtagtggttttattgcgagctgaagcaagaagtgggatatagaaacatgaaacatgattttactttatctgctagaaaataacatgatggatgcctttctctgagttcccacatgccctgcgcaggcctcagtcataatacttgctgatttacttgccagtccccattaccggaatgtctgcatattgaaagtgcttggcatacagaaagtgtgcaataattgctttttgaatgagtagatagtaagctgaccgatccatttggtgggtgacaatggtgatcataatagctttggccaaataaagcaaagcaactctcagggaaagaggctacatgttttaaaaaatattttaaaataacaatagctactgtaatcaaatagtagattttgatgtatttggctttagcagaagtgtaattcgatcggaagtcttgaacaacatagatgatgctgttttatactccaagggccaagctgccaarctcacatgcttcttctcatttctagaaaacagcaataatcaactcccaacaaatcctcaaaaaacagtttttccaaggttaaagcacacacagagatcaggaataaagaaaggatgtttctgtctttcattagtgcactacatttctaaggcacctacaattatattttctagaattcataaaagtattatgctaaatataaaaattgattgcaaatt

SEQ ID NO: 92524 - DNA, 741 bp, Homo sapiens
ggcatgtcatgttcaggaaacatggctccaagcctcctgagtagtggttttattgcgagctgaagcaagaagtgggatatagaaacatgaaacatgattttactttatctgctagaaaataacatgatggatgcctttctctgagttcccacatgccctgcgcaggcctcagtcataatacttgctgatttacttgccagtccccattaccggaatgtctgcatattgaaagtgcttggcatacagaaagtgtgcaataattgctttttgaatgagtagatagtaagctgaccgatccatttggtgggtgacaatggtgatcataatagctttggccaaataaagcaaagcaactctcagggaaagaggctacatgttttaaaaaatattttaaaataacaatagctactgtaatcaaatagtagattttgatgtatttggctttagcagaagtgtaattcgatcggaagtcttgaacaacatagatgatgctgttttatactccaagggccaagctgccaaactcacatgcttcttctcatttctagaaaacagcaataatcaactcccaacaaatcctcaaaaaacagtttttccaaggttaaagcacacacagagatcaggawtaaagaaaggatgtttctgtctttcattagtgcactacatttctaaggcacctacaattatattttctagaattcataaaagtattatgctaaatataaaaattgattgcaaatt

SEQ ID NO: 92525 - DNA, 1440 bp, Homo sapiens
ttcaggattggctgctctcgagaaagaaagcttcccacgggtcaccacaccccaccccactactttatccacagggaagcagctgtatcaaatggccaatggtcctagttcctggcagaaagtaaaagcatgataatagtctcctaaatgctctgcatatgagaagcgtccttcaggtctgtcgactttatatacactttcaactgatcctcctattttcagtttaattcctaatctccaaaggttctttgtgcctccaatttctgagcctttctggggttctgcagcataaacagactggctacaggcaggaaggttttagctttctactttctgctaaatcggtaacaattcaaacacctttctgcatctcctctgccatttattcttttgtgtttttatgcctttaaaaaattatttttaattttagttaaaatgacactgtaattttagtggcattttgagaaagagtgaaaataaatacgaatagtcacttattttttcaacagaagtcactatatatatatatacatatactatgtatatgtgttactgcttaaccatttcatgaaatgctctctattatcatcttaagaacagagactcctttatcagctatatgaatttagcatctggctaggaactttggaaaaactggatatgtcaaaatagagaacagaagtatatgttgaataatcttctttgcccctggaatagaaatacctagcaaataaggcaaactgtgaatcagcttttccctcttaaatggcttaaagagggggctcttcttaaccaaaatgctacctaaaatgcaacaaagtacatcaacatatgtcttttgcaaagccaattaacttgtaatttatatttttaaaaatattcagatatgactcatgtttcttaataaaattccttgacaaaaagtgaattcaaggcccagggtttgctggagataacaatccacctggtaagacatggatttagactaatttttaatcactaattttatgttttccatgtttaatatgtttaatcactaatgtttatcatgcttctactttgtgccaggaactaggaccattggccatttgataccgctgcttccccatggataaagtagggggtgtggtggcccatagggagttttctttctcgagagcagccaatcctgaaggatcacagttgcccaatgtgcgcacaaagcactaatggttttgcatckgattgaagggctgtttgacaaaggttttcgctatttcaaatacgtaactggagtctaagtttccaaaaggtgctcccaagataaaaaatttctgtgatgatatcagcttgcacttaatggacaaaccagattctttgagaaatgtcagtagttttaatttagcagctgaaatctgaatatgtttcagtgtttcttagtgaagccttttctgctgcgaa

SEQ ID NO: 92526 - DNA, 541 bp, Homo sapiens
taaaaccaggtctcccatttagtagctcgctgacactggacaaattacttattttctctgcacctagatttcccatctgtaatataaaatcatcatgatacatacctcatagggttgcagaggattaaatgagatatacatacagagcacttagcacagtccctgagttaataagtcctccgttaagtattacataggagaagtagtaaaaagtttcctcttaagtaaaatgctaataaaagtgcttaccctgcctcccaagattgtggcaaagttatracgcaaggcttttaaactgtaatgctgaacaaacgtaagggattggtatataccttgagatattttggacaaagttctaaccttacttttatacaatatgctttctctcacccgcctgcagttgggttaataatgcccagcattaattaataagcaataaaatcagaagataccccgaatacaagtagctgacgctcagagagcagtattaaggcgagcacccgcagaccggacctggataactccttggagttcacctcta

SEQ ID NO: 92527 - DNA, 1187 bp, Homo sapiens
tgagtcccataaaccagaacttgaatgttagaagcccctatagcaccaatcaagaccagaaactagagatcgtaaaatggaagaacgatagagttggagagcaccggatgtgaccctcttcattaggaggcatttttaccttctattccactcaaaggggtttagtttctgcagaaggcaggcaaaggccatagcctgtaagggaaaattgcagggtaatcatgatcttccacacagaagccaaaataattcttttcaaataacaaaagccagctttcatctcacatgtgccggcactgtaccgagcacttcacctgtatcattccactggactttcacaaaacttcatgaggtacagatggtcctctcaaatttattcccgtgccacagacggagaaactggggtccaaagaggaaatatcttgaaaaggatcagaaagtaagaagtctggatcaagttcagtgcttgaatgctgcctggcacataataggtatgcaataaatatctgtggaatgagtgagtgcatagatgagtgaaatgtaggatgcagctcagaacacaggctctgagccatcatctcagcaatacggattaggcaatgcaagtgaataatcccaaggtatggtactgtaacacagaagaaagaagatgaaacctggatcctagctgtgggtttgctgagcgagtcacatgatctcagacaaggctttgctgcccaatcttctcttctttcagtaattggaacttttctctgggcagtccttgctagaatatggggtcctatggattttggccaagtaagtcacatggagccatttgcaggcatctgggtggagctaagcaaatgttaccaaaaacagcatctgtaggaagtgccaagttagaaccaagaagaccatctagggtcaagtcaccatctggaagaaggctcaagcaatcagttagagagctcagtgaacccccaaggagctgaggaaccagctcatcacctagtcccacccttcacaccagccacagtaggatattgaatgtaaaagtgcagtgttatcctcatcccagtcagaagggagattaactgacttcatttcattgtttatctrattgaaaaatacagattcaaatgtaaaagaaatacaagtgctgatgtgaaccaaaatatgttcaaccttcctaataatcaattaaa

SEQ ID NO: 92528 - DNA, 345 bp, Homo sapiens
gggtttacctttgggcatggtcatctgcaggagagaggagtgggagaagctcagactggtcacttgtgcttcatacatggggacatctctattgtatgcagctgaactggatttacaaaggagagcttcaagtacagaaaaattatggtataaaggtacacatatgcccttgtactcatccccatacctaatccagcagcaagacctatcagttccacttccagaatagttcttcaatccctccacttttttcatgccccctgcctccactttaatccaagtcaccatcatctcccacttggacaacttcaatagtcttctaattggtctccttgycactgttct

SEQ ID NO: 92529 - DNA, 2410 bp, Homo sapiens
ggaggcacctcacttctgaatctaaagtcctgaggacgccacagtactgctactccaagagcctttggggaaactccacacagagaagagggtggttgatagggttgatagggattgcggcacaggaatggagggaagaaggactgtcgagagggccgcggagggaggagggatggcaggagcagcatcagctacatctccagccatgaccttactgtggtagattccaagaagttgctatgctaagagtgacttacactgaggcctctagaaggagggtgatagcagtgccaaggaaaggcatatatttcaatggggaattgttttctctatacacaaaagcccagttgcagttggttttacttccataaagcctcactccaaatccatcttccagttggggcctctctcttacacatacacacagacacaagctcaaacatctatcacagtgctgtgacctgggtctttctcagccatctgtacagatcagttaaattgaagtcatctattagggcttcctatgcatccagcaatgctctggggatgcaaacgtgaatgaacatgacttctgcctgcatagagctctgtcaagtggatcccataaatccatatagaagttagggaggggctgggcatggtggctcatgcctgtaatcccagcattttgggaggccgaggcaggcagagatcacttgaggtcaggagtccaagacaagcctggccaacatgttgaaaccctgtctctcccgaaaatacaaaaaatagctgggtgtgatggtgggtgcctgtaatcccagtgacatgagaggctgaagtagggggatcacttgagcacaagaggtagaggttgcagtgagccgaggttaccccactgcactccagcctgggtgacagagcgaggctctgtctcaaaaaaaaaaaagttagggaggcagtaaaaagtcctaatataaagatgctttgggattaagggaagggagagattaattccacctggaggggatcagcacccctggtggaagtatatgtgagttaggccggggctggaaggatggcatgagggccaccatggggcacttacctaggtctctaggtcattggcacaatcctctactccagggaagaacttggacaagactagtatgctttctcaagagcagcaaaagccaatcagaaagccaaaagcagagtataggggttcaggttcctgtctgtttgggaactgagggagatcctggtccactaaagcattccatgaaatgatgccaactcactcagtaattgtgacaactcaagatatgaaatgaaaacatgtacatcaaatgcctcaaacagtgcctggatgaaatgatgtggtagcaccttttttttttttttttaaccaacatcattttatactccttaatatttactttcaaatttgattcccagtgccagtccctgctcccagtcttggtatcaaatctaaatacagggactttaataagaagttgtatcaaggtgggagcagcattttatagaaatagggggactctcaggacaagtcaggaatgggaaatacttccacatggcttaaacagagagcaaaaaagtgaggataacgggaagcaacattgccaaaggatttggggatccgagtgtgtttgctatgaacactaagscaagaaatttcacctagacatgcctacagcattgccactgaggctgctaaagagtcgtttgatctgctcaggtctctgttggctttcttgggacctgggttctcatctaattctatcctaaaaggtagtgaaagcctttgccacctccgtggtctacactctatcggaaagcctagaactcggtgtttgtgcagatatttctaagggccttcaatgccaaatactagagtagacactgaatactggcaggtgagccacagatatgcattgctgcggttgcatcagcccccagtgagaggaccaacaggccagtctgtgcagagccttctggctaataacactcaggtccctagatggctccagtccagcaagtacggtatatctcctctcattggtaatgcgtactctcctacttccctgaaagccccccaaggagggtgtgttgcttcctcaggaatgtgtagtccttttcattatgaacatatggtattgaccaaaccacagggatgggtttccactaagccacacaggctcccttatccaacccaaatggtaacatgtgttaacttgttgggagccactggtaacccatctttggcacttaagggcattctggtgaaagcaagtaaaaattaatcattagagacaagaatcagtagtggtgtagccaatctactctttaaagaggaaggaaatatagaatatattactagttagttacattcaaattctcctccagcccgaaa

SEQ ID NO: 92530 - DNA, 1003 bp, Homo sapiens
tgcatcggactcacgtgagcagagggatgactttcagttctgtctgtcctttgcccacaagaaattaccttgtgggcaaattatgagggaagtatgtagcttttttatctttgtagctctcttatttaggaatagaatgggaggcaggtttgctcagtcagtgcagttcccagcttgacttttccctttggcttagtgattgtggggtcccgagatttattttcctttgacataaccatcctgtgtcctgtgccgttgggatgtaaactccaggaggatgcagagttcttgtctgttcaggcaytgttatttctccaagtgcctgccacacagtatatgctcagaacaccgaggctgaaataagtaataaagttgtaggagaggtgagaggggctgcctcattccagggaaaaagttatgccctatggtccaaagtttggagtatattcccctaaagccagcatgcctcaagtggaagctttgtgtctgttggtttccccttctctgagagctgcttgagtcagctccttgccttcagatgggcctgttagaatcacagatggtactcaggatgagatgctgtcctttgaggggccatgattccccagcaaagctgtttcatgggtctgtgagctacagaggaggtgagaactgcatgctgacaaaggctggggcacatcttgagctagagacccaaactctctgcacctctatcagatgagaaaaccaaacctggaacacgcctgcctgtctaccccaagaggcatatgagatccagtggagtcagagccatgaaagtgcttagcactgagccccactgctggcttggtcataactgtgctctcctcgcagggcccatggtgcctgccctctccagtccagaatccagtgctccccagccactcccatcagggacctcagtgccctgctgtgtctccccactaccccagagtgcgtccctatgaggaaggcagagagaaaccatcacagccccattcattaa

SEQ ID NO: 92531 - DNA, 634 bp, Homo sapiens
agagcctcgagggcaagaggaatttggggttctcagggacctcagccagggcccacaataatgaccctcagcctagcccaagtcactctgcatagacatcacatctaagtttgcgatgttcttgccctggaaacacgaggttcctggcaggcagtccggagggcagccccagcctcctctgggcggacactggaaccctcagacggctctgtccccaggggctctgtcactcccctgctcagctgctctccccagggggtctgccgcctccagctgcccacgctgttctcatcctctgctcatggcttctgcttccctgggctcccactttcctcgtggcctcgatggccagggcccctgcggccccctcaccgtggactggattctgcctgctgctcactctctgttcctcctgcgcacttgtctcagccacaaatcattttattctttttacttttcctgattctggttttggaaggaagatactgataggcctagttctttttctttttttktttttttgtttttgtttttttttttttagacggagtttccccttgttgcccaggctggagtgcagtggtgcgatcttggctcaccacaacctacgcctcctgggttccagcgattctcc

SEQ ID NO: 92532 - DNA, 524 bp, Homo sapiens
attttgagatcatggaatgtttgttgagtttttgctttgttttgttttgttttttgagatggagtctccctctgtcacccaggctggagtgcagtggtgcgatctcggctcactgcaacctccgcctcccaggttcaaagtgattctcctgcctcagcctcccgagtagctgggactgcaggtacctgccaccacacctggctaattttttgtatttttagtagagatggggtttcaccatgatagccaggatggtgttgagttttgactgagcagaattaaatgtttctggaatgagactgggcatcactgagtcaagagaaccacaaagcgcatctccagtcacygatggtgttggtctttctcatttcaggtgttcgggcaggcatgtcatagtgtcttatgataaattgtgcatttccctggtggctgatgatgttgagtacattttcatataaccattggccatttgtatatgttcttttgttttgtcagttttttgcccatttttaaaaaattgggcg

SEQ ID NO: 92533 - DNA, 797 bp, Homo sapiens
actagtgcagaaatatttaaacattgtaactcactgaatgtccttacaggtacatactggcttatggaagtcctgatctcagtgtgagatcagttggtaataggcagccaaagaaacacaccactttgcatttatcattttatgatcctatctttgcattgccatttgagagcctagttctgtgacatctctagccatagtttgtaagggagagcccccaatgcactcttcatgatatgaatggtcttttgtcactcatgtattctttactgctttggtaaatggaatatctcagaacattggcattaggtgagttkttaggctttacaaaatatacccactcctgcatgctgcttctccgagcccttgtttccttctgctaccatagcaattttgacgtttctacttcatttatggtaggctgttgcttcctccaagcacactaacacttttcccaagggtccttgacaggatattacattctgtattccaggacaatgatcccacatcaacatatttttcctcattcaactttatgttctgtcccttttgatccagcacccctagaatctactacgactcctagttttttctggtccatgttgactagatcctacacctcctttggtgtcctttatcccccttgtcaggtctaacacttctccagccaggttatgttgtgattttaaccctaattattgctctgaaggactggacagtgtctgcatctgcagttttaagtaggtctacttaaaactggtgatttaagatgttcaagagcatcttttatcagagga

SEQ ID NO: 92534 - DNA, 928 bp, Homo sapiens
tcatgaaaatttactcttttgaatgggagttgaggcacaaatcacctatgctaatgttgctggtgtgaatcacaaggttccatcttaaattctataaactagatgggatggttagaaacctcatggagactacagatactatagggagttggtgttggttctgcaaccagtgaagctgtgctgcaatcaatttagctgcagaggttgggacagatagatatttgcttgtccctctgtgttgtctgtgacctccaagatagtcaggagagaactgattcccgacatttataccagagcaagtcatcaaacctaatttttattacaggatttcctttctcttttttaatatttgttgctacattgtatcaaaatattaaaatatttttgctcatattagcaatatatttcaagtacagctcttaaatatttatagaacacagaaattttatttttctgtacacagttattagacatttttcttggtatgtatttaaataatattattttaaaaatgaygagacctaaacttataccactgttcttcaaggagagagattaaaactcatattccaactatgtttgaggagactgacatattttatgtttcttaattatctttaaagttcccaattgcattactgttgaaaagactcaatttactatgtgccaatgaaagaataaaagaacctcccagacaactgctatttcagatgagaaagtatttcattcctttgtactgtcagaatataaaactttcatgtgaaggacgttttcaaccttcttttgttctactcaaagtcatggcattgtttaggtcaagactgacattcaacacaagtataaaatattaatttaataaaattgtccagtatatagattttctgttatttattaattggtaatgccttatatctttgtctctcaaaaa

SEQ ID NO: 92535 - DNA, 817 bp, Homo sapiens
tactcatcatttatatgcttctctcactcactttaggcttttttttggccccaagatgtttttatgtcaccctgcgactgtggaaaaacagctattgtccccaatgccctctatcaaactaccttttgaatgcaggtaactgtacttaactattttcctttcactctacacaggtcagaatttgtattctcccttcctattaactttcctgttgactaaaataacaaaattaatgcatactaaagtgtggttataaccttcccttcccttccagaaaattttmaaaaagatttttaaacccaaatggaattctgaattatttagtttctagaaatttcacaaagaacagaatgtttcgttacaatgcgtgtttccgtaaaaataatgaagtcaattggcaagtggaatgacatcactatagaatgtagtgttagcaccaccaggtaacagtcgctgaacacaaaatatattgatgcaattgaatgcagcaccctacttcttcctattggctcattctgtcttagagatgtttattaagccttctctctgtctttgtgaattttactttgtataagtcttccttatttccttccatcaggctatttttatttatatttactgcagtgtttctttattaaaaatttatatttcttaacaagttttattaaaattgctattattttgttagtacttttttgagacagggtcttgctctgtcgcccagactggaatacattggcccgatcaagggtcgcagcaacctcaacctcctggtcccaagctatccttccatctcagcctcccaagtagctgggac

SEQ ID NO: 92536 - DNA, 675 bp, Homo sapiens
taaactcacactaaagcacattaccatgaactttgatgggtgcaattagaagattctataggtctccagggagatgggggatggggagagaaggaaagattatgtacaaaggaaccaaagggcgtatgaaaaggaatatatcaggaatcaaaataggtttgatctttttaacatcatcatggagtagcaagataatggtcaatgccttcagagttctggtggagaaagaattctaacctggaattctatacctagccaaactgtcataaattgatgctggaaaaaatatttttacagaagtacccttactatttcactgaggggtgtcttccatcaaaatgaaagagcaaatcaagaaagaggaagatggaattcagaaaaaaaaaggaggaaattgaaggtaatatcatatgataggagatctctgaaatgcccaaggaacagtccttgaagctcttttcttttttttttcttattgatttatttttacaatccccatggataccatggatgaagctcttttctatcaacaacaactcgccatgaaattattgccttttttcaaattgagtgtaattggcatatcagaaaccgtgcatatctaaaatatacaattayataagttctgacatatacaccaatcaccaaaatcaagatactaaatatgtttgtcac

SEQ ID NO: 92537 - DNA, 672 bp, Homo sapiens
gaacctgtctctgcggtctggcggtgatggcgactgccgatgctgggagccctgccgcctgggatgcgccctgcacttccctcgcctccaatccccagtgcgccctcctggcctcagcgcacgcctgcgcactccgcgtccacgtgcaactcaatgtgcccacgtgttccctccgccttccccggaagcagcttgtgctctagttacaggctcaaaaagttcctttgcagaaacttttattttgttctagcttcttctagaaagatgtctctggcaacgcctttggcaaatttgggcgcaaagatgcagactttgtctcctcgaaggtcacttgggtcaccgtggccacttaaaggtcttccaaggttttccaaataatcaacagcctctgcctggtcttggaaagtaaacacacacgtgctcatactttttttctttgcttcctgactgagggcatgtgattatacctgttggtgttacttaaagacaagctttttaagttttktttttttttttttttgctatggaacttttctaacaatttcataagggaacccttgtgtgcctatcatctagtttctaccttatcaattcatggttaatcttgtctacatctgcagcccaggcactcttcgggcaatgttttgaagcaaatccgagaattgtaaatgt

SEQ ID NO: 92538 - DNA, 1232 bp, Homo sapiens
attagtaaaatgaacacttgtttatctttcatctattgtcactaagcctagtaagttttgtttaaaaataggttcccatatgtgtttacccatgttcatgtgcacacgcacattcacctgctttttaatttccagattgaggtttcctcatttcatagaccagatagatagaatgaatttgaaccctacttacaagagagtgtagctgtattataaattttcagggacttgataacatttcccccacccacatctcccatggcctgatattaataagtatcacagagcagtaaaggttttagccctagtataccattctggatttctactttgtcttagatcttttagccctggaaatttcccatactttcttgtgagctcaactatatattaaaagatgtttgttatttttcatctaaaatttttggtgtattgaatgaggagggtttatctgccatacttgtagaagctacacttcatatactttgtgttaattttatctgttgagtcctattgattatcttattcatgttttacttatctttatccaagtcaatgataatcatcttacttacagtggataaatccaaagaccttaattggcctgtcttcctttatctgtgccataaatggaccttctataatagcttaaataacagttattgtattgtcttgtttaatactcccaatgatgctgtgaggtaggtgctgccattagcaggatggggcaggatccaggagtgtgaacttttaacaagcaccccaggttattcctttgcagttgatctatggatgaccccatgagtaacagagccgttatctggtgcgccattccctgctatagtgaagactctcataatattttccgtttattttttttgagacagggtctgttgcccaggctggagtgcratggtgcaatcatggctaactgcagcctcaacctcctgggctcaagagacctcccaccttagccctcccaaatagctgggactacaggtgcacaccaccatgcccagctaattttgttttttgttttttttgtagataggggattttgccatgttgtccaggctggtctcaaactcctgggctcaggcgatctgctcacctcagtctcccaaagtgctgggattacaggcatgactccttgcatccagccaagaccctcataatatttcaccttgtctattacaactgtctttttttgattattttctaccccctatctc

SEQ ID NO: 92539 - DNA, 1892 bp, Homo sapiens
aaacagataagatctagccaagatttttattaagtagcttcattaattcgtgcattccttggagagcagtatagacagcaaaccaagagtcaattaaagtctactcaagccacctgaaatgatctgtcagtctgggatcacctcttcatttctgtgcatttctcaggccatgtaagcagcttgtgaaaatctggtgtgattgacaactatgaactgtcaaagatattaatgagtatactatcacgcagctgccaacagaccctgtgtaaaagagagctggaaaacacagttttgcatctacgaattaragggcatatttggttttaaaattatctttggctaaaagcatgtaaagtattttaaactagcaaggcatgagaggtgagtccgttcttcatatcatgccaatacgtgatatgcaatttagcagtaaacatcctaggaaactctgccctttataaacccacaaaaatttgaagttcacacagtcagctcagtttgaaaatatatctattattcaaaagtttcaagcagaatacagtttttttcgtatctacagatatcagggcaaatatgcatttagtgcctgaattgcttgaataaaatacctactattttctatttttctgtgagtacgtaggcatggatttagagggtcatctcggacatcacatttttacatacctgcgcacacacgcacacactattgtctgaatcagttttcaggaattctactgagaaaacaaccacgggcatggagcccctgtaatatatatttgaatgaagctcataagaaataaggatttgggtctcactcctatgggagatataaagagaacagtacactgacagcatccttgtacttagcagagtggataaaaatgtgcataaatttacaacaaaactattttcagtttgcactgtaatattttctcagattatttatttttattgcactatgtattagacttacaatagggttctgtgaccaacacgaggtaatggacaatgtctgaggaaatggataatgaggatgaaggtaacacacaggtgcactcatgcaattgaaccatttattaagtttattaccttttttattgcattcacccatacaaaagctacattgaaatgagggaaaagttctagtgcaggccaaaagcaaagaaatgcagtgttaaggatgcacttttatttttgaattgccccattggagagtgtatatagacataaaacacaaattttatttctccaaaatgaaagaggggactgggaaattgaatgaaattacctacacaaaagatgaagtatattcttgaattctacaaaactgagctacagcatatgtcatttaaaaataaataatgcgatctacttatgcttgatgtgtgagatctattacaaggaaccctattttatgtattttattaatttaaaacaaaatgtcaggaataatttcctaaatggcctcctggcctaagtcagggttctgcaatgtaccacaaacgccaaaatgacagaaaaggtgattttgaatggcagggccagggtggccttaggcaaaatattgaaaaaaggtggatatcattgtcctccctcaagcaaccccattagcacaacacttctccgttcacgaagctgcctgacctcaaccccaggccctcatcccagattccaggcaagcctctgtaaaacttcagaagttcttgaaccagtacaggttgaactgaaggcttttattagcaagaagttgcccacatcacaaatcttcctcacctaagggcaccttcctgatgcccatttcaaatcctgacctgaatattgaaccctttacctaaatctgaataaatgaaaactaagcatggtatctttaaaaatgagccaactcttggttc

SEQ ID NO: 92540 - DNA, 872 bp, Homo sapiens
  misc_feature (1)...(872): n = A,T,C or G
aaaaaccttctaattaagaaaaccctgggwgctaggtcatttactttcactaattgaacatgttcattatattaaattccatttgcaatttatcgatgtaagtagtatgacaaggattcataggaaacccttnnnnnnnnnnnnnnnnnnnnnnnnnnnnnnnnnnnnnnnnnnnnnnnnnnnnnnnnnnnnnnnnnnnnnnnnnnnnnnnnnnnnnnnnnnnnnnnnnnnnttaatttcacataaatagcttatgtcatttcttttagttggtttaagacactgactcttggtgtaacactagtcctgtttctattgctaccaaaaacaaatgactaatagccagggttttgttcctcttgtccttctgccaaattcttgacataatttggctaaatgtaattttctctgacacctgttctagtcgccttctcattttttccatttacatctgatttcctcgtcaccctccctctccttttcactcattcctcaattgatttggttccctagcacagtcaagaatgcgttatacttgtttttaaaaatcccctaaaattatttatctgtagattttgatgtacgttccagaaggttgaatgcccgagtcatatacatgtagtccaatagaattaacagctgtaaaacctattagagttagtaccttatctatttcttggcattggcaaagtagtagttggtcaggaataatctgatttgatagaagtcaaaagtgtggaaagagaaccaaacacaggctaattgctggggagagtgcatccagtatgaagagccatggaaaccagagtcaagactcgggttctgactactgcctaggcaatcagcgcagcatgcacagcaggggaagggtg

SEQ ID NO: 92541 - DNA, 858 bp, Homo sapiens
gaggtggaaatagctagaaccttgtattctcaccttgctcagatgttgactaaagtctgccctgagatgagtgtagccttgactagaaagctgagaaaaaccttaaagaaggaaacagctacccatgctcctcaaagtggggcaaagtcttttttgggggagggggaatataagtagtgaacatacatggattccacactcctttccttggggtattttatccacttccctgtagaatttggggagcaactcctccagggccatgatgagcctttcttcctgctagaagaatgggacttgaaagagggaggtattcactttgctcttagggacataactatttctcattgatctccccctctactattcattctaaatttcctttgctcaaagatatcaaccctcttaatccaggtggcttacattatggtgcaacccaatmcctcattcctaaaacatctgagtctattcaagagggttccctgagtttcgtacatatttttatccatctacactatctaatagcaaccaaaccttctcctgctgaccatggtcaattgccactgacaagatcatgactcctcttcttgcccactggcacctagacaccaggtgtcaacattcccaggtaacatctgtaggtatacttcaatgaaaactttgctctattactcagagacagaatcacctcctgcaatctggggatagtatctccaacactacagagctcacagctaaagtaacaaggacaaatcaaagtgcttgtaagtagggccacttttgcttctattccatggttctcaggcccagctactcttcttagtgggaatatacctgcataaaaattactttgatcta

SEQ ID NO: 92542 - DNA, 1115 bp, Homo sapiens
aaattgaaatattcatgctcacttgatgtgacaaatccctttgggggttaaattttatatttatagtttgctctgacagaaatattaaaatctgcatttgcatgccacagcgaggatgttttgggcacaaacagaggctcttgctgctgcagtgaagggcagatgcctccaacaggagtgacagtatttattgtggcattgtgaaaatcctgtttttttccttgtcctttcttttctgtacttccctctgggttaagcagaaaaataacttttacaatggtaccattttcttagtagcttcctggtaaaaataaaagggggaaaagtgtgacctttctatgtggtctaattactgaacctggaagcttgactctaaacggtgtaactacaggtaccaggaattaggcgagtgactcttgtgattcttacatttgatcagaactttagaaggtgtggaggtaacaaatataaatgagagagaaatatataaaggatgtcctttctaggctctttttgttctccagaagcacctgtttctgggatttcagtcaattccacttacttgaattaaaagagtagagctcagtatccaatctccacagggagaagaaccatgtttaatactgatcatttttagccacgttttcaatgttgaattccacacaattaaataggcaatttcycccaggtggtggtaatattttaagacatgatgatgtctcaaagatgaatttttcaataatattaatacttaaacatagagctttgtatgtggtggtaacttagaaaaatttattcatagccacacacttttgcttgtttaagtgacaataggatacaaaggacataaggaatttcaacttataatattcagcgtttataatgaagttaaaacaacaaatatgtagtcaaaggcaaaaactcaatatttaaagacaagaatataaaaatatttaactctgtatttctccaaacactgaacacagtaatttagcacagtacattggcactctcagaattcaactcggccaatttaataggagactttacttgtttctcgaaatatatgtactgtatttttttctttttttttttttaaattgttcctcatagac

SEQ ID NO: 92543 - DNA, 538 bp, Homo sapiens
ttttctttcatagatgttttccttcatcaatctcttgcatgtctaaatcccattcaatatctkcttcttgaggtcccaaactaacacaattcacttatttacttactgattacgtgacgttgttgttggatagatcatttctcttttgaatctcatgagaaactgctattcttttacacaaccaagattcatctacacaaaaccaatatttactgattttttttgtactttattccttttgcatctcagttcttccacctaaaataatttttcttctggaggaatttccttaggattcattagaatcctctaattttggattgaaattattaatatttttgaaagtgagtttatgtgtattaaaccctatctcttttgactgcttttagtatatctaccgctgtgcctcactaggtggcattctgagaatttttttctcatttaccttctagcttatgaatttcctttttacttatttcaaattggctgatatatttaaccgttatgttttttaatatttgctttattttttaaattt

SEQ ID NO: 92544 - DNA, 457 bp, Homo sapiens
caggagtctggcgggagggaaatcatcccttctgtggtcaaacctgggcagtgatcaccaggggtgctgccgaggrcgacccttgccccccattcatttatgcagagcaccaggccctagcatcgggaaagctgttaacagctgcccatacacatcagctgtgggtgttggtgcagatgccaaaacctcacagttagaggaggtgggaatgcagagccagggcctggaggcagcagtaaaagccatgtgggttaaatcggttccatgagtggccactagctgtatgggatgagatcatacatttcttatttgctaatattttctttagaacttctttaggatttgtgtcaccatgttcacaagagagattgccctctaattttgctttaaggaaaagttctgtgttttcttgttcttttttctttgtcttaaaatggggccgtgggccgggcacagt

SEQ ID NO: 92545 - DNA, 457 bp, Homo sapiens
caggagtctggcgggagggaaatcatcccttctgtggtcaaacctgggcagtgatcaccaggggtgctgccgaggacgmcccttgccccccattcatttatgcagagcaccaggccctagcatcgggaaagctgttaacagctgcccatacacatcagctgtgggtgttggtgcagatgccaaaacctcacagttagaggaggtgggaatgcagagccagggcctggaggcagcagtaaaagccatgtgggttaaatcggttccatgagtggccactagctgtatgggatgagatcatacatttcttatttgctaatattttctttagaacttctttaggatttgtgtcaccatgttcacaagagagattgccctctaattttgctttaaggaaaagttctgtgttttcttgttcttttttctttgtcttaaaatggggccgtgggccgggcacagt

SEQ ID NO: 92546 - DNA, 649 bp, Homo sapiens
atcaatgatagactggataaagaaaatgtggcacatatacaccatataatattatgcagccatgaaaaacgatgaattcatgtcctttgcaaggacatggatgaagctgcaaaccatcattctcagcaaactaacacagtaacagaaaaccaaacaccaaatgttctcacgcataagtgacagttgaacaatgagaacacatagacacagggaggggaacatcacacactggggcctgtggggagtgggggcctaggggagggacagcattaggagaaacacctaatgtagatgatgggttgatgggtgcagsctaccaccatggcacatatatacctatgtaacaaacctgcacattctgcacatgtatcacagaacttaaagtacaatacaaaaaaaaaaagtacattttcaaatctaaatattgattgttgtgctgccaacattttaaacatagccaaattatatcttcatcatgaaaacagttgtaagaattgcttataatttctctttagtgtatcaaaatgtgtcacactcaaacttgacttaatttcccacacaatttcaataaactttgtaaaggattcatgactttgtaaacccaagatacaaaagtgtagtttctcctctattctgccctccagatctt

SEQ ID NO: 92547 - DNA, 3064 bp, Homo sapiens
  misc_feature (1)...(3064): n = A,T,C or G
tcataaaacataaaaacagtagagcaaaagaccttgtaggtcaaagaaaatattttgaccaaaacctagatatgagttgtgctaaaggtacatgcactgtgatatgaacagggcataagagatgctgtaacatcccatggctacagtcccatggctgcagactatccatgccatccacctgatgctcccctcagagaatatggagagactcagagtaatcttgtcactaaataaccctggtcaagtgcattctggattcatttgctaataatatatcttttcagctaccaaagtaaaattttacttttataagatttatatgtcgatgtgctcattttcaccaaacctggcagagcaagatttgtgtgcctacattgagaagctaaaaatcttgtccacatttttatagtggacttcacagtattctaatgcacatatgactttctgcaaaccctgtgcttttaatcactgtactttattgccacagacaacttaaattatacatatcacaattacattatatgacttgccacaaaaaaatgtctcttccaggcctggcatggtggctcatgcctgtagttctagcactttgggaggccgaggcaggtggatcacctgaggttgggagttcgagaccagcctgaccaacatggagaaacccttctctactaaaaatannnnnnnnnnnnnnnnnnnnnnnnnnnnnnnnnnnnnnnnnnnnnnnnnnnnnnnnnnnnnnnnnnnnnnnnnnnnnnnnnnnnnnnnnnnnnnnnnnnnaatctaaatgcatttcaggattgattgtggctcctttttccccaccacattcaattgacgattacatccattgattacacctcctatataattactgaatctttcttctcagactcgagctttactgctgattcaattacctcccactttgactcgtgtggaaaccatatataaataattatcctgtctctagaattggtccctagaaaattagtccttcacactatgaccatagagactttctagatcttctagaaacataggaactttcattactatgatcatgttactctcctttatagtggtttcccatggcttaattaatcattgacaaacccttttaattaatacctaaaaaccctttatgaattataatctacttttaaaatcatttctaatgaatgttcttttcaccctgcttctgaaaatttacatttgccaaaattagccacattattttgttcatccatagctctgtcattatcctcaacttgaatagttttcctgcttggtaacatatattctcctttcaaaacattttacactttatgccttgccttcgttgacttccaatgatcattctttcttgtttaggcattgagacctcagtcacaagtataatgccagggatttagtagtcattaaattaatatttagtgagtaagtaaacaaacaaaagatgaatgatgaaatttcatcatccatattttcaacaggcaccatatgtagctctatgtggtaggaagaccctaagatggctctaatgatcccaactcttgatatttatgaatacaatatggcagaaatgatcacatcacttccaagattatattataaaataattgtgattactgccttgtgggctgtctttcattttctcttgttttatttgccctgagggaaaacagttgcctgatgcaggcctatggagaggcagttcagaagaagctgagtctttagctaagacaataggttcagctgatggggatataaagcttcatcaaagaatttgaaccaaagatacccagcttagccacagctggatttctgacctacagagagtaagagataataaatgtatgcggttttaagatgctaaatatgaggtaactcatcatgaagtcatagttatctaaattatactataaatgcatggctaaatgtactctagatgttaaaacaaatgcacaaacaaacatttaagaatattgtaacaatgcttgtgttttttttttaaacttattcatgaggtgaaatcatgtacaagtttgtggcrtgcactagtttaaatattagaaaatagtggagaactagcatagatgaacagcataaatacgtgtaacgtagaattgtggaaaaaaaaacagatgatccatgtaagataatgctagtatatatttttcttacacgttttcctataattatatggcgcttggttctgaatatgctactttttaacagaccgaactatttgtgttgccatatttctatgatgctaggatggacattttgtcacattaaaacatttcttaaactgggtagatcttaaaattgatggcattgttcaaatgctggtgagcagcagccattcatcatggctgtcactgcctgtgaaacctgattgttggaaatccaggtagcatgaccagacaactgtaactcctcaaagtttcagttgacaaaactatttaaagaaatacgacatccagctattatgtgcatatcggcttagactttctggaaagatcaagaatgcaatggcatcaaaatttgccataggaggcgatgagttgagtgaaaatctcagaggcaagaacagagtaccattttagaaactactccattaccaatattcttaatatacagatggtggtattgttcaaaaaacggtgaatgtgggcaactcccagctgagaaaagatcaagaaaacctcagtgggaagacaggaatccttatctactattatttattaatattttctctttctatattgataatatatttaataaaaatatgtttaaatctgttatagtagcttttaaataagaataaagtattctaaataatttaaagtatttcatcacagttcaattagcagcacattttttccttagtgtcgtgtaaattaacggtgtgcttcatagagaggaagcctctgacataataaagtctaatatattcctgggaacttcacagattgatatctatcttacctggttcttgaaggaatttgagttggcctaaaacatatatatatatataaacagacagtacagcagatcatct

SEQ ID NO: 92548 - DNA, 508 bp, Homo sapiens
agtagaaatgaggtttcaccatgttggccaggctggtctcaaacttctgacctcaggtgagccacccccctcggcctcccaaagtgctgggattacaggcatgatccaccgcgcccggccatgaacatagttttaaattacatttacctgtggggaaaaaatagtaaagaatayaaaacttgttcccaaaaggcagcaggaaaattccatgtggctgggatgtttggacacttgtcatcatctgggtgttattattttacttgtggcctgtagttgatgagtcagatgggcaccaagtcctttctgattgtcttgagagatgggaggcaaaaaaagtttttgttttgctttgggttttgttttgttttgtcttttatcctctaaaacagtatttctcaatgtgtgtacccttgaattttttgaaaggataattgttcactgtaatatgcattgcatgatgtttcatacgtctggtatttacctattaaaattctgatagctggttccc

SEQ ID NO: 92549 - DNA, 508 bp, Homo sapiens
agtagaaatgaggtttcaccatgttggccaggctggtctcaaacttctgacctcaggtgagccacccccctcggcctcccaaagtgctgggattacaggcatgatccaccgcgcccggccatgaacatagttttaaattacatttacctgtggggaaaaaatagtaaagaatataaaacttgttcccaaaaggcagcaggaaaattccatgtggctgggatgtttggacacttgtcatcatctgggtgttattattttacttgtggcctgtagttgatgagtcagatgggcaccaagtcctttctgattgtcttgagagatgggaggcaawaaaagtttttgttttgctttgggttttgttttgttttgtcttttatcctctaaaacagtatttctcaatgtgtgtacccttgaattttttgaaaggataattgttcactgtaatatgcattgcatgatgtttcatacgtctggtatttacctattaaaattctgatagctggttccc

SEQ ID NO: 92550 - DNA, 589 bp, Homo sapiens
agaggtaaagaaatgcccttccactcatttcccaatgggtttcctccttttcaggaaaatcctgagcatgccacattactagtaatcttatgttttgaattgtgtgtatgcatgtgtcttaatcatgtcaaagtgtcccatttgattattgtgaaaatgatcagaggtgtccatgtctaacccttgagaagatactggcagagtagcaatgaccatcctctggcctgagatcagccaggartgagaagcagtggtaggacccaatttgtcctagtgtcatgacttgatacctctccctagacaccctggagtctttttcttaagggttcagaggtgagtgctctgtagaggtgttcataggttgaactgtatcttcttgactcactcactttctgtaccaggtttggccaaaactacagttttaatatgtaggaaatgtaaaagagctacaacttagactttctaactatttatttagagttttatattttttctttcttcttcccacataaccaggatgcagtaagtcagttccaccttggataaatcagcagtatacaaagaggttgaaaaataaaaaaggttatga

SEQ ID NO: 92551 - DNA, 648 bp, Homo sapiens
gcattttggccatccgcgggttactgggtaaggatttttcttaggaaggctactggttgtcagtggtctcagtgctttcgggctacgcccttgtttacactgacaacaaggtagtattggagtgttacagggtcacggagaagaccttcgattatcaattataggttttaaatttaccctggcttttaaaaagaatagggtacacttaaaaaaaactacttctatatctttctcctttgtaggtggattttggaaacacagcgggaggacgtttgctgtcctccctgctggattatagttatgggaaattgccatgcttcgagatctccctggactctagccttttgaatagaattttgtatagcaccaccaattgctccaggttttaatgttgcarctacgggagctgtacgttttgtagctaattcatcttcttgcccattaagaggcgaaagaggagttggcctttcacttagttcagcaggtagagctaacgggctagtaaaacatgcttttttcagtttcccttttaatttcctctggtttcggttcctcacatttagaatctgaggttagttttccacgctcatcttccttttcctcatttgaacctgcctcatctgtttgaaatggctcaagagctacttt

SEQ ID NO: 92552 - DNA, 795 bp, Homo sapiens
aatttgctaactgacattggaagaccaaaaatctctcttcatgtttagaggaggtattgtcacaaactttgagatgctggaagactggatggaatcttttatgtgtatccatttactcactgtagttttcattttgaacacgatagattgaaagataaccagatcacatggaaggttaagatctgcatacatctgtgacaaagagccagtagactactagaaataaaattattgtctcttgaagaaaaagaaaactatacatactttacatccagaaatatatactttgaatcctttgttagccctctgtaaagaaacctgtatcaatatccataacaaccttatactggataaagagaaatacctgaaactttcagagaacactgggtacataaaggtccagaataycactgtggcctgcaggtaaaagtggtactggctaatggggttcagcagatagagaatgcctgattctgaccccaaaccgatctgtgtttcgttttgttctgtttttctcattttcctgagagtaataatctaaatacaaattatcaggaaatggcagaatcctccattgacgatatagtaagaattattattgagggaatggtcaggaggaagccactggagacacctcttcctacaaaagcaacaacgcattcttgggttatttgaagatatcagagccaccataaaagacctaaaaagtacatcagggtgaatacctccaaatcatctatatacaaatctttcatttgtcttgaaaaatttctaatcttagaaaaattattggat

SEQ ID NO: 92553 - DNA, 795 bp, Homo sapiens
aatttgctaactgacattggaagaccaaaaatctctcttcatgtttagaggaggtattgtcacaaactttgagatgctggaagactggatggaatcttttatgtgtatccatttactcactgtagttttcattttgaacacgatagattgaaagataaccagatcacatggaaggttaagatctgcatacatctgtgacaaagagccagtagactactagaaataaaattattgtctcttgaagaaaaagaaaactatacatactttacatccagaaatatatactttgaatcctttgttagccctctgtaaagaaacctgtatcaatatccataacaaccttatactggataaagagaaatacctgaaactttcagagaacactgggtacataaaggtccagaatatcactgtggcctgcaggtaaaagtggtactggctaatggggttcagcagatagagaatgcctgattctgaccccaaaccgatctgtgtttcgttttgttctgtttttctcattttcctgagagtaataatctaaatacaaattatcaggaaatggcagaatcctccattgacgatwtagtaagaattattattgagggaatggtcaggaggaagccactggagacacctcttcctacaaaagcaacaacgcattcttgggttatttgaagatatcagagccaccataaaagacctaaaaagtacatcagggtgaatacctccaaatcatctatatacaaatctttcatttgtcttgaaaaatttctaatcttagaaaaattattggat

SEQ ID NO: 92554 - DNA, 623 bp, Homo sapiens
ctgacatctaagcataaagtaaaaaaataagcgtaaagtatggcacataggataattggtaaatagatcagtgtgctgtgcagtagactttgaaaggaggtggttggtcacttaactgaaatactaggaaatattaatccgttcatctctgttagtcctacctctgtaagttctaggactgtgggcttccacatcggaaagggttacacatttgtcctgttacctgtcactcacgttctggctctctactctcctttgtctctccttgatccccagtctctcattctgtcttccttttttcctcctacacttttctcctacaacacactctgatttgcagcagttcactttacaagggcctgacatgtgaccgcgacttattgcttagtaaccttagacctggaggtaataggcaaatatgttctatttcttttcttctctaaacatcctatgcaggtagaatacattsatgcatatgcagaaactataacattaaaaccttcgccaaatttgatctcaaataattgcttgcaaagatttgcctagactaagaaaattatcaaggaaataatatctattcagctgagtttgacgttcttatttctatcccggctgtgtgattt

SEQ ID NO: 92555 - DNA, 664 bp, Homo sapiens
aactaaattcttacagatgggagtatcttcagtctttctaaagagaatgtcacaggaaagtaggcaggaatctctttttatccaggttttagcctaagtgttaagatcagcaattctaaaacatggtgtcagccctttgtgacaaagtcctctattatcctgttcatctccctgctgaattcttagcaacctctctcagagatctgcagacmctttttcttgggggaaagaggtagtttcccaaagctgtaagtgttagttcagagaatgagagatgctgacttcattgtttcccaattcagtgaagcaggagccggacttcaggcatctaattctcctcaaataaagagctaggggtgactagactggaggaagaacatgacacacgtgtgaggtctaagaaccagaagaaaaaaggagggaaagggaaggactgggagttgaaaaaatttcaatttgcctttacatggtacctatatttcactagaggaaaaattgaccacgaatgtcaaatgtagtaacttttcatttcaagttcttgtcctctccatctgctccaattcagagcccaaatgcccgaaaagagcaagataagataaagtaacgagaccatcaacttctcgcaaattaacaagttaccataaatgaaaatcaaagtggaggc

SEQ ID NO: 92556 - DNA, 902 bp, Homo sapiens
tttgtttttctcttgtaaatttgtttaagttccttatagatgctggatattagacctctgttggatgcatagtttgcaaatattttctcccattctgtaggttgtatgtttactttgtttatggtttcttttactgtgtagaagctcttaagtttaattaggcgacacttctcaatttttgcttttgttgtgattgcttttgatgtctttgtcatgaaatctttgcctattcctatgtccagtatggtattgcctaggttgtcttccagagtttttatagttttgggttttacacttaagagtaatccatattggggagttcaacatcagtactcacaatttggctattgaagagcggtctgagtttcaagcctgtttgttctttttcttggcctctgtacaacacacaattggcttaactctttatggttgcattgctcaaataaccctgaagattaaaaaatcaaaaacctctgaagattcaaagcagtttgtaatccagtctcagagaagttaagtacttgactagggttaaagaactagtaagaaagctgcacttcagtaaaagtctttctacctcaacccaatggtctttccatgaggtcygcttcctccaatgatgtcttatcacattgggtcaagcatattacagaaaatccaagatttaataatctaaacagttatgacacaaaaataataatcaagacctttaagtatttccttttcaactgaaactccttacttcacattttagttttactcaacaattagtttgaataatagttttgtgacctacaataatgtttttacataactgtcaagtataaaaattctaagaaattctaaaaattctaagaaggactgcagtctgcagttcctcaacaagatctccaaagttattt

SEQ ID NO: 92557 - DNA, 1394 bp, Homo sapiens
aataatatacatcacatttaaaattcattaacctctttaaatgaaagaactgggttctggaaaagacatatgctcgtcaactcagcaaggaacttgttgcaatataaaaggagattgcttgcatttttaaattaaacttacgaactatattaccaatatatttgatggttacaattggggtcaaatgcacattctgccacagctataaggaaaaacaatgcaagagaaaggaaaacctttcatttaaaatttttgcttgactagaaatagtgtgtctgttgacttaagggctaaacattgttcgttaaactatagccatgcatcacttcatgatgggtatacgttcttaaaaatgcattgttaggtgattgcatcactgtgtgaacatcatagagtgcactttaatgcaaacctagatggtagagcctactacacacctaggctatatggcatagcctattgctcctgggctacaaacatgtacagcatgttactgaactaaacactgcagtccattgtaatacagtggtgagtatttgtctatctaaacatatttaaacatagaaaaggtaaagtacaaaatgcagtgttattatataatcttacaggacagccattgcctatgtggtccattgttgatgaaacatccttatgtggtgcatcgccatttatatacatttaagccagactccattccagaatgaatgtagcttamatttcagatctacttgtctagcattatctctaattaattttcctcatacacgctattatttgtccaactgccccacttacccagcttagagcacattctgcattccgtagcctccgtggattgctcatcttgttccagctgcttggaccactcatctttccttcattgctctgcccattagcactcaaggataagtaaactttacggtccacctggtggaaacctcacttcccccttgaagtcttcatggataatccctagaagcaaatatcttcttctatttcaggctcccatttcatatcatttgaatttgtcacaacaggtgattaatttttgcttgttttataggatattgtgggcatcttatttcctatgccaattggcatgaaatttcatggaaacagtttagccttagtcatctttatttcccccacaggcatatagagaaaagatcgcatgtagtgggcactcagtcggtaattgctgaaatggtgaaggtcaccactttgtcaagaatagaatcagtatgaatatcagaattttcaaattcttatatgagaactgctccataacataggtttttaaatttttggttgattaaaacttacgtgtatatatacacacatatatatacctaaacacaaatatatatgcacaatatatagttacatacatacag

SEQ ID NO: 92558 - DNA, 1022 bp, Homo sapiens
gttattttgttttaagaaattgccacagttaccctgaacctcagcaaatgccaccctgatcagtcagcagccttcaacactaaggcaagacccccccacaaccagcaaacagattatgacttgctgaaagctcatatgataagtagtattttctagcaactcattattttaaaattaaggtgtatatgatgttttttaggcatgatgctattgcacatttaatagacttcagtagagtgtaaacatgatttttatatgcactgggaaaacagacacttgtgtcactcactttattgaaatattcattttattgaagtggtctggaagcaaacttgcaatatattttgaagtatgcttgtatgtagattcttaatattttgaaaatatgttcttttgaaaggtgtacacacatttatatattaaagtggacattctggagcgtattcaagtctttaaatatattgtacgagttaaataaattccacattttttttttttgagacggagttttgctctcattgcccaggctggagtgcactggtgcgatctcagttcactgcaacctccgcctcctgggttcaagcgattctcctgcctcagcctcctgagtagctgggattacaggtgsgcaccaccacacccagctaatttttgtatttttagtagagccggggtttcaccatgtttgtcaacctggtctcgaacacctgacctcatgatccacctgcctcggcctcccaaagtgctgggattacaggcgtgagccactgcgcctggccccactttctttattgaaccttttcttctgaactccaaactcatactgggctgtgtgctccacatcttagcacggctgtcttaggtacacttactatgtttgaagctcctgatattcccttctctctgaaactgctcttcttgtctttctgacctcagctttccatcctttgttattcagaaaaagccttggtgtcctctttcagttctttcttttcttcagtaatcccatttccttcttcagg

SEQ ID NO: 92559 - DNA, 658 bp, Homo sapiens
cagactttgtgttccttcatcagctggccactgcccaagtgtggccctctggaagaggacacaaccttgaatgaggcagtgctctaaggctgagggagattcccagtgagcagcatgctagggcagtcaatagaycctaatccccacaggtgggagataggtgcatcatcctcaagaaaaattggggtgtcattgctgatatccatcacagtgtttatagctccaggccccgtgtcatctgcatgtttattcttactctttttccattgaagatagtacaagaggccccaataaatcaaacagtttttaatgcttgccagaaaaggagacagctgcttgcaaaattcatgtatgcttcccttttaggcttagatatactgtatatacaaccagtccaaccaccaaagatcagcttcctttgtctttgaactggggccaaagaagttaagaagtttcccaatataggccctttgtagtcagccgctttccctagagctttggctgcaggcaactattggactcctttattcaatgtaatgtcatttgcttattccagaatttcaaataaatggaatctttcaataattctttattttgcttgttatcactcagcttaatattttaaagattcatgcatgctgttgggtatatgtggaat

SEQ ID NO: 92560 - DNA, 706 bp, Homo sapiens
cttaaagaacataaatcaggccattgttctttgctgctgaatatctcccagtagatttccattgcatttaaaatgaaatccactctcctttccctggcacgcaggctaaccgtgtgctgaaacttgctggttcttgtaaattaatctgacctcactgtctcccagcccaccatcttctagcctgctggctttcctcttctgtcttgaagaaatggaggaggaaaaataatcttggctttctatgggagaaatatttctcctcttttcatttctatatttcaggacatatgatagtgtcttgcagacataggttgtcaaataggtatttttaagtgaaagatattttacaaaagcaaaggaaggagggaagttttccatggtgatgatatagtttgagcgtattcttggtggtgtgaaatttatgtgargttttaaggaatgacttgcaaggttaaaataatgagatttataagaaggatatgttatattttaaggtaattagtgatggtttcatcaaaaagatggaagaatctatgatatttacatgcttgtggatgtctcagaattgtatggtgttttgcagtttccaagtactttcacatatgaaatctcatttatgcgagatccctgtttttctagcttaatgcaggccagggatgcataaaaacttaattagagacagaaggaaaataatttctttttccaa

SEQ ID NO: 92561 - DNA, 1082 bp, Homo sapiens
ttagggtggaggatgcacttccaagatgagggcttcttcttcttcttctttttttttttttttactatcattttctttattttttgagatggggtctcactctgtcgcccaggctggagtgcaactccgctcactgcaagcttctcctcccgggttcacgccattctcctgcctcagcctcccaactagctggaactacaggtgccagccaccatgcccagctaatttttttgtatttttttggtagagacggggtttcactgtgttagccgggatcgtcttgatctcctaacttcgtgatctgcccacctcggcctcccaaagtgctgggattacaggcgtgagccaccgtgcccgtccgagggcttttgaactcacaggttggcacctcagtgcttcttgtcctccctccccttccctgccctcccctccccttcgtttctctcctgttccctctgcttttaacctttttctcctcttgttcttcttcctcctcctcatccttctttgtctccctctctctctttctctcccttcatatgacttcttaccattctagtatacggtgacttcacttgcttgggcttcttaacagcatggtgggtggtctcagggcagtggcattttttacatggtgactggattccaagacagggatagcagaagttgcctaaagagttaaaagatttgtttagaactggcacaacatcatttccaacatattctattagtcaaaacaatcacaagaccaacccatattcaaggggttcaagagagaggctycaccttttgatggagtaatggcagtttccattgcagaagagcgtgtggaatgagaggtgtcattgtggccacctttgtacaatatttcactatctgtagttacactgtatctttatctctatctctatatttatatctatatctagttggaatcagatacaaaacttgatagctagatagagtaatatagatataggtagctgtatccatctataggtgagtttgtatgtgtatttattagataatacttcatcccagtcagttgtatatgtagcagaatcccaattttaattaaagat

SEQ ID NO: 92562 - DNA, 987 bp, Homo sapiens
ttaaccaatgaaggatgagagttgtttgatgaataccccagtttctccaccccttggtaagacaactgtgcagcacattcagcaaagttacccagaagaattcagtagcccgcaggggtagtattcattgatgaatagtttatttctctttttctatctcacatccccatccctcctttcagtactttcaggtattgaagaactacctgctcctaagcctgtcttggcatttgctttgggggacagagatgggtctaaacagtaagcctcaggatgatattctggaataggaacattcactagccagataaaaacaaggggctgatggctgctctttggggtggtgataactcatgtcatgttgaagcaacacaattactgactttcacatgtggtgaattgaagtgaaatacaagtggaagggaaatgactggcacataaaagatatggggacaatagcaattataaggtcctaaaattggaagaattttggtaaatgccctaaaggccaaaaaaaaaaaaaaaaacctctgctggcttagtttaatcacgatcgaatcagggtgtcctatgaaatagggaaagacctccatgacagtattttttaattccgaagagaccaattcrttatcaacagagaagctgggctgatgcttttctcaaaagtcaaaatgctccttaaagaaagtaatgagggaggaaactaacatgaaattgcttatctccagcaggcagatggcagaccatgatgaaaatcaggtccaatattagatatacagctactgtaagtaactacagaagagacggattatttagtcccattaggtctcttatgctaattaagtgcccccgtaaagagtaaaactcaaagacttagaaatcatatagctgggtaaatgcccctaagaaagtgaaatttctaaatttctgaactttccagtttggaaaacagcctctttgcccttgccaaagaagagtagattctca

SEQ ID NO: 92563 - DNA, 774 bp, Homo sapiens
cacacacacacacacacacacacacacacacatttatatgttacatattttaccaatcaagacccaatacatggctgaacatgttagctggcacctataatcccagtgttttaggaggctgaagtgggaggattgcttgagcccaggagttcaagactggcctgggcaacatagtaagatcttgtctctactaaaacaaaacagaacaaaacaaaacaaaacaaaacaactgataacacggagatactatgctagtccatatttatgagtagcaatttcagtaacctctgtaagtaaacaagaatggcccaaatgatgcctattaatattgaagataaaacctgtcagttccatggcattgcagccagtctccaagatggcaccagatcattacaacttcctggtattcactcccttgtgaagtgttctcccrcactgcagcatgcctggactgtgtatgtaacagagtgtggcaattataaaaggcattacagtttccagcctggtctctctcctgggtcacttgctcttgtcaaagccactgccatgttgtgaggacactcaagctgccctgtgcagaggttctcatggtgaggagctgaggcctcttgccaacagccagcatcaactggttagctatgacactgtttcatcttggaagcagattgttcacttccagtcaagctttcagataactgcagcctgactaactcaactctctttttctctcttaaacaagtttactgagatataatttacttatcattaaattca

SEQ ID NO: 92564 - DNA, 622 bp, Homo sapiens
agtttggggtctacagagtctggttacaacaggcaggtgtcttcatcttattaaatggtcaatgtcatgctccctcttttccttaaatattatttaactcaaaagctacctctcagtggaatacttgaagttaattgaattactgtgttgtagtcggctctgctgccataacaaagtaccacacgccaggggcttaaacaacaggaatgatttcctacagttccggaggctggaagtctgagatcaagaggttggcagggctggttctcctcaggcctctctccttggtttacagatggtgtcttgtctccatgtctccttatattgcctttcctctgtgtgtgtgtcctaatctcctcttcttataaggacaccaggccatcctacggacttcattttaatgtaccccactctttaaaggccctgtctccaaatacagtcacattttgaggttctgggagttaggacttcaatgtttgaactttcgggggaacacagttcagcccatagcactctgcttaatcygtcccagcactatatttcaaccatgcagaaaaacttttagaaactattatttaaacacgtagtaaggctattgcctccatatgatttggtctctgat

SEQ ID NO: 92565 - DNA, 622 bp, Homo sapiens
agtttggggtctacagagtctggttacaacaggcaggtgtcttcatcttattaaatggtcaatgtcatgctccctcttttccttaaatattatttaactcaaaagctacctctcagtggaatacttgaagttaattgaattactgtgttgtagtcggctctgctgccataacaaagtaccacacgccaggggcttaaacaacaggaatgatttcctacagttccggaggctggaagtctgagatcaagaggttggcagggctggttctcctcaggcctctctccttggtttacagatggtgtcttgtctccatgtctccttatattgcctttcctctgtgtgtgtgtcctaatctcctcttcttataaggacaccaggccatcctacggacttcattttaatgtaccccactctttaaaggccctgtctccaaatacagtcacattttgaggttctgggagttaggacttcaatgtttgaactttcgggggaacacagttcagcccatagcactctgcttaatccgtcccagcactatatttcaacsatgcagaaaaacttttagaaactattatttaaacacgtagtaaggctattgcctccatatgatttggtctctgat

SEQ ID NO: 92566 - DNA, 596 bp, Homo sapiens
tgtcgcagtgtttgttgtcttccaacttttcagcgtgtgaaaacattttcacaagaacggaggcatcacttccccacctgcatctctacttagggtcttgcatgcggggaaaggggccagcacagtccgtgggtctcccaggcagtccgtaggtcccgtcctgagcaccgcagcatcaaraacaggctggggtgaaaaggaaagtagcgttctaggaaagccccaggcctgctggtgctgaggatgcaaccggtggggttcttttctcccaggcaccatggccctgccaggaggaccccttgggggagtgtgagcagaaagggggcgggctggattttgttgctctcccttagaccaaggtcacacccagctcaagaaggtcaggctcgggacctctccctgtcaatccagcctccgccagcgttttctaaacctgtctcttcttcccttcccccgactgactcaccctccacgcagcctacagaaggcgggttggggggcggaggccgtggggacgggagaccggatgtgtctgggaaagggagatgaaggggtcgttccgtcccctgggagatgatggcttgtgccaggctcct

SEQ ID NO: 92567 - DNA, 596 bp, Homo sapiens
tgtcgcagtgtttgttgtcttccaacttttcagcgtgtgaaaacattttcacaagaacggaggcatcacttccccacctgcatctctacttagggtcttgcatgcggggaaaggggccagcacagtccgtgggtctcccaggcagtccgtaggtcccgtcctgagcaccgcagcatcaagaacaggctggggtgaaaaggaaagtagcgttctaggaaagccccaggcctgctggtgctgaggatgcaaccggtggggttcttttctcccaggcaccayggccctgccaggaggaccccttgggggagtgtgagcagaaagggggcgggctggattttgttgctctcccttagaccaaggtcacacccagctcaagaaggtcaggctcgggacctctccctgtcaatccagcctccgccagcgttttctaaacctgtctcttcttcccttcccccgactgactcaccctccacgcagcctacagaaggcgggttggggggcggaggccgtggggacgggagaccggatgtgtctgggaaagggagatgaaggggtcgttccgtcccctgggagatgatggcttgtgccaggctcct

SEQ ID NO: 92568 - DNA, 893 bp, Homo sapiens
  misc_feature (1)...(893): n = A,T,C or G
accagccgtggtttttaagctagagagacattgtttcaaacctggctttttcaccaacaaactatgtgaccctaggcaaacttcttcacttctctgagccttgctttcctagttataaaggttgagtaggaatccctgctcttccttcttcacaaggttgnnnnnnnnnnnnnnnnnnnnnnnnnnnnnnnnnnnnnnnnnnnnnnnnnnnnnnnnnnnnnnnnnnnnnnnnnnnnnnnnnnnnnnnnnnnnnnnnnnnnatgttgtactgttatctttataaaacctgtacacctcagnacacactnnaaatttatgtaaaaatcttattttntcttcaataataaattaactttagtttactgtaattttttatctttaaagctttttatttttaaagttttgactcttgtaataatgtttagcttaaaaacagtggcaggaagggtcagtgctgcggcttcacacaggtgaatgtctgaatctagactccatctcccaccagctgagcatcccaaggacagttgcctacgctcccccagccttgcttcctcatctctagaatgagttaactgaaagatcawgagacagtagtaggctgtcttacatcttgctgcaaatataagatagcattattaaatcaaacataatgtctgcatagtctgtattttcttcatttttcagaaacaccagtctttaaatttctgaatttctataagggaactgggacaaagtaggtccttaacaaatatttggtaaatgagtgaatgaaaatgtacctttctagggctcctttaataagaatttcaaggtcaactgatatatatatatataatgtgtatatatatacatttttttctttgatacactcagctcctaaatatttgagtctg

SEQ ID NO: 92569 - DNA, 893 bp, Homo sapiens
  misc_feature (1)...(893): n = A,T,C or G
accagccgtggtttttaagctagagagacattgtttcaaacctggctttttcaccaacaaactatgtgaccctaggcaaacttcttcacttctctgagccttgctttcctagttataaaggttgagtaggaatccctgctcttccttcttcacaaggttgnnnnnnnnnnnnnnnnnnnnnnnnnnnnnnnnnnnnnnnnnnnnnnnnnnnnnnnnnnnnnnnnnnnnnnnnnnnnnnnnnnnnnnnnnnnnnnnnnnnnatgttgtactgttatctttataaaacctgtacacctcagnacacactnnaaatttatgtaaaaatcttattttntcttcaataataaattaactttagtttactgtaattttttatctttaaagctttttatttttaaagttttgactcttgtaataatgtttagcttaaaaacagtggcaggaagggtcagtgctgcggcttcacacaggtgaatgtctgaatctagactccatctcccaccagctgagcatcccaaggacagttgcctacgctcccccagccttgcttcctcatctctagaatgagttaactgaaagatcatgagacagtagtaggctgtcttacatcttgctgcaaatataagatagcattattaaatcaaacataatgtctgcatagtctgtattttcttcatttttcagaaacaccagtctttaaatttctgaatttctataagggaactgggacaaagtaggtccttaacaaatatttggtaaatgagtgaatgaaaatgtacctttctagggctcctttaataagaatttcaaggtcaactgatatatatatatataatgtrtatatatatacatttttttctttgatacactcagctcctaaatatttgagtctg

SEQ ID NO: 92570 - DNA, 612 bp, Homo sapiens
atatatctcattgaaatggtttcaagaataaatttactaccactaccaacaacaaaaagaattctcttgtgtgtttgtttaaaagatagtttcctgaaccttaccctatgtatgcctgatctgaacaccaattagaggttttggggaatttacaaaggtggagaatcataaacttacagctcactgaaagcttgtttggaggttctagcaggggcgtgcagctactgtatgcccttgaccaaaaaacagtcctcctctattggggatggccatcctcttcaacggagcatacagctttgggagggacacacatagagcagtgaggggggaagaggacacctcccttgccagacagatcagctgaatcaaccctggaggtcaatggrgtgacagatgttgcagccagatcgccctcatgtccacctacagttcatcgaaaccattagggggaaagtcacagccttaacatgctaatttttaaaattattatttaattctcacaaaatcccacctggcaagcattgatatctccatcttatggattggatcattgtggtacatcaagtgaaatggccttgcccaagaccacacagctagggagagactgagctg

SEQ ID NO: 92571 - DNA, 680 bp, Homo sapiens
aatgattggcattgtttatgtccacatagacacctgatatgtaacaacaaagtgggtctgctctggctggaggttcggaggagttgmaggagcaggacttcagtttctcagttcaccccacataccatcaaagctgtgccctggggaacatggcttgaaaactactaaatcactccccgctcctcccctcatcatgaaacatcatgaaactgttggagaaactgcgccctgagaggcaaaggtatcaacaaagtcagagagtgagctgaagtcaggagccagctcttaggtgccccattccaaggcttgtaaccacaccattgggaggaggaatttttttgttgatgtttatttgtttttgcattttttaagattttttacttggaaataattttagatttgcagaaactttgcaaagatggcacagagaattcccaaatactctttacctagcctcccctagtgttaatatctttcataaacatagtatatgtgtatgtactgagatattaacaagaaatgaactgctgagtgtctgtggtcaagtctcttctttctgagctttcccctgtctctaatgtgatgagattaaaccaagtgatcccagggtgcaacactattaactaaagaccttgctattatttccccagttttttcactgatgcccttttactgtacta

SEQ ID NO: 92572 - DNA, 1416 bp, Homo sapiens
ccttgactcacatctagtattttttgatgtgaaaaaattttagttaattacatacatatatacacatatatacaactgtctgtatttattattgtgggccccaatgggacataatttaaatgccactgctttatgttatggtagtcaactgtgcccctgttttattgcttaagttgacactaagcttcctacccacagcagaaaccataaacgatccccatttgtgtctcaccattgtctaaccctgggtctcacccttcagaggtgctcaggagctgttggtcaaatcaaattgccaaggaaaccctgggttgggttgtagtagtctttacagaagtgtggtagatgaaacgtatgttgaatttaagaaaatgtatcaataataatgataaatgctacttaaggatattaatcactacacaaacatttagaactgggtctggcaggtagtaaatcctcaataaatgatagcctttatcattttgactctatgaccatcatttagtgaatgctcaccatgtgcttcaatacatcttatcatttatttctcataccatcattctatggtacctattattggccccatttgacagatggaaaaatctgaggctcgcatagttggagtcatttgcccaaggaagtaaatctcagtaaaagcaaagctggcgttggaaccttcaccttcacctcccctgccagactccagagttccaagctctcccagcctgtcgggatgctgttcagggctggggaggtaggcaggcctgtgagcgttcagactcagaaaggcttcctggtgctggcacttcatgcagataagaacctctgggtgtgtggccaaaatggggtggaagaaataaggcataggagctgctcaggctactgcatttccgaggccagtagtcctgaggctgacctcagcttcattctaggacaagaggttatcgtaggcccatcctccccacaattctgccccagctcctgtttcatggatgctttgacaccatcagatattgcctggtcagagggacagcgactgccggcaactgctgtaattctctggcttccatttccttgttcttaaatggagcaggtaatccctgcttgttttagagatgtgatgagaataagaatggtggggacaggcaaagaaggaggcaaaggcccggcacagaargtcctcactaaatggatgtccctcccttgcttttgtcacaatgtccagctccactagagttgctggattcctgccataccagctcgttttttatcttggggaagctttccagtaggaggaagacagccttggtggtggccaaggaaatgtctctgggattggtccctagcctggagctctgtttgcctcagggcattccagagggcattgctattcttggcctcatgacccagcacctc

SEQ ID NO: 92573 - DNA, 649 bp, Homo sapiens
tcattctggcccattgatgcccctgggggaatctccttgcctgaccatgccctctgtcttctcaactttgggcatttcattcagtgagaggataaggtcttrcatggttcctgggccttcattcctcatcccactcagtatatcccgattatggttgtgggactctgtggtcagatcccaggaccaatactgacctaggaaagatgaggcctaaccaacccatccacctgcaactactaatgccccttcttccttccttgtatcctttgccttgagagccttccagtagtaaatggctaagtgttggcatcagactgacatgattttatccaggttctactgcttagacactctgtgaccttgaccagtttattttatctttctagatctttggctttctcatggattaaacaaggacaagagtcataatgccacctcattgggtcatgaaggctaaataagatgcttgtggggtatttaatatagggtaggggcacatagtatcataggttgttagctgctgttactgtcaacagaattcagcaagtatacattctgtgttgaacgaataaaggaatgaatgaaggaatgaatgacttgagtttctggccctatatacctattctgcacaacttgccttggatcccca

SEQ ID NO: 92574 - DNA, 1087 bp, Homo sapiens
taatcctcacaactacctttcaagatggttattatatcacattatatattcatttatgtatgtgtgtatgtacatgtgtatatgtacacacgtttggctcacagaagtgcagacactacatgaaaatcacacagtatttcagcagcagaggtggcattcagactccctcagctgtacttctgggtccttggcctaagccattccttttactgccccttctgccactgrctgcatctactacttatggtagctgacacaaaatcagttatttagcctaagacagcagagctagatagaccttaagagagaatctagacttagcaaaactgaggttaaaaaagatgaagtggcttggccaatgtctgaactaggactagaatctagccttctgacccctaagatcaatactgtttgcagaatgcgctttatggcaggccatgcgtttttaagaatgacaactcttcaccctgatattgctgacccagaaggcaggaagatagatgcaggaacagtgatgcctccaagttcttctccaagtgctagagattaaacaaaccttccatccctaaggttataggattagcaatcctaatttacagataagccaactgaggccaagagagggaaagggatttggctacaaaaaagtggggcagccctcctataccaaatctaggaccctttcccatagaattcactctgaacagccctggaagcagctgggtgtagaggattagaagacaagtgtgggaggcaagcagatgggtggttccagaggtacccccttaattgctctggaatcttgtgaggtcacatagggcctagcatttagaaaggtcccatgctgagtttaaggctctgctgtcaccatcttgaaattacaagcaaaggcccccacgttttcattttgcactgggccctgcaaattatgtagctggtcctgtctttgacacttttcctttctgagcctgtttcttcatctctggaatggggtaaataatggggtaacttgacagggtgtgcagccaatactgtcttcccttctctgagccaaacatatatgtatgtgtgtacacatatacacaaa

SEQ ID NO: 92575 - DNA, 1087 bp, Homo sapiens
taatcctcacaactacctttcaagatggttattatatcacattatatattcatttatgtatgtgtgtatgtacatgtgtatatgtacacacgtttggctcacagaagtgcagacactacatgaaaatcacacagtatttcagcagcagaggtggcattcagactccctcagctgtacttctgggtccttggcctaagccattccttttactgccccttctgccactggctgcatctactacttatggtagctgacacaaaatcagttatttagcctaagacagcagagctagatagaccttaagagagaatctagacttagcaaaactgaggttaaaaaagatgaagtggcttggccaatgtctgaactaggactagaatctagccttctgacccctaagatcaatactgtttgcagaatgcgctttatggcaggccatgcgtttttaagaatgacaactcttcaccctgatattgctgacccagaaggcaggaagatagatgcaggaacagtgatgcctccaagttcttctccaagtgctagagattaaacaaaccttccatccctaaggttataggattagcaatcctaatttacagataagccaactgaggccaagagagggaaarggatttggctacaaaaaagtggggcagccctcctataccaaatctaggaccctttcccatagaattcactctgaacagccctggaagcagctgggtgtagaggattagaagacaagtgtgggaggcaagcagatgggtggttccagaggtacccccttaattgctctggaatcttgtgaggtcacatagggcctagcatttagaaaggtcccatgctgagtttaaggctctgctgtcaccatcttgaaattacaagcaaaggcccccacgttttcattttgcactgggccctgcaaattatgtagctggtcctgtctttgacacttttcctttctgagcctgtttcttcatctctggaatggggtaaataatggggtaacttgacagggtgtgcagccaatactgtcttcccttctctgagccaaacatatatgtatgtgtgtacacatatacacaaa

SEQ ID NO: 92576 - DNA, 1732 bp, Homo sapiens
ctacaagccaaggaatgccgatggtcatcagcaaccatgagaaactggtagaaaggcatgggacagattctccctcagagcctccgggaggaggcttgctgacatcatgattttggacttctggcctcctgaaccatgaaagaataaatttctcatgttttaagccactcagtgtgcagtaatttaaatggaagccccaagaaactaaggcactgcccttgacctcttgatctcagcccattcagctgtctaagcttggagatcacttccccagggaacatctctgcattttcaggttgaggtgaggctttcatggctccagtcctctggctgttgttatccaatcatctgtttgaccattttcccattcaaggtcttgagttgccatttacctctaccatttatccagccttagttccagtgcttagcccagggaaggtgcttaataaacacatccagaagctgacaatcttcaccagactttccagaggaatgcaaatgcaagtacttgttttagctctgatcccagcatcaacaaggcacctgaccaaacctcgtatgcccctttgctgcttttactttctccaatgccagtgccttcagctggttttcttacgtacacaacctcaaaaacagaaaaatacacagagagataaaaagtataaagcacttcaaaccaccccaccaagagagccttctgaaaagtcaaactcagtacactgtttggcctggcctcattttaatctatttttcatgttaaaatatcaaggcatgaaagaaggaagcagagaaaggaaagaaagggataatatgaaaaatgctttatttgacaatgtgtcattcrgaaactgattatttctgtctctggcctttttaatattccctcactatggccaagccaccaggggatttggtattctaagactggatttataatactctgttctgcagtgataagaacacaggcctttaatcctcagagctgtgaacatgcatattctctcaagtaatgtccttctcttctcgtcacttgtttctggtccctggcagccacgatgccatgatggctgagaactggtgatccactgggccttctcttggccacttgcctaatgacagatctagtggggaagggggcccgggatccaagtgatccgagacgtctcctttcaggccccagtctatgtttaagctggaagaattattagaaaatagtctaagtctttagtgttagaagaaaaaaaaaaaagaaaaagaaactgagactcaaagaatgaaagtgacttgaccaacatcacaaaccatcctaaaatagttctggagacagaatatgcagccgactccctccaaagctgctaaggaaacgtgaattgtgacaatttgatctacaaaatagcttctataactttccatttctctctactctatgactgtcctatgccctagttttcatggattttcatcatgataattttaatacatgctgaatgatcttccaggctttattcctcctttcccactatgctcaatccatcttacttaccgtaactaaggcacacatggaaactgatcccttccccattgactaagctaagaatcctgtagtttgacagttcaagtcctcatcatctatctttgtggataaccttgtctcgaacgtatgcttttgaaatgcccttcttcaaatgtgtgctttggccgtccatgcaaccacccctactaagctcttgct

SEQ ID NO: 92577 - DNA, 1732 bp, Homo sapiens
ctacaagccaaggaatgccgatggtcatcagcaaccatgagaaactggtagaaaggcatgggacagattctccctcagagcctccgggaggaggcttgctgacatcatgattttggacttctggcctcctgaaccatgaaagaataaatttctcatgttttaagccactcagtgtgcagtaatttaaatggaagccccaagaaactaaggcactgcccttgacctcttgatctcagcccattcagctgtctaagcttggagatcacttccccagggaacatctctgcattttcaggttgaggtgaggctttcatggctccagtcctctggctgttgttatccaatcatctgtttgaccattttcccattcaaggtcttgagttgccatttacctctaccatttatccagccttagttccagtgcttagcccagggaaggtgcttaataaacacatccagaagctgacaatcttcaccagactttccagaggaatgcaaatgcaagtacttgttttagctctgatcccagcatcaacaaggcacctgaccaaacctcgtatgcccctttgctgcttttactttctccaatgccagtgccttcagctggttttcttacgtacacaacctcaaaaacagaaaaatacacagagagataaaaagtataaagcacttcaaaccaccccaccaagagagccttctgaaaagtcaaactcagtacactgtttggcctggcctcattttaatctatttttcatgttaaaatatcaaggcatgaaagaaggaagcagagaaaggaaagaaagggataatatgaaaaatgctttatttgacaatgtgtcattcagaaactgattatttctgtctctggcctttttaatattccctcactatggccaagccaccaggggatttggtattctaagactggatttataatactctgttctgcagtgataagaacacaggcctttaatcctcagagctgtgaacatgcatattctctcaagtaatgtccttctcttctcgtcacttgtttctggtccctggcagccacgatgccatgatggctgagaactggtgatccactgggccttctcttggccacttgcctaatgacagatctagtggggaagggggcccgggatccaagtgatccgagacgtctcctttcaggccccagtctatgtttaagctggaagaattattagaaaatagtctaagtctttagtgttagaagaaaaaaaaaaaagaaaaagaaactgagactcaaagaatgaaagtgacttgaccaacatcacaaaccatcctaaaatagttctggagacagaatatgcagccgactccctccaaagctgctaaggaaacgtgaattgtgacaatttgatctacaaaatagcttctataactttccatttctctctactctatgactgtcctatgccctagttttcatggattttcatcatgataattttaatacatgctgaatgatcttccaggctttattcctcctttcccactatgctcaatccatcttacttaccgtaactaaggcacacatggaaactgatcccttccccattgactaagctaagaatcctgtagtttgacagttcaagtcctyatcatctatctttgtggataaccttgtctcgaacgtatgcttttgaaatgcccttcttcaaatgtgtgctttggccgtccatgcaaccacccctactaagctcttgct

SEQ ID NO: 92578 - DNA, 1133 bp, Homo sapiens
atctatgcatgctttctcatccgtggaatgaatgctgaacccctgtaacttggctagaagccatcctgggtggttaacatctttggcaggacaggagcttggtttctgaagagttcccagctacgatgtttcctcggcatccagcaacaacacagcagtgaggagacaggcatcttgctcccttagctgctattccatactgaagtagaggccagtgactggaaaatggagatgatagccccactatgtctcctcatctcactctcctccaccccacccccataaactacatgacaccttccagtattaatatacgcaggcaacttcggaaaactcctcatgctatggaaagggtgatggtcttaaactttcctgactaggggatatgggtcagattctaatcttatctccttacctactcactaatttcgacatattgatgtcttgaactagtcactttcaaccaggatcgggggtgatttcctctctctctctctctctgtctctctctctctctctctctctctctatcacacagacacacacacacatctttcactggagacctttagcaatgtctgaagacatttttttttgtcatgactagggaggggttaggccagggatgctgcttaacattctacaatgcacaggaccgccccccaaccccagcaaataattacccacctcaraatatctatcaaatcaaggctgagaaaccctgctccaagccttggttgtcacattggtaaaatggagattccagtttcacaagaacgtgggaggaacaaacaattataaaggtgaatgctttttgtaactgtaacatactacacagatgtaggatagcaatgttattgttccattgtgtcttagtctgttttctgtttaactgaatatctgagactaggtagtttatggagaaaataaatttatttcttccagttctgcagactgggaagtccaaggtaggagggctgcatctggtgagggccttcttgctgatggggactgtctgcagagtcctgaggcagcgcagggcatcacatgaccagggagactcgtgacagacagccaacctagtttttaaaacagattcactcttgtgataactaacctattctcatgacaac

SEQ ID NO: 92579 - DNA, 2228 bp, Homo sapiens
tctttcataaatatcactaaagtttgatcagattcctgacctacagataaacaaacaaatgaaaacaatatgaacacaaatgarctcaaacaacaatgaaaacagtaacaataacaaaacaaaactacaaagttggaggtaggggaaggaatgatggaaaaaaactcagacaacatttttttaatagtcatttgcttgatttctggaaaagtatgaagaataaaatacattaacaagtgttgacatataatctcaactgtgcagtaacataaaagaaggaaaaattgtcagttcaacccaacagctctcctggactcgagctcctgctgtaacttttataaatcctattaaagggcaaaaaggcttaatggtaaaaacattactataaattcagaaacatctttctgatgaaagtaacttaatattcattatagacaaaattgggaaatataaaataccaaagtgtatgaagtgggaatgacaataaaatgtaatactaccatacagagataagcactgctaatatttaattttatgtccttccagtgtctctaattctattcatattctatttactaattgagtgctgaacatgtaccatagacaattatacattctctgcatgtataaactcattaattctgttccagaaacttttgaaatataaataatttttctcattttcataaataaactaagacaaaatatttagagaatggcagaacttttttagacagctgtggtacacatccaatattaaaagtagagataaaattttaaaataaaacagtagtaaaagagtaaaaaaaatagaaaacaacctagtgtagattagcagttctgacttatgctcctgtttaatcaaacttggtatatggcccctaagtttaattcaaccacaaatttttctgtcatcctaccacctccttcttctcctcctcctcttcctcctcctcctcctccttcttcttcttccttttcttcttcttcttcctcttcctcttctttttcttttttaatctgtagagttttcaacatgtagcgcaggctggtctaaaactcctgggctcaagggatccgtacaccttagccgcccaaagtgctgggattacaggcgtgagtcaccatgcccgaccagtattctacttttcatcagtactattctccatggaattccttagcaccatgagtgctgtgattttgccttgtatttgctctttctttgtctctcttgccctgccctcctcatgcattcttcagcaacctcttccaccaacatgcacatacataaaaacagaaacatgcatacgcacacattcattcccttataaatttacaccttcgcctaaagtctctattcatccttgctggctatgttttgcacttcaaaggaggtagctcttctctctctctctctctctgtgtttgtgtgtgtgtgtaaaataaattatatacatacaagtattgtataattctttgtaattattttcatgtaattgtttccaaatctattttgtgatcttcttcggggcaaagatataattttggcacatcagtgatactccatttataatttataaataaacagcttttttgatcatttgcttttgttttctcaattcagtaaatacaggccaacaattcaaaattatcagtagttcaggaattatatcaatgttctcttcaaaagagaaatgttaaggaaaacaacaaataaaatttcattaattagtaattattgggaggctcatattttttgcccagatgtctaggctatgaaaaggcctttgtatgtaattcctaatcttttttttttttttttttgagacagagtctcactctgttaaccacactggagtacagtggcacaatctcagctcactgcaacctcagcctccaggattcaagtgattctcttgcctcggcctcccgagtagctgggattacaggtgccccccacaatgcctgactaatttttgtatttttggtagagacaggatttgtccatgttggccaggccagtctcgctctcctgacctcaagtgatccgcctgcctcagcctcccaatgtgctgggattacaggtgtgagccactgcacccagctggccctactcaatttttataatactggtcaatttcctattctttttattataatatactgctattattagttatacaatggatttttgccatgttattagtatctatgtgtgtgtaaatgca

SEQ ID NO: 92580 - DNA, 546 bp, Homo sapiens
tagttggagtttaaaaaatagttgttgaataaaaggatcctcaccaattcagtagttaaaacctagtgtctttagcataaagctttagtattgattacaatactaatatcttatgtaggtgttaattttttttatgttctgctatgaggaaagagactagcctttaggtgggggtagtgaggaacatcactcatatctttaaaattttttgaaaataaatgtatatatttaaggtatacaacacgatgttttgatataaatagtgaaataattattacagtcaagctaattaatatatccatcttagaaactatgaaatttgaggctctgtttgcaagcawagtcacttcctaaatgagttacagcatatgaggagctgcttcctgaggcttcccagaagctgcttccttttctcaacttgctgacactagcactgagctcttttgaaagtcaatattctgtatttatgtggtacttctagaagacatgaaatgttctgcagactttatcatttcccagcagtgcaaataactggcaagtggaact

SEQ ID NO: 92581 - DNA, 1694 bp, Homo sapiens
  misc_feature (1)...(1694): n = A,T,C or G
tggctctcagtgggaagagaggggagctgaaaaggggacagaggaggggtaggtgatcttcccctgaagtccggctggattttctccggttactccatcaagctgtccctctgaagtcaagtcccttctctccaacattcagctgcttctcctctctgctgattgagtctggggtctttataggcacaggatgaggtggggtggggccatgggtagtttaggaaaaggcaacatttgagctggaaaacagggagagaagttctcactttgggccacggtctcaggcttttcagcttgagggtggaacttcaccagggacccacacctgtctgcctagaatttctctgcctcctgtctctatcattgtatcaatatcaaacaatagttgttggcctacatgtcagtaatttaaagatgaattaaatggttatatatgataacatttatcagagacctttagaaacattcatattctttggtctactatttttacttctagaacatattccaagcaagcaatgaaaaatcgctaattcaacatataatattttgtcagggaaaaaataaattaaaggcagttgggcttggagatatccatgtaaacaatctgtacttataagggaaggcagagttggaagtaattaaaataatgtaataaatgcattaatagaggtgtcatcaaccagttaaatctatgagaaagaaagaaaggcactcaactgcttgggggaagggaaggatctgggggaagatgaaagaagttcctcttgggggagatgactgatgagtcacagcttagaacatattttttagtatatataagccagaacttgcctcaaaattattgtataaataaatgaggaaaaacattagaatgtggtagcatgggggagagcacctcagtcccccaagtagctgagactacaggggcatgctaccatgtctggctaatttttatattttttgtagtgacagggttttcgccatgttgcctaggctggtcttgaactcctgggttcaagccatctgcccaccttggcctctcaagtgctgggattacaggcatgagccaccgngcccagcctgngattccaagtattatccaagcaatattttttgagagcaattttttattttagactgggtgcgtggctcannnnnnnnnnnnnnnnnnnnnnnnnnnnnnnnnnnnnnnnnnnnnnnnnnnnnnnnnnnnnnnnnnnnnnnnnnnnnnnnnnnnnnnnnnnnnnnnnnnngaggtctagaaacagcccctgcaacaaaaaaaattttatatgattagccggtcatggtgatacacgcctgtagcctcagctactcaggaggcccaagggggaagatgctttgagcctgggagattgaggctgcagtgagccatgattgcaccactgcactctagcctgggtgagagtgaaatcctggaccccgtgtcgaaaaaaaaaaataaagatttgagataggtaagcttttgtgtacaagagagtttgtgctacattttgttttctttataatgtttgttttggttgatgcaaaattgtttcatcttagatgcttgaggtggaaggagggaattgttttgtagyattcatatcattgaaattaccaccctatatttttctcctcaaagaaagaatatggtgatgaactaagaatagaaaataataactacatat

SEQ ID NO: 92582 - DNA, 524 bp, Homo sapiens
cagggaacacaatgcaaagattgcaaatgtaaaaatgacctttccaagtggtaacacctggtgtgttaaaaagtccattgcagactgggtttgcagtgtgcacactgtaaatatggggaatgtgggaaacagtagagagggactgttttctcctttgggtgttagctgtcaccttgtgttagactgagccagactcctcggttctggctcccacagtcacaaggcattaaccaagggtatacagaggaactcacccaggttcacacctagagaagactcagtaatatttgatcagcaacctgctgtcaatttagataaatggcatttgacttcaaataaaggtgactaactcaatgaaggaagcmtgtgcatagaaggcaatgtttgcttctcccaagctgtcagggagagcttgcccaccctagcagtggtcactgattttctccacctctgaagacatggtggggtcctgccaaagactctgagctgtcagaattctggaagagacaaactcacaacaaaga

SEQ ID NO: 92583 - DNA, 730 bp, Homo sapiens
tttgatgtgttgatgtgctttgtgactggatgtgtctagaggcactttccaaacatatttgactactaccttccctctcttgcagtattgcaagggactagagttttgagcagcacacgttggcgatagaactaggatgttctgcatagtgttgtccagttgagarcatttatgaacagcgaatcctggcctatagggaggcaccagctgcaggggccttgcaaaagtgtgatgcagctcatcttctacctggctttgttctatcatccgtatctgctaagatgttactgctaatcacttaggcattgcacaaggctgctcagtgttcaccatttctgaaagtaaagcactggagaaagaatcaagtggaaagggggtgaacggtagtaacagagaaattctaatagtgggaagaaaaaaatgaggaagaaactttagaatggataaaacattctcactgaaattggacatggagccaattctcaagttatatttctggtttagagacattaggccagggttgaagacatctgggtaaaaatgaccaataattcagtgtttcccaagccctggaaaggcaagatcttactaacttttgtaactccaagggagtccttcatgtgaggtaggtactcaataattgtgtcaaataattaaatttcttttctcttgggggcttagccttctgttagtaggcttgttggtttccattgctgtaaaaagtaatgtg

SEQ ID NO: 92584 - DNA, 643 bp, Homo sapiens
cagcccaaccaaattgaaaagtaacaaccttcacttaccatttggagatgtgacggaagtgccaggagttaaactccgaggactaaatgagataacagaagctccctatcctctcttgaagaagctcattagtttttgctttctcacattctgtttgctgtggcccgcagccaaaaaaatggcgatgcagagataataagtgagagttaaaaatatgaggagagtgattgggaggtgcaggacctcaggcagctgggtgaggcrgggtgggggggcggtggctcaggtagggcgagtctgggagggggcaggagggaaggatgcagagaccaactgagggaggctgaggaacagagagagacagccacatgcagggacacaggtagatggagagaggggcaagggaacagagagagagggaagggcagagagagagaggacgggacacagagggtgagaggcagcacacacacagagacagacatccataggaggtacagaaagggtggagagtgggagaggctgagagaaagatgtgggagattgagtgtgctcttggcaaaggtctacaataattggagtgggttcaacggtcaaggccatgctgtggggaagaacaggaacagggtcaattacatcctgc

SEQ ID NO: 92585 - DNA, 515 bp, Homo sapiens
agtttaagagcatggctcagatacctggtgaggactttcctgctgcatcatagcagagcagagagtgtcacatggcaagagggcagaagcaagagagtcagagagtgctcgctttcatacgaaagccactcctgcaataatgaacccactactgtgacagcagcattaatctctacatgagggcagggggattaagtttccaacacaggaatctttgggagacacattcaaactataacaccatttttgccatgggttaaagtatcatatatatttagatctgtttctggattctttagactcttccactaaccactttatttctgtcaccaattaaaatcttaggcaagctttaataactgataagccaggtttttacttactagtatttttccttttttcattatgttcttagattattttggatatctatgcttcagtactaattttstaattatttttatccagtttattaccaaaaagttacattctaattggaattttagtaattttga

SEQ ID NO: 92586 - DNA, 1242 bp, Homo sapiens
aagaagcagcatatctcttatgtcttttctttgcagttgctacagagtaaaagaaaatcaattcggtgtattctccaggagtatggaggaaaacagcccttatttcaaaaaattttggaaggaagaaaaccaaaataatttgtgtggtcattgttttgtaatactgatggtgaaatgcatgtgaattatccagacacatctttatttcagccatcctaaaattttgactagaattacatattaaactctaattgcataaatgtaattaaaatatcagctcatcaatgattcatatttaaaacacacaaatctttcaaagaagtatcaattatatgaacttacatgacaagaataaaaaaatgacaattaggtatcagaagaaatctcaaagtcamatgaatggcaatatttttcttttcctaaggaagctaagaacatttattattacctgattactaaccttttattttcatgacttagaagaaaactagttaagaaatcatagtacttttgcttactcttcccaaacacagtgtgtcaataaacatttattgctatatttcttacataaaagggatattttaggtgataagtgtttgttttaatgttgcatacatacacaacaaacaaaatgctaattttcagcaagtttgatatgctttatttttgcttcctcccctgaatttgctttgtgagattattatacaggttatgattttgggggccttggaaacctaagtaggactttattcttttctttgaatttgagagtttaactacatgtacgtaacaatgtgcaatccatctttatgcaaatagtctaaaaaggcaatgtgcctgaagggctgttttatggcattatttggttttatatctttgcaatcaacactatgcagctaacatggccatgtaaattcatgagagatttttctattgaaacccaaacaaggtcacctgcttttgaagatcagagtgagataaaagtgacactgtttctacagtggtactaaaaaataatgtgtaaagcctctttaaaaaaaaatactattgattttgtctgtgaaaatatgtcattgatttttttttttcaagtttggattttcattgctaattctaatgagggaatttgagatgagttgtgcaatgagctatttatacttatttccttttacatactattccctaaaacatttaaaaaggttcaaaacctgtattcttttcaatggccacagatttttcagg

SEQ ID NO: 92587 - DNA, 650 bp, Homo sapiens
atggtggtagtggtggtggatggagataggctattatatgatcctaaactgttgatcaaagratttaagaatacctaaaagagtccaattatgctaaatgaaataagccaggcacaggaaacaaatagtgcatgttctcacttgtttgtggaatctaaaacaatcaaacttatagaagatgaagtagaatgatgactacaaaaggctggggagtgggaggagtggggagtacagtgccgagtgtacaacattccagttaaacaggaggaataaatgataaatatttgagacaatgactacattaactggcttgattcaatcattccacactgtgtgtatagatatcatggcatcactttgtgccccgtaagtatatgcaattataatttgtccatattcaataaaataaattttaaaaaagaatgaagagtctgcatatcttttgatgcttagcaaacctcacatctctgaaataaacactagcaagtttgagctgagtagtacaggattatggttttctcctcagctgatagcttataatgcaaataatctgtattggcaattgcagttggacctatttgctttggaaaatacataaacataactcttgtctgaatggagaggcagtctacctccctgtagaggagacc

SEQ ID NO: 92588 - DNA, 650 bp, Homo sapiens
atggtggtagtggtggtggatggagataggctattatatgatcctaaactgttgatcaaaggatttaagaatacctaaaagagtccaattatgctaaatgaaataagccaggcacaggaaacaaatagtgcatgttctcacttgtttgtggaatctaaaacaatcaaacttatagaagatgaagtagaatgatgactacaaaaggctggggagtgggaggagtggggagtacagtgcygagtgtacaacattccagttaaacaggaggaataaatgataaatatttgagacaatgactacattaactggcttgattcaatcattccacactgtgtgtatagatatcatggcatcactttgtgccccgtaagtatatgcaattataatttgtccatattcaataaaataaattttaaaaaagaatgaagagtctgcatatcttttgatgcttagcaaacctcacatctctgaaataaacactagcaagtttgagctgagtagtacaggattatggttttctcctcagctgatagcttataatgcaaataatctgtattggcaattgcagttggacctatttgctttggaaaatacataaacataactcttgtctgaatggagaggcagtctacctccctgtagaggagacc

SEQ ID NO: 92589 - DNA, 767 bp, Homo sapiens
ggaagaagaaaaaaacctgtggcaattagaacatagtttattctttaagttgaggggtgcatgacttaaccttgcctggcatggccttaggtcttgtttataatatggtatcttactactgtaaggactctgttctgtcagtcttaggatctctattttaacaataatgctggtcagttgtgtctaaaccacaaagggagagagtataaggagaggtgtctgagcttccaagtactggccaggaactcagtatttaagacttctctggggtctccttggcaaagaagccatctgtccagctagttgggtggcttcagattttaatcttagttctgaaagcatttaatttgatgaaattttgccatattttttctttatttttaaagcccgtcatgttctataaaaatctttctactcaggatgtgaatggattctcttaattttatctctctatgagttccagagtttcagttttaatttttaaattgatgacatctaaaattctactcctaaccaaaacatttttgggggtgactaaggacaactccaaaaatcttccataaatggaagtaagacttactccttaaagaactttctgggatcctgagctgcggggcacagtggctttagtgcacctctgctcttaagactattcagaaattgtctttgtgaacccatcaggctgtttcaaaatcagcaatttagggcttgcttgcaacacgcagttawgcagcagctgttttttggatctcatgagtgcctgcatg

SEQ ID NO: 92590 - DNA, 743 bp, Homo sapiens
aggctgcagtgaactatgattgtgccactgccctccagcctgagtgacagaatgagactcccaactcaaaaaaaaaaaaaaaggaaagaaaattaagaatttgttgaaaattgttttactacaatgctaggctgcatgtcttgcacctgtactcccagcaactcaacaggctgagggggaaggattgctttaggccagcggttggagaccagcctggggaacagggcaagacctcrtctctaaaaaaatacaaggcaagctgagccaggaggattgcctgagcccagaagttccaagttggtcagctatgattgccccgctgcactctagcctggataacagagcaagaccctgtgccttatttttaaatttatgttatttttttactacttatgcttatttatctatttatttatttttgagacagagtcttgctctgtagcccaggctagagtgcagtggtgccatctcagctcactgcaagctctgcctcccaggttgaagctatttccctgcctcagcctccagagtagctgggattacaggcacatgccaccacgcccagctaatttttatatttttagtagagacagggtttcatcatgtttgccaggctagtctctaactcctgacctcaagtgatgcacctgtctcggcctcccaaagtgctgggattacaggtgtgagccaactcgcccaggctccttatgcttgaaatgtgaggtttcattagggaaaaattt

SEQ ID NO: 92591 - DNA, 743 bp, Homo sapiens
aggctgcagtgaactatgattgtgccactgccctccagcctgagtgacagaatgagactcccaactcaaaaaaaaaaaaaaaggaaagaaaattaagaatttgttgaaaattgttttactacaatgctaggctgcatgtcttgcacctgtactcccagcaactcaacaggctgagggggaaggattgctttaggccagcggttggagaccagcctggggaacagggcaagacctcgtctctaaaaaaayacaaggcaagctgagccaggaggattgcctgagcccagaagttccaagttggtcagctatgattgccccgctgcactctagcctggataacagagcaagaccctgtgccttatttttaaatttatgttatttttttactacttatgcttatttatctatttatttatttttgagacagagtcttgctctgtagcccaggctagagtgcagtggtgccatctcagctcactgcaagctctgcctcccaggttgaagctatttccctgcctcagcctccagagtagctgggattacaggcacatgccaccacgcccagctaatttttatatttttagtagagacagggtttcatcatgtttgccaggctagtctctaactcctgacctcaagtgatgcacctgtctcggcctcccaaagtgctgggattacaggtgtgagccaactcgcccaggctccttatgcttgaaatgtgaggtttcattagggaaaaattt

SEQ ID NO: 92592 - DNA, 743 bp, Homo sapiens
aggctgcagtgaactatgattgtgccactgccctccagcctgagtgacagaatgagactcccaactcaaaaaaaaaaaaaaaggaaagaaaattaagaatttgttgaaaattgttttactacaatgctaggctgcatgtcttgcacctgtactcccagcaactcaacaggctgagggggaaggattgctttaggccagcggttggagaccagcctggggaacagggcaagacctcgtctctaaaaaaatacaaggcaagctgagccaggaggattgcctgagcccagaagttccaagttggtcagctatgattgccccgctgcactctagcctggataacagagcaagaycctgtgccttatttttaaatttatgttatttttttactacttatgcttatttatctatttatttatttttgagacagagtcttgctctgtagcccaggctagagtgcagtggtgccatctcagctcactgcaagctctgcctcccaggttgaagctatttccctgcctcagcctccagagtagctgggattacaggcacatgccaccacgcccagctaatttttatatttttagtagagacagggtttcatcatgtttgccaggctagtctctaactcctgacctcaagtgatgcacctgtctcggcctcccaaagtgctgggattacaggtgtgagccaactcgcccaggctccttatgcttgaaatgtgaggtttcattagggaaaaattt

SEQ ID NO: 92593 - DNA, 743 bp, Homo sapiens
aggctgcagtgaactatgattgtgccactgccctccagcctgagtgacagaatgagactcccaactcaaaaaaaaaaaaaaaggaaagaaaattaagaatttgttgaaaattgttttactacaatgctaggctgcatgtcttgcacctgtactcccagcaactcaacaggctgagggggaaggattgctttaggccagcggttggagaccagcctggggaacagggcaagacctcgtctctaaaaaaatacaaggcaagctgagccaggaggattgcctgagcccagaagttccaagttggtcagctatgattgccccgctgcactctagcctggataacagagcaagaccctgtgccttatttttwaatttatgttatttttttactacttatgcttatttatctatttatttatttttgagacagagtcttgctctgtagcccaggctagagtgcagtggtgccatctcagctcactgcaagctctgcctcccaggttgaagctatttccctgcctcagcctccagagtagctgggattacaggcacatgccaccacgcccagctaatttttatatttttagtagagacagggtttcatcatgtttgccaggctagtctctaactcctgacctcaagtgatgcacctgtctcggcctcccaaagtgctgggattacaggtgtgagccaactcgcccaggctccttatgcttgaaatgtgaggtttcattagggaaaaattt

SEQ ID NO: 92594 - DNA, 1171 bp, Homo sapiens
ttatcaccttcatagaaaggtactcacctcccacgtcaagagaaaagccaacatgtttttcctccaatgcataaaaggaacttccatagggcaggcaggagtcaggctgttcaagacaactggaaggagttgaataacatctatccagtgagtcctgcaagacttcaggctctactgcctccagcagctccctgctgagcctggaaaaggaggaaaaagtaaagaataagccaggggaaatcagacacaacagagccccaactaggtttcatgggtagcataaggaagtggttaaaaaagtaaaaggatagatccattaatgaggtaacaaattattgccttcatgttgggacagaacagggccaaatggaaaagaatgaaagagaaagacagatagacacacacacacacacacacacacacacacacacacasagagagagagaatgagctcagtgaattgtccaggtgacacactgatgagggagtaacaggacactctgagttagtgccctcaggacacacagcatacagtgatcaggaaaggactgtgctcaataattttccataaaatgtgctcaagtttccatgcagtcgccatgagaatacagtttttgaagtctggtccacctacagtaggttagtaaatgataaggggaggaagaaatggaaacctaaatatctactgcaatgaaaaccaacagcaatgttagtaggaataattcaggctcggttgaaaagatgtaatcgataatgtcagcccgccctgttttccctgaaccaggagtctccagatgtcaacacagaagaagctgttcacaattgctcagttacctggggcatggtgggccttggtcttcttcctcttcttggtcctttttaattcctgcaatacattcagacagggacagacaaaataagccaattcacctacacccgtaacagtccactgtctaatccccacacagggatctcaggctcctcagcaagagaacaggacaatgtgagagatatacttcaggaggcctgaaagctggtcatgatattctttggtttgcatctcagaaccaagggtgaaatatccctattctggtagatcgttatcccaaaatcatttatcccaagtttgtgcaaacagttatgccttattgttcccatcagttcaaagaca

SEQ ID NO: 92595 - DNA, 804 bp, Homo sapiens
ttttcaaggtatcaagtgatcaaaatcatttatatagagatctcctgaaaacatgtgtgaccatctatcttgggaagtttcataaacctgatgctattttgttgtttccattttgttttcccatatactgaaaagaacagggccatgagcggttcttatgcaatatggtttgatatatattttgttsagatgacctaacaccattgattttgggttgcattccactaacagaacatggcaagatcaaggttatggtcacggttggttggtgatcctcagtgttgcagtagaaggtgagtttgagatgagaggaatgagtaggaaagagtgatcccctgaaccacctcctcgctttctcagctttcaccccacctaggttttgtgagcctggaacttgggagactgttctgtagcccaggtctcctaagattggctgctggacttgcctgagttgagggtgcggtgggttgaccctgggctgcccagcattcatgtggtagtgaaggaaggaggactggatcaatcccatttcaaagcatgtctctctgcactccacactgtcctccaatgacactgtaaggaaaccgctttaagacgtatcaacggctttaagtaaatgtattttctggcatctgggagacctgacattctgtgtcataatgaaaatctgtcatgtttctttattttaaaaatgataaaactgcaggttcacagagttacatggcttacttgaggtcacacggggatgagttttcagcactgccaataaaagcaatcacatgaattattcagtaattattcata

SEQ ID NO: 92596 - DNA, 844 bp, Homo sapiens
ggatccagcctgttgaatttatttctaagcacaacatgtatttagatgttacttgaaatgaaattgtatttttatttcattttccaaatgctcattgctaatacacagaaatacaaaagactacttctattgagcttatattctgcaacattaccaaactcactaattasttttggcagatttttatagatttctaggattattaacatacacagtcattatctgtgaataaagacagcttcaattctttcttttcaatcttttcaatacttttatttatttttcttactttattgcattgatttagatctctagtataatgctgaattgaaagaataacaacagatattctacttttttctctgatttaatagaaaagcattcaatcctatgccatttaatataatgttacctctgagtttttttcaaatctacccttaatagggttgaaagtgttgccttctcttcttatcatgctgagagttttctggggtttgtttttataaatcatgaaaaaagttttcaattgtgccaaatgcttttactgtgtatgacaaggtaatcatatggtttttctcttttgccctgataatacataaattacattttcttaaatataaaaaagatttcttgaatcaagctaggacagtttttttaattataaacttttaacaaatatattgaaatataacttacatgcaattgagatgcatgaaagtgtataatcattaaagtgtataattttaagagtttgagcacactatacacgagtcaaagagaaaggacagaaaatactaacgatggctcagcacatgtggtctatcttgctgaatgctctatgtga

SEQ ID NO: 92597 - DNA, 844 bp, Homo sapiens
ggatccagcctgttgaatttatttctaagcacaacatgtatttagatgttacttgaaatgaaattgtatttttatttcattttccaaatgctcattgctaatacacagaaatacaaaagactacttctattgagcttatattctgcaacattaccaaactcactaattacttttggcagatttttrtagatttctaggattattaacatacacagtcattatctgtgaataaagacagcttcaattctttcttttcaatcttttcaatacttttatttatttttcttactttattgcattgatttagatctctagtataatgctgaattgaaagaataacaacagatattctacttttttctctgatttaatagaaaagcattcaatcctatgccatttaatataatgttacctctgagtttttttcaaatctacccttaatagggttgaaagtgttgccttctcttcttatcatgctgagagttttctggggtttgtttttataaatcatgaaaaaagttttcaattgtgccaaatgcttttactgtgtatgacaaggtaatcatatggtttttctcttttgccctgataatacataaattacattttcttaaatataaaaaagatttcttgaatcaagctaggacagtttttttaattataaacttttaacaaatatattgaaatataacttacatgcaattgagatgcatgaaagtgtataatcattaaagtgtataattttaagagtttgagcacactatacacgagtcaaagagaaaggacagaaaatactaacgatggctcagcacatgtggtctatcttgctgaatgctctatgtga

SEQ ID NO: 92598 - DNA, 526 bp, Homo sapiens
ttatcaccttcatagaaaggtactcacctcccacgtcaagagaaaagccaacatgtttttcctccaatgcataaaaggaacttccatagggcaggcaggagtcaggctgttcaagacaactggaaggagttgaataacatctatccagtgagtcctgcaagacttcaggctctactgcctccagcagctccctgctgagcctggaaaaggaggaaaaagtaaagaataagccaggggaaatcagacacaacagagccccaactaggtttcatgggtagcataaggaagtggttgaaaaagtaaaaggagagatccattaatgaggtaacaaattattgccttcatgttgggayggaacagggccaaatggaaaagaatgaaagagaaagacacacacacacacacacacacacacacacacacacacacacacacacagagagagagaatgagctcagtgaattgtgcaggtgacacactgatgagggagtaacaggacactctgagttagtgccctcaggacaca

SEQ ID NO: 92599 - DNA, 526 bp, Homo sapiens
ttatcaccttcatagaaaggtactcacctcccacgtcaagagaaaagccaacatgtttttcctccaatgcataaaaggaacttccatagggcaggcaggagtcaggctgttcaagacaactggaaggagttgaataacatctatccagtgagtcctgcaagacttcaggctctactgcctccagcagctccctgctgagcctggaaaaggaggaaaaagtaaagaataagccaggggaaatcagacacaacagagccccaactaggtttcatgggtagcataaggaagtggttgaaaaagtaaaaggagagatccattaatgaggtaacaaattattgccttcatgttgggacggaacagggccaaatggaaaagaatgaaagagaaagacacacacacacacacacacacacacacacacacacacacacacacasagagagagagaatgagctcagtgaattgtgcaggtgacacactgatgagggagtaacaggacactctgagttagtgccctcaggacaca

SEQ ID NO: 92600 - DNA, 770 bp, Homo sapiens
cgcacacggcgcttagttctggaactgcatacccaggggaggatgcgggagcccgaagcccgagtatgtgtccccgaagcccgtgtgtgggtccccatggttttcgtgttgggggtgggcgcggaacgctaagcctgggcctattgggagccatagtcttcttgatggctggtgcttattgggcttttttcagtcgaatttcgaaatgcagttgaatttcttactttggaaacgataatagaaatggctgacctaagattttcatgatgatattttgccttttttggtgcatatgcagtttctgtggtgtagtggttattatggtcgcttcacatatgaaaggtctctggttcragactgcgtgggaacatcgtgttttgttttgtttttttgtccctaaatttagtgagtttaatcgaggttgggaaacaaacagaaaagtagttgaacctgtggctacactttagacctcctcaatctagagagatcgttgaccaggctacagtttccactggtctgccagcaagaggcctgcttaatattagctttggttccagaaattccttcaggttctcttcattctcttctatcgcctgtattttcacaggctgacactgaaagtggatgacatcttagtgcatttcctaagggtcccgcttggcttcgctttactctggtaagttgcagatctggctgatttgcaagacaacaaaaacaaaatattttttaaaaaggttctaaatctgcatctggaagtcatagagtcaata

SEQ ID NO: 92601 - DNA, 714 bp, Homo sapiens
atgcagcagaggcagcctggaatggggagtcagggcccatggagcgggaagaggtatctataaggtggaaaggacggagttagagagcggggattgattcatacaggggaactcattaatatgtaaataaaccaatgaaagtgaaagctgtcagcaaagggagttgcaattaaggaatggaagtaaatcagattgaaccctatggtgctgtattagatctggatcaaacagtatagactagtggtcatagagatattgatgtagatatatagatacaggccagacacggtggctcayacctgtaatcccagcactttgggaagctgaagcaggtggatcacttgaggacaggagttcaagatcacaaacatggtgaaaccccgtctctactacaaatacaaaaatgagccaggcgtggtggcacacacctgttgtcccagctactcgggaggctgaggcaggagaattgcttgaaccagggaggtggaggctgcagtgagctcagattgcgccactgcactctagcctgggtgacagagtgagactcggtctcaaaaaaaaaaaaaagatatatagatatagaaataaatacagatgtaatgtgtgtatacgtacacccattattatatttacacttactccctaactccactgagaaggcctgggagcagtaataccccaaaagcatgagtacatctagtgcacagcttttgg

SEQ ID NO: 92602 - DNA, 640 bp, Homo sapiens
cagcgtcctgtgctgcacctgtccagcatctggcccaccccactttccacctctgtgacctgcagggccacctgcggctgcctgactccgggctgctgggtgggactggcctgcagggagccaactgggagtgggtgtttgcttccccagccctccctgtagggtcctgcactcgagtctccccacacccaggtctctgctcctgcaggaccacctcccttgcagcctccctgtgtcctccgaggcctgaggggtcccacccagcattagccttagtggtttctctacatgccaaccacatcttagtccctttattcatctctcctcaaatttcccaagttgagggtgacatctgtctcctccatggatgctaactgacaccaatcaatcacgaccttggctcttataccaaaataaagcctggatagatttaaaaagatttaaaagtttttaatttaaatagtactagaagaaagcatgggggamgggggatattatgaaaaagattaattacctcatgtaataaaaagaaaattctctatggcaaaactccttaagcaaagacaaaagtcaaataacaaaccaggggaggtggtgccacatacctgtggacccagctgcttgagaggctgagatggga

SEQ ID NO: 92603 - DNA, 604 bp, Homo sapiens
atactgggcagaaatatctttgggcaaggaatgcaattgatttttcttatggaaaaaataactgcctaatgacatcggagaggtgacggacacactgtacttggaaaatcctatggtggagaagtaggtgtgatattcacactgtgcgtactttacagattaatcaaaaatattttctacatcaccgttttgttgtactttagaattatattttcagaggaaactaggttttagagraaaaaaaacaaaaggaagcctgtgaaatcaggagtaaacagtaatgccaattaagcactcgtgctgggagcaaaacagaggcctcattgtgttgagccacagctgagccaatcgcccaaaggaactggtggacttctaaaaacaaaggtcaagtttcaagtgaatcactcagcaacaaaatgaagaatattttgaccatttaataaaggctgctacaagataggagtaaagctttggttccaaaactaaccatgaagaactcatttattgcataaaatatcttagcaaatacatgataaccaggggctcagacccttcaggattgatgggctgggtcactccatgagacacgagctgagagggagag

SEQ ID NO: 92604 - DNA, 592 bp, Homo sapiens
aactcctgacctcgtgatccacccatctcggcctcccaaagtgctgggattacaggcgtgagccaccgcgcccggccagcattatgcttttgactgtgcatactataatgctctgatcgttggtatatatgggaagcctgtagttataaatgtattaaagatagcaacttttatgactttacggtcttttttctcatttaatcaaacaattttttgaactgttttctgatatttacacacttctacctcatttttttttactgatatcacttgcctagtatgtatttcttcacctatttatttttcacttttgactcatttacaacgtaagagaattgtctactgatatttttcaggactacagattttcaggacgttattttatgtttgctgataattttagagaggaagtataacattaatctaaattttctctttgtggataagtaatttctgaagcatttgatcacaatgmtggtgaaatatttttctttttattggttttcaaatccaaagtttttatcaggctatatgtagatgttggctaagttttattaattgttttggtacatgataacttattttcatctga

SEQ ID NO: 92605 - DNA, 572 bp, Homo sapiens
aaaaatatgtcttcatttacagttcattttttaattgcctttatcttttacagattgaaggacatgcctgtgtttcagccacaatctgaactttttatgtaatctttgctttaccaagtcaaattagcctaaaaccatcaaagtgagaataatgatttcacgatttagagaaagccagacttgaatactccctgtcttcctagtgacaacctgctccagcctatcacaggctgctgtttagttattggttgctctgatgtcccaaaacatcatcatctttaacagcatccatcatctagtccatcatccttaacagcaaaggaaagtctcaagtctaccattcatcacttccccacagttttagctrttgagactgaaggaagattattccctcccagggactaacccctccacacaaagaaaaccagttctttctgttgtcagtggttcctcatttttcgggaaactcagggtgtactcccctagggggtgtgttggaggtcatttcaggggtgcccactagtgtcacttctaaaggcataatctctaataaccatgaacaaactctgcat

SEQ ID NO: 92606 - DNA, 998 bp, Homo sapiens
tgagcctcagacctgaaatagccaaacacgtaggcatttatcagcaaacacgcaagagtggtcacacaggctatctggaaaagtaatatccctacccctctgtcttctgatataccaacctaagctttgtatagaagcttccctctgaatcttctgaagcatattcagtggcatttttaccacccacaggattggcaaatctcttgtggtcaaggtctttagtgaatagaaccagaacccatggcctccagacctcatgtacctcaaagctggtgtaactgatgggctggctggttttaacactttatttatgcaagagcatcactccaagccaaccccttaacttaaacaacatatatcccaccaattaaaaactgattctaatattcattatactgataaagcacatctaaagtatgatacaaataaggatcaatgtatgcrtacacataccacactacacattatacacatgttgaagcaattcgaataaccacgaatacagatagtactggttaaagcagtttcaaatgtgtgtatctctttttgttaacttgtttccgttttccagctgcccgctcccctatcgtattacctatattaactcagaccaaggtatgccgtgctctgaccatcactatccttggaaaaggcagaatattcttgtccaattcagttctaggtactttaaatttctctgcaaaatcagcggttgtatctttacacaatatctcccttccttcattccttccttccatctccactcactctttcactgattcttcctcccattattacattgctccataaatttctgttgattacttacttcccaaatcctacaaagccttgtgtgatgtggctctgtcagcctgtctaacctcgtctctcattactgttccccttactcactactctccaaccattcagaggctttctgtttctcatgtttctagaacatcctaagcttgttctttgcctcagtgccccctttgcaa

SEQ ID NO: 92607 - DNA, 998 bp, Homo sapiens
tgagcctcagacctgaaatagccaaacacgtaggcatttatcagcaaacacgcaagagtggtcacacaggctatctggaaaagtaatatccctacccctctgtcttctgatataccaacctaagctttgtatagaagcttccctctgaatcttctgaagcatattcagtggcatttttaccacccacaggattggcaaatctcttgtggtcaaggtctttagtgaatagaaccagaacccatggcctccagacctcatgtacctcaaagctggtgtaactgatgggctggctggttttaacactttatttatgcaagagcatcactccaagccaaccccttaacttaaacaacatatatcccaccaattaaaaactgattctaatattcattatactgataaagcacatctaaagtatgatacaaataaggatcaatgtatgcgtacacataccacactacacattatacacatgttgaagcaattcgaataaccacgaatacagatagtactggttaaagcagtttcaaatgtgtgtatctctttttgtkaacttgtttccgttttccagctgcccgctcccctatcgtattacctatattaactcagaccaaggtatgccgtgctctgaccatcactatccttggaaaaggcagaatattcttgtccaattcagttctaggtactttaaatttctctgcaaaatcagcggttgtatctttacacaatatctcccttccttcattccttccttccatctccactcactctttcactgattcttcctcccattattacattgctccataaatttctgttgattacttacttcccaaatcctacaaagccttgtgtgatgtggctctgtcagcctgtctaacctcgtctctcattactgttccccttactcactactctccaaccattcagaggctttctgtttctcatgtttctagaacatcctaagcttgttctttgcctcagtgccccctttgcaa

SEQ ID NO: 92608 - DNA, 998 bp, Homo sapiens
tgagcctcagacctgaaatagccaaacacgtaggcatttatcagcaaacacgcaagagtggtcacacaggctatctggaaaagtaatatccctacccctctgtcttctgatataccaacctaagctttgtatagaagcttccctctgaatcttctgaagcatattcagtggcatttttaccacccacaggattggcaaatctcttgtggtcaaggtctttagtgaatagaaccagaacccatggcctccagacctcatgtacctcaaagctggtgtaactgatgggctggctggttttaacactttatttatgcaagagcatcactccaagccaaccccttaacttaaacaacatatatcccaccaattaaaaactgattctaatattcattatactgataaagcacatctaaagtatgatacaaataaggatcaatgtatgcgtacacataccacactacacattatacacatgttgaagcaattcgaataaccacgaatacagatagtactggttaaagcagtttcaaatgtgtgtatctctttttgttaacttgtttccgttttccagctgcccgctcccctatcgtattacctatattaactcagaccaaggtatgccgtgctctgaccatyactatccttggaaaaggcagaatattcttgtccaattcagttctaggtactttaaatttctctgcaaaatcagcggttgtatctttacacaatatctcccttccttcattccttccttccatctccactcactctttcactgattcttcctcccattattacattgctccataaatttctgttgattacttacttcccaaatcctacaaagccttgtgtgatgtggctctgtcagcctgtctaacctcgtctctcattactgttccccttactcactactctccaaccattcagaggctttctgtttctcatgtttctagaacatcctaagcttgttctttgcctcagtgccccctttgcaa

SEQ ID NO: 92609 - DNA, 998 bp, Homo sapiens
tgagcctcagacctgaaatagccaaacacgtaggcatttatcagcaaacacgcaagagtggtcacacaggctatctggaaaagtaatatccctacccctctgtcttctgatataccaacctaagctttgtatagaagcttccctctgaatcttctgaagcatattcagtggcatttttaccacccacaggattggcaaatctcttgtggtcaaggtctttagtgaatagaaccagaacccatggcctccagacctcatgtacctcaaagctggtgtaactgatgggctggctggttttaacactttatttatgcaagagcatcactccaagccaaccccttaacttaaacaacatatatcccaccaattaaaaactgattctaatattcattatactgataaagcacatctaaagtatgatacaaataaggatcaatgtatgcgtacacataccacactacacattatacacatgttgaagcaattcgaataaccacgaatacagatagtactggttaaagcagtttcaaatgtgtgtatctctttttgttaacttgtttccgttttccagctgcccgctcccctatcgtattacctatattaactcagaccaaggtatgccgtgctctgaccatcactatccttggaaaaggcagaatattcttgtccaattcagttctaggtactttaaatttctctgcaaaatcagcggttgtatctttacacaatatctcccttccttcattccttccttccatctccactcactctttcactgattcttcctcccattattacattgctccataaatttctgttgattacttacttcccaaatcctacaaagccttgtgtgatgtggctctgtcagcctgtctaacctcrtctctcattactgttccccttactcactactctccaaccattcagaggctttctgtttctcatgtttctagaacatcctaagcttgttctttgcctcagtgccccctttgcaa

SEQ ID NO: 92610 - DNA, 998 bp, Homo sapiens
tgagcctcagacctgaaatagccaaacacgtaggcatttatcagcaaacacgcaagagtggtcacacaggctatctggaaaagtaatatccctacccctctgtcttctgatataccaacctaagctttgtatagaagcttccctctgaatcttctgaagcatattcagtggcatttttaccacccacaggattggcaaatctcttgtggtcaaggtctttagtgaatagaaccagaacccatggcctccagacctcatgtacctcaaagctggtgtaactgatgggctggctggttttaacactttatttatgcaagagcatcactccaagccaaccccttaacttaaacaacatatatcccaccaattaaaaactgattctaatattcattatactgataaagcacatctaaagtatgatacaaataaggatcaatgtatgcgtacacataccacactacacattatacacatgttgaagcaattcgaataaccacgaatacagatagtactggttaaagcagtttcaaatgtgtgtatctctttttgttaacttgtttccgttttccagctgcccgctcccctatcgtattacctatattaactcagaccaaggtatgccgtgctctgaccatcactatccttggaaaaggcagaatattcttgtccaattcagttctaggtactttaaatttctctgcaaaatcagcggttgtatctttacacaatatctcccttccttcattccttccttccatctccactcactctttcactgattcttcctcccattattacattgctccataaatttctgttgattacttacttcccaaatcctacaaagccttgtgtgatgtggctctgtcagcctgtctaacctcgtctctcattactgttccccttactcactactctccaaccattcagaggctttctgtttctcaygtttctagaacatcctaagcttgttctttgcctcagtgccccctttgcaa

SEQ ID NO: 92611 - DNA, 1219 bp, Homo sapiens
aggattaaaactcggaattcagctacagctctaccttactcacaagttcattctctttctaatagatcacatrtagatttgctaatatctagtaattcaaaccaaattagcaacagcttccttggttccttcccatccttcaccctttacactcagtcaccaaatgccctctactctttctcctaaaaatatccccagatgtatttgttccattctaaactcatcgcatcatgtgtctagccactgtcttctttcctgcagacaaatataacagccttttaactcatttctttgcatccacttttgcctcatttcagttcattcactcttatgctattgcttcatctagtttttgttacatgacaaccagagtaatctggtaaaaattcatacatgatcacaggactcccttgcttctatgtcttccaattatttttggattaaagctggaaatctttaacatgacctataagacttccatgaactgcacctcaggttgctttattcatttcatgccacttttcatgctgttctcatgtggtgtttttccttcacttccccttttattgcagagcctgtgctattgtctcatgctggaagtaagcctcttcaccatctcacttctcttagctatgctttttctcttggcttttagttctcagctacttcctcagggactctgactttgacctactggtctcagttaaatccccttgctatgtgcttctgcaacactttgcacttctgtatttattttatcacattggtttttgctcatataaaactctgagaggagggttatggctgacttgattcccgttggattttcagagtccagggtggtttcttgtgagagatcaagtctcagttgatacatggtgatggctgtgatgagcattaaaactcaaaatagataaattaacaaggaaatttctcaagtgggcattctacctctcaaaattgtttgagtgcaatattaatgttggtgaaattacatttgggggatgtggtagaatcttcagacttggatgagtatatggctcgtggtagaccagatgactaccatgcctctctaacgtggaggtcccctgagaatctggtgagttaccagcaatccatgcctaaggaaatccactcttgtcccattattgtaaggacatgtgtatcagtataagttaatgctgaggaggagaaattatcaggggcacatatgattttt

SEQ ID NO: 92612 - DNA, 1219 bp, Homo sapiens
aggattaaaactcggaattcagctacagctctaccttactcacaagttcattctctttctaatagatcacatatagatttgctaatatctagtaattcaaaccaaattakcaacagcttccttggttccttcccatccttcaccctttacactcagtcaccaaatgccctctactctttctcctaaaaatatccccagatgtatttgttccattctaaactcatcgcatcatgtgtctagccactgtcttctttcctgcagacaaatataacagccttttaactcatttctttgcatccacttttgcctcatttcagttcattcactcttatgctattgcttcatctagtttttgttacatgacaaccagagtaatctggtaaaaattcatacatgatcacaggactcccttgcttctatgtcttccaattatttttggattaaagctggaaatctttaacatgacctataagacttccatgaactgcacctcaggttgctttattcatttcatgccacttttcatgctgttctcatgtggtgtttttccttcacttccccttttattgcagagcctgtgctattgtctcatgctggaagtaagcctcttcaccatctcacttctcttagctatgctttttctcttggcttttagttctcagctacttcctcagggactctgactttgacctactggtctcagttaaatccccttgctatgtgcttctgcaacactttgcacttctgtatttattttatcacattggtttttgctcatataaaactctgagaggagggttatggctgacttgattcccgttggattttcagagtccagggtggtttcttgtgagagatcaagtctcagttgatacatggtgatggctgtgatgagcattaaaactcaaaatagataaattaacaaggaaatttctcaagtgggcattctacctctcaaaattgtttgagtgcaatattaatgttggtgaaattacatttgggggatgtggtagaatcttcagacttggatgagtatatggctcgtggtagaccagatgactaccatgcctctctaacgtggaggtcccctgagaatctggtgagttaccagcaatccatgcctaaggaaatccactcttgtcccattattgtaaggacatgtgtatcagtataagttaatgctgaggaggagaaattatcaggggcacatatgattttt

SEQ ID NO: 92613 - DNA, 1219 bp, Homo sapiens
aggattaaaactcggaattcagctacagctctaccttactcacaagttcattctctttctaatagatcacatatagatttgctaatatctagtaattcaaaccaaattagcaacagcttccttggttccttcccatccttcaccctttacactcagtcaccaaatgccctctactctttctcctaaaaatatccccagatgtatttgttccattctaaactcatcgcatcatgtgtctagccactgtcttctttcctgcagacaaatataacagccttttaactcatttctttgcatccacttttgcctcatttcagttcattcactcttatgctattgcttcatctagtttttgttacatgacaaccagagtaatctggtaaaaattcatacatgatcacaggactcccttgcttctatgtcttccaattatttttggattaaagctggaaatctttaacatgacctataagacttccatgaactgcacctcaggttgctttattcatttcatgccacttttcatgctgttctcatgtggtgtttttccttcacttccccttttattgcagagcctgtgctattgtctcrtgctggaagtaagcctcttcaccatctcacttctcttagctatgctttttctcttggcttttagttctcagctacttcctcagggactctgactttgacctactggtctcagttaaatccccttgctatgtgcttctgcaacactttgcacttctgtatttattttatcacattggtttttgctcatataaaactctgagaggagggttatggctgacttgattcccgttggattttcagagtccagggtggtttcttgtgagagatcaagtctcagttgatacatggtgatggctgtgatgagcattaaaactcaaaatagataaattaacaaggaaatttctcaagtgggcattctacctctcaaaattgtttgagtgcaatattaatgttggtgaaattacatttgggggatgtggtagaatcttcagacttggatgagtatatggctcgtggtagaccagatgactaccatgcctctctaacgtggaggtcccctgagaatctggtgagttaccagcaatccatgcctaaggaaatccactcttgtcccattattgtaaggacatgtgtatcagtataagttaatgctgaggaggagaaattatcaggggcacatatgattttt

SEQ ID NO: 92614 - DNA, 1359 bp, Homo sapiens
tgatactggtgatgttttcaaaaatccatgtgaatgaccaaaccagtttgtgttggtcaactaagtcagtgtccaaaaaaaagcaaacaagtgaacaacagggcttggtatgattatttaagatcttctagccctggggatatctttatccacacccacattttgatggacaataagaactgctgtcatgtttgttcacatttacatttctgcagtstcagaccagtccttggagaagcttgaagggtcaaactgtcatattctcccaaagaatctactggagaagttataataataatgcttaatatctcacaattcaacttgcctttaaagcccggcatcactttaaagtaaaagaaaagagagattgtatccagacaagccataattaaagaaagggtttagcctagaaagagctttgatttctgatgatgaatagaagtgtatgactagaaataaagcaacaaagactggatttaccaagatttccagtcatttcctactaaaatcttgaggaaatttaccatcttatgcttgcatttcagcccctgaaatggaagcgtcatgggaatgctttctgcagtggggatgtttgaacaatgagtttattaattgatgcatgtagacaagagactgttgggtggtgctaggaagaagaaaccagcaccctcagagaagagataggggtagtgccctgccccgtgcagagtggactttactgaatagaacttcataccctaagaactggattgcccctcatcactctgtggccttggtatacatatgaattgcattatttttaaaggaatatgatccttgaaaacagttttaaaagacaaatgatgcactactaatagacttatgtaggaatcccctgtcccatcctcctatcttcagtgtggttaccctgaagcaagaaccttcaacttctctaccctgaatcaactgcagtgccattctccccaatggcatttacctccatgtttctaagtatgtgtttgtgctgcttgtagttgatttatggtagagaagactttagctctctcatattaccattccatttcctctatacccctgcttcctaatttggtgatattaccagttttctatttgcttggttgtctatgtacatatggtttgttttccccttaatccagtgcttctacttgtcaaatttatcatgtcagatctggtaggtccattttctgttctcttgaagatctgccttctaaagcctcacattgttatatagcagtcgagagtagttgttctgcaacatagaacttgcctttgaaattccccttaacttcattatttgttcttattttcatttttcttctgagatttatctgaattcct

SEQ ID NO: 92615 - DNA, 558 bp, Homo sapiens
cccccccccaactcctggaatcaagctatcctccctcctgagcttcccaaagtgttgggattacaggcgtgagccactgcacctggccgtcatttgcttaattctaaaatctcacttgcctctaaagttcctcattatagactaaattccccaatgtcctcacaaatggagttattttactgggttctcctatccctatcaagaatgttaatgataatatttgtagatcttaggcctgtattttattttacataggaracagtgggagggggaatgtattattttcctccattctagggaggcaggttttgtctttgaagcctgatttgccctctcattattagaatatagttcacaggcaggagtgcatatcagaaaactgtaacaaggaaaaaagtaaacgggcacatatttacttagaatgactgttcttgcattgttctagctgcttgaatttttgagttgcaatgaaacttggtattttctgagggtggagtgaaaatacattcatttcccttgcacatttttaaggagtgattcaggttctgatattggaaa

SEQ ID NO: 92616 - DNA, 842 bp, Homo sapiens
taaactatggccaactttgactcatccttttcatttgctctcatatcctgccaatattgctaagkgcgttatttaatgttctggtgactttagttctattgctagtgacttagcttagccttcatttcccttgacaaggaatattaataatagtaaagttcttatcacacctcatgcttcattcaggctgtcttcccttctgtctatcctgtataccaccacttggtgaatcaccgtaagtgacattttgtcaagtatctgtgcttttcaaattcacttcaaagatcattctaaccatttatactggccacttattctgtacccctgctttgattcacttcatgaacacacattgagggtatatactataggtatcaaatctaaattttggcttctaatctacttggccattaagacattctagaatctgattcctctttaatggcatgctgacccgcttcctctttctcaccttgtatgctcccatctctctagttagatcttaacatcactgtcacttaatacagtctacaccaaacacatttttcatgatttcacgtgttttcttatgtttacaaatatgctgaatattctgaatactagcaccatctcacatatttttctggaaactaaaaacaaaaatatttagcacaaaaaataggtatttagcacagttctgagtaaacagtacagatcgatctttcctggagctctgctttgtatggttttgaattactgtctagtgtccttttatgtcaacccgaaggaaggactcctttagaatttgttgcagggtagatggtttagtccattcaggctgctgtaacaagataccctagact

SEQ ID NO: 92617 - DNA, 682 bp, Homo sapiens
ttggccaagtttactcagtaggaaactggtagcgcctaggctcaaactggggctattttcacagcttgctcttaagtactgggccctgctttatctctattatatgggctagtcctgaggagctgtgtctctctaaggtacttacattttttgtttatgaaacaatggctagtctttggaagttttagaaaagagaaaatagcgagatcttatcagtgtaaatatatctttaatgttcattagcattcctttttttggtttatatgtttttaattaatcaagcagtagttattgtttataagtgatacatattgcaaatatcacgttaactcactctcttcatcttccttaataggttttctcaaactttccctaatctgcttatcacttcttcctttcccttttctcacatagcttgctacttctaatctcctgagatggagaaatattcagataaatattacrtgttaaatcatatttgctaaggttctcagtgagtgatgaggaatgtaaatataagatttcacactagagtagcctcttttctttttatctctgaagtctgcatgatgatcttgagatctccaagacagtagaaaataaggcatttctctcacctaaacctgccaagagagcatttgtattaacctgtaatagttaaagagggtctcctatccatgca

SEQ ID NO: 92618 - DNA, 1351 bp, Homo sapiens
tgcattcttgacttgagagagggagtgccataaactcctaactctccaaactataccagttactccctttaaggaaagtttccacaataaccaatctcctttaattcctcttctttttttatactgactggcggtgagtaatgggcaaaggatcttagaaatgrttttggctactctttgcaaatcctgtggtttttcccattaggggagagggcgatcctgccccactgtccccagcctccaagcctccactgaatctctgaggcaccagggaagctcaatttaatactgcattacaatgatttcagctgaggttgtatctgttgcaaacaaagaagttcggacatgtgacctcctgtttctcattcattccggaggcctttgggtccatttctatagatacttttttctccctggaaggcccctgtaaatgccaggtttattactgccatgttttgattccctgccattcacttggcatcccccaggaattcccttctgcatatgcagaagtcctgaatattctcttcccctgctccttggcaacaagtgtgtgcatgagtaaacaagtccacacaggaatcaatatgctgccttctcctgatggacgcaggccagtaattttccatgtgaaagttcatgaccaattttcacctttgctaataatcaaaccactttccctacccacacagacaagcgtgcatctgtctctacaaacacatatgcagcataaagaggtgaaccacattaaacaacaatcaaaaagatggtgggaaccctcaaagaaaaacgaaggagaagaaaataggagcattctttgagaaaagacaataaaacacagacactacagtaaacaaatgtagagctcagtgaattgttataaagccaatgcttttgcaacagctactaggtcagtgtattcaacggtacaagctgcccggaagcctctctctgtgtccatatcccaaccacatgctcttctctccctccaaagtaaccactactctcttttatatgaatcactttcttgccttttttattgttgcacttagatttgacatgtttttaaatctacacccactctattccattatttttctcatggatcacctgttgaggaattgggccatttatcctgtagtgtttcctacagactagatcttgctgatcgctgatagcatgcagcattatccagtgccttctctgtgcagctggattcagaggtttgatcagattcgggtccctttcctttggcaagactgcaggtggcattgtgctcgcccctcaggagacacaggatgtctgctttttctcctttcttgaaataaccgtcattggtgatcaaggtcaa

SEQ ID NO: 92619 - DNA, 703 bp, Homo sapiens
tgcgctgtgtgtttgtgacctgctttccttagagccactcaaagtctgtggcctcacaggtccggtctggcattgcagtgtgaaattctccacgtgcccttgccatgcctaaacacagcccctggagaatgttccagccgacattccctgagacagcctctcacccagcccttcatttagcgagaaggggaggtcactcggggtagaaatatagacccaaacacccagatttctggtcgtggctcgttctagagcacacgcttcccctggcatcatgtttctttctgctggtcacaggaatctgctgcccccaggcatggaaaagagcagctaccacatggttcagagccacagggactcgaaggacctgcctggggtaaaatgtggagcggagacacagtgaccccattgtccatagaagcagctttaagaaagaacaactccaatgcgcatgatacagcctcagtatggagctcctgggtttgccttcatttcacctccttagtctgcgaacctcgcctccacctgtttcttkcagtgttttgcacggtgtcttgaacataacaaatgtttaatgcacgttttgttagattaaaatcttctgaagtattttatttgggatggcattttaattttatgcctggcatctctaactgattgcttgataacactgagcaacaacaataaaacatttttacataca

SEQ ID NO: 92620 - DNA, 555 bp, Homo sapiens
aactttttcatggtacaaaggatgaaggtaaattacagtcctgtaggcagtcctgttagagtgactgttctatacatattattgaacattttaaataaagggtattcaattaggaaaagaggaagtcaaattgtccctgtttgcagacgacatgattgtatatctagaaaaccccatcgtctcagcccaaaatctccttaagctgataagcaacttcagcaaagtccaggatacaaaatcaatgtacaaaaatcacaagcattcttatacaccaacaacacacaaacagagagacaaatcatgagtgaactcccattcacaattgcttcaaagagaataaaatacctaggaatycaacttacaagggatgtgaaggacctcttcaaggagaactacaaaccactgctcaaggaaataaaagaggatacaaacaaatggaagaacattccatgctcatgggtaggaagaatcaatatcgtgaaaatggccatactgcccaaggtaatttacagattcaatgccatccccatcaagctaccaatgcctttcttcaca

SEQ ID NO: 92621 - DNA, 554 bp, Homo sapiens
gagagagagagagagagaacagagataattcatagaaaataagaaaatattatattaccaacagtaatatccttagagacattcaaaaaaagtatttcacctgtaaaatgtaatggaaattcctgaggaaaggagamatctgatatcttggaatttacagtgttatagttaagataaaaagaataaataaaagactaggaatatatgaacatttctcaataaataaaagaaatggacaaagactgggaaaaggtaagataataagattaagaaaaccaatccaggagatccaatagccaaccaagagaaatttaagaatgagaaaacagaaaagaaaaaataaaatgtagagatgaaaactatccagaccataataaagtgtatttaatagagcagatgaacaggaatctctagattaaaagaacccgtgaagaaaaatgctaaaagatcctggtagtgtgagcatagaataaagacatttttcagacactctagaaatactcagggaatatatggtccttatttagccaaaggaggaaaaacaaaattaaaaa

SEQ ID NO: 92622 - DNA, 628 bp, Homo sapiens
ttgtggctgggtgtggtggctcatgcctgtaatcccagcactttgggagtctaaggtgggtggattgcttgagcccagaagtttgagaccagcctgggcaacatggtgaaaacccatatctgcaaacaatccaaaaacctagctggcgaggcggaggctgcagtgagctgtgattgcaccactgcactcccacctaggcaacagagtgaggtcctatcaaaaaaaaagaaagaaagaragagagaaaggaaaagaaagaagaaagaaagaaaagaaagaaagaaagagagaaaggaaaagaaagaagaaagaaagaaaagaaagaaagaaagaaagaaagaaagaaagaaagaaagaaagaaagaaagagaaagaaagaaagaagaaagaacggaaggaagaaaggaagaaagaagaaaaaaaggaaaaagaaaaaaatacaatttatatttgtgcatacacatatatatgttttataattttaacttaatttttttattttgaaaatactgagaagcattccatttatgtttttccttgctttctaaataattatttcattccattactggaattattacaagccaaactgatttatttcttaattttatatattttattaatttta

SEQ ID NO: 92623 - DNA, 742 bp, Homo sapiens
atatatttctttctccactctgaaaagaagaatttgtacttacttrtgaaatgtactacttgtatattttaggtgcacaatcaaataaatcagtagattgcagttagtgtatactacgaactacatacactgggcacattaaggagaatatattatctgactggaaagtttaatttgaatatgttaagcatagatttatccttgagaattattttacattagtatgtaaaaccgggaaaggatttgcctgccattggaagctgttggaataaagttattcatgactgaccccaaacagaattagtcagaatgttttctgtagccacgctttctgtcaaagagaagggagttcagtagaaaagaataaacagacgctgaagagcagctgctgaagtccagaatgatggataagagctcacaggagtaaaaatgagttcccaggtaccaggttgcttggattatatcccatatctggagagaactttggcctgagatctgatccaccatctgctttcttagaggagttacaggaagatggaaaacaaacggtacgttttcagtttagaaaaaaaaaaggtgtctacagagcgagttctgagactgtaaatcaggaagatgctaggtgcaactgcaaggtgcaagaacacttgtatgaaatattggtcaatatgagccagtggaagatgctggcatcactgagggacaacatggtttacaaggaacaagtaaagctgcttctttt

SEQ ID NO: 92624 - DNA, 796 bp, Homo sapiens
tctaagcagctcagagatgtcatttgtttcttttcacaaggcacaaagaagatgtcagtgttcagcatctttcatcttgctgatttatctagatcttgagacactcaatctcaaaacaattaaaagcatagtagtctatggctatacacaggctggtgtctttctgctcatgctccttacatattagtaatgtctggtaccatgatattacacaccagtaatgagtcacccctcataatgttacaattttttatgtttaagtagtatatatttgctttagataatgaaacaccccacagaatagaaagatcaagggatgttaggagtcaaataaagctacatagaacaggattggtctctkgatctcaaggtaaagctaattaaattgggttgaggcttgtcatttggaaatgatagtaagttttctttcctggctatgaaaaaaataagagagttagttgggttgccatttccagaagcaaagcaatctttatctgctttttttttttttcttttcccccctttctctgttattttaatcttctctcattatgtagcctggcttcttctgcttcattaactcatgtttcatcatagctacctttaagtgtaacaatcaactcctaagtatatattagtaatcactggtgagacagaaatgagttcataaaacccaaatacaaattttgggggatatggaagacagctaacgaagggtatgctctccttttatatattttaatatatttaataaaaccctaataattaagaatattataatgatgtacaaatatat

SEQ ID NO: 92625 - DNA, 665 bp, Homo sapiens
aaactctgaactagaaaatttctaggttcccttctatgatacagttctgtatatacagcactgtcttaccactcagactgccagtaagaaagaaaaagaggaagagagtgagcgagagagagagagagaaagacaaaagaaggaaggaagggttaagaaaggaaggagaagaaaggaaggagaccaagaaaaaayagataaaataacaacaaaaaaaatggcagaaacagtggagtctgaacatagtattattatacatataccatttttcttaacttttttctcggttatcataatttaagaatttgactacagcactttcaaagcatgtttatcacatttatgtacatctgatacaaagatattgtcccttattatttactcagaaaattccctcttccaaaacatccccagctcagtacatctggatcactcaaggaatcatcaaaggactcgtgtgtcccttcagttttcaagtcggagatgagaaaaaacaacaacaacacttgtgccagttggaattcactgcttcctgatagtttcaacacctgattctgttctggactgcgttcccttccagtcgcactgtatctgcctcactccaacttctcacccctagcctgacctgcaccttgtcaagttcttgtttctcagttacatagtag

SEQ ID NO: 92626 - DNA, 665 bp, Homo sapiens
aaactctgaactagaaaatttctaggttcccttctatgatacagttctgtatatacagcactgtcttaccactcagactgccagtaagaaagaaaaagaggaagagagtgagcgagagagagagagagaaagacaaaagaaggaaggaagggttaagaaaggaaggagaagaaaggaaggagaccaagaaaaaacagataaaataacaacaaaaaaaatggcagaaacagtggagtctgaacatagtattattatacatataccatttttcttaacttttttctcggttatcataatttaagaatttgactacagcactttcaaagcatgtttatcacatttatgtacatctgatacaaagatattgtcccttattatttactcagaaaattccctcttccaaaacatccccagctcagtacatctggatcactcaaggaatcatcaaaggactcgtgtgtcccttcagttytcaagtcggagatgagaaaaaacaacaacaacacttgtgccagttggaattcactgcttcctgatagtttcaacacctgattctgttctggactgcgttcccttccagtcgcactgtatctgcctcactccaacttctcacccctagcctgacctgcaccttgtcaagttcttgtttctcagttacatagtag

SEQ ID NO: 92627 - DNA, 1492 bp, Homo sapiens
agtagtctctgatttaacacaakttaggttaatttaaggttgaatacactgttatttaaaaagatgacgggtgaggtggctcatgcctgtaaacccagcgctttgggagtccgaggcaggtggatcacctgaggtcaggagttcaagaccagcctggccaacattgtgaaaccccatctctactaaaggtacaaaaattagctgggcgtggtggctaaagcctgtagtcccagcaattcaggaggctgaggcaggagaattgcttgaacccaagaggcggaggttgcagtgagctgagatcgtgccactgcatgcgaaactccatctcaaaaaaaagaaatttttttttgtagttccacaaaagaatgatctggcttctatgggcttcacagtttaaacatgttcaagaacttcccattcttctgatgttgaaatttggatgcagtccaactcagaggttaaaacacacacacacacacacacacacacacacgacaagaagtaaatcctctagaatcagaagaaaaattgcagccttgaaaatcacagctttactcatgaggccgcctagaagtgctagaagcttcttcttacttataagaaatgaaaaaaaaaaagggggcaggtgtcgaggaggatgggaggatgggacaagctgctggaaggtgtagtgagcgctgaacaggtcagccccatcctggtgcagaggcctggtctgagacgctccgccgtggaggcatgtcctggaaagtgtatgctggtgaggagcagtggaaaggcttccctactcctaatcttctggactttggaggctgctctaaagtttaccaagacttcacatttgccatcacatttgctcatgacaaggccctgagggaggagttacttctatccccatcagagaggttctacagtttgccaaaagtcacacaataaggggcatgacatgatggtcctcctcttgaatagattccttgcttatggagcaatctccagatgattcactggggagcctgaaagagggacagggtcatttgggtggggactgaggtatttcaattcgcctgtctcactctccactgtgctccggtaccaagacctagatcctcactcagtatttgtgcagggtattgaaactccatgtccctactctaggcaggtacaggtgtgtagggcaggcacagacggaagctgcaaataagctggcacagggaaaagggttaggagagggatgtaaagtgccactgagattctgaggaagatgagaccatgtgggtcagggaaacagaactctcgttggtgaagagagcagccgagagggccttgagggggtttatttccacaggtggggatggaggcatagtgacaccttctgtggctttgcctctgccagccttgccagacttcttcccctccaaccctctgccactcacactcaccacaccaagccagactcccctccccactttgcctttgctgctccctctgcctg

SEQ ID NO: 92628 - DNA, 774 bp, Homo sapiens
tccaagttgcccatggtacctagatcatggagagtcatcgtaaaatgcctgttaaaatagggaattagggcctccaggttgtaattatagtcttggcacacatgaacttattgcaatatagtatttgtttgaaatgtaaaggtaaagtttgtttgaagacagataccttatttttctgtacatctccttgggagtatgttcaggcataggttgtgctaaataagcttcttttataaaaacaataggctgatgcatgggtgattattttcaattgataaaatatcatgaactttccagagatcagtggtaataagttgtttgaattttcgacaccagattaaggtctctgaggtggtttaaaggctatgaggccaggtgcagtggctcacgcctataatctcagcaacttgggaggccgaagcaggcagatcacttgaggtcagaagtttgagaccagcctggccaacatggcraaaccctgcctttactaaaaatacaaaaattaaccaagtgtggtggcacacgcctgtcatgccagctacacaggaggatgaggcaggaaaatcacttgaacctgggaggtggaggttgcagtgagccgagattgtgccattgcactccagcccgggcaacagagcctgggcgacagagtgaggctctgtctcaaaaaattaaactaaattaaagctatgagaagaaaataaattttcctggtatagtgtccttctctagacctcatgtcctacagtctctgtgaaactgggccaaagatag

SEQ ID NO: 92629 - DNA, 668 bp, Homo sapiens
aattctttttaaatgmacttagatctttcttatatcagaatcaagcatatttgtcaattacttaatgtttattattaataactaaaatgatttgttattaataggaatagcttttttaaagtaccttgatctttgtgtttctaagatttgtcctagtccatttatggatctgaaataaataataaatgaggaagacaaagtttaaaagtaaaaattaactttttaaaaaagtatacaaagtatattgtttctaaaacaggaaataagcatacccaaatacatctggaaccagaaaaaaattaaaaacagaaaaacaaaacttgctttaaaaaataattatgattttccttcaaacaataaatcacatatattccactcatacatcaataaaacatatatgcaaaaattcgcacaactgtcagattaagggctactttgtggttaataaaaagacgcttcactttagaaaaaatcattcataaatagtcagttatcctagtgatcttaaaaatgagtagatactcaaaatttttacggtggtcacttttttcctcaggcatacatggtagaaatggctatatacacactaaaaataaaaacctagttgtaagttgctttgcccccagcctgtccttagtattcacagtaattctaagtcacacatccca

SEQ ID NO: 92630 - DNA, 1558 bp, Homo sapiens
cagtatgattggtagggtatcataatctattgtagtttcaccttacgtttttcttatcagtgaggccgattattatcctttcatatggctaagagccctttgcctttttctaagaactgtcttttcaaattcctaacccatttttctacaagtggctcacaaagtgtaatccctagtctagaggcaccacttgggaatttgttagaaatgcaaattctcgagccccaaaccaaacctactgaaccaataactctggggatagcgtccagtaatgtgtgtttttacaagccctgtaggtgacactgatacactaaagcttgagaaacactgggctatagggttgattcaaccaccgtgttttaacataccatagggctgtctaattattttctaattaaaccaaggccaaactgttaataaattgtagctgaaagattcaaatgccatgtgatatccattcattcatttgttgattcaataattaacccatagatgttaaatacctactgtgagtcagtcactgtggcaggcaatgaggatgctgtgttaaaacagacacagtcaccacccccagaagcttaccttcccctgaggaagaacaaaactaaatgagccaatttaagtcktaacaaagggaactgcaaggtgctgctagagcaagaggttccagctagtctagtggtcagggagatgcaaagtaaaagaactttgggataatacttcactcccatcaagcagaccaaaattctagaaagggataacacctattcctagcagggatatgggtggagcctctctgaaaggcaatctatccatatctattaatgcatcaaacaaagcaacaccactccagggaactaatcccatagaaacaatggcacccactcaaggctgtttattgcagcattgtttgttgtggcaaatactggttgcaaaatgaatacccactagtgaaggaatgattgaataaatcatggcatatccacagcatgcagccactgaaaagaatgagccctaccattgccaagggtatttctatgacctacattgagtaaggaaagcaacatgtagaaaaattgatataatgcagtctcatttaaaaatacctataaaacccgtatgtttacatatatatatacattgatatgatgatacattgatacaagcatagaaaaaatatggaggaataaacactggtatggatgagccatctatggtgaattagggctcaacattcattctaccatcctgataaatttgccttctataatgtagaaaaagaaaagctaggaacaagatacacaaacatccctgcaggcaaatagatgcacttgtgggagggatgggaggagaagcatagcaggggccacactgatgctgcctcggcactttctgctgacaagcacctgtgctagttacacctttgaatcagctgaattctgcatgtccagtcactagctttgtgggtatgcacaggtggggcacagggatcagttttgctggactgaatctggcaggcccagtgtggctctagagccaaccctaccatgggagtagt

SEQ ID NO: 92631 - DNA, 1625 bp, Homo sapiens
attatcccttagtcttatccatttaataattaggcttctaatggaggcctaatttttctaggcctctatttgaatacagaaacctccctattctcccttaaattcctagctacaatttctaccttcatgcatgcagtacatgtgtgttgaaatggaacaaaccttaaatagttataatccaccttcccagtattcatattggttctcctattaactttagtgcctcaatatcagatattcctcttaatatttaaaaaattactattggcagctgaaaactgatttcctttcctctagtccttgcatctaactctcctgagttcgcttgtgcgcgcgctctctctctctctttagtttataactcatccaggtttcctcttttatttgatatattctgatcgagataatgtttcctttcttcattctatccaatccctataaatcctaccttgaactgttcccattcaattcatcttacaaatggcatcagaatctgtcttttctgattacatcattcatgttttctgttcacctccttccagttacactggagtgattatcatcacttgcgttgtggccacctttgcttttccctcttcttgctttgctccgtctgcgtctgcaatcctcgtgttccctgtgtgggagctgatctgtggggccagggcagggtcagccccgtggcatgtgctttcacaggcaagtggagggaaaacttcagatacttaggggataaagtctgttgctgtatatatttctttatcctttctgtttcttatcttttcttacttatattgagatttacttgcaggaatttgcagcctattgtatgtgagattaagagcctataaaaatgttttaggttttttttttttttgatgtgctgatttctttttattaaaaaaagtatatagcattctcttaaatcttgttttcccattgagatgtgctcagtgaggatcctgaattagctattatcatttkttatttctttttctttttttttttgagatgacagcctcgtcctcagagtgagccgttattcttgtttatgttcagggactcaggggactaatggagaccaagcagttagtgactttctggtgagtaaaaagagtttcctcattttttaaaatctataattgacacattgagccatcactcttgattgggcagctttagggcccgcaagtcatgttttcatggctcctttgcaattggtctttgttttaagcatttgtaataaacaagttgtaagtcacttttatgatgtccggttcaggaataaaatacacaatggtgcttctgccagctgttgtcgaagccactgatagcattgtggaaggcccttgtccacgggagaaactgagcttttacactctccttctcttttctgagacactctctatggattgctaggcagcacccacccctgtaggcttttgagatgcttcttgctacactatggcgaaacagtctaggaccatctgggtttgtagtgattggcattgggtgaatataatcagtgccagtatttcaaattaaacttaagggcttctcttctgagaccagactgaggctggcatttctttccctcctgctgccttcttccttcccggcaaaag

SEQ ID NO: 92632 - DNA, 1625 bp, Homo sapiens
attatcccttagtcttatccatttaataattaggcttctaatggaggcctaatttttctaggcctctatttgaatacagaaacctccctattctcccttaaattcctagctacaatttctaccttcatgcatgcagtacatgtgtgttgaaatggaacaaaccttaaatagttataatccaccttcccagtattcatattggttctcctattaactttagtgcctcaatatcagatattcctcttaatatttaaaaaattactattggcagctgaaaactgatttcctttcctctagtccttgcatctaactctcctgagttcgcttgtgcgcgcgctctctctctctctttagtttataactcatccaggtttcctcttttatttgatatattctgatcgagataatgtttcctttcttcattctatccaatccctataaatcctaccttgaactgttcccattcaattcatcttacaaatggcatcagaatctgtcttttctgattacatcattcatgttttctgttcacctccttccagttacactggagtgattatcatcacttgcgttgtggccacctttgcttttccctcttcttgctttgctccgtctgcgtctgcaatcctcgtgttccctgtgtgggagctgatctgtggggccagggcagggtcagccccgtggcatgtgctttcacaggcaagtggagggaaaacttcagatacttaggggataaagtctgttgctgtatatatttctttatcctttctgtttcttatcttttcttacttatattgagatttacttgcaggaatttgcagcctattgtatgtgagattaagagcctataaaaatgttttaggttttttttttttttgatgtgctgatttctttttattaaaaaaagtatatagcattctcttaaatcttgttttcccattgagatgtgctcagtgaggatcctgaattagctattatcatttgttwtttctttttctttttttttttgagatgacagcctcgtcctcagagtgagccgttattcttgtttatgttcagggactcaggggactaatggagaccaagcagttagtgactttctggtgagtaaaaagagtttcctcattttttaaaatctataattgacacattgagccatcactcttgattgggcagctttagggcccgcaagtcatgttttcatggctcctttgcaattggtctttgttttaagcatttgtaataaacaagttgtaagtcacttttatgatgtccggttcaggaataaaatacacaatggtgcttctgccagctgttgtcgaagccactgatagcattgtggaaggcccttgtccacgggagaaactgagcttttacactctccttctcttttctgagacactctctatggattgctaggcagcacccacccctgtaggcttttgagatgcttcttgctacactatggcgaaacagtctaggaccatctgggtttgtagtgattggcattgggtgaatataatcagtgccagtatttcaaattaaacttaagggcttctcttctgagaccagactgaggctggcatttctttccctcctgctgccttcttccttcccggcaaaag

SEQ ID NO: 92633 - DNA, 1625 bp, Homo sapiens
attatcccttagtcttatccatttaataattaggcttctaatggaggcctaatttttctaggcctctatttgaatacagaaacctccctattctcccttaaattcctagctacaatttctaccttcatgcatgcagtacatgtgtgttgaaatggaacaaaccttaaatagttataatccaccttcccagtattcatattggttctcctattaactttagtgcctcaatatcagatattcctcttaatatttaaaaaattactattggcagctgaaaactgatttcctttcctctagtccttgcatctaactctcctgagttcgcttgtgcgcgcgctctctctctctctttagtttataactcatccaggtttcctcttttatttgatatattctgatcgagataatgtttcctttcttcattctatccaatccctataaatcctaccttgaactgttcccattcaattcatcttacaaatggcatcagaatctgtcttttctgattacatcattcatgttttctgttcacctccttccagttacactggagtgattatcatcacttgcgttgtggccacctttgcttttccctcttcttgctttgctccgtctgcgtctgcaatcctcgtgttccctgtgtgggagctgatctgtggggccagggcagggtcagccccgtggcatgtgctttcacaggcaagtggagggaaaacttcagatacttaggggataaagtctgttgctgtatatatttctttatcctttctgtttcttatcttttcttacttatattgagatttacttgcaggaatttgcagcctattgtatgtgagattaagagcctataaaaatgttttaggttttttttttttttgatgtgctgatttctttttattaaaaaaagtatatagcattctcttaaatcttgttttcccattgagatgtgctcagtgaggatcctgaattagctattatcatttgttatttctttttctttttttttttgagatgacagcctcgtcctcagagtgagccgttattcttgtttatgttcagggactcaggggactaatgsagaccaagcagttagtgactttctggtgagtaaaaagagtttcctcattttttaaaatctataattgacacattgagccatcactcttgattgggcagctttagggcccgcaagtcatgttttcatggctcctttgcaattggtctttgttttaagcatttgtaataaacaagttgtaagtcacttttatgatgtccggttcaggaataaaatacacaatggtgcttctgccagctgttgtcgaagccactgatagcattgtggaaggcccttgtccacgggagaaactgagcttttacactctccttctcttttctgagacactctctatggattgctaggcagcacccacccctgtaggcttttgagatgcttcttgctacactatggcgaaacagtctaggaccatctgggtttgtagtgattggcattgggtgaatataatcagtgccagtatttcaaattaaacttaagggcttctcttctgagaccagactgaggctggcatttctttccctcctgctgccttcttccttcccggcaaaag

SEQ ID NO: 92634 - DNA, 757 bp, Homo sapiens
atgtgtataacctgattttcttcaatatgtactttttaaattttaagttccagggtacatgctcacgatgtgcaggtttgttacataggtaaacgggtgccatggtggtttcctgcacctattaacccatcacctaggtcttcaatattttttaaaaactcatttccagtgtgtgtttaatagtaatttaacaagaaaaataagatctcagatgctttatcaagctcagcttcttctatggaacagaaaaacttaccaatattggggttgaatccttgtgaagagctatacataccaaactctatcctaaccccatatgcttattacaaattataattccaaattttatcaccaaatcaaactcagagtaatagaaaagaaatatttaacacaaactaataattaaaacacaaatttcacctattgttcaggatatctttttgagaaaggtttttgttaaagaaaatttcagatacaaacataaagaaaattaaacaatcaatccccatattcccagctctcaataatgagccactcatagcaatctttcaacttacttttaatccatattttgaatccacaatagttatgatacctacaaaggaaaaaacattttaatcactttttaaaaagaatgcttattaatacttgtgcaaccatacttcagaatgaaaattaaaactaacctatttcagttcacaaatactactcaataaaacaatgtactrtttttttctcttgccagtgctgccattta

SEQ ID NO: 92635 - DNA, 1074 bp, Homo sapiens
gtgtacataggttttaatattttaaaatataacacatggacacaggaaggagaacatcacacacaccggggactgttgtggggtggggggaggggggagggattagcattaggagatatacctaatgctaaatgacgagttaatgggtgcagcacaccaacatggcacatgtatacatatgtaacaaacctgcacgttgtgcacatgtaccctaaaacttaaagtataataataatacaattaaaaaaaaaaaagaagaaatatgatcaaagtagggccgggtgcagtggttcacgcctataatcccagtactttgggaggccaaggtgggcagatcacgaggtcaggagattgagaccatcctggctaacacggtgaaaccccgtctctactggggacggagccactgcactccagcctggggcaacagagccagactccaactcaaaaataaaagaaagaaagaaagaaagaaagaaagaaatatgttcaaagtatcctaatagaattcgtagttactttttaaatttttctccttgaaaaaaaatrcaaccaattatcctcaagaatataatatgccatagatattgcacatcctacaagcaaagaaaagggcattagaaatgtcctttaaatatcatctagaatattcactgagatttacctgtgaagtaataactaggctgtaagtcaaaacactaatgcagccttctgaactttatttttcttcttaggttaaccaatacatggcacaagaagagacaaaaatttagtagtttttaaatattagcttgacaggtgttggctattccagtaaaaattagtcattactataattgcatttgttagtttatattttgtgagactgtgtaacataatatttgaaaacatgaggttttcagactgggatggagactgtacttaagccttggcactggctcttaacagttatttggcttcaccaccctgttcctcatgtctttactggcaaataactcattgtcatactactaatcttatatggttctcatgcaactaatataattatgaaaataaagcacatctcatctcaag

SEQ ID NO: 92636 - DNA, 1074 bp, Homo sapiens
gtgtacataggttttaatattttaaaatataacacatggacacaggaaggagaacatcacacacaccggggactgttgtggggtggggggaggggggagggattagcattaggagatatacctaatgctaaatgacgagttaatgggtgcagcacaccaacatggcacatgtatacatatgtaacaaacctgcacgttgtgcacatgtaccctaaaacttaaagtataataataatacaattaaaaaaaaaaaagaagaaatatgatcaaagtagggccgggtgcagtggttcacgcctataatcccagtactttgggaggccaaggtgggcagatcacgaggtcaggagattgagaccatcctggctaacacggtgaaaccccgtctctactggggacggagccactgcactccagcctggggcaacagagccagactccaactcaaaaataaaagaaagaaagaaagaaagaaagaaagaaatatgttcaaagtatcctaatagaattcgtagttactttttaaatttttctccttgaaaaaaaatacaaccaattatcctcaagaatataatatgccatagatattgcacatcctacaagcaaagaaaagggcattagaaatgtcctttaaatatcatctagaatattcactgagatttacctgtgaagtaataactaggctgtaagtcaaaacactaatgcagccttctgaactttatttttcttcttaggttaaccaatacatggcacragaagagacaaaaatttagtagtttttaaatattagcttgacaggtgttggctattccagtaaaaattagtcattactataattgcatttgttagtttatattttgtgagactgtgtaacataatatttgaaaacatgaggttttcagactgggatggagactgtacttaagccttggcactggctcttaacagttatttggcttcaccaccctgttcctcatgtctttactggcaaataactcattgtcatactactaatcttatatggttctcatgcaactaatataattatgaaaataaagcacatctcatctcaag

SEQ ID NO: 92637 - DNA, 1074 bp, Homo sapiens
gtgtacataggttttaatattttaaaatataacacatggacacaggaaggagaacatcacacacaccggggactgttgtggggtggggggaggggggagggattagcattaggagatatacctaatgctaaatgacgagttaatgggtgcagcacaccaacatggcacatgtatacatatgtaacaaacctgcacgttgtgcacatgtaccctaaaacttaaagtataataataatacaattaaaaaaaaaaaagaagaaatatgatcaaagtagggccgggtgcagtggttcacgcctataatcccagtactttgggaggccaaggtgggcagatcacgaggtcaggagattgagaccatcctggctaacacggtgaaaccccgtctctactggggacggagccactgcactccagcctggggcaacagagccagactccaactcaaaaataaaagaaagaaagaaagaaagaaagaaagaaatatgttcaaagtatcctaatagaattcgtagttactttttaaatttttctccttgaaaaaaaatacaaccaattatcctcaagaatataatatgccatagatattgcacatcctacaagcaaagaaaagggcattagaaatgtcctttaaatatcatctagaatattcactgagatttacctgtgaagtaataactaggctgtaagtcaaaacactaatgcagccttctgaactttatttttcttcttaggttaaccaatacatggcacaagaagagacaaaaatttagtagtttttaaatattagcttgacaggtgttggctattccagtaaaaattagtcattactataattgcatttgttagtttatattttgtgagactgtgtaacataatatttgaaaacatgaggttttcagactgggatggagactgtactyaagccttggcactggctcttaacagttatttggcttcaccaccctgttcctcatgtctttactggcaaataactcattgtcatactactaatcttatatggttctcatgcaactaatataattatgaaaataaagcacatctcatctcaag

SEQ ID NO: 92638 - DNA, 626 bp, Homo sapiens
tttaacttctcagggataactgtcaagtagtacaaatgccagttatatgttaaatgtatgtttagttttataagaaactgccaagaatattttccacagtggctctactatttcatatctcaccagcaacgtatgagtggtccacttatccaatttctcttgcatcctagcaaaacaactctaaaatttatcatttggaactgycttttctttctgcaatggtattacgtgtccttttagaattgaaatcaagggtagaaaggttagatttagtccagcctcccatttcatattagctgtagtaacaatcccctttacaacatttgatcattattgccacttaacacttccaggattagggagtagtatctttctttctgagggagtttatatcagtttgggtaacagattctcattgttcattttactgctttcctatttcttcctcatcttccataaaaggcacaataataaatctaagcttgttaaaacagaaacaaaaacaacacaagtactaaaacgagggtttttgtttgtaaaactgtcaattaggattttaattcatggtcagtgaagaccttcaggattttccctgccctgcattttcttgcctttttctttcagat

SEQ ID NO: 92639 - DNA, 623 bp, Homo sapiens
gcatctgggaggcaggtattctcattttcagtcctcagactttggcactgtgcccccaaatagtgcctgggaatttccatatttttccaaactcccctgaacttctagcatgaggcatccgtcatgcctctgtgaccaagggtmacatttggcaacaactgcagctgcccaagtctcatcggtttgaagcggaggaaggcactgttttcttagctttgggctctgctgggaaatggagtaaaccttaatacagagataaaacattcctgcaggataaatcaagttgtccctttataaaaacatggactaggggtgtgggtgtgagtggtaagcatattaaactctcccctacagagtgggcaatcttcctttgaagttactctttaaataaaagtatcgttgattgtagctggataaggttcgctgtccttctggctacagaggtgacatgagttcaagagcaaagtggtacactctccagacccctcatccccgaagctttcttgcgtgcactaaaggttaagctagcaaactgtggttgcaagggcatggggaaatgttactttcattatgtcgggtttttttaggtataaaagcaagacatgtaagtggtaaatgttttt

SEQ ID NO: 92640 - DNA, 645 bp, Homo sapiens
tcatggaaatttaatcatggaaaggtacctttgatcaactgactgaagaaaaaaaattaaaccagatttatagacggctgtggaggatctcttagcattgactagggtaaatttttctggttgtctactttgaccgaaagagtagaagatctgaatcatttaatctattcatagatagaggccaatgatttggctacattgtcatggactacaaaagaaaaatattagacaatcaatggccaggaagtttgagaaataactacaagggttgacctctaaatggacccagaatttgaagatacktttgtctcacgtagctgcttagtgaagccccttctgtagaggtagttttcaataatcaagatggaaaccactcattcaatgattttgtaataaagtaaccatgataacagggatgaagattatgtgtgggttttgataacatggacttgtactcacaaaagatgacctggcttctaacaatgtgtacgcaacaaatttatcagcatagatgaccaacactgaaccccattcacccagaagtagctggcataatggaacagtagaataaccccctgatgagccagttatatccccttgtaggaaacaatgcccttcgaggctggggagctgttttctggagca

SEQ ID NO: 92641 - DNA, 675 bp, Homo sapiens
cagaagacctgcacccagctggcagacctggaggcagtgctggagtcctcggaagaggagattctgcatgcagctgccattctcgcgtctctggtatcccaggggacccccctacccgaacacaccaaacctgggcattggtccctgccccagccctcccattgacctggtgaccttgggtatgactccccactttgggaggcttaatttcatctgcaaagtggggatcacacagtgcctcctccyggattcagcgagaggatgtttgcaaagggcgaggcatgttccgaggagactgaatgcgcagtaagtggtgggctgcatccttattggtgtttctgcatcctaggactccgctcactgaatgccgatgttgtggccagctttgtgcatttataaaacgacgggtgccatccagttctgcctcacaattggaccagatgtggcccttaccctttggcgatgggccatcagtttcctcctcttcctcttctttctacaggagattcctcaggaaggtcccagtcagccgaccaaatggagccacctggccacagaggcccgtgccctcgccaggaggtgagtcccaagacatggtgagcttacacctggcccttctcctgggggttccagggtcagagtcagccccacaggtgcccccacccagaagttggg

SEQ ID NO: 92642 - DNA, 680 bp, Homo sapiens
ctgcggtagggcgaagaccgtctctgggtgctccagttctgccctctttccagcagaagggcttttcaaacaggcttcccatctgagaaaggaaaatatcttgggcccccaaaatcacgaaactaaaaggaaaattcaagctggaaactgctcagagcaaacctgtctcccattctattcaaagtcacctmtctgctcactgagatagatgcatatcggatcgcctcctttggagaggctaatcagaaactcgaaagaatgcagccatttgtctctcacttatctgtgacctggaagccccctccttgcttgtccccgcctttctggacagaaccaatgtacttcttacatatattgattggtgtcacatgtctccctaaaatgtataaaaccaagctgtgcccctaccaccttgggcacatgtagtcaggacttcctgagactttgtcacatgtgtgtgtcctcaaccttggcaaaataagctctctaaattaactgaaatctgtcccagattttctgggtttacaggtctgaccctcaccctgctctccttctgaccctgaccctggaccctccttccgcctctggaggtcactccttccacggtgcagcttcgctctgccaggattctccgttctgcttcccttgctcaatacaaactgccctcagagctgaaggtt

SEQ ID NO: 92643 - DNA, 753 bp, Homo sapiens
agaatctccgcttaatgcattcatggcaatgaatttggcctgactggacaccctcaggggccattcctagaactacaaagagaagggaattctgggaaatgtagttccagctgactrtcatgccaccgtccaaagcattgccgacacactgccttcctctacctggctgtctttttcagcttccagatgaaattacatcttgttttccctttcagtggaatgggtctctttttagagctacgaagctaagtgcaatgacatgctttccccagattaaaaccaaaggtcactgccacttcctttgaggcctcagagtcactgccatcttgtattgggagtccctctgtggtgtggcatggtggctcacacctgtaatcccagtgctttgggaggccaagatgggaggattgcttgaggccaagagtttgagaccagtctggtaaaataataataataataataaaataacagagtcctgctatctctgtattgataatagctccccacctacaagttgctctcagcaattgacacacaccctgccacttaattctgacaactttatgatgaagtaattattatccccattttgtagatgtggaaactgaagccaagagagcaaacttgtgcaattgacaagggatagaactgcaattcaaaatcagttccctgcctctattgccagggcaggttgtagggaactttctgccccctccccctttttttccagcttgagttaaaatccattccagg

SEQ ID NO: 92644 - DNA, 1170 bp, Homo sapiens
aataatttaacaacacaatatctgtatccttacacacaagtatcttttttttttgagatggagtctctctctgttgcccaggctggagtgcagtggcrcgatcttggctcactgcaacctctgcctcccagattcaagcgatcctccttcctcagcctcttgagtagctgggattacaggcactgccaccatgtccagctaattttttgtattttttagtagagacgggttttcgccatgttggccaggctggtcttgaactcctgacctcaggtgatccacctgccttggcctcccaaagtgctgggactacaggcgtgagccaccacacccaggcaacacgcaagtatcttatttctgaaatacattccaaagatacactaaatatattttaaatattatataaatattttaaggaaacatttgttaagcatatttaattcccaagggtaggagataaaaaagatacttaagacatgtttcctgctaacaaaaaatacgaactcaaatttgcagaaaaacatattaaataatatcacattgccagataataaatataaagttacataatgggaacacacacactatggacatctaattaaaattgaactcatagagaaacagatgtcatcaaatattgtctcttgattttatccctaaaattaaaaaaaggttagcactgaacagaatacggaaatgaggctgagcacactcaaggatcaaagaatattataatgttagtcaaggaaattaggtaactgttcatttaaggaaaattcaagaattaaatatagccaaagtaaacagtgatatatgaatgtagagaaagatgaatctggaaatattgtcaaagtccagattataaaagattttgtttatctcggaaaaaatttgagaatttattttgaagatgatggaaattcttttgttagtttttaagttatgggggtatcataatgagatttggacttttgaaaagtttgtttaacacaatgctctaaacaagaggatgtggttactcaatgaaaagtaactaaaaagagccctaagggacccaaatagtagtacatacacacatttttgtctgggagcttgtcatgttatgggaaatatatttccccacaacatatatgttcatgattgtagaaccaagtgttagctgggaaagca

SEQ ID NO: 92645 - DNA, 1170 bp, Homo sapiens
aataatttaacaacacaatatctgtatccttacacacaagtatcttttttttttgagatggagtctctctctgttgcccaggctggagtgcagtggcgcgatcttggctcactgcaacctctgcctcccagattcaagcgatcctccttcctcagcctcttgagtagctgggattacaggcactgccaccatgtccagctaattttttgtattttttagtagagacgggttttcgccatgttggccaggctggtcttgaactcctgacctcaggtgatccacctgccttggcctcccaaagtgctgggaytacaggcgtgagccaccacacccaggcaacacgcaagtatcttatttctgaaatacattccaaagatacactaaatatattttaaatattatataaatattttaaggaaacatttgttaagcatatttaattcccaagggtaggagataaaaaagatacttaagacatgtttcctgctaacaaaaaatacgaactcaaatttgcagaaaaacatattaaataatatcacattgccagataataaatataaagttacataatgggaacacacacactatggacatctaattaaaattgaactcatagagaaacagatgtcatcaaatattgtctcttgattttatccctaaaattaaaaaaaggttagcactgaacagaatacggaaatgaggctgagcacactcaaggatcaaagaatattataatgttagtcaaggaaattaggtaactgttcatttaaggaaaattcaagaattaaatatagccaaagtaaacagtgatatatgaatgtagagaaagatgaatctggaaatattgtcaaagtccagattataaaagattttgtttatctcggaaaaaatttgagaatttattttgaagatgatggaaattcttttgttagtttttaagttatgggggtatcataatgagatttggacttttgaaaagtttgtttaacacaatgctctaaacaagaggatgtggttactcaatgaaaagtaactaaaaagagccctaagggacccaaatagtagtacatacacacatttttgtctgggagcttgtcatgttatgggaaatatatttccccacaacatatatgttcatgattgtagaaccaagtgttagctgggaaagca

SEQ ID NO: 92646 - DNA, 1170 bp, Homo sapiens
aataatttaacaacacaatatctgtatccttacacacaagtatcttttttttttgagatggagtctctctctgttgcccaggctggagtgcagtggcgcgatcttggctcactgcaacctctgcctcccagattcaagcgatcctccttcctcagcctcttgagtagctgggattacaggcactgccaccatgtccagctaattttttgtattttttagtagagacgggttttcgccatgttggccaggctggtcttgaactcctgacctcaggtgatccacctgccttggcctcccaaagtgctgggactacaggcgtgagccaccacacccaggcaacacgcaagtatcttatttctgaaatacattccaaagatacactaaatatattttaaatattatataaatattttaaggaaacatttgttaagcatatttaattcccaagggtaggagataaaaaagatacttaagacatgtttcctgctaacaaaaaatacgaactcaaatttgcagaaaaacatattaaataatatcacattgccagataataaatataaagttacataatgggaacacacacactatggacatctaattaaaattgaactcatagagaaacagatgtcatcaaatattgtctcttgattttatccctaaaattaaaaaaaggttagcactgaacagaatacggaaatgaggctgagcacactcaagratcaaagaatattataatgttagtcaaggaaattaggtaactgttcatttaaggaaaattcaagaattaaatatagccaaagtaaacagtgatatatgaatgtagagaaagatgaatctggaaatattgtcaaagtccagattataaaagattttgtttatctcggaaaaaatttgagaatttattttgaagatgatggaaattcttttgttagtttttaagttatgggggtatcataatgagatttggacttttgaaaagtttgtttaacacaatgctctaaacaagaggatgtggttactcaatgaaaagtaactaaaaagagccctaagggacccaaatagtagtacatacacacatttttgtctgggagcttgtcatgttatgggaaatatatttccccacaacatatatgttcatgattgtagaaccaagtgttagctgggaaagca

SEQ ID NO: 92647 - DNA, 1170 bp, Homo sapiens
aataatttaacaacacaatatctgtatccttacacacaagtatcttttttttttgagatggagtctctctctgttgcccaggctggagtgcagtggcgcgatcttggctcactgcaacctctgcctcccagattcaagcgatcctccttcctcagcctcttgagtagctgggattacaggcactgccaccatgtccagctaattttttgtattttttagtagagacgggttttcgccatgttggccaggctggtcttgaactcctgacctcaggtgatccacctgccttggcctcccaaagtgctgggactacaggcgtgagccaccacacccaggcaacacgcaagtatcttatttctgaaatacattccaaagatacactaaatatattttaaatattatataaatattttaaggaaacatttgttaagcatatttaattcccaagggtaggagataaaaaagatacttaagacatgtttcctgctaacaaaaaatacgaactcaaatttgcagaaaaacatattaaataatatcacattgccagataataaatataaagttacataatgggaacacacacactatggacatctaattaaaattgaactcatagagaaacagatgtcatcaaatattgtctcttgattttatccctaaaattaaaaaaaggttagcactgaacagaatacggaaatgaggctgagcacactcaaggatcaaagaatattakaatgttagtcaaggaaattaggtaactgttcatttaaggaaaattcaagaattaaatatagccaaagtaaacagtgatatatgaatgtagagaaagatgaatctggaaatattgtcaaagtccagattataaaagattttgtttatctcggaaaaaatttgagaatttattttgaagatgatggaaattcttttgttagtttttaagttatgggggtatcataatgagatttggacttttgaaaagtttgtttaacacaatgctctaaacaagaggatgtggttactcaatgaaaagtaactaaaaagagccctaagggacccaaatagtagtacatacacacatttttgtctgggagcttgtcatgttatgggaaatatatttccccacaacatatatgttcatgattgtagaaccaagtgttagctgggaaagca

SEQ ID NO: 92648 - DNA, 1170 bp, Homo sapiens
aataatttaacaacacaatatctgtatccttacacacaagtatcttttttttttgagatggagtctctctctgttgcccaggctggagtgcagtggcgcgatcttggctcactgcaacctctgcctcccagattcaagcgatcctccttcctcagcctcttgagtagctgggattacaggcactgccaccatgtccagctaattttttgtattttttagtagagacgggttttcgccatgttggccaggctggtcttgaactcctgacctcaggtgatccacctgccttggcctcccaaagtgctgggactacaggcgtgagccaccacacccaggcaacacgcaagtatcttatttctgaaatacattccaaagatacactaaatatattttaaatattatataaatattttaaggaaacatttgttaagcatatttaattcccaagggtaggagataaaaaagatacttaagacatgtttcctgctaacaaaaaatacgaactcaaatttgcagaaaaacatattaaataatatcacattgccagataataaatataaagttacataatgggaacacacacactatggacatctaattaaaattgaactcatagagaaacagatgtcatcaaatattgtctcttgattttatccctaaaattaaaaaaaggttagcactgaacagaatacggaaatgaggctgagcacactcaaggatcaaagaatattataatgttagtcaaggaaattaggtaactgttcatttaaggaaaattcaagaattaaatatagccaaagtaaacagtgatatatgaatgtagagaaagatgaatctggaaatattgtcaaagtccagattataaaagattttgtttatctcggaaaaaatttgagaatttattttgaagatgatggaaattcttttgttagtttttaagttatgggggtatcataatgagatttggacttttgaaaagtttgtttaacacaatgctytaaacaagaggatgtggttactcaatgaaaagtaactaaaaagagccctaagggacccaaatagtagtacatacacacatttttgtctgggagcttgtcatgttatgggaaatatatttccccacaacatatatgttcatgattgtagaaccaagtgttagctgggaaagca

SEQ ID NO: 92649 - DNA, 1170 bp, Homo sapiens
aataatttaacaacacaatatctgtatccttacacacaagtatcttttttttttgagatggagtctctctctgttgcccaggctggagtgcagtggcgcgatcttggctcactgcaacctctgcctcccagattcaagcgatcctccttcctcagcctcttgagtagctgggattacaggcactgccaccatgtccagctaattttttgtattttttagtagagacgggttttcgccatgttggccaggctggtcttgaactcctgacctcaggtgatccacctgccttggcctcccaaagtgctgggactacaggcgtgagccaccacacccaggcaacacgcaagtatcttatttctgaaatacattccaaagatacactaaatatattttaaatattatataaatattttaaggaaacatttgttaagcatatttaattcccaagggtaggagataaaaaagatacttaagacatgtttcctgctaacaaaaaatacgaactcaaatttgcagaaaaacatattaaataatatcacattgccagataataaatataaagttacataatgggaacacacacactatggacatctaattaaaattgaactcatagagaaacagatgtcatcaaatattgtctcttgattttatccctaaaattaaaaaaaggttagcactgaacagaatacggaaatgaggctgagcacactcaaggatcaaagaatattataatgttagtcaaggaaattaggtaactgttcatttaaggaaaattcaagaattaaatatagccaaagtaaacagtgatatatgaatgtagagaaagatgaatctggaaatattgtcaaagtccagattataaaagattttgtttatctcggaaaaaatttgagaatttattttgaagatgatggaaattcttttgttagtttttaagttatgggggtatcataatgagatttggacttttgaaaagtttgtttaacacaatgctctaaacaagaggatgtggttactcaatgaaaagtaactaaaaagagccctaagggacccaaatagtagtacatacacacatttttgtctgggagcttgtcatgttatgggaaatatatttccccacaacatatatgttcatgattgtagaaccargtgttagctgggaaagca

SEQ ID NO: 92650 - DNA, 735 bp, Homo sapiens
ggccgcagaaaggaaatatgttttttctatatacctcattatagcttatagctgcaatctattccaaatgcttggaagtatcattttggcacaatttttttgtagcaaaatagacgcccaggtaatataatggataacctgtcctgaaaatatggtcttggatttgacatactggaaaaaacaataacttcaaagttttgttgattgttgttggttttgctttttaatatattgttgagatggtagtcttttgttttcttgcctggattttcaccttcttcacttcttctcagtctctccttcggctctccttactcttccagcctctatccctgccaccctaacaatactctgttaaatcccctagcactggagtgattcaatgcttagccctaggcaggtcttctttttatctacgcttttctcccaaggaaatcttactcaaccttgtgacattaaatccacttgcactttttaatactataaatgagtccaaaatgtatatrtatattttttatttttttaattttattattattatactttaagttctagggtacatgtgcacaatgtgcaggtttgttacatatgtatacatgtgccatgttggtgtgctgcaccctttaactcgtcatgtagcattaggtatatctcctaatgctatccctcccccttcccccttatttacaagctttcctctgagctccagactattgtgtccagatacctctttca

SEQ ID NO: 92651 - DNA, 735 bp, Homo sapiens
ggccgcagaaaggaaatatgttttttctatatacctcattatagcttatagctgcaatctattccaaatgcttggaagtatcattttggcacaatttttttgtagcaaaatagacgcccaggtaatataatggataacctgtcctgaaaatatggtcttggatttgacatactggaaaaaacaataacttcaaagttttgttgattgttgttggttttgctttttaatatattgttgagatggtagtcttttgttttcttgcctggattttcaccttcttcacttcttctcagtctctccttcggctctccttactcttccagcctctatccctgccaccctaacaatactctgttaaatcccctagcactggagtgattcaatgcttagccctaggcaggtcttctttttatctacgcttttctcccaaggaaatcttactcaaccttgtgacattaaatccacttgcactttttaatactataaatgagtccaaaatgtatatgtatattttttatttttttaattttattattattatactttaagttytagggtacatgtgcacaatgtgcaggtttgttacatatgtatacatgtgccatgttggtgtgctgcaccctttaactcgtcatgtagcattaggtatatctcctaatgctatccctcccccttcccccttatttacaagctttcctctgagctccagactattgtgtccagatacctctttca

SEQ ID NO: 92652 - DNA, 735 bp, Homo sapiens
ggccgcagaaaggaaatatgttttttctatatacctcattatagcttatagctgcaatctattccaaatgcttggaagtatcattttggcacaatttttttgtagcaaaatagacgcccaggtaatataatggataacctgtcctgaaaatatggtcttggatttgacatactggaaaaaacaataacttcaaagttttgttgattgttgttggttttgctttttaatatattgttgagatggtagtcttttgttttcttgcctggattttcaccttcttcacttcttctcagtctctccttcggctctccttactcttccagcctctatccctgccaccctaacaatactctgttaaatcccctagcactggagtgattcaatgcttagccctaggcaggtcttctttttatctacgcttttctcccaaggaaatcttactcaaccttgtgacattaaatccacttgcactttttaatactataaatgagtccaaaatgtatatgtatattttttatttttttaattttattattattatactttaagttctagggtacatgtgcrcaatgtgcaggtttgttacatatgtatacatgtgccatgttggtgtgctgcaccctttaactcgtcatgtagcattaggtatatctcctaatgctatccctcccccttcccccttatttacaagctttcctctgagctccagactattgtgtccagatacctctttca

SEQ ID NO: 92653 - DNA, 735 bp, Homo sapiens
ggccgcagaaaggaaatatgttttttctatatacctcattatagcttatagctgcaatctattccaaatgcttggaagtatcattttggcacaatttttttgtagcaaaatagacgcccaggtaatataatggataacctgtcctgaaaatatggtcttggatttgacatactggaaaaaacaataacttcaaagttttgttgattgttgttggttttgctttttaatatattgttgagatggtagtcttttgttttcttgcctggattttcaccttcttcacttcttctcagtctctccttcggctctccttactcttccagcctctatccctgccaccctaacaatactctgttaaatcccctagcactggagtgattcaatgcttagccctaggcaggtcttctttttatctacgcttttctcccaaggaaatcttactcaaccttgtgacattaaatccacttgcactttttaatactataaatgagtccaaaatgtatatgtatattttttatttttttaattttattattattatactttaagttctagggtacatgtgcacaatgtgcaggtttgttacatatgtatacatgtgccatgttggtgtgctgcaccctttaactcgtcatktagcattaggtatatctcctaatgctatccctcccccttcccccttatttacaagctttcctctgagctccagactattgtgtccagatacctctttca

SEQ ID NO: 92654 - DNA, 572 bp, Homo sapiens
tgtaaataaaatcatgttattcagtgcttaaaaccctttagtggcttctcatgtacttgacataaaattcaagcttcaaatcagaacctctaggtcccatgtgacctggccctgcctccaccctgacctcaactctgttcactctccctctctcattgtactccagacacacagggcttctctcagcttcccagacatgctaagctctttgctgtctcaaaggcttctctctttctattccatctacctagaacctcctccaattcctgattcctttgcctatttcagattcagcctaaataacacatcttgttagcaactttctctggccatgttatttaaggcaggttgccttcttttgtactagagctattttgttttgttcatatcacttactatgttatttagtaatttcatttgttgttgttttctgccatcctcaccaaaatgcaagttctgtgaatccagtggcatgaatattgtgctcattgttggatcactggtacmtaacacagtgcattgcacataagtgctcataaatatttactgaatgaatgaaatgaacaattgct

SEQ ID NO: 92655 - DNA, 783 bp, Homo sapiens
caaattattctattcttgaattggcaagtctttagattaaacatatcttggcaaagcatactgtgttagtaagacctttctgtttgaaaggcagaaaaacccaccacaaagaaaagtgtcttgttttagtccccaacagaaatcagctttaaaaaatgcagcaaatcacactcagttggtaactagttcatcactagttgttccactgaattcaactgtcttttttcccaagctgatttatgtgtagatacagcctaaatttatatccttttaaatttatggtaaactttttatctctaagttctcctaataatttaacagctaggacatagctcaaatgacctgaatttgatccctggaatcccccctaaaagtgctttccctggggtagaatttccctaagggaaaaaaaasaacaaaagaaatgaactcagactttattttggaatgtgtgtattggtaaggaaaaggaactattaatcaatgaaaatgtgccttaaagttgaactttctaaagcagaattgcatagtacttagtaaattaaaaatataaaagtcatgggaagtagattgagtgagcttcacatttgtcattttatttggttttgaagtgaccatctgtgagaggtagatcatgtctgcctgattatttccccacatgtacacaggtgacactgggagattactcaggtaggcacatgtctgacatgttgagccaacaacaccaaagtacacgagtgactacttatccattctttctgcaagaagagtcactcttgaaag

SEQ ID NO: 92656 - DNA, 783 bp, Homo sapiens
caaattattctattcttgaattggcaagtctttagattaaacatatcttggcaaagcatactgtgttagtaagacctttctgtttgaaaggcagaaaaacccaccacaaagaaaagtgtcttgttttagtccccaacagaaatcagctttaaaaaatgcagcaaatcacactcagttggtaactagttcatcactagttgttccactgaattcaactgtcttttttcccaagctgatttatgtgtagatacagcctaaatttatatccttttaaatttatggtaaactttttatctctaagttctcctaataatttaacagctaggacatagctcaaatgacctgaatttgatccctggaatcccccctaaaagtgctttccctggggtagaatttccctaagggaaaaaaaacaacaaaagaaatgaactcagactttattttggaatgtgtgtattggtaaggaaaaggaactattaatcaatgaaaatgtgccttaaagttgaactttctaaagcagaattgcatagtacttagtaaattaaaaatataaaagtcatgggaagtagattgagtgagcttcacatttgtcattttatttggttttgaagtgaccatctgtgagaggtagatcatgtctgcctgattatttccccacatgwacacaggtgacactgggagattactcaggtaggcacatgtctgacatgttgagccaacaacaccaaagtacacgagtgactacttatccattctttctgcaagaagagtcactcttgaaag

SEQ ID NO: 92657 - DNA, 654 bp, Homo sapiens
cttgagcccaggagttggaagttagtgaactatgatcaccactgcactcaagcctgggcgacagaatgatatctctttattttttatttttttgagatggagagtctcgctctctcgcccaggctggagtgcaatggctcgatctcagctcactgcaagctctgcctcccaggttcacgccattctcctgcctcagcctctccagtagctggaactacaggcgcccaccaccatgcccagctaatttttttgtatttttagtagagacggggtttcaccgtgttagccaggatsgtcttgatctcctgacctcatgatccacctgcctcggtctcccaaagcgctgggattacaggcgtgagccactgcacccggcctgaactcatctctttaaaaaagaaaaaaaatcaaaatacttaagaagccatttgaaattattttctctgtgttacaccaccaatctgacattacagatggttcgtttccatttgtttttaatttttatggagtgctttattttattgaactttgtcttataaatatgtgaaatgtttacaagagtccaaaattgtactatataaaaggtatattcatagaagtctcattcccatctctatcccctccaacccacataggcaactatttttttagaag

SEQ ID NO: 92658 - DNA, 1407 bp, Homo sapiens
taagtgagcttgtaaatggtcagaaaatttggggaagaatatagaagaaatcattatcatatctaactggagagtgggatagggagtctaagggaatacagaccatgaggaggaatggtaactcttttataatgttttataatggaaaattacaagcatacacaagatggaaagattgatatattgacctttctcccatttacttatcacttaagttcaacagtaactcatattacttgattatgctatccttttgttctgtttgaaaaaacatttaccacttacatgtcttgcttttatacctaaaaaaacccgacataatgaaagtaacatttccccatgcccttgcaaccacagtttgctagcttaacctttagtgcacgcaagaaagcttcggggatgaggggtctggagagtgttagccactttgctcttgaactcatgtcacctctgtagccagagggacagcgaaccttatccagctacaatcaacgatactttatttaaagagtaacttcaaaggaagattgcccactctgtaggggagagtgtaatatgcttaccactcacacccacaccccctagtccatgtttttataaagggacaacttgatttatcctgcaggaatgttttrtctctgtattaaggtttactccatttcccagcagagccctaagctaagtaaacagtgccttcctccgcttcaaaccgatgagacttgggcagctgcagttgttgccaaatgttacccttggtcacagaggcatgacggatgcctcatgctagaagttcaggggagtttggaaaaatatggaaattcccaggcactatttgggggcacagtgccaaagtctgaggactgaaaatgagaatacctgcctcccagatgcattcattgatttactcacccatcattcattccaatatcgtacccttggccaggctttgtgtctagagtcaggattaccaagttgagcagctgcacggcccctgaccttgctggagcttatgaaatctgtaatgaagcttagtgagtttgctttgcttttcttcctctgccagaattgttctttcctatcttgtccacctagtcttactcatgccttgcagaatttagctcatgaggcaccatctcctatgaaagacatttacaatttactgtttcctctgcttaagaacacctcttctgtcttgtccacctgtgattactcaccctgcaaagccagtcttcatccctatgagccctgcctgacccctcagatccaagttagttactgtgcttagcagattgcattacttactctgacatgcttgcctccctttaaagcccagcctttggttcaccatttcccatgcagcatgtggcacatatttatatttgttgagttaatgtgtaaagtagtgta

SEQ ID NO: 92659 - DNA, 1407 bp, Homo sapiens
taagtgagcttgtaaatggtcagaaaatttggggaagaatatagaagaaatcattatcatatctaactggagagtgggatagggagtctaagggaatacagaccatgaggaggaatggtaactcttttataatgttttataatggaaaattacaagcatacacaagatggaaagattgatatattgacctttctcccatttacttatcacttaagttcaacagtaactcatattacttgattatgctatccttttgttctgtttgaaaaaacatttaccacttacatgtcttgcttttatacctaaaaaaacccgacataatgaaagtaacatttccccatgcccttgcaaccacagtttgctagcttaacctttagtgcacgcaagaaagcttcggggatgaggggtctggagagtgttagccactttgctcttgaactcatgtcacctctgtagccagagggacagcgaaccttatccagctacaatcaacgatactttatttaaagagtaacttcaaaggaagattgcccactctgtaggggagagtgtaatatgcttaccactcacacccacaccccctagtccatgtttttataaagggacaacttgatttatcctgcaggaatgttttatctctgtattaaggtttactccatttcccagcagagccctaagctaagtaaacagtgccttcctccgcttcaaaccgatgagacttggrcagctgcagttgttgccaaatgttacccttggtcacagaggcatgacggatgcctcatgctagaagttcaggggagtttggaaaaatatggaaattcccaggcactatttgggggcacagtgccaaagtctgaggactgaaaatgagaatacctgcctcccagatgcattcattgatttactcacccatcattcattccaatatcgtacccttggccaggctttgtgtctagagtcaggattaccaagttgagcagctgcacggcccctgaccttgctggagcttatgaaatctgtaatgaagcttagtgagtttgctttgcttttcttcctctgccagaattgttctttcctatcttgtccacctagtcttactcatgccttgcagaatttagctcatgaggcaccatctcctatgaaagacatttacaatttactgtttcctctgcttaagaacacctcttctgtcttgtccacctgtgattactcaccctgcaaagccagtcttcatccctatgagccctgcctgacccctcagatccaagttagttactgtgcttagcagattgcattacttactctgacatgcttgcctccctttaaagcccagcctttggttcaccatttcccatgcagcatgtggcacatatttatatttgttgagttaatgtgtaaagtagtgta

SEQ ID NO: 92660 - DNA, 963 bp, Homo sapiens
atttgcagagcccagtgcacagcgaaaatgtggggtcccttgttcaaaaattaagaatttccaccgagcaatagcagagcattaactcaggtatgggccctttccaactgtaagtccaggggtactgtacagcccccaaactcacgaagtgttttccagatgcaagtcttaacagcatgatgacactggtaagttataaagtacttgggttcacattcaaggttcacaaagttatattaaaactgaaaaaaagtattcataaaactgtttttgaaaagaattaaaagagagaagtgagctcttaatgaggaaaaatgtcacagaaattttcactgtcctgcacatattctgttcagctccacatgtaattactacagggatgatgatatgaaatattttgtaaatatttataccaattaaggacttgtgcttttactttatcaactcactgccatctgcattcataacttttctgaaaactgtgtttgactttgatttatgtatttcatgatcaagaagtccttattgtgtccatcagcatttgtcttaaactgcatgtgtttattttaaagaaaatattcatgctgcttctttgaagctttctttttaatccagacatcttgtctgcaattttcttcatgataacctcagaaagaaacttattatttttctacatattctattctgttattatttaacttctttcattatcccctggttgtccagagtcttctattatggatcatattatctttcaagaaatagtgaaagaatcttctgttgttttattcgctttcagtacagtacatcatctaccatcaactgtgcttttttagtcaatgtattttactctttcagttttacttcattatttactctwttcagtgcatgaaatattttcccagatttaagcaaattaggcattgatgcaaaatatatgcctagtaaaacatatataaagaa

SEQ ID NO: 92661 - DNA, 389 bp, Homo sapiens
ttcttcccagatagtacatagtactgtttttattatgaatttttttgtgggaaaatagagatgataaaataggaaacctttccacaaagctatggttaatattagttagaagtaaattttcatttctagaacataacattgaaaaaaggtaagaggggcatagagaaggcaaaagaatatacttcttgaataaacaagtatttctaatgcttattatttataacttagatatccccagactgtaaactgtagaagaagggactgtgtcctgagttattcagaagccaattttttgtgccttagcataayagtataggaatattggccatagtagtcgatcagtggagacttgttgagtgaatgaatgatagacatgctttttacttgta

SEQ ID NO: 92662 - DNA, 669 bp, Homo sapiens
tgggctgtggggtttccgaggatggtgagtgtgggaatgttttgtctgtagagttggggctgggggcttccacatcctgcccactgccacatctggggaagtcatctgcactgggctgatggctccccgagcactcctgctttaatggctcgtggtgccgcaagaagtggccctgtaatggccattccaggctgccccggggaagggtctgggcaggccccaggcagcctgtttgctctcctcccaccccaggccagccagcacctttcacctcctctttgcctaggtgagctggcctgaaccctagttgggagcctccagctgtggggagacagtgggactagaggccttggacatttagagtggggataggacttggtcccgygcttcctgaatgccatccccttgctaaggcacaggctcctgcatctgtcattgtttgcgttcttctcttgacacagctctgccaaaacctcatctctttacaaaatgaggctaatggttatggggtcaggtccaagaccaagtggtgcagaaggagcaggaacaccatgctttgaaagaacctgcttcgcatggtgttagggagaggtatggaaggagaaagcagagaaatgtgctgaggcagctcagagggctcccgcctctgctatcccccagggcccaaga

SEQ ID NO: 92663 - DNA, 1493 bp, Homo sapiens
aagaagtccaaccatcccgaggttggcaagctatgaggaagcccaggccacatggagaagccctgtgtaggtgctttgattccagcctcagctgaggtcccagctgacagccagcatcaacccccagacatgtgagggaagcagccttcacatgacccagctcccagccaccaagtcttcccagctaaggccccagacatcatggagcagacatcagccatctcctctgtgccttatctgaattcctgacctcacagattccacgagcacaatgaaatggttgctttaaactgctaagattttaggtaatttgtcacacctctcctctactctttttgataacctggctcctccaccaggcccttgaggaggctcagcccagtccttcaggcagggacaagggagggaggctgggggtgaggtggggtgggacagtgggggacacacctgagcacattcttaagactgtcatctttcagacactgagattcatagagaaggtagtgtccacccccctggaggaaggacttggctgcacttctgaggggcctgccaggcctaggacctgcttcttttattctgctctgaggctcaacatggcagtgctgggcctttggcagtggctcacccctgtctagctcctctcatgttttcctttgaggctggggcctgcggggtcactctcctcccatctccaaaaatagagcaagaagaggaaggtggctccattcagcggaaagatctgaggattgaaacagagttgtggagaagggtggcagggtcctgtcttttcccgaggggctagggtatgggccaggcggctgcttctgggatccggtggccagaaccctgagtggactcctccagcaggcaggctccctgggaggtggcttacctcgagggcagttgggctagctgctccagttcctgctccatatgctcctgcagctcactgggcctcagcaggacctggcagatggggcaaattggggcctggctgtcgaacaatgccgctgctttcttcttacctagtgaggggagaagaacagacagacgcgtaagctgggctagtccaggaggcagacccagcatcccagtcctgaaacccaagcctgctgctgccctctagggcttcttggcctagaggaggggcctgagggtttcagagcccacgagcacccctcctccttgcagctccagaggctgtggccatgaatggtacctcctcagccagccrcccctctcagaaatctattaggacacatcccccatgggatgtctatttttttttcttttttaaattaattaattaatttgagacagagtcttgctctgttgcccaggctggagtacagtagcgtgatcttggctcactgcaacctctgcctcctgggttcaagtggttctcctgcctcagcctcctgagtagttgggattacaggcatgtgccaccacacttggctaatttttgtattttttgtagagatgggatt

SEQ ID NO: 92664 - DNA, 725 bp, Homo sapiens
ggcgacagagtgagactcagtctcaaaagaaaaaagcaaacaaacaaacaaaaaacaaaaagaaatgttacttctggctgtgccaagacaagcttggggagcaattcttgggctacatatacctgagccccacgttccagtacctgcaactactgagggacagccagctagggtttccccaccatcctgacaaccttcaggggagccaactcctatttccagagctggagccagctaggctttcctgagtgcagcaataaaaggggaaaatcaacatcccaatgatcttgtttatggtgctaagtaagctgcacagcttaatccctacgaggttaatgaatttacgacttgctttggaatttgacaagggctataaaagaggaatgaaccacgctctggacagctccttcctagcggctgctagggttggactagcttgacccgccctgatgaaggaggggtgaagacgtaagtggtgggttcatggccaattgtctgggttmtgaattgagtggaccaaaggagggacaatctaagggccaaaggacatttcctgtaaccctctggctaggtcagggtgagcagcctgggctgctcgagctggagttcccaggtcttcaggtgaccttggtgtcttgggcaagtcatttaacctctctgagcctctgtttcctcatctggaagagacacgatgctatgtacctcatgttgtagctgtgagaatg

SEQ ID NO: 92665 - DNA, 557 bp, Homo sapiens
tccactctctccttggtactggaacattgcctgacacaaagccattgcaatttcttaagccccaggtcaagataggcctgaaaccagcagcccccaagacttctctgagccaatacactcttttcctatctaagccagtttgagttaaggtctatctactcaatgagtcctactcctgcaygatagctccccagccccacacacctggagaagcacatgcctggtgcacaggaggtgctaagtgaacaaagaagtgaatgactcggccattctccttcctcagcacctcagctctctccactttcctgagagatagctccacctcctgagctgcctggcatctctccaggggagcagagatcccaggattccccacatcctgctagggagatggatgtctggacatgtgtcaccaggtgggccccaggatgcccaggagggccaggcactctgcagagaaccgtgagagcaggtctctcaggaggggagctggacacagagtggctggaatgtcatccctcacattcccactggccactgggctttaacaaaaccat

SEQ ID NO: 92666 - DNA, 1777 bp, Homo sapiens
attaataggttgtgggagtgaggacatcagaaaagatccagtagtaaaaatggtcacagggtgacctatacatttgacttaatcaggagtaaattactctgcaccccgagtagaactgagagctttctggtgcacaacatttcttacatgtccccttcatgctgagctggacacattccagatagcagaaggcagggagaatcccagcatctcagcccggggaccagcagaggctccatatgagctgctgtgagcatcctccgctcctcaccagccgtgggaacaaggaacacggaaggagccgctcaacctctcccgcctggaaacccactgtctccctcccccatcagggccacctctgaggatttgggttggccccaccgacttccaggaagcctcctggatggccccacccacttccaggaagcctcctggatggccccacccactcaacgctcaatgtgaaggttgactgcccagcatggcgtcagtctggctaggtcctgagttctggttcctcagggctcagggggtggtgcccggcccatgggcatcacctggagacttgccagaaatgcagaatgccaggccccaccccagaccagaatctgaatctgcaccttaatgagtttcccaggtcatccatgcacaaaaggcttttcctgggggtgctgacactcgaggactcatctccaggacaggaagagagacattggccttgaggcattccttgaactcctcaggactcagcttccttgtctataaaattggaatattctgttcactcaacaaatatgtagcaggtgtctggagtatgacaggcactgccattctaggtgccagagacagagtggtggggacagatggggcccctgctcccgtggtgttccgtctagtgcacaatcctcctgtgtctcagccttggggggatccgggacatgaagcccaggacacagagcgtgtacatcatcgagctcagtaaacccctgtkggatgaaggcaacagcagagaaccaggccctgggctctgaggttggaggcactgactcacctcctctccctcactcccaccccagccctgagtggtggtgcggcttcccaccttatagatgaggaagctgaggcccagagaagttatatgcattgcccgagtcacacagctagctggggagagcacaggtcagatccggcgggccctgggttctccctattcccctagactatgtttctggccccaaaggcttcctgcagcccttagggtcatattcctgggggttagaggggccttctaggccatcccaaaggatcttggtgttcagtcaagtcaggccgccaagctcttcctctgaacctgaccctgaccctgacccttcctggctgtgtgacttggccccttcccttcacctctctgggaccacagttccctcccctataaatctaagacaataacagccccgttcccccaattgttgtaaggataaagtaattttcataaagctggcagtgtgtggccaggcttggtcagggctgcccctctgtcctctctgcaggaaccgcctccaccctgcagctccctctttccctcccacactttcaagcctcccttcccaggtccctttcccctcccaccatgacctccccagatctggcatttgtttctcatcatccttcccttcctttcctggcccttttcacagcatggaattattttgttgttcatttgctcattttacttggctgttcccccaactgcagccaagagccctgtgatggcagg

SEQ ID NO: 92667 - DNA, 509 bp, Homo sapiens
aaagtagccccattttatagctaaggaatctgaggctcagagaaattaaagaaacttgcttacggtcaaaacctcctctgttagagctgagtgaagttgggggtctgctgtttaatttccgttgtgcctcttcaagagtcggtcactcctgctggagggatcttgtcccttttcccttcctttgaaggttcttacctacttcagaattctcagaatcagaaaagctcaaagttgtaaaggaggckcagagatgaaactagggtgggtggaggagtgaaggcaggacacaggctttggagaggcagaactgggagtcaatcccagttccaccaagcgctggctccatgaccctgtggaacctgacgctgtctgtgaaccagcacctctccttctccaccaccatggagtaacacacggctgtttgctgtctctcattcagaggcacaattcaggattttaattatctccccaagaacacagagcctctactctcacccccactacagaga

SEQ ID NO: 92668 - DNA, 820 bp, Homo sapiens
gcctctgggtgtgcgtctccttgtctactactcacacaggctaaaagttcaagtgcaagagagtgagtaggtccctactctttcgagcacaagagcgggataggaaggataaactgtcagggcatccaagtgggcccctcctcatctgtcacagcactcccctggtgctgctcacattcatttctccatgcagggaactcttagggatcaccaggttctgcacacattcctccctgcccccactgcactgcagcagccccccacctcctgctgatcagactccattaccctcaccaagactgcgacctcgtcttcttgcttttctagtccctgggtacaaggagcccaaatacccaggcagccaccatggcaaacaagctagagactcttactgtgttccctggaacatgcaggtcccccttggggaccaggatgtccagccttgcagagcccagagtcgcagggatgggagtcactaagtctggcagtggttcactaggagaatagtaagtggggccactttggctcctacctgtttttcttaagtccatgtactcttcttattggggagcaacccttatatagggctttgattagatgcatatactgcatcctgaaggatggaaccttgtgctcacagggtatttcctccaagctggcgctctggctgggccctcagcaggcccctcccacactctgtaaggtgggcagcggctgggtggtatggtatgtgatataaacatgggcccttmgttgtgagtctgtgcctgcacctactctacagtaaagtgggtcccctggtctgacacactattatgtg

SEQ ID NO: 92669 - DNA, 668 bp, Homo sapiens
cttgagatatagaaagctgattaacagcaggatccagttgtccctggttgccataattacaggcaataattatagatkttctttatctgtgcttttcaatatggtagccatcggtgacatgtagcttagcgaaaacttgaaatgtggctagtgtgacagaggaaggaatttctggtttcatattattttaatcaatactcatttaattttagatagccacatgttgctagtggctattgtattggtctttgagcatctgaggcaatgctgtgctgtcccactgttactgatagaaacttcgtagtgcattcattcagtacactgcacacaaagtttggtaagagcacagacacaaaggttcaaactgagttcaaatacagctcaatcaagaaggaaggtctctcatcaggagtcagattcagatattcctatgtcccctggccaaaaactttgccaatgttagtcattatctctaataattattggttaagaatataggagatttattgcatatagaatatggaagatgtattgtttatatacacacatgtgcattcgtataaaatgttggtaacattgtttttgtagaaaatattaatttcttttcaagtaaaagcatcctttatctcaggaaatgtgctaattacatagatgcaatgtgtgtattt

SEQ ID NO: 92670 - DNA, 668 bp, Homo sapiens
cttgagatatagaaagctgattaacagcaggatccagttgtccctggttgccataattacaggcaataattatagattttctttatctgtgcttttcaatatggtagccatcggtgacatgtagcttagygaaaacttgaaatgtggctagtgtgacagaggaaggaatttctggtttcatattattttaatcaatactcatttaattttagatagccacatgttgctagtggctattgtattggtctttgagcatctgaggcaatgctgtgctgtcccactgttactgatagaaacttcgtagtgcattcattcagtacactgcacacaaagtttggtaagagcacagacacaaaggttcaaactgagttcaaatacagctcaatcaagaaggaaggtctctcatcaggagtcagattcagatattcctatgtcccctggccaaaaactttgccaatgttagtcattatctctaataattattggttaagaatataggagatttattgcatatagaatatggaagatgtattgtttatatacacacatgtgcattcgtataaaatgttggtaacattgtttttgtagaaaatattaatttcttttcaagtaaaagcatcctttatctcaggaaatgtgctaattacatagatgcaatgtgtgtattt

SEQ ID NO: 92671 - DNA, 617 bp, Homo sapiens
ttcatcacctctattcaacattttactggtgatcctagattgagtataaatatttaggggataactattgtcactgaagcccaaatcttggtcatcctcagggaaaaaaaaaaagttgattaggttgtatataatctaattctacttgctaatttaatttctctaaaattacagcttgtatcaactctagaatttattgggcacctcctaggacataaacactggaatttggtgagagacatcwaataggaaagaacctggctctgacataaattcaacacacggaggggtacacaagttatgagactgacctggcctcttcatctcataaaaggggttcttgttgctggtaacacagattaaaactatttcaattatattcaaggtaaaaagattagcaatgatatgtaagatgaaaaaatcaccccgcaggaagacaaaagtctcacaaaaggatatttaaactagccaacactttgaaattcaggcagagatcgtgctttctgggtgaactaaagtagcaagaacaaagtagaggctccaattctaggaaaaatgggccctaataaggtttacaatccagaaactcaagatatccagacagaaggatgcagtct

SEQ ID NO: 92672 - DNA, 617 bp, Homo sapiens
ttcatcacctctattcaacattttactggtgatcctagattgagtataaatatttaggggataactattgtcactgaagcccaaatcttggtcatcctcagggaaaaaaaaaaagttgattaggttgtatataatctaattctacttgctaatttaatttctctaaaattacagcttgtatcaactctagaatttattgggcacctcctaggacataaacactggaatttggtgagagacatcaaataggaaagaacctggctctgacataaattcaacacacggaggggtacacaagttatgagactgacctggcctcttcatctcataaaaggggttcttgttgctggtaacacagattaaaactatttcaattatattcaaggtaaaaagattagcaatgatatgtaagatgaaaaaatcaccccgcaggaagacaaaagtctcacaaawggatatttaaactagccaacactttgaaattcaggcagagatcgtgctttctgggtgaactaaagtagcaagaacaaagtagaggctccaattctaggaaaaatgggccctaataaggtttacaatccagaaactcaagatatccagacagaaggatgcagtct

SEQ ID NO: 92673 - DNA, 617 bp, Homo sapiens
ttcatcacctctattcaacattttactggtgatcctagattgagtataaatatttaggggataactattgtcactgaagcccaaatcttggtcatcctcagggaaaaaaaaaaagttgattaggttgtatataatctaattctacttgctaatttaatttctctaaaattacagcttgtatcaactctagaatttattgggcacctcctaggacataaacactggaatttggtgagagacatcaaataggaaagaacctggctctgacataaattcaacacacggaggggtacacaagttatgagactgacctggcctcttcatctcataaaaggggttcttgttgctggtaacacagattaaaactatttcaattatattcaaggtaaaaagattagcaatgatatgtaagatgaaaaaatcaccccgcaggaagacaaaagtctcacaaaaggatatttaaactagccmacactttgaaattcaggcagagatcgtgctttctgggtgaactaaagtagcaagaacaaagtagaggctccaattctaggaaaaatgggccctaataaggtttacaatccagaaactcaagatatccagacagaaggatgcagtct

SEQ ID NO: 92674 - DNA, 591 bp, Homo sapiens
ttttaaacccaccaaccatcctccaaagtctggctctgtttaacaaggctgtggtctgacactagatgccgcctcagtgactaaagcataatttcccgtctcctgggagtgttgacagctgactcctggcaacaatactcacagcacagtaaagttccttcatccaagttcatgtcccttctcagggcatcccacatccgagaactgcttggtacagaaatataatggcctggttttcttgctccaattcgaggtcattaggtaaactcaccaagatccctgtagagtggactgcagccatgatagtgattgcattctagccgacttcctgctccrcccaatcctattgctttcactcttccacaggtgttgggaatatcatttcaacctccttgcatgcaaatctccaactcggagtcggcttcctaggacacctgactggtgatatctctatcattatcacggtacttagagaggagcatcttaaaatgattgaaggctaactgccctaacagcacaggcagatggtggcttaaaatagaatttaagtggacttaaaaaaacatgaaagaagttgacattgcacgctca

SEQ ID NO: 92675 - DNA, 642 bp, Homo sapiens
tcctttaaatacacgatgattggcaggggttacataggggatatcagtgcctgacaattcgccttccaggatatggattgtcattccctctctttgtgggccccagtctcctatacataaaagtagagactgtaatactcatttgactagcagatacctcaccccgaacccacctactataatgtaaaagccaagaatgcaaaccctttcctcaccccgtgaaggtaaagtcctcagagccaaggggagaaggctcagggatggtacctgggtgtttccaacastaactatgcattgtagtttttagtgttcaagtttaagcttcttatgttaaagttacgccagctttaattctattgtaacaagatttatttttgtaattccatttttggattcttgatttcttggtaaagaaatacagttatttttgtataccaatcttatatagtgttacattcctaaatttgttcatgagtcctaacactttttagtaaatttcttatgattttctaaatgcaagatcatgtcatctgtacataaagataactgtacttcttcctttccaatctagatgccatttatttatttacattgccaagttgtccctgctaccactgttatcaagtaaaagggtctcactgc

SEQ ID NO: 92676 - DNA, 642 bp, Homo sapiens
tcctttaaatacacgatgattggcaggggttacataggggatatcagtgcctgacaattcgccttccaggatatggattgtcattccctctctttgtgggccccagtctcctatacataaaagtagagactgtaatactcatttgactagcagatacctcaccccgaacccacctactataatgtaaaagccaagaatgcaaaccctttcctcaccccgtgaaggtaaagtcctcagagccaaggggagaaggctcagggatggtacctgggtgtttccaacagtaactatgcattgtagtttttagtgttcaagtttaagcttcttatgttaaagttacsccagctttaattctattgtaacaagatttatttttgtaattccatttttggattcttgatttcttggtaaagaaatacagttatttttgtataccaatcttatatagtgttacattcctaaatttgttcatgagtcctaacactttttagtaaatttcttatgattttctaaatgcaagatcatgtcatctgtacataaagataactgtacttcttcctttccaatctagatgccatttatttatttacattgccaagttgtccctgctaccactgttatcaagtaaaagggtctcactgc

SEQ ID NO: 92677 - DNA, 676 bp, Homo sapiens
agcaaaccaaaaccaaaattagtagaaggaaacataacaaagatcagagcagaaataaatgaaattgaaatttaaaaatataaaatatcaaagaaatgaaaagttaatatttttttaaaagatcaacaaaattaacaaacattttgccagactaagagaaaagagagaagactcaaatacataaaaccagagattaaaaaggagacactgcaactgatactgcagaaattcaagtaatcattagaaactattatgaccaactatattccaataaattgaaaaacctgcaagtaatggccaggcaccgtggctcatgcctgtaatcccaacactttgggaagccaaggcaggtgatcacctgagatcaggagttcaaaaccagccaggccaacatggtgaaaccccatctctactaaaaatacaaaaattagccaggcatggtggtgtgcacctgcactcccagctactacagaggctgaggcaggagaatcgcttgaacctgggaggcagaagttgcagtgagctgagattgtaccaagctccatcctgggtgacagagcaaractccatctcaaaaaaaaaaaaaaaaaaaaaacacaaccaaaccacaaacctagaagaactggataaatgagattgaacccataataaaacatctcctagcaaagaaaagcct

SEQ ID NO: 92678 - DNA, 818 bp, Homo sapiens
ggatccactctttgggttctttttaaaataagtgaggtgaaaaataaagtgcatgtatctttatttcctaagggtgytttagtataatggaattgatgggtaaagggcatacatattttttaattgtagtacttaccaccaaattatctatttgaaaagtaatcagcaacttaaactttaagcaggagtataaaacatcctcacaaatattgtggatagaaaactgtttcattcctcttttaatttaaattcttataccagaaatgcgaaggactttttcctatgtacacaagtaacttgcagatctggaaaagtgtactttgcccaattttagagtgtttgatgatttgatttgaaagaattccctgtcaaatgaaaatgtacttttcatctaatgtgtatatataactgatatatatgacatattatatctggtatatatgtatacgtatcagtaatatatatatatatatatatatatatatatatatatatataacttatgatatataataaacaacataggctgggcacggtggctcacacctttaatcccagcactttgggaggcggaggtgggcagatcacttgaggtcaggagttcgagaccagcctggccaacgtgatgaaaccccctctctactaaatatacaaaaattagccaggcacgctggcacctgcctataatccaagctacttggaaggctgaggtaggagaattgcttgaacccggcaggcagaggttgcagtgagccaagattgtgccattggacaccagcctgggcaaagaagcgagactccaactcaaaaaaaaaaaa

SEQ ID NO: 92679 - DNA, 818 bp, Homo sapiens
ggatccactctttgggttctttttaaaataagtgaggtgaaaaataaagtgcatgtatctttatttcctaagggtgttttagtrtaatggaattgatgggtaaagggcatacatattttttaattgtagtacttaccaccaaattatctatttgaaaagtaatcagcaacttaaactttaagcaggagtataaaacatcctcacaaatattgtggatagaaaactgtttcattcctcttttaatttaaattcttataccagaaatgcgaaggactttttcctatgtacacaagtaacttgcagatctggaaaagtgtactttgcccaattttagagtgtttgatgatttgatttgaaagaattccctgtcaaatgaaaatgtacttttcatctaatgtgtatatataactgatatatatgacatattatatctggtatatatgtatacgtatcagtaatatatatatatatatatatatatatatatatatatatataacttatgatatataataaacaacataggctgggcacggtggctcacacctttaatcccagcactttgggaggcggaggtgggcagatcacttgaggtcaggagttcgagaccagcctggccaacgtgatgaaaccccctctctactaaatatacaaaaattagccaggcacgctggcacctgcctataatccaagctacttggaaggctgaggtaggagaattgcttgaacccggcaggcagaggttgcagtgagccaagattgtgccattggacaccagcctgggcaaagaagcgagactccaactcaaaaaaaaaaaa

SEQ ID NO: 92680 - DNA, 818 bp, Homo sapiens
ggatccactctttgggttctttttaaaataagtgaggtgaaaaataaagtgcatgtatctttatttcctaagggtgttttagtataatggaattgatgggtaaagggcatacatattttttaattgtagtayttaccaccaaattatctatttgaaaagtaatcagcaacttaaactttaagcaggagtataaaacatcctcacaaatattgtggatagaaaactgtttcattcctcttttaatttaaattcttataccagaaatgcgaaggactttttcctatgtacacaagtaacttgcagatctggaaaagtgtactttgcccaattttagagtgtttgatgatttgatttgaaagaattccctgtcaaatgaaaatgtacttttcatctaatgtgtatatataactgatatatatgacatattatatctggtatatatgtatacgtatcagtaatatatatatatatatatatatatatatatatatatatataacttatgatatataataaacaacataggctgggcacggtggctcacacctttaatcccagcactttgggaggcggaggtgggcagatcacttgaggtcaggagttcgagaccagcctggccaacgtgatgaaaccccctctctactaaatatacaaaaattagccaggcacgctggcacctgcctataatccaagctacttggaaggctgaggtaggagaattgcttgaacccggcaggcagaggttgcagtgagccaagattgtgccattggacaccagcctgggcaaagaagcgagactccaactcaaaaaaaaaaaa

SEQ ID NO: 92681 - DNA, 1502 bp, Homo sapiens
gctgtcaaattcttattctcatccagttggggctggatgtggaacaattatgacaaggtggaatttcagatatccartatgacttaaggatagtgtggttcctcttggtaatgtttaagaggctatccaagaaaagagataataaggtcctgttctaaaacggacaaggccagtgcccaagggcatctaagaaagaagcagccaggaacatagccaatgtggggagaagaaactaggaaaagtgagttaggctcatagagataggctcatagaggtaagtctttagaaattccctaggaaaactgtaggtggtcatgagagattttttagaacattctaagttcatcttgtgtgagtgtgctaatgtcttttcatggaagtaaaactggatggaaatagttgacattaacacacaaatcaatcatctttttttttttttttgagacggagtcttgctctgtcgcccaggctggaatgcagtggcgcgatctcggctcactgcaagctccgcctcccgggtttgcgccattctcctgccttagcctcccaagtagctgggactacaggcactcgctatcacgtccggctaacacggggtttcaccgtgttagccaggatggtctcgacctcctgacctcgtgatccgcccgcctcggcctcccaaagtactgggattacaaatcaatcatcttttatattgccaaatctggttgggtccttacttcatctcagttactgggaaggagtattaattaattgcaagtgtaggattccctgcctccagaccaaggaacaaccaatcaggcattgtgtaaatatatttctaatcataccctgtagatatagaaagaattggcactccctggccaaaggattaaagggcttttctgatgctctcagctggcaactagcccagaattgccttgttctcatgtcctggtcttttttgcttggatttcttcaatattaggaatttctctgtcctggtgaaagagtgcagctttctcattgccttacccctgggtactgggacaaggtgtaggtggaaaagttctaaaatgcattaattctacaaacatttattgaccactgactgtgtgccaggcacccttttaaatgtttgtggtacaccactgagaaaacagaaaaagaatcctgcattcatggacctttacctagcagaagatagatagtaagcactaaaagcaatcaagaagtaaaaaatgtattttcttagaaggtcataattactatgggaaaaagcacaatagaggcacaagggagataagagatgttcaggagctggatggacagattgttgtattaagtaaactgaccaaggaggcctcaatgaggtgacatttgagaaaagtcttaaaggtgaaggagtgagtcatgaaaatcatttgctagaatcccaggcagaaggaatgaagtaaaggccctgaagtgggagtgagactggcaccttggcaatgagcagagtcagtgacggggagtaa

SEQ ID NO: 92682 - DNA, 1502 bp, Homo sapiens
gctgtcaaattcttattctcatccagttggggctggatgtggaacaattatgacaaggtggaatttcagatatccaatatgacttaaggatagtgtggttcctcttggtaatgtttaagaggctatccaagaaaagagataataaggtcctgttctaaaacggacaaggccagtgcccaagggcatctaagaaagaagcagccaggaacatagccaatgtggggagaagaaactaggaaaagtgagttaggctcatagagataggctcatagaggtaaktctttagaaattccctaggaaaactgtaggtggtcatgagagattttttagaacattctaagttcatcttgtgtgagtgtgctaatgtcttttcatggaagtaaaactggatggaaatagttgacattaacacacaaatcaatcatctttttttttttttttgagacggagtcttgctctgtcgcccaggctggaatgcagtggcgcgatctcggctcactgcaagctccgcctcccgggtttgcgccattctcctgccttagcctcccaagtagctgggactacaggcactcgctatcacgtccggctaacacggggtttcaccgtgttagccaggatggtctcgacctcctgacctcgtgatccgcccgcctcggcctcccaaagtactgggattacaaatcaatcatcttttatattgccaaatctggttgggtccttacttcatctcagttactgggaaggagtattaattaattgcaagtgtaggattccctgcctccagaccaaggaacaaccaatcaggcattgtgtaaatatatttctaatcataccctgtagatatagaaagaattggcactccctggccaaaggattaaagggcttttctgatgctctcagctggcaactagcccagaattgccttgttctcatgtcctggtcttttttgcttggatttcttcaatattaggaatttctctgtcctggtgaaagagtgcagctttctcattgccttacccctgggtactgggacaaggtgtaggtggaaaagttctaaaatgcattaattctacaaacatttattgaccactgactgtgtgccaggcacccttttaaatgtttgtggtacaccactgagaaaacagaaaaagaatcctgcattcatggacctttacctagcagaagatagatagtaagcactaaaagcaatcaagaagtaaaaaatgtattttcttagaaggtcataattactatgggaaaaagcacaatagaggcacaagggagataagagatgttcaggagctggatggacagattgttgtattaagtaaactgaccaaggaggcctcaatgaggtgacatttgagaaaagtcttaaaggtgaaggagtgagtcatgaaaatcatttgctagaatcccaggcagaaggaatgaagtaaaggccctgaagtgggagtgagactggcaccttggcaatgagcagagtcagtgacggggagtaa

SEQ ID NO: 92683 - DNA, 1502 bp, Homo sapiens
gctgtcaaattcttattctcatccagttggggctggatgtggaacaattatgacaaggtggaatttcagatatccaatatgacttaaggatagtgtggttcctcttggtaatgtttaagaggctatccaagaaaagagataataaggtcctgttctaaaacggacaaggccagtgcccaagggcatctaagaaagaagcagccaggaacatagccaatgtggggagaagaaactaggaaaagtgagttaggctcatagagataggctcatagaggtaagtctttagaaattccctaggaaaactgtaggtggtcatgagagattttttagaacattctaagttcatcttgtgtgagtgtgctaatgtcttttcatggaagtaaaactggatggaaatagttgacattaacacacaaatcaatcatctttttttttttttttgagacggagtcttgctctgtcgcccaggctggaatgcagtggcgcgatctcggctcactgcaagctccgcctcccgggtttgcgccattctcctgccttagcctcccaagtagctgggactacaggcactcgctatcacgtccggctaayacggggtttcaccgtgttagccaggatggtctcgacctcctgacctcgtgatccgcccgcctcggcctcccaaagtactgggattacaaatcaatcatcttttatattgccaaatctggttgggtccttacttcatctcagttactgggaaggagtattaattaattgcaagtgtaggattccctgcctccagaccaaggaacaaccaatcaggcattgtgtaaatatatttctaatcataccctgtagatatagaaagaattggcactccctggccaaaggattaaagggcttttctgatgctctcagctggcaactagcccagaattgccttgttctcatgtcctggtcttttttgcttggatttcttcaatattaggaatttctctgtcctggtgaaagagtgcagctttctcattgccttacccctgggtactgggacaaggtgtaggtggaaaagttctaaaatgcattaattctacaaacatttattgaccactgactgtgtgccaggcacccttttaaatgtttgtggtacaccactgagaaaacagaaaaagaatcctgcattcatggacctttacctagcagaagatagatagtaagcactaaaagcaatcaagaagtaaaaaatgtattttcttagaaggtcataattactatgggaaaaagcacaatagaggcacaagggagataagagatgttcaggagctggatggacagattgttgtattaagtaaactgaccaaggaggcctcaatgaggtgacatttgagaaaagtcttaaaggtgaaggagtgagtcatgaaaatcatttgctagaatcccaggcagaaggaatgaagtaaaggccctgaagtgggagtgagactggcaccttggcaatgagcagagtcagtgacggggagtaa

SEQ ID NO: 92684 - DNA, 725 bp, Homo sapiens
taatctattgacctctctgcaaattgtacacccaggtgtctgattgacttgacctatggcatagaatcaatgcatatgagggattaaaggttggaggacatctgacacctatcagggttttgattttagaatagttgacctaaagctatcctttctgtgcttctcaatagaaatgccagttatcttttgaagccgtatatactgatcaagtacagagaagaaactttattttttaaatcagtgacataaaagtcaaccaaaggtaatgtgaagtcattgggttatcacttaaaaagaggkaggacatcattagaacctaaagtgttgggacactgggctggctcctgactctgtcccttagagtgttttgtggagtagattctgagtaagcatagtaaccatgaaaccatattgagctcacagagttttccaaaaataataatgctggtaatagctaactgtgtgacaggcactcttcgaagatctttgcatgggtaatataatttattctgcacaccccatgaggtaggtgctattattatcatccctgtgttatagataaaggaactggagcccactctctttccacaaagtgtgcaaactctctatttccgtcagatttctctacaaggtgatcaaggacacttttccatgtggaaaagctggactacagttgactcactgtcctaagaagtcagatagaagactggatttataatttgggg

SEQ ID NO: 92685 - DNA, 922 bp, Homo sapiens
attttgatctcagaatctgtttcttggggggacctgaactatgacatctgtctttgtttatgatgtacttttctcaattttaaatcagtgaaagattactttctcattgtatgtaggatatctattaagtaaactattagtgcctaggtcttttttgttgcatctcattgctgtgtggaagaaacacatctcaaattgcattttgatgaaatgaccatgagaatgctttgattttacctggtgggtttgtgtttgtatgcacacacacatacacacacacacaatgacaaagacattgatgcagactcatatagatatctaygtgtttataaaaaatcaataattttatatagcttcatagatatatgatataaatatggaaaaatatagacctaaaataatattttatatacatcatcatataaatgtaaatacagacaaaatataggcgtatgggcaaaacatagccatagccatagacatggattgttgttgttattgttctcttaggcctccatctagatcatgttttcaaccagcactttttttttcttcattgctggttcttcacctttattaggaggacaggtagagtgaaactattcaaatatgacttaaatcaactgccaggatacctcagggaaggttataattatatgctgctgatgtgctatgaaaagctgccaagccgtgagtacatctgtctttctgagccctttgtcacttagcttgctttgtgtagaggtgagtgtgataggaagctgggtgacagctttagaatgttttgaatttctctgtatgagtacggtctaggagccactcactcaggtgttttgcattaagataacacctaacaaccagagattctgggacatgtgaataaatgttggactttcacttgggtaaactctttcatttttta

SEQ ID NO: 92686 - DNA, 922 bp, Homo sapiens
attttgatctcagaatctgtttcttggggggacctgaactatgacatctgtctttgtttatgatgtacttttctcaattttaaatcagtgaaagattactttctcattgtatgtaggatatctattaagtaaactattagtgcctaggtcttttttgttgcatctcattgctgtgtggaagaaacacatctcaaattgcattttgatgaaatgaccatgagaatgctttgattttacctggtgggtttgtgtttgtatgcacacacacatacacacacacacaatgacaaagacattgatgcagactcatatagatatctacgtgtttataaaaaatcaataattttatatagcttcatagatatatgatataaatatggaaaaatatagacctaaaataatattttatatacatcatcatataaatgtaaatacagwcaaaatataggcgtatgggcaaaacatagccatagccatagacatggattgttgttgttattgttctcttaggcctccatctagatcatgttttcaaccagcactttttttttcttcattgctggttcttcacctttattaggaggacaggtagagtgaaactattcaaatatgacttaaatcaactgccaggatacctcagggaaggttataattatatgctgctgatgtgctatgaaaagctgccaagccgtgagtacatctgtctttctgagccctttgtcacttagcttgctttgtgtagaggtgagtgtgataggaagctgggtgacagctttagaatgttttgaatttctctgtatgagtacggtctaggagccactcactcaggtgttttgcattaagataacacctaacaaccagagattctgggacatgtgaataaatgttggactttcacttgggtaaactctttcatttttta

SEQ ID NO: 92687 - DNA, 922 bp, Homo sapiens
attttgatctcagaatctgtttcttggggggacctgaactatgacatctgtctttgtttatgatgtacttttctcaattttaaatcagtgaaagattactttctcattgtatgtaggatatctattaagtaaactattagtgcctaggtcttttttgttgcatctcattgctgtgtggaagaaacacatctcaaattgcattttgatgaaatgaccatgagaatgctttgattttacctggtgggtttgtgtttgtatgcacacacacatacacacacacacaatgacaaagacattgatgcagactcatatagatatctacgtgtttataaaaaatcaataattttatatagcttcatagatatatgatataaatatggaaaaatatagacctaaaataatattttatatacatcatcatataaatgtaaatacagacaaaatataggcgtatgggcaaaacatagccatagccatagacatggattgttgttgttattgttctcttaggcctccatctagatcatgttttcaaccagcactttktttttcttcattgctggttcttcacctttattaggaggacaggtagagtgaaactattcaaatatgacttaaatcaactgccaggatacctcagggaaggttataattatatgctgctgatgtgctatgaaaagctgccaagccgtgagtacatctgtctttctgagccctttgtcacttagcttgctttgtgtagaggtgagtgtgataggaagctgggtgacagctttagaatgttttgaatttctctgtatgagtacggtctaggagccactcactcaggtgttttgcattaagataacacctaacaaccagagattctgggacatgtgaataaatgttggactttcacttgggtaaactctttcatttttta

SEQ ID NO: 92688 - DNA, 1436 bp, Homo sapiens
tcaagagtgcacagcctcaggaagagggtctctataggggtaagaatcagatggaggaggcatagattcttacagggaaaacactataaaacaagttcatccaacctgaggcccaggacggctttgaatgcggcccagcacaaattcataaacttgcttaaaatatyatgaggtgttttttttgcaattttttttttttttagttcatcagctgttgttagtgtattttatgtgtgacccaagacaattcttcttccagtgtggcccggggaagccgaaagattggacacccttgctataaaaggacagggactggagtctttcattcttaccagaagtttaagtaacaggaaaaaaagggcctggtcaaaattgcctatctttgcagttttaagctcagatcagctaaggttttcccattagtatcagaaacgtgattaagttagcagtctttgttaggatttaaattatgtatttctgagagatttttattaaattttcattgaaatatccaaatgggttgtgaatatcaagttgtcatgcaccttctggttcagtttaatctagaggaaatgtgaatttgattatatagaaatgaaaacagtttaatgcttaagtggttagatatccattacatattcttcctattccctcagttttccttgactcggtcactagatgtattatgttctgtaatcttggtcttctgcttaattcctgtcatgggtgctgaaacacattgatactttatatacatttcataataactaaaaacataggaatttttttttcattggctgcttttttaaaaaaatagttacacaaatgggattgtcttattctgtgagtactaaactgatcttctttgccttgagttcctgactactcttcttgaattgttactgtctttattaaacaaacaaacgatgtattcttgtgatcccacataacaggcccactcctcactccctaatccccagagttgtaatggcatctcactcgactcagtggactctgttgttctcttaggtcttaagtgtgctctgtcttttgctgtaggtgtttatgtaccgtcagtgttcaccataagcagttggagggcggggtacattgtagattaaggatattccagatttcaaacaagttgttcacttagtgaagcagcctgtcctaaattacttcctccccaaatcactttttctcaatatccctcatctgtgtttatcacactccttcgaaagccaccattctctggctccatgagtagccatttgactcctttagtcctatatctaatggtaacatttcactttgctttggaatttgccttttctcaactctaatttagatttttttctttgaatttcagtccattgtccaaaggatttctgcccttttcctatgtactcttttcctcagagagagattatttatga

SEQ ID NO: 92689 - DNA, 691 bp, Homo sapiens
agtgaagttaaaccactcgctaagcccactcaactgtactagaactcaagctccagactcttcgccgatacccatttcccttcaaatgtggaataatgccaagccacaacgcyaactcagttacaagcataaataagcttctattggtaataattaacttttcaatgcaataaagaaaacatatcgtctgtttctcctcagacaactgttaatcagcaagaactttttcgttttgctcttttattctcttattagttctgtcaatctctgacaactagaacaaatgtaagacttattctttttttttaagcagcatcttaaagccatacatactatttcttaatttagaggaaaaaaaatgcattttcttaggtttggtttttgtcaatattactgtttggtataggtgctaggacaaaagaaaatgtttattttctctcaaaccaagaaaacctcaaatgtttttccagttcaaactaaatgattttgttttataggaaactgtattttaatttttcgctaaatgaacttcaaacaactgagaaaaggaagtcatattcttgtagtctggatcacttaatagttcagaccatggaatacagctcctcttcttgcctatacaaacacaccggctctggctgaggtcacctctctctacctacctacctacccagtttctgttactccttgg

SEQ ID NO: 92690 - DNA, 363 bp, Homo sapiens
tcccttgagcccagaagttcaagaccagcctgggtaacatagtgggaacccatctaaaaaaaaaaaaaaaaaaaaaaaaaaaagcgcttctgtgacagtggcgagattggcagggatggggatgaggattttccatgtcagccccagtccagactagaaccaaacaaatctcctggttaattaatgagcctgctacatacaagtttatgggaagatgagccctgactagaatgtgagccttgcyctggagggttctagctttagtctgttgactgtgtccgctgaagacaagtccctgctctgggaacatagttttcccttagctaatctttcatcatcatcactgcatccatgagacaggcc

SEQ ID NO: 92691 - DNA, 777 bp, Homo sapiens
tctcaatgctatggaggctctgctttctctgttcatccatcaccttttgccaggatgaaataaataatacatggaatgaaataaattgtgacttttagttttttctgacatctatgtatgttttaatttttctctgtatctctctgtattcttgttagaaagagtgtataggagacttggatgcgaactgccattattgggctcacaccaaaggacgactgcgggaggccagttatggcaccctaaaatatacatttgaagcttatttacagcacattatattgagaaactacagacacaggagtagctctgaaaagctgtcctttcacaaagagaatgaacttgtgtaaagaaaatctaggtaagtaaccgtatctgtatcagaaagaagkttgctccagacaacttttattaccggatagactttttatctgtataacaagattaactttattccccatacatttcctctccttcttgaccccataacttgtctccactctgacccctcagaagcccaaatccccttttccttcctgcaacttaggatactacataagcttcaatcatctggttgttctttgagtctcatattctgtgggactatcaggggtacttaggaaattaattgtgggttttctcctgttgatctgtcttatgtcaatttaatttgtagatcagccaaagaacctaggaggttggaggaaagaaatttttctcttgcctacaccatcatcctctagaattgattccactcacgaagactgaaatggatcc

SEQ ID NO: 92692 - DNA, 1261 bp, Homo sapiens
tattatagaagagattcacattcatggtacccttctatgaattgatgaaacaaaaagcgggagcagaggagggaagaagcaatggaaatagaccacggcattcatttgtagtgcctcagcagctaactctgtctcttgctcactgagtctccatgggcaagttgggctgggttgtctcactagcttctcactaaaataagtgccaagagagcagagactttacctatttcatatcatgtgcccagggcctgacacartgtgggtccctcataagcaatccatgccagcggtaaccccacctctgtttctctctttcagaaatcatattgggatcattcagaaatcataatgatgttattatagggataccctgccttccactctgacttacaaaataaaggctgtaacccatacttcagtatttaacaattatcagtaatcaacaatgatcatgacacagctcatatctgattggcacacatgcagctaggtcctccaggttgagaacttctgatcagatcaacggccaccggcatgatctagacagtatgtacgctagagggccaggaagaggagcaatctgtgtggacgagagttaacaagtaatgcttcctggaggaggaggagcttgagttgcctgttgagtaggacgaacatatgtcctggtttgcctgggccggcctctatgttggtatttctggtataattattttatagtttcatttatttgaaacagagtcttactctgtcacccaggctggagtgcagtggcatgatcttgactcaccgcaatctctgcttcccaggtccaagcgattcctgtgcctcattctccccagtagttgggactacatgtgtgcaccatcacacctggctaattttttgtatttttggtagagatggggtttcactgtgttggccaggctggtctcaaactcctgacctcaggtgatccacctgccttggcctcccaaagtgctgggaatacagttgtgagccaccgtgtctggcctgatataattattatctgtactccttttaactctcaaatttattattgcttggaagataaattgtatggttattccaccatgatgaatgtgtgcaaattgacttggcagaggggagggctctacttctccttccctgaggacatggaagcctctcactccttcctctccccttcacacagttttgtctcttgattccaccttttctgctgaccttccttgtcttccatgctgaactctctgcttaggcc

SEQ ID NO: 92693 - DNA, 1261 bp, Homo sapiens
tattatagaagagattcacattcatggtacccttctatgaattgatgaaacaaaaagcgggagcagaggagggaagaagcaatggaaatagaccacggcattcatttgtagtgcctcagcagctaactctgtctcttgctcactgagtctccatgggcaagttgggctgggttgtctcactagcttctcactaaaataagtgccaagagagcagagactttacctatttcatatcatgtgcccagggcctgacacaatgtgggtccctcataagcaatccatgccagcggtaaccccacctctgtttctctctttcagaaatcatattgggatcattcagaaatcataatgatgttattatagggataccctgccttccactctgacttacaaaataaaggctgtaacccatacttcagtatttaacaattatcagtaatcaacaatgatcatgacacagctcatatctgattggcacacatgcagctaggtcctccaggttgagaacttctgatcagatcaacggccaccggcatgatctagacagtatgtaygctagagggccaggaagaggagcaatctgtgtggacgagagttaacaagtaatgcttcctggaggaggaggagcttgagttgcctgttgagtaggacgaacatatgtcctggtttgcctgggccggcctctatgttggtatttctggtataattattttatagtttcatttatttgaaacagagtcttactctgtcacccaggctggagtgcagtggcatgatcttgactcaccgcaatctctgcttcccaggtccaagcgattcctgtgcctcattctccccagtagttgggactacatgtgtgcaccatcacacctggctaattttttgtatttttggtagagatggggtttcactgtgttggccaggctggtctcaaactcctgacctcaggtgatccacctgccttggcctcccaaagtgctgggaatacagttgtgagccaccgtgtctggcctgatataattattatctgtactccttttaactctcaaatttattattgcttggaagataaattgtatggttattccaccatgatgaatgtgtgcaaattgacttggcagaggggagggctctacttctccttccctgaggacatggaagcctctcactccttcctctccccttcacacagttttgtctcttgattccaccttttctgctgaccttccttgtcttccatgctgaactctctgcttaggcc

SEQ ID NO: 92694 - DNA, 1261 bp, Homo sapiens
tattatagaagagattcacattcatggtacccttctatgaattgatgaaacaaaaagcgggagcagaggagggaagaagcaatggaaatagaccacggcattcatttgtagtgcctcagcagctaactctgtctcttgctcactgagtctccatgggcaagttgggctgggttgtctcactagcttctcactaaaataagtgccaagagagcagagactttacctatttcatatcatgtgcccagggcctgacacaatgtgggtccctcataagcaatccatgccagcggtaaccccacctctgtttctctctttcagaaatcatattgggatcattcagaaatcataatgatgttattatagggataccctgccttccactctgacttacaaaataaaggctgtaacccatacttcagtatttaacaattatcagtaatcaacaatgatcatgacacagctcatatctgattggcacacatgcagctaggtcctccaggttgagaacttctgatcagatcaacggccaccggcatgatctagacagtatgtacgctagagggccaggaagaggagcaatctgtgtggacgagagttaacaagtaatgcttcctggaggaggaggagcttgagttgcctgttgagtasgacgaacatatgtcctggtttgcctgggccggcctctatgttggtatttctggtataattattttatagtttcatttatttgaaacagagtcttactctgtcacccaggctggagtgcagtggcatgatcttgactcaccgcaatctctgcttcccaggtccaagcgattcctgtgcctcattctccccagtagttgggactacatgtgtgcaccatcacacctggctaattttttgtatttttggtagagatggggtttcactgtgttggccaggctggtctcaaactcctgacctcaggtgatccacctgccttggcctcccaaagtgctgggaatacagttgtgagccaccgtgtctggcctgatataattattatctgtactccttttaactctcaaatttattattgcttggaagataaattgtatggttattccaccatgatgaatgtgtgcaaattgacttggcagaggggagggctctacttctccttccctgaggacatggaagcctctcactccttcctctccccttcacacagttttgtctcttgattccaccttttctgctgaccttccttgtcttccatgctgaactctctgcttaggcc

SEQ ID NO: 92695 - DNA, 750 bp, Homo sapiens
aatattctaaattccaatcctgcaactccccacaaattaatcagaacaaatgaacttgaattatatgttaaaggtgacatacttggctctctataaggctgcagactatatcaggaagtgtgttcttcctcaatagttgatttcgtcacaattaaaatgaactgaagaacattcagatctccatatttaacactcagggtccaaaggccacttcaatatatacctagcaaatcagtamtttgaaaatacaatgctctgaggctatatacagatgacttgcttgcattttttaagactctgggcagatttttcactgacaaaaaattgaactcaacatccaagattgaatggttttatcagcatgaaaagcaggctattgggaataggtactctgactgcaaacacttcacacttctctcatttatgttgtctaagtatcatctctacttccctttccaactacttatacacacattcatctgttcctactgcagggtttcccaagagccatgactggaagaggctgggggagagaacttggggtggaggtggggtgctcttcactcttctttgacccttagctttatttaaacaaagcttagggcttcacacacatatgtattccctcccaggacctggtggaggccttacacaacaaaggtctgaataaatacttgtgttgaatttatttaaagccttggagctaattgtatatgtgtgtatgtacgtacacacacacacacacacaca

SEQ ID NO: 92696 - DNA, 750 bp, Homo sapiens
aatattctaaattccaatcctgcaactccccacaaattaatcagaacaaatgaacttgaattatatgttaaaggtgacatacttggctctctataaggctgcagactatatcaggaagtgtgttcttcctcaatagttgatttcgtcacaattaaaatgaactgaagaacattcagatctccatatttaacactcagggtccaaaggccacttcaatatatacctagcaaatcagtaawttgaaaatacaatgctctgaggctatatacagatgacttgcttgcattttttaagactctgggcagatttttcactgacaaaaaattgaactcaacatccaagattgaatggttttatcagcatgaaaagcaggctattgggaataggtactctgactgcaaacacttcacacttctctcatttatgttgtctaagtatcatctctacttccctttccaactacttatacacacattcatctgttcctactgcagggtttcccaagagccatgactggaagaggctgggggagagaacttggggtggaggtggggtgctcttcactcttctttgacccttagctttatttaaacaaagcttagggcttcacacacatatgtattccctcccaggacctggtggaggccttacacaacaaaggtctgaataaatacttgtgttgaatttatttaaagccttggagctaattgtatatgtgtgtatgtacgtacacacacacacacacacaca

SEQ ID NO: 92697 - DNA, 740 bp, Homo sapiens
cctcctcccctgttttattcacacacagctgtccacctcctgaaagctgccttccttcagggacacacagcagctgatccatcatctacagtgagaaaaggagcagygacatgtagggccaccccagggatgttactgctaggaaatcagttgccaaatgcaaatgtcccagtatgagataagggtgggaggtagctgtggaatgagggaagaaaatccatcaaacctggatttaaaacaaaaaagacctggcttctggtcctggacatgctattcactgcctgtgtcacctctctgagcctcagtctcctttgctgtaaagataatatctgcctcaatgagcagctgtagacacgtacccacatacccaaagaggtggcattcgtagctgtggttaaaaaaatcaaaacagaaacaatatcagtatttaccagaaagtaagatggctaaataaataatgaggtattcattccatgggcatgcagtcattgaaaggagtgaggtagatctgaatgttttattatggaaccatctccaagacatattatgattttaaaaaaagcttgaagtagaaaattacatatagtttgatatccttagtgttaaaggatctacacagcaatagtgtactttttaaaatagttttacctgagcataaatgaatagaaacaagtgctggacacacacagtgctaacaggggttaatcctgtggagggagcagggaactggaaccagatgt

SEQ ID NO: 92698 - DNA, 740 bp, Homo sapiens
cctcctcccctgttttattcacacacagctgtccacctcctgaaagctgccttccttcagggacacacagcagctgatccatcatctacagtgagaaaaggagcagcgacatgtagggccaccccagggatgttactgctaggaaatcagttgccaaatgcaaatgtcccagtatgagataagggtgggaggtagctgtggaatgagggaagaaaatccatcaaacctggatttraaacaaaaaagacctggcttctggtcctggacatgctattcactgcctgtgtcacctctctgagcctcagtctcctttgctgtaaagataatatctgcctcaatgagcagctgtagacacgtacccacatacccaaagaggtggcattcgtagctgtggttaaaaaaatcaaaacagaaacaatatcagtatttaccagaaagtaagatggctaaataaataatgaggtattcattccatgggcatgcagtcattgaaaggagtgaggtagatctgaatgttttattatggaaccatctccaagacatattatgattttaaaaaaagcttgaagtagaaaattacatatagtttgatatccttagtgttaaaggatctacacagcaatagtgtactttttaaaatagttttacctgagcataaatgaatagaaacaagtgctggacacacacagtgctaacaggggttaatcctgtggagggagcagggaactggaaccagatgt

SEQ ID NO: 92699 - DNA, 605 bp, Homo sapiens
  misc_feature (1)...(605): n = A,T,C or G
atttcaccttttctcccaagcttctagacaacagtcataccttagggcccacagncttcaaaggtagccaattaaaatccggtaagcagaagagtctggcttcttagtcaaataatgaatcagcatctcaaagatgagtgggagaggtgatctcccatgctacttctcagttgggcagtgaattgtaggtaataagcacatggctcccaagcaggctkattgctaaaccccttctgctgctcacaaactctaggaccttggacaaaggtacttaacaactttgtgcctccatttcttcatctgtaaaatggaattaaagctgtattctcaccccaaattaaatgtggcacacttagaagagtgttgctaactgtactattgtttgcaaaggtgcatataatcaagaaagaagaaactggcagatgctctggataatgtgaagaacaaacacacccaatggactaacttttaacaatgctcaaattctggggtatcagtgtgcacatttctcacatgacagtcataaagcaggctggcttttataatgcctgcgatttaggctagggatgatagaatcattctttaattaacctgctgctaccaga

SEQ ID NO: 92700 - DNA, 730 bp, Homo sapiens
tcccaattcctgggctgcactgcaggcatgaggcccttgggggtctccccggcagcctaggccatccacctctccactcacgccccagaattagaggtggtcagtctgctaattttaccacttcttttcagttcacctgtcaaattctaccaacaccccctcagcttctgacagtctctccattgggctctatagatacaatagctcatgttaaattcatcagcttacttttacatataactcaaaatcagtaggctcccagctgagggcttggagatgggtcagccctttcctctggattagagcgcatgggctcccagcagctcagcttctctccctgcttcctcttccctgtagatgactgtgttcttgggggttgaggcaatctattcactagtttgaatggtggggtctactgtacctcaaggtttactgagctgacttaggaatttatccatgtgtttgtaaaagagcaaggaaaaggactccagaaactccaacccatgtccytgtttcactcttaacccatgtatctctctgaagttctcctcaaacaaaggggaaggctgctcctccagtgaccctaggaggtcccagcctggcccctcagtggttgccacagctgatgcatgacctgactgccagcagccatgcaaagagactgcactgatccaaataccacaggcttgtccttgatcccaaggaatactgaaagggtcagattttgggg

SEQ ID NO: 92701 - DNA, 730 bp, Homo sapiens
tcccaattcctgggctgcactgcaggcatgaggcccttgggggtctccccggcagcctaggccatccacctctccactcacgccccagaattagaggtggtcagtctgctaattttaccacttcttttcagttcacctgtcaaattctaccaacaccccctcagcttctgacagtctctccattgggctctatagatacaatagctcatgttaaattcatcagcttacttttacatataactcaaaatcagtaggctcccagctgagggcttggagatgggtcagccctttcctctggattagagcgcatgggctcccagcagctcagcttctctccctgcttcctcttccctgtagatgactgtgttcttgggggttgaggcaatctattcactagtttgaatggtggggtctactgtacctcaaggtttactgagctgacttaggaatttatccatgtgtttgtaaaagagcaaggaaaaggactccagaaactccaacccatgtccctgtttcactcttaacccatgtatctctctgaagttctcctcaaacaaaggggaaggctgctcctccagtgaccctargaggtcccagcctggcccctcagtggttgccacagctgatgcatgacctgactgccagcagccatgcaaagagactgcactgatccaaataccacaggcttgtccttgatcccaaggaatactgaaagggtcagattttgggg

SEQ ID NO: 92702 - DNA, 713 bp, Homo sapiens
atagaggttggtgtaagagcagatggtgagggttagttttctagaaaggagcagtgcagactcttagggttccatggctgtccaagagaccagacaggaagagaatctcatgtatgtaaagaggctcagtgagtgatggctcaacctgaggcagaggaacatgaagaacagggaggtcagcgtccctccctgtgayttggccacgtaagtggcaaatgtgactgtggccacggatctgagggaggtatcgtcctccctgcccaggtcacctgcactctgcagcctgacagcaggcaagcatggggagacagggacagggaaggcttccaagcggttgttaccaaaagggaggtggtttcatctttttccccaaatctttctattttgtttctgggactgctacccttttccatctgtgccatccttacagtttcatcttaattctggtgattcccaaaagtatatttgcagtctagcaagcactctgaatttcccaacatctaccagacatttctgcttatacgtattgctgttccatcaagcactacatatgcacaacagaactcttcattctctttcccccatagaagcagtttcctcttccatacccattttctcatcttggtcaacagagctatgagtcctccattccttcaggctagaatcctgggaacccaattttgaattcatgtttcctcttcaccttaaaccta

SEQ ID NO: 92703 - DNA, 786 bp, Homo sapiens
  misc_feature (1)...(786): n = A,T,C or G
tnnnnnnnnnnnnnnnnnnnnnnnnnnnnnnnnnnnnnnnnnnnnnnnnnnnnnnnnnnnnnnnnnnnnnnnnnnnnnnnnnnnnnnnnnnnnnnnnnnnnttttgtttttaacctgaatgacatattaccaatcagcagatgtaggccatccagggaagtttcttttaaatgctggacttttgcaaaaatgtagagccttggtggcaattgtgattcttttttttttcttttcttttccccaatgaaggtacttttttttatgtccagttttggaaggctcctgaagattgtttgagaacttgactgctgtgtcagggcagtgctgacactctctgttgccaactgttttttattattccaaaaaatcagagaagcaaaaacgacccctccaaacaactccaagacaaactccaagcaaaacaacaacayacacacaaacccacaattttcctttggttgcttctgagaaggagttttaatggtatagtaaatacagcatttatcggatgatttttgctgccattgatatgtttctcttcttgaaagaggaattcaaatgacaatgaacatttttggggtcctcttttatggagtttgattttcaggggattgtcaggcatgtcgtctccgggttcccatgctgcacagtcccagcactctctgtggctcagccttcccgtcccttgccctctgaataccttgccgttgactgaatggtcatcgttagcacaggtcatcacaatacatgactcctgggcaggaggaacagaggagcggaggttgt

SEQ ID NO: 92704 - DNA, 2420 bp, Homo sapiens
tttgtttaggaagaaaaatgaaaacagataaaaggtgttcatttcaaagcttccctctttcccagcatttttctgaagtagagtttgaaaagaaagcaaaataactgcaaaccaatacagcggcacggagttcactgacgcagagctagaaatgacgttcagagatccgccagcccagcctcctgttctgggtcacctggctccttgacaaccctgaaagctgcctgtgcaaatccccaggcatgttatacccatgagcagggacgcgtggcactgacaaagggactcgtacacctttgaagtatcctgggagaccacgctcatattccacacacgctcaggagtcattgaagagccacaccggaaatacgtggcacggtctcattccatgtttgaccaaaaccactgtttacccagctcagccaatcactttattttgttaaccaaacctaatgcagaatgatgttcaggtgtttccaaggatcaaatccactcccactgggagaagcttccttcaagagcagcttctgtagcccatggagccaggagtcaggagaccctataagttctggctccatttcttactatggataggacctagggtgaatcactttcctgctctgagatgtgcctttcttaggtgtaagggttataagtgctctgcagatcacattaaataattgtgtgaacatgctctaaacactctaaacacacattagcatgtgttctgaaaatagataactgtgatgttatgtgcgcctaaagagggcaactaaaaatagaggcatggccccactgcttgaatgcctgctatcctcatgacccgcttgtgtcaatggactgcagcaaagccaccacagaggcagctctgaacctctgccttgggatccagctgccatgtaagaaactcaggctaaaccaccaagtgctgggaggccatgaagagttgacccagaacgaagagaaggcaccctgaagtccagcccagtccagcttccagctgagttgaacaagacacctcatgtaagagcagcagaaaccacccagctgagccccacaaacccacagaatcacgagaaataataaattatggctttttaaaccaataagttttgaaatacttgttatacagcagcagataacttaaacaatgactctaaaataaaagttctaaaacaatctccattgcagacaaactctgtacctttttcatgggaggttctgaataggacaatcatcattctattgtataacgactcctttggtgtatgtggatgaaccaatcagtattgttgttttactggtcggaagaaggaaggaaagaaaagaaggaaggaaagtacccactgggcactgggattgctcagatctaccaacttaagtcacttttcccagtcctcatcccaagctccacaaacatttgactccttacaaatgcaaactaagatttttgctatcgtctattttttattaatattatgctttgctcatatgggcattcactgaaatagttactcagcttactatagaagagaatggagaatagtcctggagatttgaactaagcctgttaactccaaagaagccaaagacttctcatgccagatgccatttctccttgctctccccagagccgccatcacactccgcctgtattacaacctggcttagaatgggtctgctgcttggttctgtcatcctcagacttcccaagtacctgctgttcttctgcacttggccacccaccttgtgttctccacccatcttgagcggtcagctcctgacaccatctgccatgcacagtcctgctgatgagatgctaaggaaattatatgtgtgtgatagaatgtcaggatgctggtcaagctctagttgcccagacaggagcaagatggagctggttcacagtgagcagaacaaggtgagtaacaagagggaaggatggctgctaataagaaacaccctaaggagactgagtttggaggcaggctgccctctcactgctttgtacattttaggatgtataaaaaagtgccagctgtctaaacagaggagttactatttccaggtatagaaattccccaggagatagtcttttttgatgacgatccttattcttaaaattttgctccctccatccatacctgggtccacactacatcacagataagagaccaaaaagatccaagattagaaacactttgtaatcagcatcatagatgtgaattttggggacagaattagtcacaaatggtaagtggaacctgacactgcatttcagatgtggtaaaaaggccagacatttatatcagraagagttgatcttctctagagagttcattaagaacaaccgggtagcctcaagtagaagtgagatttggtgagtgtcaccatacactgcttcatctctccagagctgt

SEQ ID NO: 92705 - DNA, 662 bp, Homo sapiens
ctttctctacccagcacttccctgccyccctcctgtataatttcccctctgaagaggtacgttgaagaaataaaaattgacttcattcggaagctgggggcagaggaaaacatggcagagaatggctgggctattactgttaggggaacaggagcatagaagagccagggtgacatgattttaaaaatcaactccatcttgaaactaacaaggcacattccttgccggtcacggcccactggctaaatcataggaatactgccgttagaatatggttgatgaccagtcttgctgcttcctgctgacaaggggtgttgttttggagaaaatggcagtcagagtcctcccagaggtctatttaagggttcctagcaaaggggagctatcatctgaggctccagttgcctgaccatttggagtttgatggcttctaggcatgagagaaaaaaacaagttttataaggtcaagtatgcataagttaaacatgtgtattatacaaggaaagaatttagtgccaacagagataagtgaaatatactaacaacaacattgtactccaagctgtttcaccctggtgaaagaaattaaaccttgtacgggggcagataaactttagaagagagagaactgttcttgccatatctttagaagttaacaggtg

SEQ ID NO: 92706 - DNA, 662 bp, Homo sapiens
ctttctctacccagcacttccctgcccccctcctgtataatttcccctctgaagaggtacgttgaagaaataaaaattgacttcattcggaagctgggggcagaggaaaacatggcagagaatggctgggctattactgttaggggaacaggagcatagaagagccagggtgacatsattttaaaaatcaactccatcttgaaactaacaaggcacattccttgccggtcacggcccactggctaaatcataggaatactgccgttagaatatggttgatgaccagtcttgctgcttcctgctgacaaggggtgttgttttggagaaaatggcagtcagagtcctcccagaggtctatttaagggttcctagcaaaggggagctatcatctgaggctccagttgcctgaccatttggagtttgatggcttctaggcatgagagaaaaaaacaagttttataaggtcaagtatgcataagttaaacatgtgtattatacaaggaaagaatttagtgccaacagagataagtgaaatatactaacaacaacattgtactccaagctgtttcaccctggtgaaagaaattaaaccttgtacgggggcagataaactttagaagagagagaactgttcttgccatatctttagaagttaacaggtg

SEQ ID NO: 92707 - DNA, 662 bp, Homo sapiens
ctttctctacccagcacttccctgcccccctcctgtataatttcccctctgaagaggtacgttgaagaaataaaaattgacttcattcggaagctgggggcagaggaaaacatggcagagaatggctgggctattactgttaggggaacaggagcatagaagagccagggtgacatgattttaaaaatcaactccatcttgaaactaacaaggcacattccttgccggtcayggcccactggctaaatcataggaatactgccgttagaatatggttgatgaccagtcttgctgcttcctgctgacaaggggtgttgttttggagaaaatggcagtcagagtcctcccagaggtctatttaagggttcctagcaaaggggagctatcatctgaggctccagttgcctgaccatttggagtttgatggcttctaggcatgagagaaaaaaacaagttttataaggtcaagtatgcataagttaaacatgtgtattatacaaggaaagaatttagtgccaacagagataagtgaaatatactaacaacaacattgtactccaagctgtttcaccctggtgaaagaaattaaaccttgtacgggggcagataaactttagaagagagagaactgttcttgccatatctttagaagttaacaggtg

SEQ ID NO: 92708 - DNA, 1009 bp, Homo sapiens
gccctttgaaaacaaaggattcaaatgatataaatgagtgcttgttttttatccaagtaatgaatttagaaaagtctaaaaacaataaaaacacagaatatgacaactttttttcatcattagctttaatggagttgtaaatggatacaattatgtttcctaaacaaaaaattattttagaagtgtatctttttaatagaaggaagtatggtaaagtgggcgtcaagttagcttaacaaagacaacaataaatcattagaaaattcagaagttcagattttggcagtttgggatcaacagtttcatatgaccagagatttttatactcagtttccttctgagaaaactatccaagtgtttattaatgacccatatcattctgtagaaagtggataactttttctaatcatttgctttgaggcatatgtttagatttcttgatacttattatacttgaaaatataacccaagataatttaaaatgttttgtttcctaactcttcagctactacaaaactgttacatcctatgcaatcaattatcttcaccacaataaaaaacattctgcatatataaatagatttataggccaggcgccgtggctcaagcctgtaatcccagcactttgggaggccaagggcggtggatcacctgaggtcaggagttcgagaccagcctgacaaacatggtgaaactctgtctctaccaaaaatactaaaattagccagttgtggtggtgggcacctgtaatcccatctactcgggaggctgaagcaggagaatcgcttgaacccagcaggtggaggttgcagtaagccgatatcacaccactgcactccagcctgggtgacagagcgagacactgtctcaaaaaaattaagaaataaaaataaatttatgaaatgaaaacaaatttaaattgatacaaataacagcacagtgctgcagtagacatattagaayagtttattctttaaagcaaagtacatacaggaagaagaaaattaaa

SEQ ID NO: 92709 - DNA, 1158 bp, Homo sapiens
tggctttccaaggttgtatagctggtaaatagagaaagcagcagatgagcagagttctctggacttcagttttgtttattttttactctgacacattatagtgcttctcaaagccacgagtgcatcatgagccagacttgcctggcatttaggccctccgagaagctctagccatggcactgcctggtcccattgggtgtgaggggctgagtcccctgattctgagggaggctgtgcagctctgcagagggtctggaacagaactgctgtcccctyaccagggccccctagtccccactgatgaccagtcagacttgtgtgaaatttcagattaagcccatcccaagggctcaaaacatatttgattctgtaggcctgtcagagttgccagatttggcaaataaaaacataggattcttagttagatctaaatttcaggtaagcaacaaatattttattaaataaaagtatgtctcaaatattacatggaacatatttagaataaaccacaattcgcagtttatctgaagttcatatttacctgggaatcctgtctgtaagctggctgccttcctggtggcatgttccaggagactggatttttaaaatagattcctcagttgatttctctcatcaaccatgttggaaacaattgctaatgccaatcagtaatccactagatgccatttttgctcaagttattaactggcaagtttatacatttttatttaatttacggatctggagtccttgtcattcattaacagtgtctctcactggcacaggagactggagaaatcaccatttttccagggtttataatttatagaggaaattcctgatagacagagatggggtgagctagccttgaagacaggcaaaagaacttcctgccaactgccctgtgtgctctgctcctgcaggaaggttactgggcttgtcagccattagaagggggcaatatcagagaatgacggggtgatcctgtgttttctcttggggtgggtgggtagataatggccccaacaaccagaactggggacacaaagaagtgtctttaggtaagaaagacacagtgagatggttttggagatgttcatatctcctttgtgcatgcaggtggaggcatttaccaggcaggccagtgctgggtctgca

SEQ ID NO: 92710 - DNA, 761 bp, Homo sapiens
gtttccttttctttattgctataatttaagaactttattttaagcagcttaggaagattattaagtttagcttttgaagcagtaactgaactgtagccagatggtcaacaagtaaactacataatttcaagttctagcacattatacattttgagcaatcaaagtactatattttcattgtctataaagtttcctttgcaatttccacacacacaaaaaaaggcaggagacaatggggatgggatttcttctgggaatgatgaaaatgttctggaatgagtgtagatgttggagtcccttgtgaatacggtaaaaaaaaaaacactgaattatactttaagagggtgaaatgtatgtgtgtaagttacatttcaatttttttaagtgtgcaagacaggagtgtgccttgcacattggagaaacagcaaggagtccagtatggctgcagtagagttgaacaaaaaagagatgaggtcaggcatgggacgggacatcagaccacggaggcccttgttggtttttgtaagatctgtgggttttactgcaattacatggggaaccaatgcagggttttgatgcatgtagtgacatcgtatcgtctacatttcaaggatcaggctgcctgctgtatcggcagtagctacaaggagacaagagtggaggcaaggaggaccataaagaggccattgcartgatccagggagaggcgatgcagacttgggaaagctcagggagagtggcggaaacagtgagaagggact

SEQ ID NO: 92711 - DNA, 747 bp, Homo sapiens
atgatttgaagagaggctatgaaacagccctgccaggtcccacccacctctgctggagctcaacattaggtcaatccccatgatgcagttgacttagaaacataatgaaggaaacaattactcttcctgcttcctagttaaagtgcaggcagctcagagctgtgccaagaaatgttacaaagctacagtgaaccattgtgaacatcctgggcctaggccacttgctggatacagtgccctggtcaaccttactttctcctttccctcttatacacagccttcctagaaacacctgtcttatctcatgaaatcataagctcttctcaagcaatcacaaaggagaacaatagacttgactactagcaaacaatcccaccaaataaaaagacaaaataattgctatgaatagggcaaagaatattcttaataaacagatatgtgttaaaaaaacatataaaatattttcaaagaagtaaaaaactaaaataagatgcaatttctcctccaactaaattaactgattcaaaacaattttcattactgataagagtgctttgagaaccgttactgtcacataatgggagtcggagtrtaaactgataaaatctctgaaaaataattggcaacattatagcaaaagacttgaagatattcatataatttcaccctgtaattccatttctataagtctatcctaaggaaaatatattactcagtaaatatttgctgaatagatgaaatcatcag

SEQ ID NO: 92712 - DNA, 1138 bp, Homo sapiens
gatgccagtgtgggaggactgctcaagctcaggagttcaagaccagcctgggcaatataaggagaccttgtctccacaaaaaataaagaaagaaaaactagccaggcatggtggcatgtgcctgtggtcccagctactcgggtgtctcaggtgggaggactgtttgagcccaggagctcgaggctgctgtgagccatgaacgtgctactgcactccagcctgggcaacagaaaagagactctttctttaaaaaaaaaaaaaaaaaaaaaaaaaaaaaagaaagctcccaaagaagcggctgcctgctttgggcagattacttttaaatttcgagtagttcaagaaccaagctgtacccgtgtttcaatatttatttacccaagtttgttccaaatattaacaacacatactgtatgtcaggggcaaagctttaggatttctagggaagctgtaagaaagactaacacacagctactggtctatgagattatgcaggactgcatactttgaacttttctgagatttgctttaatttaaagaaagctgaacacaaagatatatgtaccatgaacactgtacaaaacatctgtgaacgatagagctagggaataaaaaaagcagttctgaaaggcagccttgaaagaaggaaatatgtccatgaaagacaaaattagtactttacatgtccaaagctcttagtgactctaaaaaaaggtctttagttaacaacaagatctttaattttcccccaaaagatctccagggattttcagatcctcattcccttcaaatctacaaaggtccccaggctcagggcaatgccaaatgttcttgargtctgctcccttcttccccgttcccagcatcatcatgtgtgtgggaggaactgagttgtttttatcctgctcactgcctaagtacagcagaagccaactgggagttctattccccaatatgctcattgtacaatgcttagttcctagaagggtgggtagaaaagagctgacaggcaaagaagcagtttatagtagctgcatgtttaaaaactgaaattcatctagacaccctgtgtgaacacatttagattttcagcattgctgtgaatgagaccgtaagaatttctagcctagtgggagaa

SEQ ID NO: 92713 - DNA, 672 bp, Homo sapiens
ctggagctcagcatttccaggctgcagtgagctatgctcactctactgcactccagcctgggtgacagagtgaagcacaatctttaaacacacacacacacacacacacacacacacacacacacacacacacgcatgcacacacacagatatatataaaagtatactgtcatttaaaaagatacattatttatatattttgacgtttactatgcaaaatataaagkacttacgaaagaagtaggatgaatggtataataaacacttatgtacctgtcacctgaattcaaatagtttacataattatcaacatgtagccaatcacgtttcatctataactctacctttctgaggcagacttcagacttcagtatatatagaacataaattcataaaggcaagtattagattgggaaaatcccttatacaatgaacgtgtattaaaaacacttcttccttactacttaaaaatatattaaattatacttagcacccagatctcagtttctaaatatcattttccaataagaattctccaacagttccttgaaaaatggctgtttctagggctggggcagaaacaatacaagacaatgagcttggagcatcttaaagtaccaggaagtcggaacacacttcagaaaagtaaaaggatggtggcatgcctaaaag

SEQ ID NO: 92714 - DNA, 1183 bp, Homo sapiens
tggacagcttgcagccaggagcccatgcccagaaggcattctagaactcagggctagaataattgtcttccggaattctcttttacctctgactgaaatcccacctaaggcgctcgcaggcatcacctctgacacagagatggagcagacagttgccgggaacacaaccttctagacctttaaggagaaagctgccaactttgtcctcttggggctgctgaatgttctgagagtcagagggagtgcaggcacagaatccaggtccccatgggggctggcaggggacagctgcacattttacaccccctggcagggctcaacctttccttagagatgggctgtgaaggttgtctgccttgagggaaggagctcctgacgtcacagagcggtggtgcttccacctaccctgtccccaaggagcctgcacactgatggaggaggtacagccgtggaggagaaccagagtctggaggggaggcacagtcctcaggagcccccaggctgacgggggaaacaaaacacacaataaaccccaaacttgcaaggttctggggcaggcaccgaggtccgagtggcaaggagacaggatccagccctgtgcagtggtgaggaggcccctggggctgctgtgatcrgcctggaatgtcaggctgtgagctcagccctctcggcctgcgtgtcgggctgtcagcagggccggcgcacgggagaagatttccagccccctctgggccatggagaggcctaaatttagctagtagacaaggggctggccccaagcccagggacagtcggccttataaagcggccgcagtcggagcctggcacgctcgcccagaggcctgcgcccacaccctctcctgtccagccctcgcccgcctgggcagggcccggcgccgtccgtggatgagccacagaacctcttccaccttccgagcggagagaagtttccattcctcttcctcttcctcctcctcttccacctcctcctcggcctcccgtgctctcccggcccaggacccgcccatggagaaggccctgagcatgttttccgatgactttggcagcttcatgcggccccactcggagcccctggccttcccaggcaagtgatccgggccctgaggggaggggaggtgcacagggaggggacgtctgctccagggcgccaccgaaggcgctg

SEQ ID NO: 92715 - DNA, 1183 bp, Homo sapiens
tggacagcttgcagccaggagcccatgcccagaaggcattctagaactcagggctagaataattgtcttccggaattctcttttacctctgactgaaatcccacctaaggcgctcgcaggcatcacctctgacacagagatggagcagacagttgccgggaacacaaccttctagacctttaaggagaaagctgccaactttgtcctcttggggctgctgaatgttctgagagtcagagggagtgcaggcacagaatccaggtccccatgggggctggcaggggacagctgcacattttacaccccctggcagggctcaacctttccttagagatgggctgtgaaggttgtctgccttgagggaaggagctcctgacgtcacagagcggtggtgcttccacctaccctgtccccaaggagcctgcacactgatggaggaggtacagccgtggaggagaaccagagtctggaggggaggcacagtcctcaggagcccccaggctgacgggggaaacaaaacacacaataaaccccaaacttgcaaggttctggggcaggcaccgaggtccgagtggcaaggagacaggatccagccctgtgcagtggtgaggaggcccctggggctgctgtgatcagcctggaatgtcaggctgtgagctcagccctctcggcctgcgtgtcgggctgtcagcagggccggcgcacgggagaagatttccagccccctctgggccatggagaggcctaaatttagctagtagacaaggggctggccccaagcccagggacagtcggccttataaagcggccgcagtcggagcctggcacgctcgcccagaggcctgcgcccacaccctctcctgtccagccytcgcccgcctgggcagggcccggcgccgtccgtggatgagccacagaacctcttccaccttccgagcggagagaagtttccattcctcttcctcttcctcctcctcttccacctcctcctcggcctcccgtgctctcccggcccaggacccgcccatggagaaggccctgagcatgttttccgatgactttggcagcttcatgcggccccactcggagcccctggccttcccaggcaagtgatccgggccctgaggggaggggaggtgcacagggaggggacgtctgctccagggcgccaccgaaggcgctg

SEQ ID NO: 92716 - DNA, 1183 bp, Homo sapiens
tggacagcttgcagccaggagcccatgcccagaaggcattctagaactcagggctagaataattgtcttccggaattctcttttacctctgactgaaatcccacctaaggcgctcgcaggcatcacctctgacacagagatggagcagacagttgccgggaacacaaccttctagacctttaaggagaaagctgccaactttgtcctcttggggctgctgaatgttctgagagtcagagggagtgcaggcacagaatccaggtccccatgggggctggcaggggacagctgcacattttacaccccctggcagggctcaacctttccttagagatgggctgtgaaggttgtctgccttgagggaaggagctcctgacgtcacagagcggtggtgcttccacctaccctgtccccaaggagcctgcacactgatggaggaggtacagccgtggaggagaaccagagtctggaggggaggcacagtcctcaggagcccccaggctgacgggggaaacaaaacacacaataaaccccaaacttgcaaggttctggggcaggcaccgaggtccgagtggcaaggagacaggatccagccctgtgcagtggtgaggaggcccctggggctgctgtgatcagcctggaatgtcaggctgtgagctcagccctctcggcctgcgtgtcgggctgtcagcagggccggcgcacgggagaagatttccagccccctctgggccatggagaggcctaaatttagctagtagacaaggggctggccccaagcccagggacagtcggccttataaagcggccgcagtcggagcctggcacgctcgcccagaggcctgcgcccacaccctctcctgtccagccctcgcccgcctgggcagggcccggcgccgtccgtggatgagccacagaacctcttccaccttccgagcggagagaagtttccattcctcttcctcttcctcctcctcttccacctcctcctcggcctcccgtgcyctcccggcccaggacccgcccatggagaaggccctgagcatgttttccgatgactttggcagcttcatgcggccccactcggagcccctggccttcccaggcaagtgatccgggccctgaggggaggggaggtgcacagggaggggacgtctgctccagggcgccaccgaaggcgctg

SEQ ID NO: 92717 - DNA, 640 bp, Homo sapiens
ggattctctgagtgcattccaccaggagccaaaggaactggcccagagcagtcaggggatcgctttgatcaacagggttatgtcaacaggattattgttggctcaatgggaggcaggcctcctaccaaacagaccaaacagacactatttctaccaagcgcagctgcttcctgatttagggtaggcctctggaaccttctcatccagcctcagtttcccaaacctcagtcattatccagtggttccaccagtttggctttttcccctgtctaggaactatacgtaatgctacttaattcacatgtccttgaagtcagccaactgtttttactgaaaaagaagtgcacttggccgggcgcggtggctcatgcctgtaatcccagcactttgggatgccaagacgggtggatcacaaggtcagaagatcaagaccatcctggctaacayggtgaaaccccgtctctactaaaaatacaaaaaattagccgggcgaggtggcgggcacctgtactcccagctactccggaggttgaggcaggagaatggcgtgaacacgggaggtggagcttgcagtgagccgagtttgcgccactgcactccagcctgagtgacagaacgagattccatctcaaaagaaaaa

SEQ ID NO: 92718 - DNA, 486 bp, Homo sapiens
gaaaaatagggtttttaattcaagttctccaactcttttttgagactatttgtaaaaaatgggatagtaatctcttcctcatttattttagagtttgttgaggataaaagcagagtaatagctctgtgttttgaaaataaagggagtttatagagatgaggctcaacaatgataaygatgagtcatccatcactctaacctgatagaacaatcaactataattaggaaagacatttttctctctcaaacgccatcacaattgaatgccaagaagaaattgcttgtaagtcattcaagcttttagaagatctttcttttgccaggctttttgggtgggtttaccaagtgctgattcctctgagaaggatttgcctcagacctttggaaactgagatctccagatctcagaaatataactcagtaatataaactttaaagctgaacctaaacacttaggtttgaattttaagtctctccccagccagt

SEQ ID NO: 92719 - DNA, 486 bp, Homo sapiens
gaaaaatagggtttttaattcaagttctccaactcttttttgagactatttgtaaaaaatgggatagtaatctcttcctcatttattttagagtttgttgaggataaaagcagagtaatagctctgtgttttgaaaataaagggagtttatagagatgaggctcaacaatgataacgatgagtcatccatcactctaacctgatagaacaatcaactataattaggaaagacatttttctctctcaaacgccatcacaattgaatgccaagaagaaattgcttgtaagtcattcaagcttttagaagatctttcttttgccaggctttktgggtgggtttaccaagtgctgattcctctgagaaggatttgcctcagacctttggaaactgagatctccagatctcagaaatataactcagtaatataaactttaaagctgaacctaaacacttaggtttgaattttaagtctctccccagccagt

SEQ ID NO: 92720 - DNA, 762 bp, Homo sapiens
ctccagacaaacatttcttgttctttttttgtggcactagctaaacttccyctcctcttctccacccactgcctcctagagtcaaaaagtgggggtggaacatcgctgagtattgtaggtctgggagagtgaccagaggtagctttagcatgtggtgcccaaaagagagtccattataactgctcacactgagtgaagggacatagaggggaagaggaagcacagggctgggcaggcagaaattttgtgtcattctccaaagcgacggaaagtccttgatcatgaggttttaagaaaaaggaacctactacccccatgcaatagtacattgttttcccctgggagttttactttatatcacctttattgggatttaggtttacttgaatcagttccttcaaaacacacacacacacacacacacacacacacaaaatctcaaaacagacatgagatcatagccatccgttttaacattgctgccctctattagcgtgtacttgaacactgagtataacaaaggaaacaagagtacctagtcagttccacctatatcagcccccagctgattgctcatacctctttccaagtttcacatagatgagcccagtgatctccaaacttacaggtccatccctttcctaaggtccaagacaagaaaggtttgatttaggaatactccagtagcctgaatggcttggcaccgaccatcaggctcctgttgcgaaggtgctctggctgccttgttggcctccatattga

SEQ ID NO: 92721 - DNA, 762 bp, Homo sapiens
ctccagacaaacatttcttgttctttttttgtggcactagctaaacttcctctcctcttctccacccactgcctcctagagtcaaaaagtgggggtggaacatcgctgagtattgtaggtctgggagagtgaccagaggtagctttagcatgtggtgcccaaaagagagtccattataactgctcacactgagtgaagggacatagaggggaagaggaagcacagggctgggcaggcagaaattttgtgtcattctccaaagcgacggaaagtccttsatcatgaggttttaagaaaaaggaacctactacccccatgcaatagtacattgttttcccctgggagttttactttatatcacctttattgggatttaggtttacttgaatcagttccttcaaaacacacacacacacacacacacacacacacaaaatctcaaaacagacatgagatcatagccatccgttttaacattgctgccctctattagcgtgtacttgaacactgagtataacaaaggaaacaagagtacctagtcagttccacctatatcagcccccagctgattgctcatacctctttccaagtttcacatagatgagcccagtgatctccaaacttacaggtccatccctttcctaaggtccaagacaagaaaggtttgatttaggaatactccagtagcctgaatggcttggcaccgaccatcaggctcctgttgcgaaggtgctctggctgccttgttggcctccatattga

SEQ ID NO: 92722 - DNA, 779 bp, Homo sapiens
tgcatgaatatatttgttgcagcactattcacagtagcaaagacatagaatcaacctaaatgcccattaattatagcttggttaaagaaaatgtggtacatatataccatggaatactatgtagccacaaaaaagaatgagatcatgtgctttgcaaggacattgatgaagctgaaggccattatccttagcaaactaacatgagaaaagaaaaccaaatactgcatgttctcacttataagtggaagctaaatgaggggaacacacagacacgtagacaggaacaacagacattggggccttttgatgggtagagggtagaagaattaagaggatcaggaaaaataaccaatgagtactaggcttaatacctgggtgacaaaataatctgtacaacaaacccccatgacataagtttacctatgtaaaaaacctgcacttgtacccctgagcttaaaagttttaaaaaagtgggattcgattaagtaaattatcattgatgtgcctttcagcattcaccaccaaaagtattttatcacctagagatcaccaagctactacccaatctaatggcaaacgctggctcttttcatttcttacgaaccctccatctccaacatactaaacaaggaaacttgtctctycagtcaaacctccttcttttccacattcactctagtcttcagttgttcagccctttctgggcttcctcccatttcatacctaacagcaactcctttcttcatcattcacttaatgctcaaataagtattctcact

SEQ ID NO: 92723 - DNA, 689 bp, Homo sapiens
ggatccaagttatcccacaccttacaccacactctgagcatgcttccatatgttgaacagcctgggtaactgaactgggtatggtgcctcaaacacaaggctgaccaagataaacaaggccatgcacaatagttttctagggagagctcaccctgattctctaactccaacaaaaagaagagaaaatcatraaggaatgaggcatgaaggattaaccctcacaggactcagagcccagagccctagatagtcacattgggcacttccacatgttccaggtgacatcaggttaaaagaggcatccaggatagccctagagtgggaaagaagtcaactgggcagtttttggaggaaaggaaaggattaaagcagggagagatgagtaacccacagtggagggcctggcagcaccagccaactatttgtacatggccccaggcatttctagcatcagccgcctgccaaagtaaatacctcctccctcacagcagcttcttcttcctcctcctatcagcaacataaagaaatctatctccccaaatctagaggatgcacgatggtgccttccagaggggagagtctattctgaggtgcatgagagatgtcacaggcatgtggcaactgccagtagcagacttcaaaatcaacctggtttctgcagtaatatttttccctcctccttaaattca

SEQ ID NO: 92724 - DNA, 673 bp, Homo sapiens
ttttccctaaatctacaatctccagatgtcactactgaattaacagccaacaattccacaacattacctgggagacactggccctttttcttcctcttcctcatcatcactttcattttctgtaaataaattcagagaagcaggtcacattaagcaattcatacttcacatakgaacaaatcactgtccagtcatagcacaaggacataactattctcagtgcaagaataaggattctgacaggaatattctagggtgccctagattaactttggtgagaattagatgaccctgctttccagacccacaggccaaaatctccctctacgtgtagaccataatgccatattccctgcctgagtcaaagttaaacaaaattttttccccaaaaaaatctccaaaaattggtcaaacaattttctaagagtgttgctgcaatacggacttatatcaccaggtaacatggacattaaatgtttagaggcatctatacatgaaacacgactgatagataaatttgaacaactcttgctttaaaaagcatctgtgatttgggaggccaagacaggtgaatcatttgaggtcatgagttcaggactaccctggccaatatggggaaaccctgtctctactaaaaatacaaaaattagccagatgtgatgttgtgcacctg

SEQ ID NO: 92725 - DNA, 673 bp, Homo sapiens
ttttccctaaatctacaatctccagatgtcactactgaattaacagccaacaattccacaacattacctgggagacactggccctttttcttcctcttcctcatcatcactttcattttctgtaaataaattcagagaagcaggtcacattaagcaattcatacttcacatatgaacaaatcactgtccagtcatagcacaaggacataactattctcagtgcaagaataaggattctgacaggaatattctagggtgycctagattaactttggtgagaattagatgaccctgctttccagacccacaggccaaaatctccctctacgtgtagaccataatgccatattccctgcctgagtcaaagttaaacaaaattttttccccaaaaaaatctccaaaaattggtcaaacaattttctaagagtgttgctgcaatacggacttatatcaccaggtaacatggacattaaatgtttagaggcatctatacatgaaacacgactgatagataaatttgaacaactcttgctttaaaaagcatctgtgatttgggaggccaagacaggtgaatcatttgaggtcatgagttcaggactaccctggccaatatggggaaaccctgtctctactaaaaatacaaaaattagccagatgtgatgttgtgcacctg

SEQ ID NO: 92726 - DNA, 673 bp, Homo sapiens
ttttccctaaatctacaatctccagatgtcactactgaattaacagccaacaattccacaacattacctgggagacactggccctttttcttcctcttcctcatcatcactttcattttctgtaaataaattcagagaagcaggtcacattaagcaattcatacttcacatatgaacaaatcactgtccagtcatagcacaaggacataactattctcagtgcaagaataaggattctgacaggaatattctagggtgccctagattaactttggtgagaattagatgaccctgctttccagacccacaggccaaaatctccctctacgtgtagaccataatgmcatattccctgcctgagtcaaagttaaacaaaattttttccccaaaaaaatctccaaaaattggtcaaacaattttctaagagtgttgctgcaatacggacttatatcaccaggtaacatggacattaaatgtttagaggcatctatacatgaaacacgactgatagataaatttgaacaactcttgctttaaaaagcatctgtgatttgggaggccaagacaggtgaatcatttgaggtcatgagttcaggactaccctggccaatatggggaaaccctgtctctactaaaaatacaaaaattagccagatgtgatgttgtgcacctg

SEQ ID NO: 92727 - DNA, 537 bp, Homo sapiens
atacatagaattgacataaagaatatataatctcacccggtgcgctggctcatgcctgtaattctagcaatttgggaggccaagatgggcagatcacgaggtcaggagtttgacactagccaggccaatatgatgaaaccctgtctctactaaaaatacagaaattagccaggcatggtggtgcgtgcctgtagtcccagctacgggcgggcgggggaggggggctgggggggctgaagcagaagaatcgcttgaaccccggagacggatgttgcagtgagctgagatcgygccactgcactccagtctgggtgacacagtgagactccatctcaaaaaaaaaaaaaaaaaaaaaaaaaaaatatatatatatatatatatatatatatatatatatatacacagctatatatataatcttatatataagttgacattttgttactgatatatagaatattatataaactatatgttttatcgtatactaaattatattatatattacatattatataatttataatatgttatatg

SEQ ID NO: 92728 - DNA, 1248 bp, Homo sapiens
tacattttaatcagttttcttaattatttaaaataggaaggtgtctatgttttatcttactcttcataacctttgctatagtatattatactagaaataaattaatatttcactttgaagaaatattgcatttaaaaattaacaaaatgggtgcttggagtttggaatgcttgcttcattactttaaaaactatcctaaattaagcaataaaaataccatagttttatagggggaggaaaattatcattaaaaaatgtttattttaaatgaatacaaattgatgtggctcattcatttaagaagtagactggaaattcaaggccttaattcagactttgtaaactgcactgagagattcagttagtgacagatcaccaaaagtgaatgcacaacactttgtaattacaaaattatactaatcctaccattatgaaattagttttttaaaaaagtttgcctgccctgagaaaaccacatttaaacaacaacaaccatgaaacagagaagattttggtacattttttgacaatttacgataatatttgaaaacttctttaaatagaaaaccttacttcaaatttaaaataagtttgtagaagatataggagcttaaaatactttaaaatcacaaaaatattcagaattttgacaaaaaaattaattctcatctactgagtattattgagggagaaaataagctaaaaatatcaaaatccattcaatttttcttatttgttattttttcttgagacagagactccctctgttgcccaggctggagtgcagtggtgcgaactcggctcactgcaacctccgcctcctgggttcaagcgattttcctgcgtcagcctcccgagtagctgggattactggcgctcaycaccacgcccggctattttttgtatttttagtagagacagggtttcgccatgttggccaggctggtcttgaacttctgacctcaagtgatccacctgccttggcctcccaaagtgctaggattacaggcgtgagccatggcacccagcaaaatccattcgatttttaacaatgtattaaaaaataattctacactctgactgtaaatgataatatttatagaaacatagaatcgcaataaacttggaagtcatatgaattcactttcagacaaatgtgaaaaatgtgaatttaatacttgaatattttctatcacaagtgcggtaggtagcctctaaaacagcccctgataatttcacatcccagta

SEQ ID NO: 92729 - DNA, 1248 bp, Homo sapiens
tacattttaatcagttttcttaattatttaaaataggaaggtgtctatgttttatcttactcttcataacctttgctatagtatattatactagaaataaattaatatttcactttgaagaaatattgcatttaaaaattaacaaaatgggtgcttggagtttggaatgcttgcttcattactttaaaaactatcctaaattaagcaataaaaataccatagttttatagggggaggaaaattatcattaaaaaatgtttattttaaatgaatacaaattgatgtggctcattcatttaagaagtagactggaaattcaaggccttaattcagactttgtaaactgcactgagagattcagttagtgacagatcaccaaaagtgaatgcacaacactttgtaattacaaaattatactaatcctaccattatgaaattagttttttaaaaaagtttgcctgccctgagaaaaccacatttaaacaacaacaaccatgaaacagagaagattttggtacattttttgacaatttacgataatatttgaaaacttctttaaatagaaaaccttacttcaaatttaaaataagtttgtagaagatataggagcttaaaatactttaaaatcacaaaaatattcagaattttgacaaaaaaattaattctcatctactgagtattattgagggagaaaataagctaaaaatatcaaaatccattcaatttttcttatttgttattttttcttgagacagagactccctctgttgcccaggctggagtgcagtggtgcgaactcggctcactgcaacctccgcctcctgggttcaagcgattttcctgcgtcagcctcccgagtagctgggattactggcgctcatcaccacgcccggctattttttgtatttttagtagagacagggtttcgccatgttggccaggctggtcttgaacttctgacctcaagtgatccacctgccttggcctcccaaagtgctaggattacaggcgtgagccatggcacccagcaaaatccattcgatttttaacaatgtattmaaaaataattctacactctgactgtaaatgataatatttatagaaacatagaatcgcaataaacttggaagtcatatgaattcactttcagacaaatgtgaaaaatgtgaatttaatacttgaatattttctatcacaagtgcggtaggtagcctctaaaacagcccctgataatttcacatcccagta

SEQ ID NO: 92730 - DNA, 635 bp, Homo sapiens
catagacagctaatcccccataggaatctcctgtcacctcagggttttttcttcttttaatggaatagaagactcagtgtatgtagagatcttttcaaatgaaactactgtactgcatctgtcagatgacattttcataatataaaactcatccaatctgtttcttttcaacattttcaatgtttgttatatgatgtcaattatagcttaacttcctttaccctaacgatttcccagagttttattagattggccagctaaaactcacatattcccatttaacttctcaagcaacagaacagaaggcatgagtggctgatgttaaccaaaccaaacgccacttgagaatgccattaaaagaatcgtggctgaaggttataaataggtgacactatttataaagcataaacaaaatgtttcttgatgtgtaacataaagcccaagcagtcctattgttaaaaacctgctcctgtgcctaatgtctacataaatagcagcagcaacgcagtatcatgagctgctttgtttggcctcaagcaaatcataggcatattagatgtaacatttcctactaattgctgcttggcctttagaaaaaaaaaaaaaagttgaggatggggacttacgatrtgagg

SEQ ID NO: 92731 - DNA, 511 bp, Homo sapiens
tcttttagattcaatgaaatatggcagtaggatgcctggcacatactaagagctcagtaaatgttggctgctattaataatgatagtaagaacaatgaacaaaagctgcaagtaataagtttgtggtcacacttgcttctgttaactttagctctatttaaagagaaataaactttctgtcttctacaaagacaacaaaaaataagattgagaaaggaaagaaaawctgtaagtaagtaattctcttaatcctctcctttctactcttcacatgaacattttgcatgtttataagaagagaaataaaagagatgggcaagactggaactatgcttagagcatggaaagttgaattataacctctttttgcccgtaaaaaccagatttctgcaaaggtttacggaaacaggagcagtagggacaaactataaggcctgaagttactatgtatggggcacaaataggttgagggataataatgtacaaaatgcttccgattcactctctcatt

SEQ ID NO: 92732 - DNA, 1243 bp, Homo sapiens
ggacaatgaaagatgtgtttagagctgaaatgaaaaaagataactggtacccatattttacagatctaaaatataacttgctcaagagtacaaaggtaggaagtgatagatctagaatttgaacctagggaggactaattccatacttcaatgtctcggagttaggtagggagacttcaacctaggaggggagactttgctgccccctaccttataatgctgacactgctttgaagtttttattaaatatttttcacacccaggtccttggaagccctcctccctaccagattctctatagttcaaacttcacttaaaaaaaaattcttttaatgttttgttttaaatctgaaacatctgtattagtgcatattactgttcaataaatacttactcttccrtcccccatcccttaggcaaaattacttttctacttttttcttccccttctgcatatgaatgccaggtcataaatttccttctctttaagtttttggcgtatgtcttgccatatgtcttgctctaaccaatggaatgtggaccagttccatgaagtgcttttaggaggtgctgctgttagttttcttgtgttcctgcactccatcgagggaagaccatgtcccaaagagacactgatccttcaaactggcatccataatgaacagacttcagcctggaataaaccactgtcaagcccagctgagccagctgagcacagctgacctgtagaatgctggtgagaaataaatgtgtgtaactgtaagctgcaaagatttgggtgttgtttgttgccccatcaatagccaactaattcagcatccaagataattactgggaagttcttattctttttttttttttttttttttttgagactgagtcttgccctatcacccaggctggagtacagtggcgcaatctcggctcactgcaacctccacctcccgggttcaagcgattctcctgtctcagcctcctgggtagctgggattacaggcacacgacaaccacacctggctaatttttgtttttttagtagagacagggtttcaccatgttggcaaggctggtctcgaactcttgacctcaagtgatccatccgcctcggcctcccaaagtgccgggattacaggcatgagccaccgcgcctggctgggaagttcttattcaacaaaaatttattaaattcatactgtatatacatccctatgtgagacccagaaagccaaaaactatctacatt

SEQ ID NO: 92733 - DNA, 2633 bp, Homo sapiens
tgccctgtgcctcagcttagatgcttattttcaaggttagtcatttaaagataggcacctgcccagactacggccttagcacaagaaaatatattcactgaacttggcatctcagggtgaaatgcaaggctcatacaatgtcaacaaatcaaaacaccatttcaaggatgccaagaaaaacttatcttttactgttcaggaggggcagtcacctaagagattacagatccaatgttcataccttcaaaaaaacactttttgagtttcattacctttatcaagagatgctccagccatatggtaaaaactcaatgcagtgtccacatcattaatgttctttaggaaagtaaagaagttctccacctcctgaaatgtcagaccctgcaagaggagagacagcaaggtaaggcaggacctgtaacaaaaagcagcacgatatgcataggcagtgattcacatctgcaaatcagaaattcatgctcatgtctagaacagaaactgaatacattagtcaaggaatatcaaattcataaacagcaggggaacaaaactcttgaattctaccctgagaaaggcaaactggctagttgcttccctctcacacgtaaaatctgagaaagcttacagtgatggctgaatatcttaatgaaaatatttcttctttttttttgagatggagtttcactctgtcacccaagctggagcgtaatggcatgatctcrgctgactgcaacctccgcctcctacgttcaagcaattctcctgcctcagcctcctgagtagctaggattacaggtgcacaccatcacgcctggttaatttttgtatttttagtagaaacagggtttcatcatgttggccagactggccttgaactcctgacctcaagtgattcacctgcctcagcctcccaacgtgctgggattacaggtctgagccactacacctggcctaatgaaaatatttctaactgtgctctccaattagacacactatcaatgatgacacttcctaattgggctatagctacttgacttgttatacatcttaagaagtaaaatcagagtcaggacttccagtttaatagtctgctcacaggccagctgagctttttgaggcttaagcgaattgaagaatcaccaaagtcagtgatatacaggggaacggtgtcggtatttagcaaaacccaagtaatggggaagccgttcattatctcaatttaaaagctacccacaaagtaatttgccacttaactttaatctaatgaaattctgtgaatgaagatttttttttcaaaaacggtttaaagatttgctgatctctaattccactttctatgatgcatcgagaaaaagtagttatagaaataggggctactgggaattcctttatagggaggaagatttgtcctatttgcctttcccccgcttcccacacatcatgctgtgatggaaataaatgcagtttctaagaagggaaaacactgggaaatgtcctagatatcccagacactgatgttaatgccttttaatgaagcatcaggtccttaaagagctgcagatgtagactggcttctacttagtgctgctcctcctgcaattttcattttcccaaactacagagcccaggaactcacatcaggaactcagtaataaggaaatcctaatacaatctacagttctttcctggtactctccaaactgggtcaattgtatgtttctcaccttatcaaactgaaagctaaaagactgtattaggctgggtgcagtgactcatgcctgtaatcccagcactttgggaggccaaggcaggaggatcacttgagctcagtgaccagcctaggcaacatggtgaaacctcatctctacaaaaaatatttaaaaagttagccgagtgtggtggcatgtgcctatagtaccagctatttgggaggctgaggtgggaggatcgcttgagcctgggaggcagaggttgcagggagctgagatcatgccacagcactccagcctgggtgacagggctagacgctgtctcaaaaacaaaacacaacaaaaaagactgtatgattatatcacatgatcttttataatttttttccttagaatcatagaacttaaaaaactttattgtggaatatgatgactatatagaaaggtgcataaaatataaatgtacaacttatcaaactcttgcaaagtgaacacccacagaaccttcatttaggtcaaggaacagactattatcatcatctcagaagcctcctctctccccacaacatgtcccttcctaatcataaactccagcccctgcccaacccctactgacaataaccactattctgacttttagggaattcatttccttgctttttttaaaaatagcatttttatatgtaaatagcgtacttacaaaaaccgttgcttaattttatctgttgtggaacagtagaaatggaattatgcagtaggcattctgttatatatggcttctctctttaagatttgttcatgtttttgtgtgtatctgtagttcattcatttttattgctataaagtatttcattgtgtgaatataccacaatttgtttatccattctatttgggctgtttccaatttttggcaattatgaacag

SEQ ID NO: 92734 - DNA, 1420 bp, Homo sapiens
tgcattacttaattccctgtgttgtattagaaataacagtaacacaatcttcacaagtagataatatttttaaacttgtttcctaccaaatagcatggtagtcaagagcaggaastgtgagggaaaacgtctgattctgaaatccagctgtgacactcacacactctattacctccagtgactgacttgtgcctcagtttcctgagctgaaaaatgggaaatacaatagctcctacttcaaagaagtattaaggacggaatgaagtaatatacatgaagtacttacaacactgcatacctgtgatgtctaataattgagtgtcaacatgattggattgaaggatgcaaagtattgttcctgggtgtgtctgtgagggtgctggcaaaggagattaacatttgagtcagtggactgggagaggcagacccaccctcagtgcgggtgagcaccagctaataagctgccatcgcggctagaatagagcaggcagaaattggaaggatttgacttgctgaatcttccagccttcatctttctcccgtgctggatgcttcctgccctcgaacatcagactccaaattcagccttgggactcttggacttacaccagtagatttgccagggactctcgggacagactgaaggatgcactgtcagcttccctacgtttaaggttttgggactcggactggcttccttgctcctcagcttgcagacggcctttcatgggacttcaccttgtgatcgtgtgagtcaattctcctaataaactccccttcatatatacatctctcatatcagttctatccctctagagaacactgactaatacactgctcataataagtacttaataagaattagctgttgtttttataattattactatggcttggttattactatctcattatgcatccttgatgcctaccaccttctcttgtgtttgatgaccctgaatcaaatgtgagagagaaccctagtggtggaaaggtgccagcgtcatccagatcacacagaaccactggtgtaacagagcgcctcgtcttgtgttggaggcgtacatcaggatttatagacaaactgtgtctctttggggaaaatcatcaactgatgcagtaccaagtgtgtgtcttgggggtatcctttcctgggttgaaccccctcttcttcacaatatcctatggaaaaagtgtgtcagagggagagtgcagatagaggagactaaaagacattaaagagattgtcaaaagtcagaggataaactctttttcaacaaaaacgccattttgtggtgcttatgtcaaaatatagaatcattatcaataatattgttttatgaaaagcagtattttgattttttttttttttttttttttgagagagtttcattcttgttgcccaggctggagtgcaatg

SEQ ID NO: 92735 - DNA, 896 bp, Homo sapiens
tctataatgggtagaagggcattttaaatgttgcatatgttacatcatgtcatttttataactctcttggggaggtatttctgccctgttttacaaatgagaaaagagaaactcagaggtraaaaactgtgtaggctcatggaagtgaataattagtaaagataagaataagaccatgctttccaacatataactcatgctacaacatagaggaagttagaaagtgacccattgcctttgtcaaagcatttgatgatggaaccctaggggatggcaagctaaacctaaagaaggaagtgagactcagatggaaggggcttgaccattggatgggatgaaagcagataatgcagcccaggtcagtctcagaaatcagtcatctccttatgccagactccaggagctgctttttaaaccctagtgaagaaaggggctaaaaatccatatcaagaggcatgctcctcttatgaaactttagggtataggtctatgtataaaagtgtcaaacaaatcaataatgcaggcagccttctcgtctcacagttcagctccatcttcaccaggtgggtatggagaccaagaatgtgctgctttgacacgctccaaaatttaatgtgtctttagtggagttgatagtggcatcaaaaaaagcaggactagggccatgatgggagaattaattcgtgattacactgggaatttaatcaggtctcttcatgagtatccttaaagcttgccctggggactcacaaagataaatgcaggtattgcacaaagcttggaggctcagcaagggctagtgaaaataagtgttgaaataataagagctatcactaatttggcataattttaacccctaacattatgcggtatgaagtatgaaaatgttcaaagaa

SEQ ID NO: 92736 - DNA, 1225 bp, Homo sapiens
aaaagagatagatatagatacatgaaagagagagagagaggaagagcaagagtgtaaacaaaaaatagaagatcaccactaaaggccgggcacagtgrctcaagcctgtaatcccagcactttgggaggccgaggcaggaagatcacgaggtcaggagattgagaccatccgggccaacacggtgaaaccccgtctctaataaaaatacaaaaaaattagccgggtgtggtggcgggcgcctgtagtcccagctactcaggaggcggaggcaggaaaatggtgtgaaccccggaggtggagcttgcagtgagccgagatggtgccactgcattccagcctgggcgacagagtgagactccatctcaaaaaaaaaaagaaaagaaaagaaaagaaaagaaaatcaccaataaaacatcctagtaataatggccacaggcaagatccagcaataaatacaaaaattaaatctgattttgagctacatcaattctaataagtgttgcaggacaagaaaatcactgtggtggtgttgcacaagacaagtaagtttaaataattcagtgaaaacacaattcgacatctatttagaaagctatggaaaatgaatgccaattcagaatcacttgtgtatacatgacaaacattgggtttaaatgtttaaaagttgcatggatttaaatggttgactaatttcatgactatttcatgtcaacttcgattttactagtagagccatataaaaattaattattttattttaaatgtagtgagaaagtcacccttattcactctattatagacaagtaattattaaatatgattaaacacgtgaaattattctaaattatctatttcttactttcatacccacactctcttcccttcccctaaacttgcatctcttctcatagcctttatttggtgaacagtaatattacccactgagttgctcaagccagaattttgggaataatcttggctcattttctccaaattcaattctttctctatgtgcccaagtgatgtgaattctcattaaacaaatcacttatctctgcttccactgctgaaacttcagttgaagattttagtgtttctttactgggctacagagattacctcttaatttatcttcctgattcctatctcactcaactgtcaaagcgatctgtcaaagtcacaaatccgattgtttcattctcttgtttgaaatcttcccgtgac

SEQ ID NO: 92737 - DNA, 1106 bp, Homo sapiens
tggcccacaaacatttttagttagaacttttaataaacatattttaaattatttatttgactatattgccagaatatttcttaaattcttaacacaaacatgaaaatttctctaggactttccatacagattgtatcaactcacactatcataatttctgtgtgtatgtgtccatattgccatatccttgatgacattacactcttgagaaattmtgaaggtctagttaggtttcactctgagaaaaaatgagaaagatgtctcttaatttgtaatcaaatcttggataagcttattgctatagactaaatgtgcctgtctttccaaaattcatatgttgaaacccaatctccaatttgatggtattaggagttggagtctctgagaggtgattaggttatgagagcgaagcttcatgaacaggattagtgccctaagaagagaggccactcattcctttcacctggtgagattatgaaccagaaagccggtcctaaccagacagggaatctgccagcaccttgatgttgaactttccagcctccagaattatgggaaataaatgttatgttgattttatgatattccacctatcataatttgtttcagcagccaaagagccttaggcactaagatatagaaaaaatgtaggttttctgccatttaaagatccatgaaccatctatatggtggtatccattgcaattttcacttttcaaagaactcattttctgatcttggcctaaataatatctactttatactgggattcatataatagataactgatatgtaccgtaaggtctcagacttctcagagtatctttggttatctttagcaaaacaaagttatttttcattgaataggaatgaaatgaagtaatactgctctcatacagctttaccatttgaagaattgtgccaaagctttaagttaaacatgaagcacctgtaagtatcaggatgactctggactaacattgttttcccatctctttctaatgagttgctgttcctctaaatgtactcattaaaacattttacaggaatgtgtaaaacccgttccagttttagggtatctaatttggtggttaaaaaattagaat

SEQ ID NO: 92738 - DNA, 1228 bp, Homo sapiens
cagagtttgttgtgatattaacttatgggtgatgttagaaagtcaaaaagtttagagcttaattgataggtcagagtttgtcttgcatataatttatgtctagaatctgtttttggaagctttccctctcatcctttgttcttcccattttctaccagattcctatgaaactacctagagttttccagtctcagggatttaatactctgacattggctggtcttcagactttagacccttcatgcctttaccartctgctaaataattcagagtttattaggttaatagcaaaggagcttaccttttcccctctggatggcagagtttcctttgtgcctaaagtgctttagctgggcctgggccctaagatttttgaaacctgggtgatagaagtgaggaagttgtcatttaagagttgcagattctggccgggtgcagcggctcaatgcctgtaatcctagcactttgggaggccaaggcaggtggatcacttgaggtcaggagttcaagaccagactggcccacgtggtgaaacctcatctctactaaaaatacaaaaaattagccaggtgtagcagtgcaagcctgtaatcccagctactcagaagactgaggcaggaggatcacttgaaatttcaggtgaaaggcatggctcagagctgggggtgtccactcctccctgctcagcttggcacctggatagtggagccagagggaatcagaagaccatgctcttggcaaggccaccaccaatatcaggagggtacagcatcattaccaaggcaacaatgagattccttcaagctacttggaggacaggcagggcatatgggtgaacacagtgttgctagactagcaggaaaggaacatggttggcttggatgattactgtagtggacacactgtaagcagatataagctatcctttgggggacgacaggaatatttgggaaatatttgactagtaatcaattaagtgggggctcaagttatatttggagcattagaaagttaatatgacctcatttatatctagtgaaaagcctggtcataccagctgcacacatttaaaaatacacatacaggctgggtgcggtggctcatgcctataatcccagcactttgggaggttgaggctggtggatcacctgaagtcaggagttcaagaccagcatgaccaacatggtgaaaccctgtctctactaaaaatacaaaattagctgggca

SEQ ID NO: 92739 - DNA, 660 bp, Homo sapiens
aataatttctgaaaagtcatggttaggggaaaagttgtgtatatcaatcagtacttctcagatgactttctgaggaccagtttaaaaaatcaaccaaaaaagttaatttcagactatcaagagatcatcagagagcctttggcccttacttcaactctaaagtaacacaagaaatccagagagacctgtacatcttgtgtaaatctgaactctctttttaatagcttttaaaattgaagaattgtaaagagaattgtcctagctgtatcttgacattatttgaattatttaattgatatagatgactagaactctctmaattacattttctcattacaatttcttgaagcagggagaacaaaggactaactctattcctcagccatattttgtgtatttggactcaactcttgaaactgccgggtttttcctccttacgttcatttccttcgtaaattttaactcttgagcagtggttatggaaattagaaattgttttaaacttttgaaaagctatccagtgcttactgtgtaagaggttcgttgagttgattagatcatattgtagacctaatagataataaagttaagatcacagtatatattgttaatcttggctgagatgtcccaaatgaatacacttggtcacaaagggatcct

SEQ ID NO: 92740 - DNA, 713 bp, Homo sapiens
ccttaataagagctcattcatttctatttgttacagaagataggttcaccattgtccattcaaataacaactaaatggggcatgaccagaccaacagatttcaaattaagatatagcagtttaatagtatatcgcagcagttggcttctttatagcctatcaactaacagaagaatgctctctcttaaaaatcaagaactataaggttccactgtcaggaaattaaagattttcaggtaaattctttactgctctctttgttaattctcctctcatagtattaatctgttacaacgggtacatctctgtcattttgcatgagtggcatagactaaacctgacaccagaaaacctgggtacaaatccctttccaccacttaccagttaagtaaccttggcaagtgtttgtaaatctaaattgccacgaagggatagaatattttctctcaccaatttataaagtttttgagagaatggaattagaagatgtctgtgaaggcacggaatraatttttgattgctgttttgtataagacattacgatgccagcctacctagctttttggcactctacccctcagttctatcagttgtgaacagaattgtgattctattcaatcacatcataattctcacataagaaacaagtaggcacatttaatcatgtcttcttatttactcagagctgatctacatgtcaatgtaaagagact

SEQ ID NO: 92741 - DNA, 580 bp, Homo sapiens
acaaatctgaaaattttcaaaatatctttaaaatttttgatatcaatccatagaatatctttctgatgataataaggcacatctgaattttggtagaaaaacataaaaaatcagaagactatacattaaacaataacagctttattcaaaacatgtaagacttccacaagggctgttttgctttatagtatgacaagtgctaccttgttggcattctaaagtgaacggtgatgtggagaaaggcagtcctttccattctaaaaaggaaaatatttgcatctactctaataattttctgtcaagttaagaaaaaggactgttctcattatttgtgttctccccaaagcaggcacagaatatgtaggaaatgaaaaaaaaaatgtttagaagagctcgttttcatgcactacrgattctaaccttgtctccaagagccaaggttgatgcatcccatgctaaattaaatctaagatgtatgcagtaatgaaaagggtagcattccatgaaaaattccacttttcagttaaagtacctagcgtttattaaatatgcaaaaattacaatgtcaatataactgcaa

SEQ ID NO: 92742 - DNA, 549 bp, Homo sapiens
atgactctgactaattctcctgctagttggatcagtgttacaaaccttggtaccctgtgattcataagcattcatatttttgagctggtatatcctctccatgcagctgatcattgagcacaaagatgttttatattagaataacatgtaccttattttttaaaactgagatctgcaaaggcttaaggaagctgaggcaacaatataaaagatctgaaataaacatgtatttgaatactgtaccaataactgatttttttcttcttaaattactttttctgataacagtcaataagtttcagtaggaaaatgcagaaaacacagaaaaatatacagaataaaaatcacctgtaattcctacaggtgattttgagaattaattttagaattaattcmaaaaatattaaagttctaaaaacttcaaattcttccaaaaatttttaaatctagggtgaagaaatctttccaggcctttttttattgttcctttttttcttccaaattttattttaacttcaggagtacacgggcaggatgtgcagtttggta

SEQ ID NO: 92743 - DNA, 858 bp, Homo sapiens
tttttagaggacaggactgttgtcctgccttccttggaatatccatagtgcttaagacatactgaatgctatccatgaaaagatatcaccaggctgattgattaagtgttatagccatcttcagcctctgatcaattttggttgtcctgagaatgtccttgttcatagtagagcatgatttgagcagactcaactcgtctgttcttattttggacctctgaagggtctaggatcaaacatactcatcacaaaaccgggtggccatggtctgactcagggcctggaggaacttgtgaagctgcacattcctgtatcggaaaccagcatccatccagaaggttgaactgcaaatagcccaagcctatgccttttgtacttcaatcagcattttagaaaaaaatataaatagactaactctaacaagttttagggggtgaggggatgggaagatgcaaatatctgaagtaaataactttagactttaactatggatactgtgaagtcaattccctaattacatatataataaatcattttcccctcagcaagaaaactaattaatgagcaaaacacaagcagactctcaccaacccttaacagatgcttatgtagaattgtcaggataccagaaaagatcgttttcaaaagaaggaagttccaattccttccatttccagtcttcctgctgtaggtaacagttgctgtacttaaagccacagctgccctgaaggaagagaatcagtgcacggggcagctgagaagcccaagtaccagtgaataattcaggagcagtaagctgtcccgttgctctcctgtactttctccacagaagtttttttytggggggcaaaggatccc

SEQ ID NO: 92744 - DNA, 1279 bp, Homo sapiens
  misc_feature (1)...(1279): n = A,T,C or G
ctttttgattcaaaaatccctaggggcagaaagcctctgggataaatacttaacaaattatgttttaacaattacataagaaagagatggtccctggctcattaagaacaacacatgaccagttacttccttgtatttgtagcattactggactggcagatgaagggaaaaaccattacccatagatagagtttagctttattcattgagctagccagcagctttctcccaatatggacatgctcctggtgggtagggagaaattgggcagtatgataatagagtcacttgggctcctttcattaaaatatctatatgcaaaatattagatttatgtcaccctaaaatatatctgcagccccactgatattttannnnnnnnnnnnnnnnnnnnnnnnnnnnnnnnnnnnnnnnnnnnnnnnnnnnnnnnnnnnnnnnnnnnnnnnnnnnnnnnnnnnnnnnnnnnnnnnnnnncaaaaaaaagagaaaaaaaaagaaggaggaaagagaaagtagaatttaataatatgataaaaatagggaaaggagagggagaaaaagaaagaaagaaaaaaaagagaatagatgataaaaaaaaaaaagagaaaatgagaaaaattaaaaaaaaaaaaaataaagaatataagaagaagagtaaaaataaaaaaaataaaaattaataataattaaatataaacaaaaattaagaaaaagataaaaaaataaaaaagattaggaccaaaaataatcactttcaagttttgccccatctsagtccatctttcaacctatctttgtagccaaatgtggtaactgagtacttctctgttcagtgttctagatgctgggaaaatgagaggagatatgatggtggttcctgctcgaaaggagatttatattctggtggtaggaaagacacaattaaaaataatcaaataagattctttcagaaaccaacgagagctctgaggaaaaaacacttttcatgcatcacataccatgtccctatctttacatatctgttgtttggctccccttagggattgccaccaccatgaacagaaaggaatttatttatcttcctatctcccgtacagattatggaggatgcagcagctcccagcagtgcatttctcactacctgatttgttcagtctagaataatctcctgctgtacttcagtcatcctcccccaggtctgattgggtcaaggtttccctgtcatcatgtggtgcaggttgtctgctcatctggttgtcatccactgggtgatcacagg

SEQ ID NO: 92745 - DNA, 1279 bp, Homo sapiens
  misc_feature (1)...(1279): n = A,T,C or G
ctttttgattcaaaaatccctaggggcagaaagcctctgggataaatacttaacaaattatgttttaacaattacataagaaagagatggtccctggctcattaagaacaacacatgaccagttacttccttgtatttgtagcattactggactggcagatgaagggaaaaaccattacccatagatagagtttagctttattcattgagctagccagcagctttctcccaatatggacatgctcctggtgggtagggagaaattgggcagtatgataatagagtcacttgggctcctttcattaaaatatctatatgcaaaatattagatttatgtcaccctaaaatatatctgcagccccactgatattttannnnnnnnnnnnnnnnnnnnnnnnnnnnnnnnnnnnnnnnnnnnnnnnnnnnnnnnnnnnnnnnnnnnnnnnnnnnnnnnnnnnnnnnnnnnnnnnnnnncaaaaaaaagagaaaaaaaaagaaggaggaaagagaaagtagaatttaataatatgataaaaatagggaaaggagagggagaaaaagaaagaaagaaaaaaaagagaatagatgataaaaaaaaaaaagagaaaatgagaaaaattaaaaaaaaaaaaaataaagaatataagaagaagagtaaaaataaaaaaaataaaaattaataataattaaatataaacaaaaattaagaaaaagataaaaaaataaaaaagattaggaccaaaaataatcactttcaagttttgccccatctcagtccatctttcaacctatctttgtagccaaatgtggtaactgagtacttctctgttcagtgttctagatgctgggaaaatgagaggagatatgatggtggttcctgctcgaaaggagatttatattctggtggtaggaaagacacaattaaaaataatcaaataagattctttcagaaaccaacgagagctctgaggaaaaaacacttttcatgcatcacataccatgtccctatctttacatatctgttgtttggctccccttagggattgccaccaccatgaacagaaaggaatttatttatcttcctatctcccgtacagattatggaggatgcagcagctcccagcagtgcatttctcactacctgatttgttcagtctagaataatctcctgctgtacttcagtcatcctcccccaggtctgattgggtcaaggtttccctgtcatcrtgtggtgcaggttgtctgctcatctggttgtcatccactgggtgatcacagg

SEQ ID NO: 92746 - DNA, 2144 bp, Homo sapiens
gagacattgttgctaatttcttatgaggaaataaagatcttcagaactaaacagtagtcaaatgagctgaaaaggtgctggtgatatatcaggcaggcaccttggtttcaagcacagggttggcatacacaaaacagctcatcttttcccaagaacttctcagcctttcagagtggttttattctagcatagtttatgcacccttcctcccctttgtgccttgatattgtctgtcaattctcttctgtttctaaaaataaatatttagcagcctatggtgctgtttagatcaaagggagtaggaattataaatttttaatcatgaaatatcagctataaatggtataaattttgttctcaaaagattgttaacagaagacactgactttgtccaatagctttcaaatttaatcaggtaaacaagcaatttttaagaataaacagtgtactttgtgtggaaaaataaatccttatgaccagttattctatatgaagattctattatcattaagggctgattctcagccccagtctgtatcatctcatagttatctactgatatcccagacatgttgcaaaattcccaaagtgcaattaacctcagtacatgatgactgtatgtcatatttcttaacaactcaaggttttctccaagtaatattgcaaaattctcaaaatcccaattaatttcaattcgcttttgtagggatgtcacatattccttaaacattttcagtaacgagaggtcatcagaatcagtattgtgaggtttacgaaaactgccttgaaatcaaaatmagagactcaatgccaaagcagggtgggaagaactgccatttgtcaagcctgatgcagatgtgtctggaaatctatgcaagggtgattgggctcttccgttgattggacttgctatggtttgaatgttggtgtctcatccaaaattcatgttgaaacttagtggccaatgcatcaatattaagaggtgaggcctttaggaggcaatcaggccatgagagctccaccctcctgggtgagattaatgccttataaaagggcttaggggagtgactttgccccttcatctcttctgccctgtgaggatgcagcattcatcccttttgccccttctgtgcttgtttccactaagtgaggatgcagcaagaaggaccttgtgagacatcaaatgctggtgcctcaatctgggacttgccacctccagaactgtcagaaataaatttctgtgtttttttttgtttgtttgtttttgtttttttgtttttttctgacccattctagggcattttgttacagcagcaggaactgactaacacaggacctaatggagacttcttttaattcaagaatatcaactcgtgaacagttgttttgggggctcctggatatcagctaatatgctttgatttctgattatcaaaacattgtttgctttctgcaattcgatctttttaaatgctgttgcagagaagttccaaagcagcaacccttggatacacggagaatttaagctaccattaagagtttaaatgtatgctctcagtgaaggaagatgggatcactggttttgacatttagctatggcctgctgagctctgagaacagtatatgacataaacaggattccagtctttagtaacttccatactaaaaatgagtcactgttttgcagcaattacatttcttttcgttgttagcatcagcgatggaactttgatagttcaggctgtatgcaacatgcgtgattaaagaaaacagtacctctgacaagatggggcatcatctgaatacaccaggcaagatattagtagatgtaaaaatctgggaatatgtgagtgagatgtgcatgttaacagtgaaatcactcaggtcatttatttgtgtttctcctctcactgtgctgaaagccacacttgtaatcagaacctcttctaattttttttctgttttttcatcttgctttcctgtcattcttctaacactggaagtagcagaattggcagtgtgcctcacccctgcagtgagtgaaaacatggaggagtgatgccagttccattccgtaaatcggcccgggtgtgcacgtcagcagggacggtgttccttggacttcggcatggaaaggcaggaac

SEQ ID NO: 92747 - DNA, 1063 bp, Homo sapiens
cattgagacttgttttatggcctaacatatggtctatatggagagtgtgccacgtgcacttgagaagaacatgtagtcttctgttgaggggagacttcaacagatttctgttaggtccagttggtttgtagagttattcaagatttctgttttatctattattgaaagtgggtcattgaagttctcaactattattgttagaatttctgcttctcccttaaattctgagtttttgttatatgtattttgagactcttgttaggtccayatatgtttaaaattgctataatttctaataaattggacacttttatcagtataaaatgtccttacttgtttctagtaatgagttttcttttatagtccattttgtctgctgttagtataaccactcaggttctatttttgttactgtttgcatgatacatctcattgtgtcttttacttccaacctatttgtgtctttgaaagtgtgtctcttttaaaagcatgtaatgggattatatttttaaatccattctgctaatatctgcctcttaataatacatctattaaacttttaaatctaaactcaaaagagatttaaaaaaaatttttcaacttttattttagattcaagggatacgtgtgcaggtttgttatttggatatattgtgtggtgctgaggtttggggtatgattgatcctgtcacccagatactgaatatagtgcccaatagttactttatcaacccttcctccccttctaccctcccccaaaaatagtcctcagtttctattgtagccatctttatgtcctcaaatacccattgtttcactctctattataaatgagaacatgtggtatttggtatttggtttcctgttcctgtgtgaatttgcataggataacggtcaccagctacattcatgttgctgcaaaggacatgatttcatttgtttcttatggctgtgtagttttagtattccatgacgtaaatgtaccacattggctttatccagcccactgttgattgcatctaggttgattccatgtctttgctattttgaatagtgctgcagt

SEQ ID NO: 92748 - DNA, 1063 bp, Homo sapiens
cattgagacttgttttatggcctaacatatggtctatatggagagtgtgccacgtgcacttgagaagaacatgtagtcttctgttgaggggagacttcaacagatttctgttaggtccagttggtttgtagagttattcaagatttctgttttatctattattgaaagtgggtcattgaagttctcaactattattgttagaatttctgcttctcccttaaattctgagtttttgttatatgtattttgagactcttgttaggtccatatatgtttaaaattgctataatttctaataaattggacacttttatcagtataaaatgtccttacttgtttctagtaatgagttttcttttatagtccattttgtctgctgttagtataaccactcaggttctatttttgttactgtttgcatgatacatctcattgtgtcttttacttccaacctatttgtgtctttgaaagtgtgtctcttttaaaagcatgtaatgggattatatttttaaatccattctgctaatatctgcctcttaataatacatcyattaaacttttaaatctaaactcaaaagagatttaaaaaaaatttttcaacttttattttagattcaagggatacgtgtgcaggtttgttatttggatatattgtgtggtgctgaggtttggggtatgattgatcctgtcacccagatactgaatatagtgcccaatagttactttatcaacccttcctccccttctaccctcccccaaaaatagtcctcagtttctattgtagccatctttatgtcctcaaatacccattgtttcactctctattataaatgagaacatgtggtatttggtatttggtttcctgttcctgtgtgaatttgcataggataacggtcaccagctacattcatgttgctgcaaaggacatgatttcatttgtttcttatggctgtgtagttttagtattccatgacgtaaatgtaccacattggctttatccagcccactgttgattgcatctaggttgattccatgtctttgctattttgaatagtgctgcagt

SEQ ID NO: 92749 - DNA, 1063 bp, Homo sapiens
cattgagacttgttttatggcctaacatatggtctatatggagagtgtgccacgtgcacttgagaagaacatgtagtcttctgttgaggggagacttcaacagatttctgttaggtccagttggtttgtagagttattcaagatttctgttttatctattattgaaagtgggtcattgaagttctcaactattattgttagaatttctgcttctcccttaaattctgagtttttgttatatgtattttgagactcttgttaggtccatatatgtttaaaattgctataatttctaataaattggacacttttatcagtataaaatgtccttacttgtttctagtaatgagttttcttttatagtccattttgtctgctgttagtataaccactcaggttctatttttgttactgtttgcatgatacatctcattgtgtcttttacttccaacctatttgtgtctttgaaagtgtgtctcttttaaaagcatgtaatgggattatatttttaaatccattctgctaatatctgcctcttaataatacatctattaaacttttaaatctaaactcaaaagagatttaaaaaaaawttttcaacttttattttagattcaagggatacgtgtgcaggtttgttatttggatatattgtgtggtgctgaggtttggggtatgattgatcctgtcacccagatactgaatatagtgcccaatagttactttatcaacccttcctccccttctaccctcccccaaaaatagtcctcagtttctattgtagccatctttatgtcctcaaatacccattgtttcactctctattataaatgagaacatgtggtatttggtatttggtttcctgttcctgtgtgaatttgcataggataacggtcaccagctacattcatgttgctgcaaaggacatgatttcatttgtttcttatggctgtgtagttttagtattccatgacgtaaatgtaccacattggctttatccagcccactgttgattgcatctaggttgattccatgtctttgctattttgaatagtgctgcagt

SEQ ID NO: 92750 - DNA, 504 bp, Homo sapiens
tatcatcaccctatttaaaaatcctcttaccttagtttgtgtaagtacactctatgatggtgcataatgaaatcacctgacaatgcatttctcagaaagtatctcyatttttaagcaacacatgactgcagttctctgttgcctcaaataaattatagacagtatgatgattttaaagaaaagatacaagagttcaaagaatatttaagacaatgtaaggaaataaaaagtaacctggcagagctcagccaagaagtggaagggaaagataaatacaaacttataaaaactagaactaatatacattaaaaatgtcagtatcatggtgaaaattatatgaaacaaaatggaaattagcaaagttatttaaattattatggcaatgcatacagacatgaaaagaaaagaaaaccccaaatgagcagaaagcagagaacaggggaaagaataaatttttaaaaagtgttcaaagacaagatagaaaaacttttctaaaataaaggc

SEQ ID NO: 92751 - DNA, 717 bp, Homo sapiens
tttccaggagggggattggaagatttgatgcatggatcaaattagctacacagtccacatgaaatgcaaatttgttttgctccctccatggcagctaagtatagtacaacatattaggatgtgagaaacctgagctaaacccccacattttcctgataactcactagccttatacaagtctccccatcaccaattcaagctctgcagtaagccacaccactttatcagaccctggacagcctttctaggcactgccacaggccactagaaaccrttgtttatattgaaatagcagaacttactgtgacctttaaaaataaagtactaatttatatccttatgctgtggtctgaatgtttgtgtctctgcaaaatccatgtgttgatatctagtcctcaatgagatagattaatgcgcttataaaaaaggcctaagggaggttgtttgtctcttccactgtgagaaggcaccatcattgaggaatggtcctcaccagacactgaatctgctgatgtcttcatctttgacttcctagcctccagaactgcaaaaaacaaatttctgttgtatataaggcagccagtttatggtatttttgttatagcagcctgaatagactaaaacaccttatatattcctttacgtttcaacaaaaagtgggtgttgcttttttttaataagataatgcatgatgagtatttgggccctcagggacat

SEQ ID NO: 92752 - DNA, 717 bp, Homo sapiens
tttccaggagggggattggaagatttgatgcatggatcaaattagctacacagtccacatgaaatgcaaatttgttttgctccctccatggcagctaagtatagtacaacatattaggatgtgagaaacctgagctaaacccccacattttcctgataactcactagccttatacaagtctccccatcaccaattcaagctctgcagtaagccacaccactttatcagaccctggacagcctttctaggcactgccacaggccactagaaaccgttgtttatattgaaatagcagaacttactgtgacctttaaaaataaagtactaatttatatccttatgctgtggtctgaatgtttgtgtctctgcaaaatccatgtgttgatatctagtcctcaatgagatagattaatgcgcttataaaaaaggcctaagggaggttgtttgtctcttccactgtgagaaggcaccatcattgaggaatggtcctcaccagacactgaatctgctgatgtcttcatctttgacttcctagcctccagaactgcaaaaaacaaatttctgttgtatataargcagccagtttatggtatttttgttatagcagcctgaatagactaaaacaccttatatattcctttacgtttcaacaaaaagtgggtgttgcttttttttaataagataatgcatgatgagtatttgggccctcagggacat

SEQ ID NO: 92753 - DNA, 853 bp, Homo sapiens
atccataaaagtgggtactgactagaacagaagaccatagacaacaacttggctttctgccaccgggtgccaaaaataagggtttagacccattgcatacaacagagtagcccattttctaacagtgtgagttcccaggctcaggattagatttcacctaatgtgcaacatcacactccattgcctagagcccaattactccaaagcatgaggctgtgccccccaatcactgtgcctacgtaagcagattagagtcaccacattttttgtattaaagatgatctgctttttatttacctcaaatgatttcaatttccaggaagcaggaagatgacagaatgtgtgctcgagtaggcagcgggaggcaacggggcggaagtatcatttctgtcagcattgccatcttgcccctgggagttctagcaaagagctgagagagggatttagaacagcggtcacctttgattaagaacagyggtcaccctcattttgctcactgaagctttaattgtggattctgatctgctggttggggacttttgtatgagacagaagcatgtagcattatcctagtacaatagtgaatataaattgttattatagaatcctagcatgactaggaaactgaaattcagtttatcaggatgctcccttagaccctggattcatgtatccattggaggggatttctatgactcttcctcctcatactcctccatcctccagttgcctaggcagggcttttgctccactctctactgaggcaggggggaaagtctccatcaccatctctcttagtatcttaactagttccttgccaagggaaggggacagtctctgaactgagagttta

SEQ ID NO: 92754 - DNA, 1475 bp, Homo sapiens
aggttcatatctccctggtattcaaaatctattggcaactctgtatataaaggggtttattatcctccacttttaggcaaatgaattcagggtctatttttgctccaattctccccaccagcaaatcacaaggtctgagcatgagcagatgttaacagaatgcttccattttgacttcaggctaggctattttctcccatccagctttcccaaggagccctgtatttggagaactgtgttagtctgttttctccccactaataaagacatactcaagactgggtaatttatagaggaaagatgtttaattgcttcacagttccacatggctggggagtcctcagaaycatggtggaaggtgaaaggggagaaagacacatcttacatggcagcaggcaagagagtgtgtgcaggggaactctataaaaccatcagatgttgtgagacttattcaccactgtgggaacagtgtgggggaaactgcccacaagattcaattatctccacctgaccctgccctcgacatgtggggattattataatttaaggtcagatttgggtggggacacagccaaaccatatcgggaaccattagggcaccatttgtaaagccaacttattaatcactattgattccctgagtctgttccctaccagttagaaccaagtgagaggagtgatgagaggttgtaacctctaccttttgacatggataaatgagttaaataaaggatcccaaataatcctactatacagtactatgcaccctcaaatctcaaaatataatcaattatgtagaaacaataccaactgaaggcacttttttctacctctttctcttaccaaataattgaaaccatatcatttgtcctttatatacttcaggaaaagtaaaaaatatgacaggggaattctgagatgtattgcctaccatttctggttgtcagttttaatgtttgctgaatactgtgttggcatatgacatctgtcttaagtagcagcaatgcatcctcttggactccctctgaggtaatgcatcttccctccactactgagctgggcctttttgctaccccaacattttgcagctgctggaacctctcctcagtctgggatgctttcctctatgccatccagagtcctaaagggaacactggcggaagaagggaattagaaaaaaaaaaaaaaaaaaaaaaaaaaacacttagaatttatctagttcacacataccaagttaatatttaattttttcaaatttatatcttttttcatggatttcctacaactaacaatttatggtactaaatctgaatgaaaaaaattctgtaacctgaagaattcatgtcctaagttttctgggataaaaataagcagagcagcaattgaaatttgtatttctcagaaggtaacaagtatggggtcagtacagaaatcccctcaggtgtcctgaagccagctctccccactaccttact

SEQ ID NO: 92755 - DNA, 1314 bp, Homo sapiens
aggtagaaagccagaacttgaatgccgtaagtctgtaccattrctcaacacaataacatggtacaaatgtatacttgcataacataataaccatgcaattacatagtctttctacaccaacataaaaagcagttacacacacacacaaactcacacacacattcatttaaatgaaggaaaaagtagcagaagcctttttttattattttacattattgtcatatttcatagaatttataacatgatctaaagcagtttgccaacattttaatttaattctctaagactgtaatttagcttgctgcatcttaaatttcctactgaaattctcagtcattttccttatattactgttataaacttgagttagagccatatagtttttgagaggtactccactgtagtgtggttctaaaaattatttctcagaattacatagctggattggtatcctggaattcttaaaaatatctctctaaaagaatattctaagtgcattagaaatgctccactgtagaaataaatagtaaagagaaataaagatataaagtgttcaaaatgtgactataatgaaaataagtttgtacagttttgacttctcatcaatagatgtgaaatattattttttatgttgcaaaataattcagaattataataatttattagaactttacagttacatgcaaaaatatacaaaaacaggttataaagaatatgctattattagcgtaagtaatgtagaaaaagatgtatattcatattgcttctgtatgtataaaataacttcagaaaactatacacacacaaaaaagccctgataacactgattggctatagagaggagagaataattgagtgggtgggtaatgctggtggcaatgttgaactctgaaacatatagacatatcacctattaaaaatagatatgaaaacatgtacaaggtataaaaataatgcttgatttgatagcaaactttccatgtttatttccaataaagaggagatgacttctaaaaatctcttccattaatagaataaaattttataataccaaattgccaaggaaaggaaaaacatacatctattaaaaagagatataagaaaaaaattatcttcaattctagctactcaaggaactagaacaaattggccacagaaaatgagtttgaatgggctgtgggaatacagaatcaagctttgattgactgcccttgttcaaagtactggttacaatgcttcataattgttacaatatagtaacagtggatttcagactggaaataattaatatactataatagttaacattttcaa

SEQ ID NO: 92756 - DNA, 1314 bp, Homo sapiens
aggtagaaagccagaacttgaatgccgtaagtctgtaccattactcaacacaataacatggtacaaatgtatacttgcataacataataaccatgcaattacatagtctttctacaccaacataaaaagcagttacacacacacacaaactcacacacacattcatttaaatgaaggaaaaagtagcagaagcctttttttattattttacattattgtcatatttcatagaatttataacatgatctaaagcagtttgccaacattttaatttaattctctaagactgtaatttagcttgctgcatcttaaatttcctactgaaattctcagtcattttccttatattactgttataaacttgagttagagccatrtagtttttgagaggtactccactgtagtgtggttctaaaaattatttctcagaattacatagctggattggtatcctggaattcttaaaaatatctctctaaaagaatattctaagtgcattagaaatgctccactgtagaaataaatagtaaagagaaataaagatataaagtgttcaaaatgtgactataatgaaaataagtttgtacagttttgacttctcatcaatagatgtgaaatattattttttatgttgcaaaataattcagaattataataatttattagaactttacagttacatgcaaaaatatacaaaaacaggttataaagaatatgctattattagcgtaagtaatgtagaaaaagatgtatattcatattgcttctgtatgtataaaataacttcagaaaactatacacacacaaaaaagccctgataacactgattggctatagagaggagagaataattgagtgggtgggtaatgctggtggcaatgttgaactctgaaacatatagacatatcacctattaaaaatagatatgaaaacatgtacaaggtataaaaataatgcttgatttgatagcaaactttccatgtttatttccaataaagaggagatgacttctaaaaatctcttccattaatagaataaaattttataataccaaattgccaaggaaaggaaaaacatacatctattaaaaagagatataagaaaaaaattatcttcaattctagctactcaaggaactagaacaaattggccacagaaaatgagtttgaatgggctgtgggaatacagaatcaagctttgattgactgcccttgttcaaagtactggttacaatgcttcataattgttacaatatagtaacagtggatttcagactggaaataattaatatactataatagttaacattttcaa

SEQ ID NO: 92757 - DNA, 1314 bp, Homo sapiens
aggtagaaagccagaacttgaatgccgtaagtctgtaccattactcaacacaataacatggtacaaatgtatacttgcataacataataaccatgcaattacatagtctttctacaccaacataaaaagcagttacacacacacacaaactcacacacacattcatttaaatgaaggaaaaagtagcagaagcctttttttattattttacattattgtcatatttcatagaatttataacatgatctaaagcagtttgccaacattttaatttaattctctaagactgtaatttagcttgctgcatcttaaatttcctactgaaattctcagtcattttccttatattactgttataaacttgagttagagccatatagtttttgagaggtactccactgtagtgtggttctaaaaattatttctcagaattacatagctggattggtatcctggaattcttaaaaatatctctctaaaagaatattctaagtgcattagaaatgctccactgtagaaataaatagtaaagagaaataaagatataaagtgttcaaaatgtgactataatgaaaataagtttgtacagttttgacttctcatcaatagatgtgaaatattattttttatgttgcaaaataattcagaattataataatttattagaactttacagttacatgcaaaaatatacaaaaacaggttataaagaatatgctattattagcgtaagtaatgyagaaaaagatgtatattcatattgcttctgtatgtataaaataacttcagaaaactatacacacacaaaaaagccctgataacactgattggctatagagaggagagaataattgagtgggtgggtaatgctggtggcaatgttgaactctgaaacatatagacatatcacctattaaaaatagatatgaaaacatgtacaaggtataaaaataatgcttgatttgatagcaaactttccatgtttatttccaataaagaggagatgacttctaaaaatctcttccattaatagaataaaattttataataccaaattgccaaggaaaggaaaaacatacatctattaaaaagagatataagaaaaaaattatcttcaattctagctactcaaggaactagaacaaattggccacagaaaatgagtttgaatgggctgtgggaatacagaatcaagctttgattgactgcccttgttcaaagtactggttacaatgcttcataattgttacaatatagtaacagtggatttcagactggaaataattaatatactataatagttaacattttcaa

SEQ ID NO: 92758 - DNA, 1314 bp, Homo sapiens
aggtagaaagccagaacttgaatgccgtaagtctgtaccattactcaacacaataacatggtacaaatgtatacttgcataacataataaccatgcaattacatagtctttctacaccaacataaaaagcagttacacacacacacaaactcacacacacattcatttaaatgaaggaaaaagtagcagaagcctttttttattattttacattattgtcatatttcatagaatttataacatgatctaaagcagtttgccaacattttaatttaattctctaagactgtaatttagcttgctgcatcttaaatttcctactgaaattctcagtcattttccttatattactgttataaacttgagttagagccatatagtttttgagaggtactccactgtagtgtggttctaaaaattatttctcagaattacatagctggattggtatcctggaattcttaaaaatatctctctaaaagaatattctaagtgcattagaaatgctccactgtagaaataaatagtaaagagaaataaagatataaagtgttcaaaatgtgactataatgaaaataagtttgtacagttttgacttctcatcaatagatgtgaaatattattttttatgttgcaaaataattcagaattataataatttattagaactttacagttacatgcaaaaatatacaaaaacaggttataaagaatatgctattattagcgtaagtaatgtagaaaaagatgtatattcatattgcttctgtatgtataaaataacttcagaaaactatacacacamaaaaaagccctgataacactgattggctatagagaggagagaataattgagtgggtgggtaatgctggtggcaatgttgaactctgaaacatatagacatatcacctattaaaaatagatatgaaaacatgtacaaggtataaaaataatgcttgatttgatagcaaactttccatgtttatttccaataaagaggagatgacttctaaaaatctcttccattaatagaataaaattttataataccaaattgccaaggaaaggaaaaacatacatctattaaaaagagatataagaaaaaaattatcttcaattctagctactcaaggaactagaacaaattggccacagaaaatgagtttgaatgggctgtgggaatacagaatcaagctttgattgactgcccttgttcaaagtactggttacaatgcttcataattgttacaatatagtaacagtggatttcagactggaaataattaatatactataatagttaacattttcaa

SEQ ID NO: 92759 - DNA, 1314 bp, Homo sapiens
aggtagaaagccagaacttgaatgccgtaagtctgtaccattactcaacacaataacatggtacaaatgtatacttgcataacataataaccatgcaattacatagtctttctacaccaacataaaaagcagttacacacacacacaaactcacacacacattcatttaaatgaaggaaaaagtagcagaagcctttttttattattttacattattgtcatatttcatagaatttataacatgatctaaagcagtttgccaacattttaatttaattctctaagactgtaatttagcttgctgcatcttaaatttcctactgaaattctcagtcattttccttatattactgttataaacttgagttagagccatatagtttttgagaggtactccactgtagtgtggttctaaaaattatttctcagaattacatagctggattggtatcctggaattcttaaaaatatctctctaaaagaatattctaagtgcattagaaatgctccactgtagaaataaatagtaaagagaaataaagatataaagtgttcaaaatgtgactataatgaaaataagtttgtacagttttgacttctcatcaatagatgtgaaatattattttttatgttgcaaaataattcagaattataataatttattagaactttacagttacatgcaaaaatatacaaaaacaggttataaagaatatgctattattagcgtaagtaatgtagaaaaagatgtatattcatattgcttctgtatgtataaaataacttcagaaaactatacacacacaaaaaagccctgataacackgattggctatagagaggagagaataattgagtgggtgggtaatgctggtggcaatgttgaactctgaaacatatagacatatcacctattaaaaatagatatgaaaacatgtacaaggtataaaaataatgcttgatttgatagcaaactttccatgtttatttccaataaagaggagatgacttctaaaaatctcttccattaatagaataaaattttataataccaaattgccaaggaaaggaaaaacatacatctattaaaaagagatataagaaaaaaattatcttcaattctagctactcaaggaactagaacaaattggccacagaaaatgagtttgaatgggctgtgggaatacagaatcaagctttgattgactgcccttgttcaaagtactggttacaatgcttcataattgttacaatatagtaacagtggatttcagactggaaataattaatatactataatagttaacattttcaa

SEQ ID NO: 92760 - DNA, 555 bp, Homo sapiens
tagccaaagtggtaatttaaacataaattattaactccactgtttaaaatcttccttttacatttataattcaaagtatgagtattctcatacttaaagtataccagtcactttttcattgttagagggggcagtggttaattacttgcctttttttccagcatttttttggtccttattgtttgttttttacttctgttggaagcattttaaaatttctgtgcagtaaaattccttttgcgggragtacagttgtgtgagttttaacacatgcatcatttattataattaccagctctcccaggatacagaacaatgccaaagccccagtgaatacctcatagagccttctttgcagtcagactttctccccacccctacacgctggcaaccattgacctgatctctgttcttgcagttttgccttttccagaatgtcattcaaatggcttctttcccttagtctactgcatttaagattcatccaaggtgcttttttgtatcaatagtccatttcatttcattgctaagtagtatttcattatatggatatat

SEQ ID NO: 92761 - DNA, 555 bp, Homo sapiens
tagccaaagtggtaatttaaacataaattattaactccactgtttaaaatcttccttttacatttataattcaaagtatgagtattctcatacttaaagtataccagtcactttttcattgttagagggggcagtggttaattacttgcctttttttccagcatttttttggtccttattgtttgttttttacttctgttggaagcattttaaaatttctgtgcagtaaaattccttttgcggggagtacagttgtgtgagttttaacacatgcatcatttattataattaccagctctcccaggatrcagaacaatgccaaagccccagtgaatacctcatagagccttctttgcagtcagactttctccccacccctacacgctggcaaccattgacctgatctctgttcttgcagttttgccttttccagaatgtcattcaaatggcttctttcccttagtctactgcatttaagattcatccaaggtgcttttttgtatcaatagtccatttcatttcattgctaagtagtatttcattatatggatatat

SEQ ID NO: 92762 - DNA, 555 bp, Homo sapiens
tagccaaagtggtaatttaaacataaattattaactccactgtttaaaatcttccttttacatttataattcaaagtatgagtattctcatacttaaagtataccagtcactttttcattgttagagggggcagtggttaattacttgcctttttttccagcatttttttggtccttattgtttgttttttacttctgttggaagcattttaaaatttctgtgcagtaaaattccttttgcggggagtacagttgtgtgagttttaacacatgcatcatttattataattaccagctctcccaggatacagaacaatgccaaagccccagtgaatacctcatagagccttctttgcagtcagactttctccccacccctacacsctggcaaccattgacctgatctctgttcttgcagttttgccttttccagaatgtcattcaaatggcttctttcccttagtctactgcatttaagattcatccaaggtgcttttttgtatcaatagtccatttcatttcattgctaagtagtatttcattatatggatatat

SEQ ID NO: 92763 - DNA, 1588 bp, Homo sapiens
gggagggatagcattgggagatatacctaatgctaaatgatgagttaatgggtgcagcacaccaacatggcacatgtatacatatgtaacaaacctgcacgttgtgcacatgtaccctaaaacttaaagtataataataaaataaaataaaataaacgggtaaaaggggccctaaatgatagcagtaatatcataaatcaatataacaacgtatgcaaaaagaacaattttttttgagacagagagtctcgctctgycaccaggctggagtgcagtggtgtcatcctggctcactgcaacctccgcctccggggttcaagcgattctcctgcctcaggagagtagttgggaccacaggtgcgcgcggccacgtcctgctacatttttgtatttttagtagagacggggtttcaccatgttggccaggatggtctccatctcttgacctcgtgatccgccagcctcgacctcccaaagtgctgggattacaggcgtgagccatcacgcccggctggtatgcacaaattttaaaaagatcttcacacattaagataaataaaagatgtaaagaagtggatggatccactacatctcaataaaaattccagaagagattattgaggtaattaacaagttttatttttgtagatttaaatgtaagagaacagccaagatcttaaagaaccacacatttgtaggacttagaggaccatacattaaaatttattatcaagttatatttaagagaatactggccgaacgcggtggctcacgcctgtaatcccagcactttgggagactgaggcgggaggatcacgaggtcaggagatcgagcccatcccggctagcacggtgaaaccccgactctactaaaaataaaaaaaaattaactgggcatggtggcgggcgcctgtagtcccagctactcggtaggcggaggcaggagaacagggtgaacccaggaggcggagcttgcagtgagcagagatcccgctaaggcactcccgcctgggcaacagagccagattccgtctcacaacaaaaacaaacaaacaaacagaatattgaactaaaaatagaccattataccaatgaaacagaataccagaagaaaattttttgacccaaattcacataatatataaaaaaaaaatcaattccacgtgaattagagctctttatgtggactaataaagttcctttaaaaaaagaaatcatgatatgagttggctctgtgttcccactcaaatctgatcttgaagtgtaatcctcacatgtcagggagggacctggtgggaggggatggatcatggggatggtttcccccatgctattctcatcacagtgagaagttctcatgagagctgatggttttgtgtccagaattggtgggttctcggtctcactgacttcaagaatgaagccatggaccctcgggtgagtgttacagttcttaaagacagcgtgtccggagtccgttccttttgatgttcagagtttcttccttctggtgggttcctggtctcactgccttaggagtgaagctgcagaccttcacagtcagtgttacagctcataaaagcagtgt

SEQ ID NO: 92764 - DNA, 529 bp, Homo sapiens
taatcttgcttctgcctgaaatattttctttataagctggggcttttactcaatttattaacaygcaatatcttcctggaggattttgtttgtttgcttgtttgtttttaattttacttattgatttttttttcctcactgaaacaaaataatttggaagacttgtcactgtgtaatcccctctgtgatcccaaaccttttttccttgtttcttttaattaactaacatgtcaatcagatttgtaccgcttgtgtttttacccattatcactgtttgtatagagttttagtttaatctgtatgtatattacatccacccaattctttgataagcatgggtttttgtgtcgatgtgagagtgagaaaatgtttagaaagccgatgctttcctcatgaagccttttctaaaactttcctaaatcttaggaagaacaatactgccatcctaaggcaaattaagttttaagaaacaccaccaacttttgtacacattttagatttgtatttcacactttcatattagatttat

SEQ ID NO: 92765 - DNA, 551 bp, Homo sapiens
aactttatatttttaaggtacattaaatcttttaacattatataatgattttttaaatttccagtaatagttttaatattaacatatattttgaattattttatcattaccatatactaacctttttattgatttctatgttgtttcttttaatttcaagcatttcttagtcatatattttagacatttttcttataaataacatatacgtggatttttaaaaaatattctatcatccaatattcatctttttcccccactgtttatcttttaaatgaagtgtttacttcatttcaatgttttgtagttaccagtacactcagaataattaatctattttattttgtactattttttccaattctatgtttgatagaacttcatctggggaaatgctttgagacctactttcaaggggctttaatctatacaggatatttattactttcagtttaaractttcaaatcaggatatattttaaataatttatagatttgaattagttttggccaaaatgaaagtgtaaataggtaagggctacaaatttgag

SEQ ID NO: 92766 - DNA, 706 bp, Homo sapiens
agcccactcagtagagggagggaccagaaaaggacaaaaacaagtagaggctaggcgcagtggctcacacctgtaattccaacactttgtggggctaaggtgggaggatcacttgagctcaggagttcgagaccagcctgggcaacatggcaaaaccctgtctctaccaaaaatacaaaaaattagccagacatggtggcatgcacctgtggtcccaggtactcaggaggctgaggcaggagggttgtttgagcccaggaggyggaggttgcagtgagccatgatcgtgccaatgcactccagcctgggtgacagagtgagaccccatctcaaagaaaaaacaaaacaaaaaaacaagtagaaagagaactctagaagcaagaaacacctatgtgaagagttaaaagaggacaagatgcagacaagtatagggaacaggacttttcagttggaatgaagactgagcccacaagtcctgggagactttagagagcaacttgataccaaaggtgattacagccaaattgaggcataaactcaaaataagattttgtgtttactgcattccggcaaggtactgaataaaacatacttatgatccaggctctattctcatagctgtccttgcccaggaaccagcagatagaagagagctaagctgttgagttagtccctaactcttatattgccatattttccatgtcta

SEQ ID NO: 92767 - DNA, 514 bp, Homo sapiens
  misc_feature (1)...(514): n = A,T,C or G
gtttacaggcctaggaagtgatgtgcacagagaacagtaagaagattaatttactggagtggaataaccagattcctattatagccatccatgtaagtgccaccatatataaaacactgttttagtttctaggctatatagaaataaaaaagattagatggttcctcccctcaacatgtttaaaatctaatggaggaaattcaaattacagtaggagggagagtgggaggaacaaagagcttacaataagagaacaaagaagagaaaaattaattaataatgggaaatatggggaagcrcttcacagagaggatagtatttcagctgggcttgaagagtggtactttagtaggcaaaagagatgagggagggaatgccagtgaaaagacagcataggtcaaaggcacaaannnnnnnnnnnnnnnnnnnnnnnnnnnnnnnnnnnnnnnnnnnnnnnnnnnnnnnnnnnnnnnnnnnnnnnnnnnnnnnnnnnnnnnnnnnnnnnnnnnnagtg

SEQ ID NO: 92768 - DNA, 1500 bp, Homo sapiens
gggggagggggggttatttttgtttttataagttccctaactaatactgacagcagcgagtccagagtgaggaccaggcaggctagatggtgcccgtctcccttctccttctaatcatgagtagaagaattaaggagaggcagtctaaggtgatgtcagcctgagaagctaatcactggcagctttttagaggacaggaattggaagctgcatttagaaagagatgatttacgggcacatgtgacggggaggaaagcccaggcatagggtaaacagagcttgctcaaaagcagagtgagaatgaaacacagctcccaaggacttagcctagcctgggtggagctagatgcagggactagaggagagacatctttcagtttctactggggagctcaggtttcatggagtgtgaagtgcttgccttttttagccttgtgagctgcttctggagcagtagaggggaacaagcctctcagaggtctgcacttggatgtcagagaatggtacttagacatatccaatgagagggactttaatacttctcttaatggagcacagaacatccagaaaatatttttgtccttgccttggactttagatatcagcatccagtcctgaattcaggaatgacctgagaggtccaggcctcctctccttttagactaacagggcagaaagccagcccttcctcccagtgtcatagggagctgaaatgccttgagatgctcagcagaagggatccccctccacccccagtaccccatccactctgctttctctgatctcccactacagactcgcgcctgcggaacagcgaagatgcccgtggtgttctctgtgaagctcaagaggcagccatgcctgagatccaagagcagatccacgactacaggttggcccaggagctgacctcccacctctctcctcgttcacctcckcctcttggccctggctccttccctctgggacgtgcacatatctcttgttatatgtgtttgtcttgttctttctggatgtccatctgttgagtatttgtgtatatttctttctttccctgtgtttatctggcttagaacgaagcgcacactggggctgggcagcctgtatggtgaaaatgacctgctggacctggatggggaccctctccgagagcgccaagtggctgagaagcagctggctgcccttggagatattttgtgagtctttcagcttcctcccaccccactgaacatcctaagcaggttgacatattttgtgggtctgttctttcaacctctccccctcttccacttcttgcctgattctcctgcccctgaaagatggggagtcctgcactcctgctgcattggtcaggctgagggctgcaggtgttcaagggtgtggcagagcctggagctcctgatagtcatttggtggttatgacagaccacgggccccaggaatgtggtaagctttctgctttcccctgctggccctcctcctgacctctctcccttcctg

SEQ ID NO: 92769 - DNA, 1500 bp, Homo sapiens
gggggagggggggttatttttgtttttataagttccctaactaatactgacagcagcgagtccagagtgaggaccaggcaggctagatggtgcccgtctcccttctccttctaatcatgagtagaagaattaaggagaggcagtctaaggtgatgtcagcctgagaagctaatcactggcagctttttagaggacaggaattggaagctgcatttagaaagagatgatttacgggcacatgtgacggggaggaaagcccaggcatagggtaaacagagcttgctcaaaagcagagtgagaatgaaacacagctcccaaggacttagcctagcctgggtggagctagatgcagggactagaggagagacatctttcagtttctactggggagctcaggtttcatggagtgtgaagtgcttgccttttttagccttgtgagctgcttctggagcagtagaggggaacaagcctctcagaggtctgcacttggatgtcagagaatggtacttagacatatccaatgagagggactttaatacttctcttaatggagcacagaacatccagaaaatatttttgtccttgccttggactttagatatcagcatccagtcctgaattcaggaatgacctgagaggtccaggcctcctctccttttagactaacagggcagaaagccagcccttcctcccagtgtcatagggagctgaaatgccttgagatgctcagcagaagggatccccctccacccccagtaccccatccactctgctttctctgatctcccactacagactcgcgcctgcggaacagcgaagatgcccgtggtgttctctgtgaagctcaagaggcagccatgcctgagatccaagagcagatccacgactacaggttggcccaggagctgacctcccacctctctcctcgttcacctccgcctcttggccctggcwccttccctctgggacgtgcacatatctcttgttatatgtgtttgtcttgttctttctggatgtccatctgttgagtatttgtgtatatttctttctttccctgtgtttatctggcttagaacgaagcgcacactggggctgggcagcctgtatggtgaaaatgacctgctggacctggatggggaccctctccgagagcgccaagtggctgagaagcagctggctgcccttggagatattttgtgagtctttcagcttcctcccaccccactgaacatcctaagcaggttgacatattttgtgggtctgttctttcaacctctccccctcttccacttcttgcctgattctcctgcccctgaaagatggggagtcctgcactcctgctgcattggtcaggctgagggctgcaggtgttcaagggtgtggcagagcctggagctcctgatagtcatttggtggttatgacagaccacgggccccaggaatgtggtaagctttctgctttcccctgctggccctcctcctgacctctctcccttcctg

SEQ ID NO: 92770 - DNA, 581 bp, Homo sapiens
tcgactcaagtaacaactccgtttatacaaggtataaagtatgccttctttgaagaaaatccagtcttttgagaatttatatttaaggtattatcactttcrtgatgatttacttcagaacatatttacttatcttttcaggaaaacattaggtaaaacaagatatgcctgtagggccgggcacggtggatcatacctataatccaagcactttgggaggccgaggcaggtggctcacttgaggtcaggagtttgagaccagcctggcccacatggcaaaacgccatctttactaaaactacaaaaattagcctggcatgttgacacacgctctaattccagctgctcaggagactgaggtacaagaatcacttgaacctgggaggcgaaggttgcagtgagctgagatcgcaccactgcactccagcctgtgtgatagagtgtgactgtctcaaaaaaattttaaaaagatactcttgtagagtggttttaggatgacaagtaatttaattatcacagtgccctgcaaaaagtacaaggcttggtcttcccatcttactgttaagaaagctgagactgag

SEQ ID NO: 92771 - DNA, 581 bp, Homo sapiens
tcgactcaagtaacaactccgtttatacaaggtataaagtatgccttctttgaagaaaatccagtcttttgagaatttatatttaaggtattatcactttcatgatgatttacttcagaacatatttacttatcttttcaggaaaacattaggtaaaacaagatatgcctgtagggccgggcacrgtggatcatacctataatccaagcactttgggaggccgaggcaggtggctcacttgaggtcaggagtttgagaccagcctggcccacatggcaaaacgccatctttactaaaactacaaaaattagcctggcatgttgacacacgctctaattccagctgctcaggagactgaggtacaagaatcacttgaacctgggaggcgaaggttgcagtgagctgagatcgcaccactgcactccagcctgtgtgatagagtgtgactgtctcaaaaaaattttaaaaagatactcttgtagagtggttttaggatgacaagtaatttaattatcacagtgccctgcaaaaagtacaaggcttggtcttcccatcttactgttaagaaagctgagactgag

SEQ ID NO: 92772 - DNA, 581 bp, Homo sapiens
tcgactcaagtaacaactccgtttatacaaggtataaagtatgccttctttgaagaaaatccagtcttttgagaatttatatttaaggtattatcactttcatgatgatttacttcagaacatatttacttatcttttcaggaaaacattaggtaaaacaagatatgcctgtagggccgggcacggtggatcatacctataatccaagcactttgggaggccgaggcaggtggctcacttgaggtcaggagtttgagaccagcctggcccacatggcaaaacsccatctttactaaaactacaaaaattagcctggcatgttgacacacgctctaattccagctgctcaggagactgaggtacaagaatcacttgaacctgggaggcgaaggttgcagtgagctgagatcgcaccactgcactccagcctgtgtgatagagtgtgactgtctcaaaaaaattttaaaaagatactcttgtagagtggttttaggatgacaagtaatttaattatcacagtgccctgcaaaaagtacaaggcttggtcttcccatcttactgttaagaaagctgagactgag

SEQ ID NO: 92773 - DNA, 581 bp, Homo sapiens
tcgactcaagtaacaactccgtttatacaaggtataaagtatgccttctttgaagaaaatccagtcttttgagaatttatatttaaggtattatcactttcatgatgatttacttcagaacatatttacttatcttttcaggaaaacattaggtaaaacaagatatgcctgtagggccgggcacggtggatcatacctataatccaagcactttgggaggccgaggcaggtggctcacttgaggtcaggagtttgagaccagcctggcccacatggcaaaacgccatctttactaaaactacaaaaattagcctggcatgttgacacacgctmtaattccagctgctcaggagactgaggtacaagaatcacttgaacctgggaggcgaaggttgcagtgagctgagatcgcaccactgcactccagcctgtgtgatagagtgtgactgtctcaaaaaaattttaaaaagatactcttgtagagtggttttaggatgacaagtaatttaattatcacagtgccctgcaaaaagtacaaggcttggtcttcccatcttactgttaagaaagctgagactgag

SEQ ID NO: 92774 - DNA, 581 bp, Homo sapiens
tcgactcaagtaacaactccgtttatacaaggtataaagtatgccttctttgaagaaaatccagtcttttgagaatttatatttaaggtattatcactttcatgatgatttacttcagaacatatttacttatcttttcaggaaaacattaggtaaaacaagatatgcctgtagggccgggcacggtggatcatacctataatccaagcactttgggaggccgaggcaggtggctcacttgaggtcaggagtttgagaccagcctggcccacatggcaaaacgccatctttactaaaactacaaaaattagcctggcatgttgacacacgctctaattccagctgctcaggagactgaggyacaagaatcacttgaacctgggaggcgaaggttgcagtgagctgagatcgcaccactgcactccagcctgtgtgatagagtgtgactgtctcaaaaaaattttaaaaagatactcttgtagagtggttttaggatgacaagtaatttaattatcacagtgccctgcaaaaagtacaaggcttggtcttcccatcttactgttaagaaagctgagactgag

SEQ ID NO: 92775 - DNA, 638 bp, Homo sapiens
cctgtctgccaagttgtctgctctgatagtcaaacaaatcctaaaatctctttttgtctaagaccttcatgaaagtagaaaggtgaggtttactggccctgccctacctagaatttgaacaccctgggggtatttttcactcactctttctagttctgttcccctcacacctgacatttttcaagcatagctcacctactgtacacctgaaaaaaaaaaaaaacacacaataaaaccatttgcagagggctttacactttcaaagcacttaataaatattatcttttttgccctcacatcagccctggaagaaagaaaggacgtatatgggtccttcagctaacatttttggagcgaccctcactatgcaccaggcactgtgctggaactcagctggtgatacaaggatgaataagacatggtccctgttctyaggggcttaaagtctaaaagagatgacagactaacagatgatatcaatatgtgttcattttgcagataagaaagatgatagactgatgatagactcataaattaagggacttgtttcaagagtttctccaagttacggtcctctgaataaggaatggcttgggctgcttgttgaaatagattccacaccacagacctgctgaatt

SEQ ID NO: 92776 - DNA, 638 bp, Homo sapiens
cctgtctgccaagttgtctgctctgatagtcaaacaaatcctaaaatctctttttgtctaagaccttcatgaaagtagaaaggtgaggtttactggccctgccctacctagaatttgaacaccctgggggtatttttcactcactctttctagttctgttcccctcacacctgacatttttcaagcatagctcacctactgtacacctgaaaaaaaaaaaaaacacacaataaaaccatttgcagagggctttacactttcaaagcacttaataaatattatcttttttgccctcacatcagccctggaagaaagaaaggacgtatatgggtccttcagctaacatttttggagcgaccctcactatgcaccaggcactgtgctggaactcagctggtgatacaaggatgaataagacatggtccctgttctcaggggcttaaagtctaaaagagatgacagactaacagatgatatcaatatgtgttcattttgcagataagaaagatgatagactgatgatagactcataarttaagggacttgtttcaagagtttctccaagttacggtcctctgaataaggaatggcttgggctgcttgttgaaatagattccacaccacagacctgctgaatt

SEQ ID NO: 92777 - DNA, 690 bp, Homo sapiens
cctccagtgaagtcaaggttcagctctcctttaccttcttccttctcttaggctgagcagagtcagacccagagaagaaagaaggaaaagatggcttacagggagaatatgagttctagagtctgtgtgtgtgagagttgtgtgtgtgtgcatgcatgcatccctgtgtgcatgtgtgtgttggggaggagagtaaaagagacttcatttggattggcattgaagtcacaagagtaacaaagcagcggttatcttttccagatacatattaggtttctttaattcactgtcaaagtatagtctgtgttctgcctgtattagaatcacctaagcccaagatgattgaaatccttttycttggggctgacctcggaagcactgaattgctttctggcaagaggtccaagaaatacactttttaaaaattcccacagtgattctcaggcttgctgaagtctgagaatttctgctcaagttccttaactctgaagagtttagtttaaaaaaaaaaaacactaagttattagaagtcacctcacgtgtttcatacattcaggcaagatagttctgttgtctttaacgttagtttctaaatgaacgtataagagggaatttcaagctatttgcaagtactcttccataaatagcacactttagctgagggtagtcttgagtcccagtattgaaaag

SEQ ID NO: 92778 - DNA, 690 bp, Homo sapiens
cctccagtgaagtcaaggttcagctctcctttaccttcttccttctcttaggctgagcagagtcagacccagagaagaaagaaggaaaagatggcttacagggagaatatgagttctagagtctgtgtgtgtgagagttgtgtgtgtgtgcatgcatgcatccctgtgtgcatgtgtgtgttggggaggagagtaaaagagacttcatttggattggcattgaagtcacaagagtaacaaagcagcggttatcttttccagatacatattaggtttctttaattcactgtcaaagtatagtctgtgttctgcctgtattagaatcacctaagcccaagatgattgaaatcctttttcttggggctgacctcggaagcactgaattgctttctggcaagaggtccaagaaatacactttttaaaaattcccacagtgattctcakgcttgctgaagtctgagaatttctgctcaagttccttaactctgaagagtttagtttaaaaaaaaaaaacactaagttattagaagtcacctcacgtgtttcatacattcaggcaagatagttctgttgtctttaacgttagtttctaaatgaacgtataagagggaatttcaagctatttgcaagtactcttccataaatagcacactttagctgagggtagtcttgagtcccagtattgaaaag

SEQ ID NO: 92779 - DNA, 1900 bp, Homo sapiens
tggtttccaagagtacagcaagccagtgccacagtgacttgatcacccttacccatttctccttacttatctatagagtctatctcacttggctcagaagaaagtctgcagtagctactgccaagagaatttctcattttatttatatggaaataaaaatataatctttttccctggaatcacataaaagatggacaatcagaaattatatcctttagttttgactctttcatatgactctatttcatatttcatgacatgttgctcatgtacacctatgtatgtatacacagacacagagcttcctgccacctgtttaacagacgtatcagaatcaacagttaagcaaagagacatgctgaaagaaataaatttgtttaattcaacctccctttcctcccaccacaaacatacctgtagttatcagtaaaactaacatcacgattcagatctgagttgtttttatgttctgttggggtgtccaagctttgtgtagacaggaacagatcatttattaatttcctctccctctattgtgaatgccaaccagccttgggaccaatgtcctccctccctatctcaactgtcaatgcagcagttctggctattttgagacactgtgatgtttatgttgaagggtagacatgaagggactcgtgaggtcttttcttatgcacacatctatgattggactggccttttggcgagtcagcaattcagttctggcccaatctaaatacaccctgggggtctctgcctttctctctggttcttctgtgatgttttcctctactttcttctcccaatatcattgtcctttgggagtacagcaaaaaaggctgagtaccaaatgagactttacaggcagaatgagaattgcacatgtataacttaatttaatccatataggcagaaccaagatcataaagcctctcagtatgacagacgaggccaagagagcataccagtttaaacgaactgcaaaggaacatcatcataaatcttccattgcttttgcgttttttattgtgcagtgttggattttgtaatattattcttcagaacaaactaaaatctcaagaggaagatctattttcagttaaagccttccacaagtaactttaatttttggaatcctaaatcatcgtcttcatttccacctccttcccccaccctccataggaacttacataaagtgtaacaaattttattactccaataaggaagaataaatcccctttcacttattattaaaaaagcctttgagggatcctccatgtcttctaaaaagcacaaagatatttttatgccaacactcagtttgttgcaggcaatgraaaaatcagaggaattcagaatggtaagaggataaactggcatttcttttatcttgaaatgaagaactgtggtacttacaccttcagggtaattgtgacctcagagcagccaactgctcttagaaaaaaaggtaattcaacccaagaacaagtattagttcatacaaaaggtggaagagaagtttgaaaatctaagtgacacattttcaggtactgactggccttgagggacaatgtaagctgagacccatgctgatcccaaagatcaagtaactaagaaaagttcctaaaattaggaatcagaccattatagtcagcgtatatttgtcttatatttattgcaataagacaaaaaaggaaataaaagatatacacattggaaagaaagaaatacaactgtccctatttgaagactaatacgtctatgtagaaaatgccaaggaatctacaaaataactcccggagctaatacacaaatatagcaaggttgcaggacacaagtcaatatacaaaactcaactgctttcccatataccagcactgaataattaaaacttgaaata

SEQ ID NO: 92780 - DNA, 1900 bp, Homo sapiens
tggtttccaagagtacagcaagccagtgccacagtgacttgatcacccttacccatttctccttacttatctatagagtctatctcacttggctcagaagaaagtctgcagtagctactgccaagagaatttctcattttatttatatggaaataaaaatataatctttttccctggaatcacataaaagatggacaatcagaaattatatcctttagttttgactctttcatatgactctatttcatatttcatgacatgttgctcatgtacacctatgtatgtatacacagacacagagcttcctgccacctgtttaacagacgtatcagaatcaacagttaagcaaagagacatgctgaaagaaataaatttgtttaattcaacctccctttcctcccaccacaaacatacctgtagttatcagtaaaactaacatcacgattcagatctgagttgtttttatgttctgttggggtgtccaagctttgtgtagacaggaacagatcatttattaatttcctctccctctattgtgaatgccaaccagccttgggaccaatgtcctccctccctatctcaactgtcaatgcagcagttctggctattttgagacactgtgatgtttatgttgaagggtagacatgaagggactcgtgaggtcttttcttatgcacacatctatgattggactggccttttggcgagtcagcaattcagttctggcccaatctaaatacaccctgggggtctctgcctttctctctggttcttctgtgatgttttcctctactttcttctcccaatatcattgtcctttgggagtacagcaaaaaaggctgagtaccaaatgagactttacaggcagaatgagaattgcacatgtataacttaatttaatccatataggcagaaccaagatcataaagcctctcagtatgacagacgaggccaagagagcataccagtttaaacgaactgcaaaggaacatcatcataaatcttccattgcttttgcgttttttattgtgcagtgttggattttgtaatattattcttcagaacaaactaaaatctcaagaggaagatctattttcagttaaagccttccacaagtaactttaatttttggaatcctaaatcatcgtcttcatttccacctccttcccccaccctccataggaacttacataaagtgtaacaaattttattactccaataaggaagaataaatcccctttcacttattattaaaaaagcctttgagggatcctccatgtcttctaaaaagcacaaagatatttttatgccaacactcagtttgttgcaggcaatgaaaaaatcagaggaattcagaatggtaagaggataaactggcatttcttttatcttgaaatgaagaactgtggtacttacaccttcagggtaattgtgacctcagagcagccaaytgctcttagaaaaaaaggtaattcaacccaagaacaagtattagttcatacaaaaggtggaagagaagtttgaaaatctaagtgacacattttcaggtactgactggccttgagggacaatgtaagctgagacccatgctgatcccaaagatcaagtaactaagaaaagttcctaaaattaggaatcagaccattatagtcagcgtatatttgtcttatatttattgcaataagacaaaaaaggaaataaaagatatacacattggaaagaaagaaatacaactgtccctatttgaagactaatacgtctatgtagaaaatgccaaggaatctacaaaataactcccggagctaatacacaaatatagcaaggttgcaggacacaagtcaatatacaaaactcaactgctttcccatataccagcactgaataattaaaacttgaaata

SEQ ID NO: 92781 - DNA, 652 bp, Homo sapiens
  misc_feature (1)...(652): n = A,T,C or G
gggatcctcctgccttggcctcccaaactgctgggattacagctgtgagacgccacacttgaccattctttttttttttttttttttttttttttaaggagatagggctttctatgtctcttcataacacttaaagctcacgtagtgcttatatgtagggtgaccagagtttgtatgggagtggtatcaatttatgnnnnnnnnnnnnnnnnnnnnnnnnnnnnnnnnnnnnnnnnnnnnnnnnnnnnnnnnnnnnnnnnnnnnnnnnnnnnnnnnnnnnnnnnnnnnnnnnnnnntggcacacactgaccctctaaacatttgcagaattgaatgaatgaagagagcagcacatgccccatcgcgtgtttgaactattccctgaacttctcccacccaagttkttactatctaaaattttagtgcccattgtaaacatgaaaaattagttgtaattgttactgtttacattctagggttgattttgtttcaccagtttctatggcttctgtgatttcttaaatcccaggccctcacttcgtttgcatctttttccttgctgaaatgtgccccgcagcaggcgcttcagtgaggcttcgggcgtagttacctcctgtgcttttcatatgtctgaaaatctctctctcccctt

SEQ ID NO: 92782 - DNA, 652 bp, Homo sapiens
  misc_feature (1)...(652): n = A,T,C or G
gggatcctcctgccttggcctcccaaactgctgggattacagctgtgagacgccacacttgaccattctttttttttttttttttttttttttttaaggagatagggctttctatgtctcttcataacacttaaagctcacgtagtgcttatatgtagggtgaccagagtttgtatgggagtggtatcaatttatgnnnnnnnnnnnnnnnnnnnnnnnnnnnnnnnnnnnnnnnnnnnnnnnnnnnnnnnnnnnnnnnnnnnnnnnnnnnnnnnnnnnnnnnnnnnnnnnnnnnntggcacacactgaccctctaaacatttgcagaattgaatgaatgaagagagcagcacatgccccatcgcgtgtttgaactattccctgaacttctcccacccaagttgttactatctaaaattttagtgcccrttgtaaacatgaaaaattagttgtaattgttactgtttacattctagggttgattttgtttcaccagtttctatggcttctgtgatttcttaaatcccaggccctcacttcgtttgcatctttttccttgctgaaatgtgccccgcagcaggcgcttcagtgaggcttcgggcgtagttacctcctgtgcttttcatatgtctgaaaatctctctctcccctt

SEQ ID NO: 92783 - DNA, 708 bp, Homo sapiens
tgcagattttttttttctttttgagacagggtcttgctctattgcccaggctagagtgcagtggcatgatctcggatcactgcaacctccacctcctgggttcaagcaattctcctgcctcagcctcccgagtagctgggattacaggtgcctgccaccacgcccggttatttttttttaagtagagatggggtttcaccatcttggccaggctggtcttgaactcgtgacctcataatccacctacttcggcttcccaaagtgctgggattacaggtgtgagccaccacccctagcctacagattctagatataactattatctaagttttgccgtgttgtttgcattttaaaggtgaattcattttgctgtttattgagttgttttattctttctccttgagaattttccttccgtgctttggatgtgtgttttgcagagacgtcttgagagagtgctcacgttctttttcctcttctctctctctgtatctggtcattttccattgcgtccacccattcctagtccagaacccrgctttctgggtggcactgggctgtgtgtcagtgacattagagacactgcaggtacagacatggcccagaagttagctggcccagtgtagtctgccttctcctgctaccatgtgtctggctggctaatgtttgccatatcctgtggcatcctctgcagctgttttcagtgga

SEQ ID NO: 92784 - DNA, 755 bp, Homo sapiens
atcagtacttaacaaatgttaaattccggaaactcccctgactactggagctctgatttctaggtaagttcctaattctttttcaaatgtagtttttttcttatgttacctatccctctgttctctaataaaggcaattttccacccagtagtggttagtactctgaattaacttatctaaatcartgaaaataatagtgaacctctgctttattgtgttatatgggaaacattgttatcactgatttcgttatatcacatttaatccacccagtaattccaagaggacactaggtttcatagagtttaatgagagacaagaaataagagcttggttttatactctcactccttatcataataatcaaactcagtgatatttcacagacctatgagttttataaaatacctgaatctggttgtgtatatacaagatacataaagataatgaaaagtagttaattggtctgggtcaattttttgtatctgtataattattctgaattgccatagttgtactgtgggcatctgtactaattgttaagtatgctctggcccgagagagtgatcagttttagaataattttgtacagtattctgctgcacgaaaccactgctttattccccaaaaaatcaggatacattctgcttaaggaaaatctccagacacagcttttgcaaacaggttggtatggtttaccactattggcttggaggaaagcagagaataaacctgacatttttgtttgaccaaa

SEQ ID NO: 92785 - DNA, 1675 bp, Homo sapiens
ctgtaattccacacttggcattttgttctcatgagattgctagtgtctggagtcctttgttctattctggaagttcagagatgtattataactcctataagcctgagcattggccctgaaactctaaaccatagcctgatccaaccctaagctggaatccacttcagcctgctacttagatcccacctctcaaatcctggagttccctgagctccatttttaattcttactttgatgatctattccctttctttgcccttctttccttcctgactacctgactttcttcctttactaatcaactgttttccagttcttgctatctgccaggccctgtgtaaaatgttgaatgtaaaatcataaccaatgtctccctcctcagtggtcttaaaattgagtggagactgtgttctggcttttccctagctgtctttggaccttaagcaggtcaatgctatactcttagctatactttctttattctttcatgtattcattcagcagatattgtcttagcttggtccccctagaaaataggattgaggcaaaagctatgagttaacacgctactggggtatgaaatcacataaaaactgaagagaggaagaagggaagtgagacagagacgaagggaataaaaaagtgtgcattactgaactgaccacagcttcccactaaaggcagatgaaggctcactcatggagagcatcttcagagtgactgtgaagtatcacatctttgaacagtttgtccaggggagaaaagaaacaaatgtatccactggctgtctcctaccttgttcaaagtccatcccaagtgacattgatgattttttcatacttctaggtccttttaaggttgccaaggggcaattcaagggctctgtggatctggtgcaaccatgtacagttgcagtagacagtcttccagatcgttgggtgctctttcaaaccagcaggcagcttccccagtaggttggctgatgaccaagcaaactgtgtgagccactgggagtgctgctttgagaggaaagcaggctacagccttgagagaaggagaattaagcaaggaggttctaaagtgacccataatcagaatctgatttagctaccaagataatattgcttcagaggtaaactttctctgtgcttgtggagttcacagttcagtaataaaaatgaaaaaataaacttgtgaattaaaatgctagtctggaggcataaagttctatgtcttgatgagacttgggaagacataaagcaggagacatttgtggtatgtttggtagaattagcaggcatttttatttgtaaaagataaactataattgaatcaacatcattcaaaacgtgtttcactaaattagggtctcatggtgtggcagacattgctgaytggttcattagtttgtacttcaaaatccctaacatagacctataggacaaaggatgaaaaggtaaaatgtatacttcccagactccctctaggaagtgatctaagttttgccatacctatgcacctgtgagaaaagtggacatgatcaatgtggggaaaccatgtcttccagaaatatgacagtggaggtgctacacaccacctcctagaaacacagattcagagtgccaggtagtagtggtagcagtgtggccaacagtagcatttagtggtatatttg

SEQ ID NO: 92786 - DNA, 548 bp, Homo sapiens
tgagcaactgaatccaggtggctgggacaacatatttgcctgggtctatggtccctttaccaccttcagggctctcatccctgattgtcttatcataagcctgggttattataaaagatgtgtctgttggaaagcttttgcctgtgagccacagaagacttgccaatcctgaagtgctttaaacataacaggcttctttgtgtgtgtgtgtttggagacagggtctcattctatggcccaggctgaagtgcagtagtacaatcagggctcactgcagcctccacttcctgggctcaggtgatccacccgcctcggcctcccaaagtgctgggattacaggtgtaagccaccatgcccggcytagtaacaggctttttcttcttcttttttttttttctttttttttttcaggcagggtcttgctctgtcacccaggctggagtgcagtggtgccatcttggctcactgcaacctctgcctcccagcttcaagtgattctcctgcctcagcctcctgagtagctgagatcacaggcacacacaacgccc

SEQ ID NO: 92787 - DNA, 830 bp, Homo sapiens
tgtaggggatgcttcagtgtagaagtggactttttatagcttacctcttggtccctgtggtcccatggcttgatgcctctttttttatttttattttatttttaaaatttttaaatttttaatatattttaacagtgcaaagaggtttttttaattgtgtatatgtaacattagacaaaattatttaaagtcaataaattattattcaaggaattccatgttgtgatttcttccactgtccatcaaggccagtttagatcctctaaagagctggagtcaaaagatttawcttcaagttagccctttttaatgaaactgaagtttaatttaatccagttgtcctgtcagcccataattcttttattttggctctgtcatctcctttttaatatggatatatttttttaatttattttattttattttagactctggggtacatgtgcatgtttgttacatgagtatacagtgtaatgatcaggattgggattctagtttatccaccacccaaatagtgaagactgtatctagtagtaggtcattttttggagcccctatacccccttttgaagtctccagtgtctattattttcatctttatggccatgtgtacctattgtttagctcccacttataagcaagaatatgcagtatttggttttctgtttctgtgttttttcgcttagtgtaatggcctccagttccatcaatgttgctgcaaagaatatctttcttgtggctgcatagtattttctttattcaatcaatcattgatggacacttaggttggtcccatgattttgctcttgtgaattgtgctgcaataaata

SEQ ID NO: 92788 - DNA, 830 bp, Homo sapiens
tgtaggggatgcttcagtgtagaagtggactttttatagcttacctcttggtccctgtggtcccatggcttgatgcctctttttttatttttattttatttttaaaatttttaaatttttaatatattttaacagtgcaaagaggtttttttaattgtgtatatgtaacattagacaaaattatttaaagtcaataaattattattcaaggaattccatgttgtgatttcttccactgtccatcaaggccagtttagatcctctaaagagctggagtcaaaagatttatcttcaagttagccctttttaatgaaactgaagtttaatttaatccagttgtcctgtcagcccataattcttttattttggctctgtcatctcctttttaatatggatatatttttttaatttattttattttattttagactctggggtacatgtgcatgtttgttacatgagtatacagtgtaatgatcaggattgggattctagtttatccaccacccaaatagtgaagactgtayctagtagtaggtcattttttggagcccctatacccccttttgaagtctccagtgtctattattttcatctttatggccatgtgtacctattgtttagctcccacttataagcaagaatatgcagtatttggttttctgtttctgtgttttttcgcttagtgtaatggcctccagttccatcaatgttgctgcaaagaatatctttcttgtggctgcatagtattttctttattcaatcaatcattgatggacacttaggttggtcccatgattttgctcttgtgaattgtgctgcaataaata

SEQ ID NO: 92789 - DNA, 1355 bp, Homo sapiens
ggtggtcctatgaaagaccatttgaggccagctcctgagtttcctgtttcccattatagagaaattttgggaaagccttttcacaggagatggaagttgaggcaggatttaaaatacatgtagaatttggataatcgaagggaaggaaatagcattccaggctgaggtttggaaaaaataattgaataattcaatgtgtaaacctaaaataaaatcctaagcccccaactgactgaacagacttcttctgggccatgggaaacctgaaaaattgaattcccatccatgacaagaagataggacagacataccttgatatgctctcctgccttttggagtttaggcacaatggatcataactaatattaaaagagagatcacaagactgataaagactttttgtgacaataagatacaaaatttcagtatgattctggtatagcatcacatgacagatagcaggctgtgaaggaaatcaaaattttttaccccaaaacatatttctttgacgtattttgaaatggtcctgcaaagccacctcttgtggggaaaatttgcatctgtagagcatctctccccatttataggtctttctggatccaggagagatcaaactaacagtctgacaccttttaagatacaaaaagagacacttatcatctatctatctgaaacctgctacttagaggcttcatctatatagcaagaacctcagcttccacaaccccccttatcttaactcaagcatttctttctactgtctccaactctttaggcaaagcttaactatttcaatcaattgccaatcagaaaatctttgaatctatatatgatctgtaaggcctcacttggagatgtcccatctttgtaggctgaacaaatgtatatcttgcatgtattgatttattaatatgtctttgcctgtaatttctatcttcctwaaatgtataaaatcaagttgtaacctgaccactttgggcacactttccaggacattttgagaccatattccagggcatggttacttatattggctcagaataaacctctttaaatattttagacaatttgatgtttttcatcaacaaatgcttgataactagtttagactcttaccttatctgcccagctcatactatgataaaagccttaggaaagaagacaaagtttatcctaaacctttattctctattcccctaaagcacctacctcaagtctggacacatagcgagttcctaataaacattattaattattgctctcaacatcactgtgtgaaacatatataggcacagaaggctggattttgtgattacccataaagagtgcttagttgttacgtaaaatgaataatg

SEQ ID NO: 92790 - DNA, 1646 bp, Homo sapiens
agataaatggctagcgaacaccaaatacctcagcgctccctcaccctactctacggacactagtttgggagaaaaaaaacacagagccctttcctctgaaacacaagggctcggtgttcctactcacaactatgggaaagggaaagggatgccaaacccaaccagaccccaacttcagatcctagggggaggtggctgccccacactgggcaggccttttgggggcagggtctctctgtctatccctcaccctcttcctcgcttgctctggggctctgtctctctctttctctctccctcgtccactcccccaaacatgtccaccggctccctcagcgatgtggaggaccttcaagaggtggagatgttggaatgtgacgggttgaaaatggattcgaacaaggaatttgtgacttccaacgagagcaccgaggagagctccaactgcgagaatgggtctccccagaagggccgcggcggcctgggcaagaggaggaaggcgcccaccaagaagagccccctgagcggggtcagccaggaggggaagcaggtccagcgcaacgccgccaacgcgcgagagcgggcccgcatgcgagtgctgagcaaggccttctccagactcaagaccaccctgccctgggtgccccccgacaccaagctctccaagctggacacgctcaggctggcgtccagctacatcgcccacttgaggcagatcctggctaacgacaaatacgagaacgggtacattcacccggtcaacctggtgagtgctcccggggctgcagctgcagtccaggcgcgcccgcactcccgcctgcggtgggcgcgagtgcgcgcggggctgggagtgggggtgtgggcgcggcggtgacttacacatctcgaccaccgcgggcctagagcctccagggaccggaggcgggcggtctagacacggccctcgctctctgccctaccagcccccggagcgggagtgatttatgcgagggtttgacgtggcagcccaattaaaagttaacaagtgtgttgagctggcacagaggagggatcccccgctcccgctccatcgccatcctccctggggtgcagtggctgctgcggaactgagaacactgacaagacgctgcgagcggacaggcaataggttaatccttttttcttcttttagcagagagaggaacttgattttcctttccttgtaaataaaaacacacaaccccgtttcttttttttgcatatttagtaccattggataaggacacatctatgccccccaaattgtccacgtaagcccttacccgcttaaatattctgtgcttctcctataagtggattaatatttttaaatcccagaagttctagtaatgatcagcaaaatcagtaaatcctcactagtatgagtgtaataaatactaaaataggtcactctcayccaagatttaagaaatgttaccttttatcttaaaaagtaatgcccattgagcctaattttttaacacaaaaaactgataatcattgagtctacttttttctcaaatgtattttactgtttaagaaatatatcttaatttttttcatttgattttattttaaaacttctaagatctaaagaaaaacaataacaacaacttactaggatctct

SEQ ID NO: 92791 - DNA, 723 bp, Homo sapiens
aaaggacatccctgaccctatttttgaacagttttttttaacccatatttctgcagcatttctgatggcaaatcaagagttatgattgcctaatgagtctgacttaacaatacaatagtcctcccttatccacagtttcactctctacagtttcagttacctgcggtcaatcatggtctgaactattaaatggaaaactccagaaacaaacaactcataagttttaaattgcacaccattctgagtagcatgataaaatctctcaacattctgtgccatcctgcccaggaggtgaatgtccttttgtccagcatatccacactatagatgctacttgcctgttagtcacttagtagctgaaccagttatcagatcaaaaatatatagtctatggctgggcgcatggtggctcacgcctgtaatcccagcagtttgggaggccaaggtgggcggatcacttgaggtcagaagtacragaccagtctggccaacttggtgaaatcccgtttctactaaaatttaaaacaattagccaggagtggtggcacacgcctgtagtcccagctactccggaggttgaggcacaagaattgcttgaacccggtagacagaggttgcagtgaaccaagactgcacccctgcactcagcctgggtgacagagtgagactccatctcaaaaaaaaaaaaaagagctaaagctaattaaagataaagtaaaaaaa

SEQ ID NO: 92792 - DNA, 634 bp, Homo sapiens
gggaagagcactttatggaagacacttaaaaccattttagttagggctttaatctattttccatcgaagttgaccagtgtgagtttaattatttttccacttctcttsctgatgaaggaatgatcaaaaacaaaagaaatataagtgatataaataatttgcaattaagttcaggtatttttatgattatttcatatgttgtaatattctctaatcaatgtgagatggctgaaactatgacatcctttgtcctttatagatttcatagtttgtatgaaaataagatagcacaatctgtaaatttaataaagttaaaggctgtcatagacagcaatttaacatatgagaaaatgtaaacttaaaatgaaggtagctctttcttgatggtcaataacctattaattgaatttataatttcagaagatttttttctccaaaaagaagttaaataaacttgtttaatcaacagtcccaaagaattccatcttgctttctgtagagcagatggctgtaccactgcttctgttgccaccttgtcctctagcagctgcgattactagaaaaaaatttcctttattacttacatgatgtgcccataactgcaatcaaacatttaaaaaagttactcattgga

SEQ ID NO: 92793 - DNA, 634 bp, Homo sapiens
gggaagagcactttatggaagacacttaaaaccattttagttagggctttaatctattttccatcgaagttgaccagtgtgagtttaattatttttccacttctcttcctgatgaaggaatgatcaaaaasaaaagaaatataagtgatataaataatttgcaattaagttcaggtatttttatgattatttcatatgttgtaatattctctaatcaatgtgagatggctgaaactatgacatcctttgtcctttatagatttcatagtttgtatgaaaataagatagcacaatctgtaaatttaataaagttaaaggctgtcatagacagcaatttaacatatgagaaaatgtaaacttaaaatgaaggtagctctttcttgatggtcaataacctattaattgaatttataatttcagaagatttttttctccaaaaagaagttaaataaacttgtttaatcaacagtcccaaagaattccatcttgctttctgtagagcagatggctgtaccactgcttctgttgccaccttgtcctctagcagctgcgattactagaaaaaaatttcctttattacttacatgatgtgcccataactgcaatcaaacatttaaaaaagttactcattgga

SEQ ID NO: 92794 - DNA, 634 bp, Homo sapiens
gggaagagcactttatggaagacacttaaaaccattttagttagggctttaatctattttccatcgaagttgaccagtgtgagtttaattatttttccacttctcttcctgatgaaggaatgatcaaaaacaaaagaaatataagtgatataaataatttgcaattaagttcaggtatttttatgattatttcatatgttgtaatattctctaatcaatgtgagatggctgaaactatgacatcctttgtcctttatagatttcatagtttgtatgaaaataagatagcacaatctgtaaatttaataaagttaaaggctgtcatagacagcaatttaacatatgagaaaatgtaaacttaaaatgaaggtagctctttcttgatggtcaataacctattaattgaatttataatttcagaagatttttttctccaaaaagaagttaaataaacttgtttaatcaacagtcccaaagaattccatcttgctttctgtagagcagatggctgtaccactgcttctgttgccaccttgtcctctagcagctgcrattactagaaaaaaatttcctttattacttacatgatgtgcccataactgcaatcaaacatttaaaaaagttactcattgga

SEQ ID NO: 92795 - DNA, 777 bp, Homo sapiens
ggatccctcactgttgctggataaaactccttagcacgagatacaaagtccgctcctactttctctcacctgactctccttatacttaagccccagccgtagtgaattatagtggacccttgaataacacgggcttgacctgggtgggtccacttgtacgtgaaaatttttcaataaaagttacacctagtgcgcctgcctctcctgcctctcctgcctctcctgcctctcctgcctctcctgcctctcctgcctctcctgcctctcctgcctctcctgcctctcctgcctctcctgcctctcctgcctacgctgcctccrctgcctcctaccgctcctgccactcctgccactgtcgccccaagacagcaagaccaacccctcctcgtcctcctcctcagcctactcaacatgaagacgatggggatgaagacgtttaagatccactttaaatgccacgaatagtaaatatattttctcttatgatttttaaaataacattctctatttttgtaagaatacagtatgttatacatatacaaaatgtatgaggtaactgtttatgttatcagtgaggcttcctgtcaacagtagattattagtagcttttttttttttttttttaacatggagtctcactctttcacccaggctggagtgcaatggtgtgatctcggctcactgcaacctccactttccaggttcaagcgattctcctgcctcagcctcccgagtagctgggattgcaggaatgcaccaccacgcctggctaatttt

SEQ ID NO: 92796 - DNA, 728 bp, Homo sapiens
tgtagatatatagaaaatgaagaaaatttttgattagacattatattacatagatcggacattagatctgacattctattacagcagccatgtgaattttgcagttacatggttttactgtttctctttgttttctctctttatagtcaggattttacctgagtatctagattatttctcagcttttattttacttaatctatagtgttggcctcctcttaggcctaaactgaactatttcaaatatctgactcctaattgtgcaaccttaaggctgtcagaatcaccccaatgcaggccagaataacgtgtgtgtgtgtgtgtgtgtgtgygcgcgcgtgcgtgtggtcatctttattcttggcatgcttaaatagattttcataactgttccctcagataacgagcaataatagctctaatgatctctgaaaaaaaggaaacaaaatatcagaagcaaacatttgttttcattattttctcagaggagttttacaatttttatcgcttgagttagacatcatgttgtaaagtgagtgccttagttttagggaagaataattcaagattgactatcaaaacctgaccgtggatatttgctttaaattcttaccaccactgattatcttctttcattccaaagaaaaagaagagaaaaccaaacaattcattactatatggaacttacacctccctctgataagaaatcagttgctcaagcactgaaa

SEQ ID NO: 92797 - DNA, 622 bp, Homo sapiens
gacaaggtcagatgtatagcagaaaatcaaggaataaaatactaattttaagtcatagatacctttcgtttggttttaaatctgtatttgtactttgtagaatagccaactttagcttaaaactacagttaagaaagaacagcctgacttctctctgctgctcagtttgctttctgtcttagaattcctggtggccatcaaaacaaaacatgcagtatatgcacacgaaaggctagttgaagtgaaatttggctcctgtgttagaaatgatggttaatgtaaatattctgttaaagtcaggtaaattgttttctgttactcagggatcttctgtactacttctctccattcttgtggatatttgactactgttttgaaaagaaacttttttgagctaaggaacaaaagagtggagaatcctttttggatrtgagattgttaacttctcttgaggcagaaataaattatatgattgaattatccagacattgagcttacagcctagttcaactgtaactagaaaataggcattggtatatagtgtttttctgttggctggtctggggagatgattttttgattaggagttttagtgtcaaagggaagaggtggtagggaatgg

SEQ ID NO: 92798 - DNA, 611 bp, Homo sapiens
tgtggaacaatcttggtgggatataaattaacacaacctttctgggaaacagtttagcaagacttttataaatgtttagaaattttttcccaaagacaaattaaaatatgggcagatattgtattcagcaagactatcawaaatgcttagaaatgttttccaaaagaaaaatgaaaatatggacagaaattatatatctataaatgtttatcctacttcatgtttaaagaatctgcctggcattatggttatcagtggggactctggaaccagacagcatggttacaaaaccaaattttgcagcttcccagctggatatcttggggcaaatcacataacgtttctgtgctcagttttcatatgtgtagatgtgaaaataacagcatctatctatgagcttgttccgtgcattaaacaagatgatatatctaaaacattagagcagctcttacacaaaatacacacaatataaatgattgcacaatacaaatgatagctatgattattgtatttataattaaacaatggaaatagcatgactttcataataataataatatatgtacataattttctatagctgtgaaatatttttccaaagaatatttaac

SEQ ID NO: 92799 - DNA, 540 bp, Homo sapiens
tgctgggtttatgtgaaacctctggcagctgggtttgtgcaaaacctggcagattaaggaaccttaacagaaattggtgacgtgtttagagtcctcctctggggttgatactggtgcatgaggtgttcccctcctgggaatcagtacgttgccaaatgaactgtttttatctcagcctcttgtattrtttttggctatttcacagttctatcccatttgttgcctgtgtcagttcattccaaggtgctgtcaaaaagaagctaactgatcatgtttacatcttcccaccactcccggctctcagagctttagctactggcacctaatatgatacagcattcgaatcttattagattcagaattacatggcctgttaatttcagagagctggtgctgttaactggaatttgcagtgatagaacctcttcaacaaaatatttacctcacttaatatgcctgaaagattgattttccttccctgacaaggacactatcaccaactcctgtgtcattagagattgctggtcaaatctaaatttt

SEQ ID NO: 92800 - DNA, 552 bp, Homo sapiens
tctactaaaaataccaaaaaaaaaaaaaaaaaaatagccaggcatcatggcgcatgcctgtaatcccagctactcaggagactgaggcaggaaatcacttaaacctgggacgcagrgattgcggtgagcctcactgctctccaacctgggcgacagagtgagactctgtctcaaaaaaagaaagaaaaaattaaaagaaagaatggtttaatcatagaacatatgctagctagacaatacattcagtgtatgatttcttttcctaaatatttggagaactcccccatgtacttatgaaggtgactgcacacacatcgttgaatgaattttcatgctgtactttattcttttccacattttagtcatccatagatcatcagatatttggggctggctttgttctcttttacccttattacctgcattgtgaattctctatttttttttttttttttttttttttttactgttgctcctttttctcttttgataacatgtttggtttaaggggtgagggaataactcccgttaaactcagtggtggcctatgtt

SEQ ID NO: 92801 - DNA, 1930 bp, Homo sapiens
acctggctaatttttgtatttttgtagagttgcagttttgtcatgttgcccaggctggtctgaaactcctgagctcaagcgacctgcctgtctctgcctcccaaagtgctggaattacaggcgtgagccaccacgcccatcccagctctrttttaaaacacagaatccacaaaggaaggaaaaggtcaggcccttgcaacagtgttctgtggaggcacatactagaatgtactggaatagggttccctgaaagccaagatacaggggtttttttagggaatggggaggtgtaaggtagcacacaagagaaatgaccagcagggcagagggagctggggacaaactttgttcagtgtcgaagtttatccatgaaaatgaaactaacacaaaactatttttttacctataaaatggaaaagtatgttttaattatattatccatggttaacaaggagaggaaacagacattctcatatactgatgataatactataaattgataggagatttctgcaaggcagtttggtaatagttatcaaaagatttaggttgtgttggggggctataatttcacttctgggaatttattttatgtaaataatcatgaaagggtaaagttatagtaatatttttattttaaatagaaaaacatagaatttttatcttattagtgtggtttcattttattttgcttagccgtaatttctataatgagttgattatgtgataagacatcagcaataatatttgttaagaaaaaaagtgtgcccatggtcagtgggctcctttgctgtttgttgattgaaaatttcccttccagggccttcatggaaactgctctggtgtcacagaaatatatccaaggatggaggtaaatcccatgtgcaaatactgtcaaaacagtgcctctcctgacaccaaaacaaaaacgtgagaatttcagtgaaatagtcatgcattgagtaaagtacaaaaaatctgaaagttttaataaactcaaatatatctttcagaaaccagtatacaaatgatttctcatttacctttttaaatacaactaaatacacacaaaatctaagcaacatttagcattttcactctaaaacttggagacctcatcttttatctaacctctcttttttccagtacagcgtcattaccatggagtttcatgtaagtagaaaagctttgcagaacctcttttctcaaacaagaacctatccgaatctgtattaaaatggcaaggaataaatgaaaatatctatatgaagtcttaactcagaattgaaatattaaaagtgaccgttttgcgttgtctctttctcacaaagctttatctcatggcatgatttttactcctcagacattttcaaatatttgatccctgaagctttcacccaactcactgcaaagtttaaaaatactgcctattccaaagtgattacacatggttctcaaacatgataggaactggcagaccagcccccagctgtttccatggagacactgggagtggcagttatgcattgtgagatttctccagcctgaaactgttactgccctagactgagacatacatgtttcacagctaagcctgaatccaaaatgaaattaaaagtttactggctaaatgccaaattcaaaactaccctgacctgtcttcctctgttctctgacagtgtgtacgtgtacaagctcgtctgaaaagagttggcttgtaaatgggagaagctgtccaagaagtattctcacaatgaaataatcattttattttgtccataccgacaaacaaccagtcaattcagctggaggaaaaaacaaacaaacaaacaaacattttattttccaaatttgtaatgagttcgcttaattatttttggtttattgtgttatctacatagttgaatcttaaatctgaattttcataacc

SEQ ID NO: 92802 - DNA, 639 bp, Homo sapiens
gggcgataccttaaaacacttattaaacaaaatcttaagaaggatagtgatttcactaaattttattttattttatttttttgagacagagtctcgctctgtcgcccaggctggagtgcagtggcacagtctcggctcactgcracctccgtctcctgggttcaagcgattcttttgcatcatcctcctgagtagctgggactacaggcgcccaccaccacccctggctaatttttgtatttttggtagagacggggtttccccattttgtccatgctggtctcaaactcctgagctcgtgatccacctgcctcagcctcccaaagtgctggaattacaggcatgagccactgcgcctggcctttatttttattctttattgaaatgaacctgtgtgtgcacatgtgtctgtgtgtttgtgtgtatgtacagatgtataatgaggtatggttagaatgaacattgcttcaagtcctatttcttcacaggctgattgacagtggggaagtcacctcacttctctaaaccttacttttctcatctaaaattacagctaacaatgcttgttccatctgtttccattttgtcatgaaaatcaaaggaggtagtggatgtgaaattttactgattacatatata

SEQ ID NO: 92803 - DNA, 751 bp, Homo sapiens
acctcacagcaccacaaactatgatctgtggctcttgttaagtaagctttygcacttaacctgctgtggtctggcttttgctcagcagctgtgaaatatatacctggacccacaacggctcatggagtgctttcccatggaggctgatagcgtccttctgccatacgcttgcccatgccctaactagaaatgggcagaaacaacatctttcagttcgttggcgcaggttctttgaagtcagactaacctgcctgtaccagatgcttaaagccccgagacctcaagtcttcacctataaactggaaacaggaacaccttccccacgtgctgctattagatttagaggtaaagtggcgtgtcgcacccagcgggcattttatttatgatggtgacgatctgctgactcgccggacaacatgcttttccacttgcatttttgataaccctgtactagtggactcttcagattgcaaggatatgacattcctagatttctggggttctttaaaataaaacatttgtttaatgaaccagaaaagcaagcagagtcaccttcattgttaaaggtgagacttagcaaaggaaggatgtgaagcctttcctcactgtttgcaaaatgccacgcagagtgaggcagccaccttcagtagctgaggaaatgtcttttccgtgagatggccacagttccttgaactggctcagaaaggccacacactgtcctgggtgagggagagttcctctaagggagcac

SEQ ID NO: 92804 - DNA, 662 bp, Homo sapiens
cactcaggaaacccccatgaaacagcttgcaggtatcgaggctacagaaacgaaggtgcataacacagaggacttgctctccagaagggcaccgtctgagggctatggggagatggatgaggaagaagatatttgcaaaactaaacaaaaaagaagggctaatagtcactgaacactacatttttctcccagctctgtcctaaggattttacttagaatatttcatttaggccgggcgtggtggttcacacctataatcccagtactttgggaggctgaggcaggtggatcaccaggtcaggagatcaagaccatcctggttaacacagtgaaactccrgctctactaaaaatacaaaatattagccaggtgtggtggcacacgcctgtagtcccagctattcaggaggctaaggcatgagaatcgcttgaacccaggaggcggaggttgtagtaagctgagattgtaccactgcaatccagcctgggcgacagagcgagactctgtctcaaaaaaaaaggaacatttcatttaaccccaataaggtgggtagtatcattggacccattgtacagtaggaaaaagggacagaaggtgtgggagctggaccaaggcctcagatctagtggttggtggagataaattcaagtccagggcagcct

SEQ ID NO: 92805 - DNA, 1202 bp, Homo sapiens
taattaacacctagtaggcctactgaaacaagcacctctataataagaggaagattctacatgaatatccaacctacttaacctttagggatttatttttacaatgtaagaaagtgataaagtcaccttcaaaaagttctaagtaagtcagtacttaaaagtatttgatcaattgctttgtttcatgaagtaacattttacaattttaagtcacaactataaatttgttcatcccaaaccaagttatttcatgtcttaagatgtataattctagatgttttcatatgttataactattaaaaagttgaggctggacatggtggctcatgcctgtwatcccaacactttggaattacactttgggcatagatggggagatctcttgagcccaggagttggagagcagcctgggcaacacggcgaagggaggatcgcttgagcccaggaggttgaggctgcagtaagccttgattgcgccattgcactccagcctgggcaacagagcaagaacctgtctcaaaaaattttaagttgatctttctttctctacaattctattagtaaggctaaaaacaaaaccactaactttgcataaaacagcattccaatttaatctcaagctaacagttgactttgaaacatgctcttaatatttggtgcaggacatttcaaagctgagccctcttgcattgcctttttcagatgacctcaagcagtttggcctaacaaccagtattccgttccgaggttgcatcagatccctgaagctcaccaaaggcacaggcaagccactggaggttaattttgccaaggccctggaactgaggggcgttcaacctgtatcatgcccagccaactaataaaaataagtgtaaccccaggaagagtctgtcaaaacaagtatatcaagtaaaacaaacaaatatattttacctatatatgttaattaaactaatttgtgcatgtacatagaattctttctgtattcagatggtgctaattcagactccagactgaattttaattcaagttctttctcaagtctataaataatattaaactgattatttcattctaaataattgcctgttttgtgtgattttaaggataaaaggtaactggccataaattgttgagtttgcaacatgccctccagtcatctcaaggaaagagttcagatgtaatttatggaggcaattttt

SEQ ID NO: 92806 - DNA, 579 bp, Homo sapiens
ggtccattataccctaggtaccaaagccctgttccaggaaaaatgatggcacttctaaatattaaatataactaatctacaaaggacattgtcaatactacatggataattgttaataacagtatagtgaaaacaaggcatgggtaaacttcaaaattcgtctctatttccttgaaaacttattacatgatttaatcaatagcccacatcttcagctggtggctaggagattccttcttttctctgaaatgacaatgtattatcagaaataccataaaaattaaaaactaggaatgtatgtcctcaagccaaaaagtaactaaaaaaactagaatttaaaatgcttctctcttcaacctttttacacactaggttatttttcctgttcaaatgccaatgatgataaataaaagccaattagaattrgaagcaacttcatcttaaatcattgacaagagcctctttttttaacatcagcttatttcagtcaagaagcacgggtcaatataagactattgtttataatcactgccaatgagaaattactaccctatcaggagggccagaaaaatcataaaa

SEQ ID NO: 92807 - DNA, 573 bp, Homo sapiens
tttttcttctagaagacaaaggtcagacttagtgtatttgtggccttctgtctcctgttcttctcatcttccgaaaaatgacagtgccttgtgctgagtcggcttttagtaaacattgagtgttgagaggggcgktggtggtaggagcatgagttctgcattcagctgggcttgggttccattcccagttttgctgcttaatagcttatatattagtcctcgggcaaatgaactatgtaggctgcagattcttactctgtaaaatggtaggagtagtacctcatatactggttattgtgaggataaataatgtacataaataacttagagcagcacaaaatatgtacttactgttagctgttacggccattaagatgatttaatgaacgagattatatcaggcagatgtttatttggtagagtcacacattcttaattaaactcattagccttcagtttggagaaaatattaagtgtagaccctgtagcttttgagtgggatgtttgcaaaaagaaatatttaagaacatgtctaacgctcttgtttttccttcaacctaggatttctctgaa

SEQ ID NO: 92808 - DNA, 539 bp, Homo sapiens
cactcttgacatattaaatggccagcgtattccaacaattgttccagggtgcaggcctcctctaggccatggactatttgctttgcagttaactagaaacatgatgcagtgccrcgtaaggcaaattaactggaagagcctccaaaggccatctcagcaggggagaaggtgagcaagtagagggtaagcctccctctggttatgctttcatcagaggatctctgggaaaaagagaaagatttttaagtattctacatataaaagatctatcactatccattgcctcatttaccaataattaattgatcatctattatatgccaggcagtgagctttattgccaaaaggcgggataggggaaaacaaagataaatgagattgaacaagtaaatttgatgagaaaatcatagagacaagatccatcgaggaataaaatgaaactaacgacaggtggctggcacctaaactgacttaaacgatattatcaggaataggagacagagaaatggcaaaaagtgcacacatagagaagccagagc

SEQ ID NO: 92809 - DNA, 714 bp, Homo sapiens
gatccaaagcaggcagttccagtgtatgaataattttgctttcttttaaagctgattgctgttttcttttaaaaacaatctgtcaagggagtttctaaggccatacttattttttaagtcttttcctaggtaccattaacatggctggctgtttaagacaagagtgctctaaaaagctttcctttaaatatagccaattcattcatttactaagtgaactagttcacgtatgtttttgtcctgttaatccaatttggggaaagaaaaaaggcaagggctcttaccaccctcatttgacctggggtcccaggcagacatctgggagaactgacttggtaaaaaaaaaaaattcttattttctttgttggctttgtgtcagttgtcccaagatcccgtttgtacgctccagaataaagtttcctacagtgggtaatattaactagtaaatttgttaacctattcactgcatcaaaactgtagrgaagtttaaattttccccctgaagagtgaataatttgagtctgtgaaacaaaccgataatagacagattaaaggggaaaaaaggcatacgaattttattacatgtacttgtttgcacgggaattatatgaagtataaaaacttaaagaaaggtaacatagttgatgcttttatatcatcttgaaattatagaaagaacagggacttggaatgtgacagattatgggggcaaaa

SEQ ID NO: 92810 - DNA, 576 bp, Homo sapiens
aaaaaaaaragagagaaaggatatgtaaaatgttttaaaaggaaagccagtgtttctaaaaaaaaaatcaaatacttgaaaggctcatctatgcccataaagtatctcttctctgcactgtcccctcgtaatttactcacttgtgcaagttaaagaatggaaagtagtagaatgagtagctcagagaggaggagctgcatgagaagatgaaccagggaaatcatggaatgggactgccctctctgaggccttttccttgctgtttataatgatagcgggcattgtgacttctcaaacactatctctggtggtagtaccataaaaactttttatcaacagtaaacgtccgtggactcttgagtatagctggccttgatagctaaacactgtttacttatcatctttgcttggccatggtcatctccttacactccagttgtctctacagacatatgtttgatccttgtgaaattcataatgaaaagtttgcttgatcattaaaaaaaatttcacaagtagtgatttacctctgggaaggcagttgtgtctgaatgtgctgatattatgcaatctcca

SEQ ID NO: 92811 - DNA, 576 bp, Homo sapiens
aaaaaaaagagagagaaaggatatgtaaaatgttttaaaaggaaagccagtgtttctaaaaaaaaaatcaaatacttgaaaggctcatctatgcccataaagtatctcttctctgcactgtcccctcgtaatttactcacttgtgcaagttaaagaatggaaagtagtagaatgagtagctcagagaggaggagctgcatgagaagatgaaccagggaaatcatggaatgggactgccctctctgaggccttttccttgctgtttataatgatagcgggcattgtgacttctcaaacactatctctggtggtagtaccataaaaactttttatcaacagtaaacgtccrtggactcttgagtatagctggccttgatagctaaacactgtttacttatcatctttgcttggccatggtcatctccttacactccagttgtctctacagacatatgtttgatccttgtgaaattcataatgaaaagtttgcttgatcattaaaaaaaatttcacaagtagtgatttacctctgggaaggcagttgtgtctgaatgtgctgatattatgcaatctcca

SEQ ID NO: 92812 - DNA, 576 bp, Homo sapiens
aaaaaaaagagagagaaaggatatgtaaaatgttttaaaaggaaagccagtgtttctaaaaaaaaaatcaaatacttgaaaggctcatctatgcccataaagtatctcttctctgcactgtcccctcgtaatttactcacttgtgcaagttaaagaatggaaagtagtagaatgagtagctcagagaggaggagctgcatgagaagatgaaccagggaaatcatggaatgggactgccctctctgaggccttttccttgctgtttataatgatagcgggcattgtgacttctcaaacactatctctggtggtagtaccataaaaactttttatcaacagtaaacgtccgtggactcttgagtatagctggccttgatagctaaacactgtttacttatcatctttgcttggccatggtcatctcyttacactccagttgtctctacagacatatgtttgatccttgtgaaattcataatgaaaagtttgcttgatcattaaaaaaaatttcacaagtagtgatttacctctgggaaggcagttgtgtctgaatgtgctgatattatgcaatctcca

SEQ ID NO: 92813 - DNA, 576 bp, Homo sapiens
aaaaaaaagagagagaaaggatatgtaaaatgttttaaaaggaaagccagtgtttctaaaaaaaaaatcaaatacttgaaaggctcatctatgcccataaagtatctcttctctgcactgtcccctcgtaatttactcacttgtgcaagttaaagaatggaaagtagtagaatgagtagctcagagaggaggagctgcatgagaagatgaaccagggaaatcatggaatgggactgccctctctgaggccttttccttgctgtttataatgatagcgggcattgtgacttctcaaacactatctctggtggtagtaccataaaaactttttatcaacagtaaacgtccgtggactcttgagtatagctggccttgatagctaaacactgtttacttatcatctttgcttggccatggtcatctccttacactccagttgtctctacagacatatgtttgatccttgtgaaattcataatgaaaagtttgcttkatcattaaaaaaaatttcacaagtagtgatttacctctgggaaggcagttgtgtctgaatgtgctgatattatgcaatctcca

SEQ ID NO: 92814 - DNA, 957 bp, Homo sapiens
aaacagtgcctgaaatgttaactttcactacagaatagagaaaggctgaaggaagtgctgatctcaagtagaaaactggaaggagaacattgcaaatagtacagcttctccttcctctctatcctgtccatcccaaatctcaagcacttatgatatccaaaacagaacatccacattcttcaaaatgtgtaagttatgccttagttaaattcagttccaattaactactttataaagagttcttccctatctacaggagactgtgggaatcacagcattgttactgagatctgcaaccctctcccaagtcccgcacttccagctgcattgcctgctcctcgactgctctgaatttctgtgttctccttgcctgcttttgattgctggagttgttaattttgttaaaaattcaagtatgtatttaaaattttattattgtagatacaacttttcaatrtgtttgtaaagggagaattttcaggatatctcatgtcacattgccagtaataatatctaagtgagcataaaagggcagaaaatgttcctgtatgtcattactcgggtctgaaaaattaaaacagggactcattatgtatgcaaccaaagttatttcaggtcccccaaacaggataaatcaaagagcttttgcttccccagaaatataaatataaaggaaaatgtcactgacacttggaaaatatatattaacttgaaataagccttgtgttacagattgggaaattatcagattataacacataggtaaaatcatgaagttgaataaaattattgtaaaaaaaatcatgcagagtagaagataaaaatatggggagaatttggaaaatttcaaatttcagtggcagaaacagcagctactacagaggttgaaaggaaatattttataacacatgtatacatacacatgtctatgcacatacatatagacacacatatata

SEQ ID NO: 92815 - DNA, 957 bp, Homo sapiens
aaacagtgcctgaaatgttaactttcactacagaatagagaaaggctgaaggaagtgctgatctcaagtagaaaactggaaggagaacattgcaaatagtacagcttctccttcctctctatcctgtccatcccaaatctcaagcacttatgatatccaaaacagaacatccacattcttcaaaatgtgtaagttatgccttagttaaattcagttccaattaactactttataaagagttcttccctatctacaggagactgtgggaatcacagcattgttactgagatctgcaaccctctcccaagtcccgcacttccagctgcattgcctgctcctcgactgctctgaatttctgtgttctccttgcctgcttttgattgctggagttgttaattttgttaaaaattcaagtatgtatttaaaattttattattgtagatacaacttttcaatgtgtttgtaaagggagaattttcaggatatctcatgtcacattgccagtaataatatctaagtgagcataaaagggcagaaaatgttcctgtatgtcattactcgggtctgaaaaattaaaacagggactcattatgtatgcaaccaaagttatttcaggtcccccaaacaggataaatcaaagagcttttgcttccccagaaatataaatataaaggaaaatgtcactgacacttggaaaatatatattaacttgaaataagccttgtgttacagattgggaaattatcagattataacacataggtaaaatcatgaagttgaataaaattattgtaaaaaaaatcatscagagtagaagataaaaatatggggagaatttggaaaatttcaaatttcagtggcagaaacagcagctactacagaggttgaaaggaaatattttataacacatgtatacatacacatgtctatgcacatacatatagacacacatatata

SEQ ID NO: 92816 - DNA, 717 bp, Homo sapiens
gaggaatgacttagttctgtcctctgccccataactatgaagataagttgtcaatttacattgtcagagtgaaatttaacagaacmattttaggggaaagatcttgggggcctacaaggaatttccttgtgagcaaattgtgagggaagtatgtagcttttttatctttgtagctattttattaggaacaaaactggatgcaggtttgggtgacccagttcccagcttgacttttccctttggcttagggaatctggggtactgagatttattttcctttcacatcacccaggccttatttgatctcaggtcttcccattttgcctcacctccagtgctctcttagaacagaataccttcccagcaaggatatcacactcctaacttttaatctattgccttcatttgcagactgttcaatcattgttttccccctcccattctgttgcaacccattgtgaaattaataaacaaataatatctattttagtttggccttgtctctgtacctgtcaaagctgtagcatcctcaagggcagccctcataggtgaatttcagccattcactctaatttcaaacagttctcgtaactagagtcatgtaatagctctcatatggacataaggctactgaacttgcatttggagagatcctgaataactccactaacagggggaatgattttcattaaatcatcaacattctatgtcttattt

SEQ ID NO: 92817 - DNA, 717 bp, Homo sapiens
gaggaatgacttagttctgtcctctgccccataactatgaagataagttgtcaatttacattgtcagagtgaaatttaacagaacaattttaggggaaagatcttgggggcctacaaggaatttccttgtgagcaaattgtgagggaagtatgtagcttttttatctttgtagctattttattaggaacaaaactggatgcaggtttgggtgacccagttcccagcttgacttttccctttggcttagggaatytggggtactgagatttattttcctttcacatcacccaggccttatttgatctcaggtcttcccattttgcctcacctccagtgctctcttagaacagaataccttcccagcaaggatatcacactcctaacttttaatctattgccttcatttgcagactgttcaatcattgttttccccctcccattctgttgcaacccattgtgaaattaataaacaaataatatctattttagtttggccttgtctctgtacctgtcaaagctgtagcatcctcaagggcagccctcataggtgaatttcagccattcactctaatttcaaacagttctcgtaactagagtcatgtaatagctctcatatggacataaggctactgaacttgcatttggagagatcctgaataactccactaacagggggaatgattttcattaaatcatcaacattctatgtcttattt

SEQ ID NO: 92818 - DNA, 717 bp, Homo sapiens
gaggaatgacttagttctgtcctctgccccataactatgaagataagttgtcaatttacattgtcagagtgaaatttaacagaacaattttaggggaaagatcttgggggcctacaaggaatttccttgtgagcaaattgtgagggaagtatgtagcttttttatctttgtagctattttattaggaacaaaactggatgcaggtttgggtgacccagttcccagcttgacttttccctttggcttagggaatctggggtactgagatttattttcctttcacatcacccaggccttatttgatctcaggtcttcccattttgcctcacctccagtgctctcttagaacagaataccttcccagcaaggatatcacactcctaacttttaatctattgccttcatttgcagactgttcaatsattgttttccccctcccattctgttgcaacccattgtgaaattaataaacaaataatatctattttagtttggccttgtctctgtacctgtcaaagctgtagcatcctcaagggcagccctcataggtgaatttcagccattcactctaatttcaaacagttctcgtaactagagtcatgtaatagctctcatatggacataaggctactgaacttgcatttggagagatcctgaataactccactaacagggggaatgattttcattaaatcatcaacattctatgtcttattt

SEQ ID NO: 92819 - DNA, 1123 bp, Homo sapiens
gtttggtgtttgtgtggtgaaaaataccttagatggcaacaactagtaatagatcctgttatggacgtagtcctgagtccaaatagtgacatccctcctagttatggaaatagaagaattctgtagactatttaagccatcatcacactgttactatccaccattgttttggggagaaacctaatatttggttttaattcaaaataattgctttcagaaagtttatttcataacataggctcagcttgtttcatcttctgttgccataggaacaaataaataaattaatgcaattgtctgggcatggcacaaataatttctttcatgtattgtcttctactttagaatagaacacttgtcagattgaagggcaacaattctctcaccaactttatcataattttgataccacataatccatctataattatttttagggatatttggacattttagctttgatttattaatatcatattagacctttgcagagaacatttgcattttattttctttgtcttgaatttcatggtgcactctgtggtatccattttcaagtactttatgtacaaaaaaaggtggcaacattttttcagcaaaatcacagggaacccctggcatatagtaaatcttttcaaattgacttaatagcacaaatagatccttttctaaggtttaagttaaaattcacaccaaaggccttgatgaggtactcttgcacatgccccayggctagaggagggtttcagaatctgatccctactttgtgaatcttgtaatcggcttgagtacctcaggattgcaagcaaagaaagaacagcttaaggtataaaagccttgtccacccttaaaggcatcaaactggggagaagggaggaggaacaatgttagagctatttttaataattttaaaaattaaaatgaacttatagtaaatctgcatgaccagaaactacaaattgagtcattaagggagtacagaattaaaggtcacacctcatgggtgtgtatctcaggttcacaccttgttagctgtgagattttaggcaaattacgtaacctctccaaagctcagttgcctcctttggaaaataggatacttcctagggtttcaagaggattg

SEQ ID NO: 92820 - DNA, 1123 bp, Homo sapiens
gtttggtgtttgtgtggtgaaaaataccttagatggcaacaactagtaatagatcctgttatggacgtagtcctgagtccaaatagtgacatccctcctagttatggaaatagaagaattctgtagactatttaagccatcatcacactgttactatccaccattgttttggggagaaacctaatatttggttttaattcaaaataattgctttcagaaagtttatttcataacataggctcagcttgtttcatcttctgttgccataggaacaaataaataaattaatgcaattgtctgggcatggcacaaataatttctttcatgtattgtcttctactttagaatagaacacttgtcagattgaagggcaacaattctctcaccaactttatcataattttgataccacataatccatctataattatttttagggatatttggacattttagctttgatttattaatatcatattagacctttgcagagaacatttgcattttattttctttgtcttgaatttcatggtgcactctgtggtatccattttcaagtactttatgtacaaaaaaaggtggcaacattttttcagcaaaatcacagggaacccctggcatatagtaaatcttttcaaattgacttaatagcacaaatagatccttttctaaggtttaagttaaaattcacaccaaaggccttgatgaggtactcttgcacatgccccacggctagaggagggtttcagaatctgatccctactttgtgaatcttgtaatcrgcttgagtacctcaggattgcaagcaaagaaagaacagcttaaggtataaaagccttgtccacccttaaaggcatcaaactggggagaagggaggaggaacaatgttagagctatttttaataattttaaaaattaaaatgaacttatagtaaatctgcatgaccagaaactacaaattgagtcattaagggagtacagaattaaaggtcacacctcatgggtgtgtatctcaggttcacaccttgttagctgtgagattttaggcaaattacgtaacctctccaaagctcagttgcctcctttggaaaataggatacttcctagggtttcaagaggattg

SEQ ID NO: 92821 - DNA, 639 bp, Homo sapiens
aatatttcctccaagctggcatttcagttgccagattgtctcgcagataagaagcctgagatattatcctctacattctgtctcttgttggctgtgaatggctcctgagagctttaactcccttcgtttatagcctttgataggcagaaaaaggcttcaagcagwgtgacacctgtccttgagatcagaagccatcagtctttgtgggaatcatccaccaaagctgcagttgatatttagggtagacaaacaagtatttcactggcttttggcattgccccttagtttcctgacaatccctgctaacttctgagcatcttcctgtaaaaagaaaaaaaaactgtatgatgtgacttcatattgcttgccttttaaaaatacgcttcattttccaattggatttctccttatgtcagcttccaagtcatttaacacctccctctcttaccagaactctagaattaagcatcaaagattcataattattttttattagcagatatagctagtctaaaattttataggttgtcgtttgacacagacatctcccttacaaagggaaattaatttaaattctaaaacacatggaggtgaagcataatttacttttgaaacagctataaaatgactgtatcatgt

SEQ ID NO: 92822 - DNA, 1651 bp, Homo sapiens
agaatgagaatcatgtcaggtagagggaagagcatgtgataacccagaggcagggtggaatgaggtacttttaaagaactaaaaaaaagtctgtgaggctagagctgggtgagcaataagaaaagttgtagaagatggggctaaaaggattgatagtcaggaccagatgatgcagagccttgtataccatgttgaggaattaaaatgtatgcaagagcaatgaggaagccctgatagatttgaaaaagattggtgttatgacatcatatgttcatttatttatctaataatatttattgcatgcctactctgtgccagtgtatcaggtgctagaaactttaatagagatgtaaattataatttaaaattttaaaaagtaattgattcagaaagatgggaggcaggaaagttttcttagaatgaaaaatgtattcatgcaacaaaaagttttgggcaccctggcatatctcaggatctgttctaggccctggagattcaatggtgaattatacccagtcctcatcacaaggaatatttattgtgtgcattgaaattcatggcaggaggtatagcatgtaggagatgaaagggaaaaatcagtcaactgaaagatctgctctggcagacactgagagtgtggcacggtggaagctaatagtaaccaggatccagcacattagtgtttacactttcatgttcatgatcccagttttcaaaaaccgactgtgtcccactaaaaggaactaggaatccatggaagaatgactaattccagatctgagacaggaaatgcataagatgagcattggccatctttttatgcagatagcaaagatgtagtcaaagatgaatggaattacatcaaaaggacatcgaaacagtttgaagggtcactcattgaccaaagatgggacaatttgaacatcagaacaaattaactgaggaacacctctgtgaatttacaaaaatatacatgtttataataatagtttttttaaaaagatagcccttaaccccccaaattaaaaaagactcattggtcacattggaagtaacctcactctgaaaattaaagggaaataattaaacatttattttttctttcttggataagcagtatttcaatatgaccaagtagccctagttgacgaagaaaackacttctttatagaggaattccacctaataaatgtaaagggttgaagaagtgacagaattagaacattatcattttgcaacttataataagaatcaataatttaggcaaagattttcaatgaatgaagacatttttaaaaatgaatggagaatttttccatgaaaggtcaggcttttaccatttgaacccactgattaatttaagtaatacttattctagtgaataaaccagaaatatttaccacttgaaggaagataaaatacatggcatcccgtatgatgtaattttgggaagaaaggtcaaacatgactataatggaaccctcagagaaaaagtgttgttattaacaaacatgaagtttacagaaacaaattaaaagacagtagaatgaaaaagtaaaatgatgaggaaggcactgctctatatgaaaagattctaggagacataaccaaatgcaatgtgtaatcctatttggatactgttttgaacaag

SEQ ID NO: 92823 - DNA, 769 bp, Homo sapiens
tgtccctctgattttcctcctcccccattttaggtctccctgatgagacgtgagataaagatagtcaagtgtggtgaaggagggaatgcatagtctactttccttctccctaacagctttggtgacaaaatcaaaactcaacataagaggagtttgaaacaatagagataaagtaggatttcgggttctaccgaagagcctggtttgaagttaaataagatcagaaactcatttgaggaatccattagtcatgagtatawtcccagtcagggaggaaatgaaacacaaccaatctgtttgtaaatatcagcaaacaagaaggagaaacccgggtatccccttgtacatgtcaccctcttcttttgctgctgaatctctagtttggagtgtgttgagtcatatcaatgggtcacatttgtcagttcattgggttggcagtgcctggccactagagacggtgccagagtcagcccccagtttaagagaactagacaaccacttgggctggcctcaggatctgtcaccagagggaagctacagaaccattgccaacaagggcaatcccagacaagcccccaaatttgtaactgcccaacaggttcaccttgcccactgcctagacagaaccaatgtatcaagagaagggaattgaaatagagaaagagtaattcatgcagagccagctgtgcagaagaccagagttttattattactcaaataagtctctaagagcattcagggatcagagtttttaagaaaaatttggtgg

SEQ ID NO: 92824 - DNA, 686 bp, Homo sapiens
ctgctctaacaggcctccaaagcaatattgccttccaatagggagaaagtccaacgaggagccaaaactttatatccacctatcctttaacattccctaaaccagtagattaaaacaagatccaggcctgcacccaaaagaaagctgaggcagtacataattattataatagacatgaaatcgttatcaaggaaaactctggactcccctcagtcaccaaatctatccaagtggcttttaattctatgttcataaatagtttagatgatgatcttacaattctaaataggttcaccttgaatgggaaacaatgsaatgtccacctctgattcagttaacctggccagccaattagcctaaacaatttgtaaggtggataaagtgagggcaaagaaaataatgaacctacagcttcaccatctttctatccctcataataaaacatggtactttaacactataaaactaaatgttaaaggagtctgccactactacaaaaagcctggacacggagtagggggagattgcatacaattaaaacaagataaatgaccccctttaataggccaccctctatgttccttatagactgagggtgctccaaaaaacctacaggcgatctttcaatcttgtctcttaatcatttgggtgcaacccctgtcatgatcagaaaggagattctcact

SEQ ID NO: 92825 - DNA, 583 bp, Homo sapiens
ggcacaatacttggaagacaatcctcagtgaggtctgggttcaatatctaactgctaaagaggttggctgtccgccttgtggtgttcagtcaatctccaattgatataatgctttgataacatatgagcagcatgggttaaatccagaaactgtaaaggacttagataaaagtcctaagacctaaagtttggtctccaaatgtcacgaagcttggaatatatttgggaatgagtttaatcctcaaatggtaagagttttggatgtcaggaatgaggtctgggttcaatctcttgtcattaaaatgcttggaagacgcttggggtctggtttcaatcgtcaaatrgtaaagagttcaaatgacaacaatggtttctaggttcaagtgaaagctgacaaacagcttgaaataaactgcaagatctgggttcaatcttgaaatgttaagggtttagataattgtcatgagaaatgagttcagtttggaggattctaaaagtctaggtgaggtagctaagaatctgcaccagattagagacaacttgtggtcaggatccacgtgggaaaggatttagataacgacca

SEQ ID NO: 92826 - DNA, 717 bp, Homo sapiens
ccaattataatgaacttttccaagttccagggctaatgggtaagctacaaacgctgtaaatgagcttgctagatttgggcagccctctgtgaatgtcaatttagtcctagaattttgcaaggataatttcaagtgaacaaaacctggacatcttcctcatcttccaaaacattcaaggcagttcttgtatgcccattaattttttagcaacaacttccattcgatctctggataaaaggccatctttatatgaaaaaaattacttttcaaaacaggcagtaggtagttcctttttaaaatctcatgttgtaaaacaatatcattccaaaaataattctaacaagactttataggctctcgtaagagaatttattatgtattgccttttatcaccgtgcgtgtcaaacagcagaattatgagataaatggtaatggtagtcatgtgatatttgctttaggaaatctaaacaattgtaaaaagacactgtacttctatcraatacctaatacttggttccagacttgaaatgccagaggtttactgcaagtctgagacagaaaagaaggattaaaaatgataaaattaggatttgggcacagtcaatcataacatcttaacatctgacgtgacctctggagttatctgcaccagacaagctctcccagtcagagatgaggtgaggcccacagctgaggaatccaattgccccagcttca

SEQ ID NO: 92827 - DNA, 932 bp, Homo sapiens
agtaaaaaataattttttccattaccattctttaaacaaccccaatagattgcttttataacacacacacacacacacacacacacacacacatcattagaatctagtttaattttctaaaaggtgctaaacagcacctctgcgtatgtgagagacgtataaaaattkttttaatggggcttataacccaagaacttggagatcccctttctatgctttcaaaacttgacccctattggatacttgttatgaaggatcatcttgacattcaggaaaatgacctatagaagtcatctgagagaccatggaactttccttcttcagaaaacacttcacctcccctatctcctaatttcaagttcagtgtttttactttataccagactgactcattctcactgttgcacttatttcaagacctctaacatttctctgcagcttaaacattctatgattactcactgatgaaatgcaaaagtgtagtttaaaaaaaaacacatagactttattattttcggcccaattttctttttttgtttccatgaatataggaacctgaatcaatcttgagagaatttattggtcacacaccaagttaggtaaaaggcggatgaataatttctttactcatttactccactctgggaacaagagactgtgctgaatcgggatgtgtggcacacagagtaatatttccagctgtttcctcaaatacgatgtatgaaaaggaaaacaggctcacactggcatttgggaattaattcatggctacataggaatgcaaggtagaggcaaccctgatctcctctccttgaagttaataaattttacgtgtagatgagggtgaagaagtccatgctgtaagaccaaacccaggaaagctgtttgtgatccttgccagcccttttccacgccacagtcatgaagggttt

SEQ ID NO: 92828 - DNA, 932 bp, Homo sapiens
agtaaaaaataattttttccattaccattctttaaacaaccccaatagattgcttttataacacacacacacacacacacacacacacacacatcattagaatctagtttaattttctaaaaggtgctaaacagcacctctgcgtatgtgagagacgtataaaaatttttttaatggggcttataacccaagaacttggagatcccctttctatgctttcaaaacttgacccctattggatacttgttatgaaggatcatcttgacattcaggaaaatgacctatagaagtcatctgagagaccatggaactttccttcttcagaaaacacttcacctcccckatctcctaatttcaagttcagtgtttttactttataccagactgactcattctcactgttgcacttatttcaagacctctaacatttctctgcagcttaaacattctatgattactcactgatgaaatgcaaaagtgtagtttaaaaaaaaacacatagactttattattttcggcccaattttctttttttgtttccatgaatataggaacctgaatcaatcttgagagaatttattggtcacacaccaagttaggtaaaaggcggatgaataatttctttactcatttactccactctgggaacaagagactgtgctgaatcgggatgtgtggcacacagagtaatatttccagctgtttcctcaaatacgatgtatgaaaaggaaaacaggctcacactggcatttgggaattaattcatggctacataggaatgcaaggtagaggcaaccctgatctcctctccttgaagttaataaattttacgtgtagatgagggtgaagaagtccatgctgtaagaccaaacccaggaaagctgtttgtgatccttgccagcccttttccacgccacagtcatgaagggttt

SEQ ID NO: 92829 - DNA, 2579 bp, Homo sapiens
acaaaaaccctccaggatcctaatgacatcattgtgcttctaaagtaatcaggccccttgaatccttgttacgtgaggtaaagaatgcccttattgcttaagtcattgacagctggattgtttgttacttgttgttgaaactgtgccatctggttctcatcatcatctgtccatgatggtatttactaaaacattcatcatcctgtcatgtccttagtcatcagtgcatatgggatgccattgaatcatccttcattttaatcctcaaagtcccattgaaagaaatcattctcacacttctgcctagaaaccatatgagactgtttaagatcatctacttaggttattcatatagccattkatttttttcttgagatttctagctcttgcctcccactctctagttctacatgaaaagcaaaatctatattgccttgactcttttaaattgtacactttcaggggtgttttcatccctcttcgacctggattgtggaacaggaaaatgataacttcttttgcagaaatatgttttgatctacccactatgcatccatgctcatctcttaccttcaacttaggcattcctttcccagtctgaagaggcattgcaatcacctgttctttcatgtctgactccaaaagcctattgtttatgccctgaattatgtccactttcctcaaagacgaattatgtgaaattcaaaaattagacttctttagactcacttatctttccctggagcaatgagcatggaacacttcatgatgttctgttaaaatgagcaagggagcaagcaggatcacaaaataggaaaatttattttattaatatttcaaacttatgaatttggcacacagattcattctcaacaaatttgtttgttgtcttcatttaagtcctaagcatgtgggttgggtgagggaggcatttctggtatatttcgcaggatactgaaaatagatctattgaagatcattttctggtgctgagggtaaacaaaactgtttatattttcaaccatgttgaatatcaccttaaggctccttcagtttgactatgtttcagttgaattatatgctatattctgctgaaaagactaattttagagatattttataaggcactgttacaaacagtcttctgagactgggctccaatatcaaataattgataactcgaagaaatgtaattccaaagtttttctagttagagacaacgtttgttggggtgaagtttaacttttggagaaagtgggaatatgggaatcacttaaatgggcctttggtgatagaagtgagaaagaaacattttttaattgaaataaggttttaaaacaataccaaattgttctgcatattaatgtcgaaaattgtttccctctgggcaaaattgcctccttgcagcaagattattattatgataatattgaagtctattttatagaattatgcaagagattaaagagtttgtttatttttttcctcacttagagtgaaagggcagttgagaaactaggctctagttccaaggggagatgattaaggaatttcacccagttaaaaggaaactgactcctataactgaacaatagccaggagtctaaggaacaataagtcaatgacaattgtgtcttggatagagtctaggatacacattttgtttcatgtttttgttgttcttgaaaattccctacattgcttcctgtttgtgcttctcaagttctcagtgaagtcttgctggattttaagactagtcttacatatttcagggtttagggttaggtgtgtattcataaggaatgtatctatattttgacaacaacaataaccagaagaacaattattgaataatatgataagtggtaacttgcaaggaatagggcagctttcttctgtggctaggtagctagtcctttaagttattaatagagcatgcaggaattccttgggaagcctcacccataaaagacagttcttattgttacacatataatgagggcttttatattgcttgttgtagtagatactctagtcaccattcatttcctctttcttcttttacaacaaaaaactgattttagtaaggaacccagtaacttacatgtatccatgagctgtgtaatactaagcacagtaatcctaattctccctagtaccctcccttacctactgcaaaatattcaacagttgatacttcaaaggcatccaccaattggaatggaggactgttttaccactggagtggaagtatggaggcttcttgctatgagatactgaatatgagagggctgcctgtaagaggtgaagaaggaagaaagaaacacaaaaagcagctcaacagtcaaaggccgggttattgtggagaataaacctgagaggggcttctggccgagtgaggtcaggagcactgttttacagactaagaatatttaagagtttagggcaagagagcttatcacaggcttggaatgtttctgtgtctctgtcttgcttatctgggagggagagtttttgtgtctgttcccatacatcttcctgcagctgcaggcactgcctttcaagcgctactgaggtaa

SEQ ID NO: 92830 - DNA, 2579 bp, Homo sapiens
acaaaaaccctccaggatcctaatgacatcattgtgcttctaaagtaatcaggccccttgaatccttgttacgtgaggtaaagaatgcccttattgcttaagtcattgacagctggattgtttgttacttgttgttgaaactgtgccatctggttctcatcatcatctgtccatgatggtatttactaaaacattcatcatcctgtcatgtccttagtcatcagtgcatatgggatgccattgaatcatccttcattttaatcctcaaagtcccattgaaagaaatcattctcacacttctgcctagaaaccatatgagactgtttaagatcatctacttaggttattcatatagccatttatttttttcttgagatttctagctcttgcctcccactctctagttctacatgaaaagcaaaatctatattgccttgactcttttaaattgtacactttcaggggtgttttcatccctcttcgacctggattgtggaacaggaaaatgataacttcttttgcagaaatatgttttgatctacccactatgcatccatgctcatctcttaccttcaacttaggcattcctttcccagtctgaagaggcattgcaatcacctgttctttcatgtctgactccaaaagcctattgtttatgccctgaattatgtccactttcctcaaagacgaattatgtgaaattcaaaaattagacttctttagactcacttatctttccctggagcaatgagcatggaacacttcatgatgttctgttaaaatgagcaagggagcaagcaggatcacaaaataggaaaatttattttattaatatttcaaacttatgaatttggcacacagattcattctcaacaaatttgtttgttgtcttcatttaagtcctaagcatgtgggttgggtgagggaggcatttctggtatatttcgcaggatactgaaaatagatctattgaagatcattttctggtgctgagggtaaacaaaactgtttatattttcaaccatgttgaatatcaccttaaggctccttcagtttgactatgtttcagttgaattatatgctatattctgctgaaaagactaattttagagatattttataaggcactgttacaaacagtcttctgagactgggctccaatatcaaataattgataactcgaagaaatgtaattccaaagtttttctagttagagacaacgtttgttggggtgaagtttaacttttggagaaagtgggaatatgggaatcacttaaatgggcctttggtgatagaagtgagaaagaaacattttttaattgaaataaggttttaaaacaataccaaattgttctgcatattaatgtcgaaaattgtttccctctgggcaaaattgcctccttgcagcaagattattattatgataatattgaagtctattttatagaattatgcaagagattaaagagtttgtttatttttttcctcacttagagtgaaagggcagttgagaaactaggctctagttccaaggggagatgattraggaatttcacccagttaaaaggaaactgactcctataactgaacaatagccaggagtctaaggaacaataagtcaatgacaattgtgtcttggatagagtctaggatacacattttgtttcatgtttttgttgttcttgaaaattccctacattgcttcctgtttgtgcttctcaagttctcagtgaagtcttgctggattttaagactagtcttacatatttcagggtttagggttaggtgtgtattcataaggaatgtatctatattttgacaacaacaataaccagaagaacaattattgaataatatgataagtggtaacttgcaaggaatagggcagctttcttctgtggctaggtagctagtcctttaagttattaatagagcatgcaggaattccttgggaagcctcacccataaaagacagttcttattgttacacatataatgagggcttttatattgcttgttgtagtagatactctagtcaccattcatttcctctttcttcttttacaacaaaaaactgattttagtaaggaacccagtaacttacatgtatccatgagctgtgtaatactaagcacagtaatcctaattctccctagtaccctcccttacctactgcaaaatattcaacagttgatacttcaaaggcatccaccaattggaatggaggactgttttaccactggagtggaagtatggaggcttcttgctatgagatactgaatatgagagggctgcctgtaagaggtgaagaaggaagaaagaaacacaaaaagcagctcaacagtcaaaggccgggttattgtggagaataaacctgagaggggcttctggccgagtgaggtcaggagcactgttttacagactaagaatatttaagagtttagggcaagagagcttatcacaggcttggaatgtttctgtgtctctgtcttgcttatctgggagggagagtttttgtgtctgttcccatacatcttcctgcagctgcaggcactgcctttcaagcgctactgaggtaa

SEQ ID NO: 92831 - DNA, 1314 bp, Homo sapiens
  misc_feature (1)...(1314): n = A,T,C or G
tgcatatactttttatgtagtagcattttttgtttcctcctagaattgattgctgaaagttaaaagcacttatgacaaattcatttaattcattctcttctttgaaaacttaccaagcagtactgattttaaatgcttcatttacctagatattttatcccttcatgttttcagtgtgtttatgcttctttaaaaaacaggatagacagatagatagatagatagatagatagatagatagatagatagacagatagatacatagaaagatacatggacagatgacagaaatagctatgtagatagagacattgtcaaagtcctaatttatgccatgtcaaaactcataattttgttaaataaatatatttaacagccttattaaaatttaggtttagacattgtctaaagttatacaaaatttttattatttttacaactgcccatttaatattggctttgactatacgcaatataatatatatatgttttcaagataacaattttataatgttatatttggaaaatttatgtatctctgaatacttctactcttctcctatctctcatgactatttaatcaccttattgcagtagtacaatttaattgtaaaacacataattaagcaatctaagtttgaatttctgctctaatatttcaacctgtgatttctgataagttacttacttctctttctctgtgtgtgtttcttataggtaaaattgcataaaaatagcaactacctcctgggaattttatatgattgagtaagatgctttataaaatgagcttgacaaccgagtacttaatgaatgttagctattattcttaaaccaactgtactttgaaagtttttcttacctccataattcaattcagaacttcattattagtttccctgttgtattagtccattttctgttgctataaccgaataccacagactgggtaatttataaagagtagataattatttatgactagagactgcctgcaaagtgacacaagcaatgccagatctaggccagtaggggcctgtagtgtcctattctrtcatatgacagacatctgactataaaaacttttaagacgttttttctaactttataggttatccattccaaaacaaagatgaatnnnnnnnnnnnnnnnnnnnnnnnnnnnnnnnnnnnnnnnnnnnnnnnnnnnnnnnnnnnnnnnnnnnnnnnnnnnnnnnnnnnnnnnnnnnnnnnnnnnnatgattccttttgagtaactttagccttctataatttaacttttatgctgtagcagtgggttgacagaactatgca

SEQ ID NO: 92832 - DNA, 1314 bp, Homo sapiens
  misc_feature (1)...(1314): n = A,T,C or G
tgcatatactttttatgtagtagcattttttgtttcctcctagaattgattgctgaaagttaaaagcacttatgacaaattcatttaattcattctcttctttgaaaacttaccaagcagtactgattttaaatgcttcatttacctagatattttatcccttcatgttttcagtgtgtttatgcttctttaaaaaacaggatagacagatagatagatagatagatagatagatagatagatagatagacagatagatacatagaaagatacatggacagatgacagaaatagctatgtagatagagacattgtcaaagtcctaatttatgccatgtcaaaactcataattttgttaaataaatatatttaacagccttattaaaatttaggtttagacattgtctaaagttatacaaaatttttattatttttacaactgcccatttaatattggctttgactatacgcaatataatatatatatgttttcaagataacaattttataatgttatatttggaaaatttatgtatctctgaatacttctactcttctcctatctctcatgactatttaatcaccttattgcagtagtacaatttaattgtaaaacacataattaagcaatctaagtttgaatttctgctctaatatttcaacctgtgatttctgataagttacttacttctctttctctgtgtgtgtttcttataggtaaaattgcataaaaatagcaactacctcctgggaattttatatgattgagtaagatgctttataaaatgagcttgacaaccgagtacttaatgaatgttagctattattcttaaaccaactgtactttgaaagtttttcttacctccataattcaattcagaacttcattattagtttccctgttgtattagtccattttctgttgctataaccgaataccacagactgggtaatttataaagagtagataattatttatgactagagactgcctgcaaagtgacacaagcaatgccagatctaggccagtaggggcctgtagtgtcctattctgtcatatgacagacatctgactataaaaacttttaagacgttttttctaactttataggttatccattccaaaacaaagatgaatnnnnnnnnnnnnnnnnnnnnnnnnnnnnnnnnnnnnnnnnnnnnnnnnnnnnnnnnnnnnnnnnnnnnnnnnnnnnnnnnnnnnnnnnnnnnnnnnnnnnatgattccttttgagtaactttagccttctataatttaacttttatgctgtagcagtgggttgamagaactatgca

SEQ ID NO: 92833 - DNA, 1245 bp, Homo sapiens
cgcaccggsgctgcatgtggagctgcctgccagtcccgcgccgtgcacccgcactcctcagcccttgggtggtcgatgggactgggcgccgtggagcaggcggcggcgctcgttggggaggctcgggccgcacaggagcccacgaaggcggggaggctcaggcatggtgggctgcaggtccccagccctgccccgcgaggaggcagctaaggccaggcgagaaatcgagcgcagcgccggtgggccggcactgccgagggacccagtacaccctccgcagccgctggcccgggtgctaagcccctcattgccaggggccggcaggctgctccgagtgcggggccgccaagcccgcgcccacccggaactccagctggcccgcaagcgccgagcacagccccggtttccgctcacgcctctccctccacacctccctgcaagctgagggagccagctctggccttggccagcccagaaaggggctcccacagtgcagcggtgggctgaagggctccttaagtgccgccaaagtgggagcccaggcagaggcagcgctgagagcgagcgagggctgtgaagactgccagcacactgtcacctctcaataccccacagaagcaaagccacatgtgagcatgcaacctcacatctcacatagactattagcagaggtgtcctattctcccgggaagggagaaagaggagtaggaaaaagaaaggctaaaaggtgtctcaaaaggggaaaaggaattaacagcttctgaccacctacccccaatacctattttttatctattttttgccttttagcaaataaactttctgtatttttccattttttagtgaaaatatatatacctatatatatatattcactgaattataaaattaaaattatatatataattttataggaaaaatagaacaaatctttttaaaattgcagttacatgcaattaaagcatgctgatgatgagacatattaaatcatccataagaaatgcacaggctctcataggtatgaaagcaatggctccttctgtgtcactttatctccatgaatatgcttcagtagttaagaactgcttcatgttcaagggtggcttagccttagaggagagacttagaaggggattatacttttagatcagaagagaatgaatttttccccagaacaaatgatttctaaaacccttagaaattgtgcattactcatcctttttctatcttctttccactatacat

SEQ ID NO: 92834 - DNA, 1245 bp, Homo sapiens
cgcaccggcgctgcatgtggagctgcctgccagtcccgcgccgtgcacccgcactcctcagcccttgggtggtcgatgggactgggcgccgtggagcaggcggcggcgctcgttggggaggctcgggccgcacaggagcccacgaaggcggggaggctcaggcatggtgggctgcaggtccccagccctgccccgcgaggaggcagctaaggccaggcgagaaatcgagcgcagcgccggtgggccggcactgccgagggacccagtacaccctccgcagccgctggcccgggtgctaagcccctcattgccaggggccggcaggctgctccgagtgcggggccgccaagcccrcgcccacccggaactccagctggcccgcaagcgccgagcacagccccggtttccgctcacgcctctccctccacacctccctgcaagctgagggagccagctctggccttggccagcccagaaaggggctcccacagtgcagcggtgggctgaagggctccttaagtgccgccaaagtgggagcccaggcagaggcagcgctgagagcgagcgagggctgtgaagactgccagcacactgtcacctctcaataccccacagaagcaaagccacatgtgagcatgcaacctcacatctcacatagactattagcagaggtgtcctattctcccgggaagggagaaagaggagtaggaaaaagaaaggctaaaaggtgtctcaaaaggggaaaaggaattaacagcttctgaccacctacccccaatacctattttttatctattttttgccttttagcaaataaactttctgtatttttccattttttagtgaaaatatatatacctatatatatatattcactgaattataaaattaaaattatatatataattttataggaaaaatagaacaaatctttttaaaattgcagttacatgcaattaaagcatgctgatgatgagacatattaaatcatccataagaaatgcacaggctctcataggtatgaaagcaatggctccttctgtgtcactttatctccatgaatatgcttcagtagttaagaactgcttcatgttcaagggtggcttagccttagaggagagacttagaaggggattatacttttagatcagaagagaatgaatttttccccagaacaaatgatttctaaaacccttagaaattgtgcattactcatcctttttctatcttctttccactatacat

SEQ ID NO: 92835 - DNA, 1245 bp, Homo sapiens
cgcaccggcgctgcatgtggagctgcctgccagtcccgcgccgtgcacccgcactcctcagcccttgggtggtcgatgggactgggcgccgtggagcaggcggcggcgctcgttggggaggctcgggccgcacaggagcccacgaaggcggggaggctcaggcatggtgggctgcaggtccccagccctgccccgcgaggaggcagctaaggccaggcgagaaatcgagcgcagcgccggtgggccggcactgccgagggacccagtacaccctccgcagccgctggcccgggtgctaagcccctcattgccaggggccggcaggctgctccgagtgcggggccgccaagcccgcgcccacccggaactccagctggcccgcaagcgccgagcacagccccggtttccgctcacgcctctccctccacacctccctgcaagctgagggagccagctctggccttggccagcccagaaaggggctcccacagtgcagcggtgggctgaagggctccttaagtgccgccaaagtgggagcccaggcagaggcagcgctgagagcgagcgagggctgtgaagactgccagcacactgtcacctctcaataccccacagaagcaaagccacatgtgagcatgcaacctcacatctcacatagactattagcagaggtgtcctattctcccgggaagggagaaagaggagtaggaaaaagaaaggctaaaaggtgtctcaaaaggggaaaaggaattaacagcttctgaccacctacccccaatacctattttttatctattttttgccttttagcaaataaactttctgtatttttccattttttagtgaaaatatatatacctatatatatatattcactgaattataaaattaaaattatatatataattttataggaaaaatagaacaaatctttttaaaattgcagttacatgcaattaaagcatgctgatgatgagacatattaaatcatccataagaaatgcacaggctctcataggtatgaaagcaatggctccttctgtgtcactttatctccatgaatatgcttcagtagttaagaactgcttcatgttcaagggtggcttagccttagaggagagacttagaaggggattatacttttagatcagaagagaatgaatttttccccagaacaaawgatttctaaaacccttagaaattgtgcattactcatcctttttctatcttctttccactatacat

SEQ ID NO: 92836 - DNA, 1245 bp, Homo sapiens
cgcaccggcgctgcatgtggagctgcctgccagtcccgcgccgtgcacccgcactcctcagcccttgggtggtcgatgggactgggcgccgtggagcaggcggcggcgctcgttggggaggctcgggccgcacaggagcccacgaaggcggggaggctcaggcatggtgggctgcaggtccccagccctgccccgcgaggaggcagctaaggccaggcgagaaatcgagcgcagcgccggtgggccggcactgccgagggacccagtacaccctccgcagccgctggcccgggtgctaagcccctcattgccaggggccggcaggctgctccgagtgcggggccgccaagcccgcgcccacccggaactccagctggcccgcaagcgccgagcacagccccggtttccgctcacgcctctccctccacacctccctgcaagctgagggagccagctctggccttggccagcccagaaaggggctcccacagtgcagcggtgggctgaagggctccttaagtgccgccaaagtgggagcccaggcagaggcagcgctgagagcgagcgagggctgtgaagactgccagcacactgtcacctctcaataccccacagaagcaaagccacatgtgagcatgcaacctcacatctcacatagactattagcagaggtgtcctattctcccgggaagggagaaagaggagtaggaaaaagaaaggctaaaaggtgtctcaaaaggggaaaaggaattaacagcttctgaccacctacccccaatacctattttttatctattttttgccttttagcaaataaactttctgtatttttccattttttagtgaaaatatatatacctatatatatatattcactgaattataaaattaaaattatatatataattttataggaaaaatagaacaaatctttttaaaattgcagttacatgcaattaaagcatgctgatgatgagacatattaaatcatccataagaaatgcacaggctctcataggtatgaaagcaatggctccttctgtgtcactttatctccatgaatatgcttcagtagttaagaactgcttcatgttcaagggtggcttagccttagaggagagacttagaaggggattatacttttagatcagaagagaatgaatttttccccagaacaaatsatttctaaaacccttagaaattgtgcattactcatcctttttctatcttctttccactatacat

SEQ ID NO: 92837 - DNA, 988 bp, Homo sapiens
taattgcttggctcttttcaacatcccgccttactcacatactatcatgctataagtggagctaagattgtgtattttaattcccatagtcctgaacacaatatcaataaaggcatggggaaaaaaagcacatatgttcaccatcctacttctcgtcataatttagtataaaattcagggaaacccaattagttttccctttatctttctctttagattacttctctaaatacttagcttgtactgcagtgttggtcaatgacactatcaaaggttttctgctaacataacaatctgctttgaagaaggaaggaaggaaggaggaaggaaggaaggaaggagagagagggaatctcagtcggagagtgcaaggactgcagataaagaactttctcctcctaatgtttgtgtgtagacagagaccacatagcagcactgaatggtaaactgtcttttttgaaacttgaaacttctgtttaaatggcatttaagacatgataaaataaattgtttcattcactaagcactgggactcccaattacatctctcctctaagaaccccaagtccctattgcctgcccctgctttttgagctcagatgtttgtagatccatgcaagaaaagtaatttctcttggttggtgatttctggctgtggttttgcaggtttttcactgagatgtaaaacaaaggccctgactactcagtcatttaaggaagactccctggaaactttctgcaaaasgtagtaatattaacagcaattgccctggccagaatccattgcaagtaattgcattccaccaggtagtttataacaaaagcctcttcccatgcagtcttctgcatctctgccaagaatacagcagcagctaagctccaactatgtttgggtcaaaacagtttctggagtgaagtcatttaaggaatacatacagtgagccccaactgccacagcctcctttgttgtctgcaatgattgctgtat

SEQ ID NO: 92838 - DNA, 1083 bp, Homo sapiens
  misc_feature (1)...(1083): n = A,T,C or G
cgaactcagtattgggcagcgtagtccccacaggcgatgtcactgaccccactaaatactgtcagcacctgcagtcacagcattggcacctggcatttctcggctgatccaagaactcctgtggctttgcagagtacttacaccagtggttctcaaccctggttgtccattagattcacatggggagatttttctcaatgccaataactgggacccatcccaaaccaatttaattaggatctgttggtggaagcgggggactcaggcatcagtttatattaaaagctgctcagggactgggtgtggtggctcccgcctgtgatcccanaactttgggaggctgagggggggggatcacaagggcaggagatcaagaccatcctggctaacatggagaaaccccgtctctactaaaaaatacaaaaaatagccgggtgttgtggcgggcatctgtagtcccagctactcaggaggctgagacaggagaatagcgtgaacccaagaggtggagcttacagtgagctgagatcctgccactgcactccagcctgagcgacagattgagcctccgtctcaaaaaaaaaaaacaaacaaacaaacaaacaaaaaaaggctgctcagaagtaaaggcttcttctgccactttaggttaactgtggccagacggtaaggctgcacctactgagcatggagaaaagtaagaatgaaatccaattattgtgcttagtttggccaaatcccataagtcagaataactgaacatgaaacaaaacaaaacgaagcaaaacacaatagtgcccaccccgacagtccacctgtaccgcttttttttacgagatgatccttttatttcttacatgggaagatcttgttaaagtgtgaatttctgattctcactcccaacctaaagcaatcagaatctctgtttgccagggaatttgcatttcaataggtaycccagagcacctaagcccacaaaattttcggaccaccactttctaagtgattgcattaaggatcactgtataatccttctggggttttctgccctgattgcaaaacaaaaagaaatataaaatatag

SEQ ID NO: 92839 - DNA, 599 bp, Homo sapiens
  misc_feature (1)...(599): n = A,T,C or G
tgctctgtggcaccaggaagtttttagtcttaaagtaaaatagctctggtctccaagctgcttgccacctgtggcctggtgaggctgcacccttttctaagaattctttgctcctctgaggcccacaggggcccgttctggtttctcagggaaatccatgttgaagagccctgatactctgaagacacgaggaggaagcatagggaaagacctgactgacgtcttaggcccacggggacccttgcagcaaagcagacagaagagattgaaggcacagtaacacaggaatagggtgcctcttctatgacagatgacattttccccagtagctgcatttcgtgatctatagtgaatgtcacctgggacatccctttgccctacgatggctyccatgacctcttgtaattgagggaggtggcgaggccatgaggcaggtgctgtgcctgctgctgctctgcactttggctttcccttggctgccaccagtttccaaggttgnnnnnnnnnnnnnnnnnnnnnnnnnnnnnnnnnnnnnnnnnnnnnnnnnnnnnnnnnnnnnnnnnnnnnnnnnnnnnnnnnnnnnnnnnnnnnnnnnnnnt

SEQ ID NO: 92840 - DNA, 599 bp, Homo sapiens
  misc_feature (1)...(599): n = A,T,C or G
tgctctgtggcaccaggaagtttttagtcttaaagtaaaatagctctggtctccaagctgcttgccacctgtggcctggtgaggctgcacccttttctaagaattctttgctcctctgaggcccacaggggcccgttctggtttctcagggaaatccatgttgaagagccctgatactctgaagacacgaggaggaagcatagggaaagacctgactgacgtcttaggcccacggggacccttgcagcaaagcagacagaagagattgaaggcacagtaacacaggaatagggtgcctcttctatgacagatgacattttccccagtagctgcatttcgtgatctatagtgaatgtcacctgggacatccctttgccctacgatggctcccatgacctcttgtaattgagggaggtggcgagrccatgaggcaggtgctgtgcctgctgctgctctgcactttggctttcccttggctgccaccagtttccaaggttgnnnnnnnnnnnnnnnnnnnnnnnnnnnnnnnnnnnnnnnnnnnnnnnnnnnnnnnnnnnnnnnnnnnnnnnnnnnnnnnnnnnnnnnnnnnnnnnnnnnnt

SEQ ID NO: 92841 - DNA, 803 bp, Homo sapiens
ccagcctctgtctactccagcctgactcctacctgagcccctcacctggcccaagmgctcctgggttctttccatctttgtcaccaggtatactctccctttgcataagctatcccctctgtctggaattccgcctccttgcttggcaaaatcctccttctctagatgtctcagggagcctttttctggatgcctggatgttagatcctcttccctctctccccagcttccccagtgcgccatgagtttggtagctgtcctcttctctagaatgtaaactccatgaagtcagggaccatgtctgatttttcccagatgactccttagcaccttatatggagctttcacatgaaagtgaataataaagaacaaatatttccaggaatggaaggctctagaggtgaaacagttctgggtgatgaccaggtctggggtggggtcctgctagtgggtagctaaatgttgtggcaaaggtggtcatgggatagaaaggacagggtgatgcacaggtgacccctgaggccttggatcatgggagaatagcaggaggagaaggccttgggctatgggctcagtcttcaatgaatgaggagaggtagatggcaataatgtgggcaggacagagggcagaagaggaagcaaaggggatttttcaagaaggtgaaggtggacaggtgtgagtggtggtgagagcagtgtgagtcttgacattgtgggtgggattgaggataaatggcctgatggctgaagcagttcttagtcgcagcctcctctgaaggtccccacttggctcagtggctcag

SEQ ID NO: 92842 - DNA, 803 bp, Homo sapiens
ccagcctctgtctactccagcctgactcctacctgagcccctcacctggcccaagarctcctgggttctttccatctttgtcaccaggtatactctccctttgcataagctatcccctctgtctggaattccgcctccttgcttggcaaaatcctccttctctagatgtctcagggagcctttttctggatgcctggatgttagatcctcttccctctctccccagcttccccagtgcgccatgagtttggtagctgtcctcttctctagaatgtaaactccatgaagtcagggaccatgtctgatttttcccagatgactccttagcaccttatatggagctttcacatgaaagtgaataataaagaacaaatatttccaggaatggaaggctctagaggtgaaacagttctgggtgatgaccaggtctggggtggggtcctgctagtgggtagctaaatgttgtggcaaaggtggtcatgggatagaaaggacagggtgatgcacaggtgacccctgaggccttggatcatgggagaatagcaggaggagaaggccttgggctatgggctcagtcttcaatgaatgaggagaggtagatggcaataatgtgggcaggacagagggcagaagaggaagcaaaggggatttttcaagaaggtgaaggtggacaggtgtgagtggtggtgagagcagtgtgagtcttgacattgtgggtgggattgaggataaatggcctgatggctgaagcagttcttagtcgcagcctcctctgaaggtccccacttggctcagtggctcag

SEQ ID NO: 92843 - DNA, 2699 bp, Homo sapiens
acagttggcgtcttgtcccacaggacctcyccagaacccgtcttctgcaccctactgtggcattactttttcagggagctcattgagctccacacagtctgctccactgcaacctgctggaggccgtatgaccaggccttctgctggcaccttccctgagctggattctccccagcttcatttctctcttcctacagaccctgatcccatcagaggttttgggtcttatcatccctctgcttcctctccttttcattttcaaccttccgcagcctctttgactgccaacctgaggctgccaatagcctctgccttacctgagcctctttacagtcagtcctggactaccccagtagatctctgtcttctggaagaatcagtaagcggtctcgaaggaagtcaatatcctgactatggttttcaaagttgttctgaaacagaaagtcatgagctatgagaagtacttctagacagttgctttttacaaataaaatgtgatacaacagacaacagtatcccgtgctttctggaggtaatagaggaggatgaaatagtgtgcacacagcactggcaggatgctgtgccttggactgaactcttcagtctacagacagaggtatgtgtcttatttctccttaaatctgtggttagctggcttcatagtttagaacggggctcctcaaagcagctggtcaaggaactgtctatcgtcagtctgtagtgaaggaaggggcttgtgcactggggtgtaaatcatactgcttccttcactgaggaactcttgctacagaacaaaacagacagctgaacaaaacagtgtgcttgatgctggctggtgtttccctaccaacattagaccagaacctcatgctggggaatgttactattcctcacgtgaaaatgaacatctctgaacagatgatggggtgagatcttaatttcctagattctagaactaatggattgtaatccacataaatttcccactgtgaagtagagcacaagcacttgcacctgtactctaaatattttcatataaggtcatgggagtacagatattattcaacatgtagattgtgttagagcttatcactccatttgttaagctgataaacaccctgtagatttggccccatcgctggtactaagacccagtcctgcatctgtgattacttgttttggtgtaaagcagtttagtgaaatggaaagggcttgatgtagtataaaagtaagcgtgagtcccagcccactttgtgatttggggcaagtcaggtaacctgtctgagcctcagcttcctcatccatatagtggagataatgatagtgtctacttcacagagtgggtttggggtttaaacaggataatcacagctgcccagtttccctacttgagacagtgcacccaaaagcctgccaggagcatactgcaaatggtcaggagtgtggatcccacggccactcctggctctgctgcttgttagctgggagactttagacaaattgcttaacctttctctgcctccgtgttctcatctgcaatgtgggtgtgacaaatcatgctccacaggaagtggctaaacacataaaagaacagcacctggtaccagttctctatgggttggtacacattatcactgctgtcatttttcaaattattgccatagatccttcaacctgtgcacctgcctagggccacaccctgctttctgctccctgtgttggtttccctagggcctggattctgtctccgttgaggttaatatccccaagctcaggcttagcacactctcctctgcatgtgatggggcaggcagatgatggggggtgcagggaaggtagttttaaagtgcatgtttaatataacaattttgtacttagaaaaaactgtcattttcatgtttcagactacatcagggtacatttttatgttaaacaaaaggaatcatgctggagatctactgtacaatacaccgcctatgattgacaatccgatatggtatactgaagcatttgctaagaggtctatcttatgttaagtactctttccacaaaagggaacaaaacaaaacaaaaggggtggaagaaaagttctgggagtggtggctaagttcatggcattgataagtgatggtttgatggtttcacgggtgtatacttatctccaaacacatcaagttgtatacattaaatattggtgactttttgtatgccaatcatatttcaataaagtggggtttttttaaagagggaatcatgctatttaaaagtttgagaaataccagttcaatgctcattgctagttgacaatgcagtagggtgactatagttaacaagacattgtatatgtcaaaataactagaaggaaatatttgaaatgttgccaacacaaatacatgataaatgttcaagctgagggagatcctaaataccctgacctgattatttcacattctatgcatgtatcaaaatatcatgtgaaccccaaaatatgtacgagtattatgtatcaataaaaaatgaaataaagcattgctagaagaaaaaaagtacgatttaaaaaaatctctacacatgagcctctttccacactttttataaatgccaccagatatgtagtgttcatagcatttatgaggttccaaacaatactatgtcactagtgtatgaagaactttattttacagtaataaaaatgttag

SEQ ID NO: 92844 - DNA, 2699 bp, Homo sapiens
acagttggcgtcttgtcccacaggacctctccagaacccgtcttctgcaccctactgtggcattactttttcagggagctcattgagctccacacagtctgctccactgcaacctgctggaggccgtatgaccaggccttctgctggcaccttccctgagctggattctccccagcttcatttctctcttcctacagaccctgatcccatcagaggttttgggtcttatcatccctctgcttcctctccttttcattttcaaccttccgcagcctctttgactgccaacctgaggctgccaatagcctctgccttacctgagcctctttacagtcagtcctggactaccccagtagatctctgtcttctggaagaatcagtaagcggtctcgaaggaagtcaatatcctgactatggttttcaaagttgttctgaaacagaaagtcatgagctatgagaagtacttctagacagttgctttttacaaataaaatgtgatacaacagacaacagtatcccgtgctttctggaggtaatagaggaggatgaaatagtgtgcacacagcactggcaggatgctgtgccttggactgaactcttcagtctacagacagaggtatgtgtcttatttctccttaaatctgtggttagctggcttcatagtttagaacggggctcctcaaagcagctggtcaaggaactgtctatcgtcagtctgtagtgaaggaaggggcttgtgcactggggtgtaaatcatactgcttccttcactgaggaactcttgctacagaacaaaacagacagctgaacaaaacagtgtgcttgatgctggctggtgtttccctaccaacattagaccagaacctcatgctggggaatgttactattcctcacgtgaaaatgaacatctctgaacagatgatggggtgagatcttaatttcctagattctagaactaatggattgtaatccacataaatttcccactgtgaagtagagcacaagcacttgcacctgtactctaaatattttcatataaggtcatgggagtacagatattattcaacatgtagattgtgttagagcttatcactccatttgttaagctgataaacaccctgtagatttggccccatcgctggtactaagacccagtcctgcatctgtgattacttgttttggtgtaaagcagtttagtgaaatggaaagggcttgatgtagtataaaagtaagcgtgagtcccagcccactttgtgatttggggcaagtcaggtaacctgtctgagcctcagcttcctcatccatatagtggagataatgatagtgtctacttcacagagtgggtttggggtttaaacaggataatcacagctgcccagtttccctacttgagacagtgcacccaaaagcctgccaggagcatactgcaaatggtcaggagtgtggatcccacggccactcctggctctgctgcttgttagctgggagactttagacaaattgcttaacctttctctgcctccgtgttctcatctgcaatgtgggtgtgacaaatcatgctccacaggaagtggctaaacacataaaagaacagcacctggtaccagttctctatgggttggtacacattatcactgctgtcatttttcaaattattgccatagatccttcaacctgtgcacctgcctagggccacaccctgctttctgctccctgtgttggtttccctagggcctggattctgtctccgttgaggttaatatccccaagctcaggcttagcacactctcctctgcatgtgatggggcaggcagatgatggggggtgcagggaaggtagttttaaagtgcatgtttaatataacaattttgtacttagaaaaaactgtcattttcatgtttcagactacatcagggtacatttttatgttaaacaaaaggaatcatgctggagatctactgtacaatacacsgcctatgattgacaatccgatatggtatactgaagcatttgctaagaggtctatcttatgttaagtactctttccacaaaagggaacaaaacaaaacaaaaggggtggaagaaaagttctgggagtggtggctaagttcatggcattgataagtgatggtttgatggtttcacgggtgtatacttatctccaaacacatcaagttgtatacattaaatattggtgactttttgtatgccaatcatatttcaataaagtggggtttttttaaagagggaatcatgctatttaaaagtttgagaaataccagttcaatgctcattgctagttgacaatgcagtagggtgactatagttaacaagacattgtatatgtcaaaataactagaaggaaatatttgaaatgttgccaacacaaatacatgataaatgttcaagctgagggagatcctaaataccctgacctgattatttcacattctatgcatgtatcaaaatatcatgtgaaccccaaaatatgtacgagtattatgtatcaataaaaaatgaaataaagcattgctagaagaaaaaaagtacgatttaaaaaaatctctacacatgagcctctttccacactttttataaatgccaccagatatgtagtgttcatagcatttatgaggttccaaacaatactatgtcactagtgtatgaagaactttattttacagtaataaaaatgttag

SEQ ID NO: 92845 - DNA, 2699 bp, Homo sapiens
acagttggcgtcttgtcccacaggacctctccagaacccstcttctgcaccctactgtggcattactttttcagggagctcattgagctccacacagtctgctccactgcaacctgctggaggccgtatgaccaggccttctgctggcaccttccctgagctggattctccccagcttcatttctctcttcctacagaccctgatcccatcagaggttttgggtcttatcatccctctgcttcctctccttttcattttcaaccttccgcagcctctttgactgccaacctgaggctgccaatagcctctgccttacctgagcctctttacagtcagtcctggactaccccagtagatctctgtcttctggaagaatcagtaagcggtctcgaaggaagtcaatatcctgactatggttttcaaagttgttctgaaacagaaagtcatgagctatgagaagtacttctagacagttgctttttacaaataaaatgtgatacaacagacaacagtatcccgtgctttctggaggtaatagaggaggatgaaatagtgtgcacacagcactggcaggatgctgtgccttggactgaactcttcagtctacagacagaggtatgtgtcttatttctccttaaatctgtggttagctggcttcatagtttagaacggggctcctcaaagcagctggtcaaggaactgtctatcgtcagtctgtagtgaaggaaggggcttgtgcactggggtgtaaatcatactgcttccttcactgaggaactcttgctacagaacaaaacagacagctgaacaaaacagtgtgcttgatgctggctggtgtttccctaccaacattagaccagaacctcatgctggggaatgttactattcctcacgtgaaaatgaacatctctgaacagatgatggggtgagatcttaatttcctagattctagaactaatggattgtaatccacataaatttcccactgtgaagtagagcacaagcacttgcacctgtactctaaatattttcatataaggtcatgggagtacagatattattcaacatgtagattgtgttagagcttatcactccatttgttaagctgataaacaccctgtagatttggccccatcgctggtactaagacccagtcctgcatctgtgattacttgttttggtgtaaagcagtttagtgaaatggaaagggcttgatgtagtataaaagtaagcgtgagtcccagcccactttgtgatttggggcaagtcaggtaacctgtctgagcctcagcttcctcatccatatagtggagataatgatagtgtctacttcacagagtgggtttggggtttaaacaggataatcacagctgcccagtttccctacttgagacagtgcacccaaaagcctgccaggagcatactgcaaatggtcaggagtgtggatcccacggccactcctggctctgctgcttgttagctgggagactttagacaaattgcttaacctttctctgcctccgtgttctcatctgcaatgtgggtgtgacaaatcatgctccacaggaagtggctaaacacataaaagaacagcacctggtaccagttctctatgggttggtacacattatcactgctgtcatttttcaaattattgccatagatccttcaacctgtgcacctgcctagggccacaccctgctttctgctccctgtgttggtttccctagggcctggattctgtctccgttgaggttaatatccccaagctcaggcttagcacactctcctctgcatgtgatggggcaggcagatgatggggggtgcagggaaggtagttttaaagtgcatgtttaatataacaattttgtacttagaaaaaactgtcattttcatgtttcagactacatcagggtacatttttatgttaaacaaaaggaatcatgctggagatctactgtacaatacaccgcctatgattgacaatccgatatggtatactgaagcatttgctaagaggtctatcttatgttaagtactctttccacaaaagggaacaaaacaaaacaaaaggggtggaagaaaagttctgggagtggtggctaagttcatggcattgataagtgatggtttgatggtttcacgggtgtatacttatctccaaacacatcaagttgtatacattaaatattggtgactttttgtatgccaatcatatttcaataaagtggggtttttttaaagagggaatcatgctatttaaaagtttgagaaataccagttcaatgctcattgctagttgacaatgcagtagggtgactatagttaacaagacattgtatatgtcaaaataactagaaggaaatatttgaaatgttgccaacacaaatacatgataaatgttcaagctgagggagatcctaaataccctgacctgattatttcacattctatgcatgtatcaaaatatcatgtgaaccccaaaatatgtacgagtattatgtatcaataaaaaatgaaataaagcattgctagaagaaaaaaagtacgatttaaaaaaatctctacacatgagcctctttccacactttttataaatgccaccagatatgtagtgttcatagcatttatgaggttccaaacaatactatgtcactagtgtatgaagaactttattttacagtaataaaaatgttag

SEQ ID NO: 92846 - DNA, 2699 bp, Homo sapiens
acagttggcgtcttgtcccacaggacctctccagaacccgtcttctgcaccctactgtggcattactytttcagggagctcattgagctccacacagtctgctccactgcaacctgctggaggccgtatgaccaggccttctgctggcaccttccctgagctggattctccccagcttcatttctctcttcctacagaccctgatcccatcagaggttttgggtcttatcatccctctgcttcctctccttttcattttcaaccttccgcagcctctttgactgccaacctgaggctgccaatagcctctgccttacctgagcctctttacagtcagtcctggactaccccagtagatctctgtcttctggaagaatcagtaagcggtctcgaaggaagtcaatatcctgactatggttttcaaagttgttctgaaacagaaagtcatgagctatgagaagtacttctagacagttgctttttacaaataaaatgtgatacaacagacaacagtatcccgtgctttctggaggtaatagaggaggatgaaatagtgtgcacacagcactggcaggatgctgtgccttggactgaactcttcagtctacagacagaggtatgtgtcttatttctccttaaatctgtggttagctggcttcatagtttagaacggggctcctcaaagcagctggtcaaggaactgtctatcgtcagtctgtagtgaaggaaggggcttgtgcactggggtgtaaatcatactgcttccttcactgaggaactcttgctacagaacaaaacagacagctgaacaaaacagtgtgcttgatgctggctggtgtttccctaccaacattagaccagaacctcatgctggggaatgttactattcctcacgtgaaaatgaacatctctgaacagatgatggggtgagatcttaatttcctagattctagaactaatggattgtaatccacataaatttcccactgtgaagtagagcacaagcacttgcacctgtactctaaatattttcatataaggtcatgggagtacagatattattcaacatgtagattgtgttagagcttatcactccatttgttaagctgataaacaccctgtagatttggccccatcgctggtactaagacccagtcctgcatctgtgattacttgttttggtgtaaagcagtttagtgaaatggaaagggcttgatgtagtataaaagtaagcgtgagtcccagcccactttgtgatttggggcaagtcaggtaacctgtctgagcctcagcttcctcatccatatagtggagataatgatagtgtctacttcacagagtgggtttggggtttaaacaggataatcacagctgcccagtttccctacttgagacagtgcacccaaaagcctgccaggagcatactgcaaatggtcaggagtgtggatcccacggccactcctggctctgctgcttgttagctgggagactttagacaaattgcttaacctttctctgcctccgtgttctcatctgcaatgtgggtgtgacaaatcatgctccacaggaagtggctaaacacataaaagaacagcacctggtaccagttctctatgggttggtacacattatcactgctgtcatttttcaaattattgccatagatccttcaacctgtgcacctgcctagggccacaccctgctttctgctccctgtgttggtttccctagggcctggattctgtctccgttgaggttaatatccccaagctcaggcttagcacactctcctctgcatgtgatggggcaggcagatgatggggggtgcagggaaggtagttttaaagtgcatgtttaatataacaattttgtacttagaaaaaactgtcattttcatgtttcagactacatcagggtacatttttatgttaaacaaaaggaatcatgctggagatctactgtacaatacaccgcctatgattgacaatccgatatggtatactgaagcatttgctaagaggtctatcttatgttaagtactctttccacaaaagggaacaaaacaaaacaaaaggggtggaagaaaagttctgggagtggtggctaagttcatggcattgataagtgatggtttgatggtttcacgggtgtatacttatctccaaacacatcaagttgtatacattaaatattggtgactttttgtatgccaatcatatttcaataaagtggggtttttttaaagagggaatcatgctatttaaaagtttgagaaataccagttcaatgctcattgctagttgacaatgcagtagggtgactatagttaacaagacattgtatatgtcaaaataactagaaggaaatatttgaaatgttgccaacacaaatacatgataaatgttcaagctgagggagatcctaaataccctgacctgattatttcacattctatgcatgtatcaaaatatcatgtgaaccccaaaatatgtacgagtattatgtatcaataaaaaatgaaataaagcattgctagaagaaaaaaagtacgatttaaaaaaatctctacacatgagcctctttccacactttttataaatgccaccagatatgtagtgttcatagcatttatgaggttccaaacaatactatgtcactagtgtatgaagaactttattttacagtaataaaaatgttag

SEQ ID NO: 92847 - DNA, 2699 bp, Homo sapiens
acagttggcgtcttgtcccacaggacctctccagaacccgtcttctgcaccctactgtggcattactttttcagggagctcattgagctccacacagtctgctccactgcaacctgctggaggccgtatgaccaggccttctgctggcaccttccctgagctggattctccccagcttcatttctctcttcctacagaccctgatcccatcagaggttttgggtcttatcatccctctgcttcctctccttttcattttcaaccttccgcagcctctttgactgccaacctgaggctgccaatagcctctgccttacctgagcctctttacagtcagtcctggactaccccagtagatctctgtcttctggaagaatcagtaagcggtctcgaaggaagtcaatatcctgactatggttttcaaagttgttctgaaacagaaagtcatgagctatgagaagtacttctagacagytgctttttacaaataaaatgtgatacaacagacaacagtatcccgtgctttctggaggtaatagaggaggatgaaatagtgtgcacacagcactggcaggatgctgtgccttggactgaactcttcagtctacagacagaggtatgtgtcttatttctccttaaatctgtggttagctggcttcatagtttagaacggggctcctcaaagcagctggtcaaggaactgtctatcgtcagtctgtagtgaaggaaggggcttgtgcactggggtgtaaatcatactgcttccttcactgaggaactcttgctacagaacaaaacagacagctgaacaaaacagtgtgcttgatgctggctggtgtttccctaccaacattagaccagaacctcatgctggggaatgttactattcctcacgtgaaaatgaacatctctgaacagatgatggggtgagatcttaatttcctagattctagaactaatggattgtaatccacataaatttcccactgtgaagtagagcacaagcacttgcacctgtactctaaatattttcatataaggtcatgggagtacagatattattcaacatgtagattgtgttagagcttatcactccatttgttaagctgataaacaccctgtagatttggccccatcgctggtactaagacccagtcctgcatctgtgattacttgttttggtgtaaagcagtttagtgaaatggaaagggcttgatgtagtataaaagtaagcgtgagtcccagcccactttgtgatttggggcaagtcaggtaacctgtctgagcctcagcttcctcatccatatagtggagataatgatagtgtctacttcacagagtgggtttggggtttaaacaggataatcacagctgcccagtttccctacttgagacagtgcacccaaaagcctgccaggagcatactgcaaatggtcaggagtgtggatcccacggccactcctggctctgctgcttgttagctgggagactttagacaaattgcttaacctttctctgcctccgtgttctcatctgcaatgtgggtgtgacaaatcatgctccacaggaagtggctaaacacataaaagaacagcacctggtaccagttctctatgggttggtacacattatcactgctgtcatttttcaaattattgccatagatccttcaacctgtgcacctgcctagggccacaccctgctttctgctccctgtgttggtttccctagggcctggattctgtctccgttgaggttaatatccccaagctcaggcttagcacactctcctctgcatgtgatggggcaggcagatgatggggggtgcagggaaggtagttttaaagtgcatgtttaatataacaattttgtacttagaaaaaactgtcattttcatgtttcagactacatcagggtacatttttatgttaaacaaaaggaatcatgctggagatctactgtacaatacaccgcctatgattgacaatccgatatggtatactgaagcatttgctaagaggtctatcttatgttaagtactctttccacaaaagggaacaaaacaaaacaaaaggggtggaagaaaagttctgggagtggtggctaagttcatggcattgataagtgatggtttgatggtttcacgggtgtatacttatctccaaacacatcaagttgtatacattaaatattggtgactttttgtatgccaatcatatttcaataaagtggggtttttttaaagagggaatcatgctatttaaaagtttgagaaataccagttcaatgctcattgctagttgacaatgcagtagggtgactatagttaacaagacattgtatatgtcaaaataactagaaggaaatatttgaaatgttgccaacacaaatacatgataaatgttcaagctgagggagatcctaaataccctgacctgattatttcacattctatgcatgtatcaaaatatcatgtgaaccccaaaatatgtacgagtattatgtatcaataaaaaatgaaataaagcattgctagaagaaaaaaagtacgatttaaaaaaatctctacacatgagcctctttccacactttttataaatgccaccagatatgtagtgttcatagcatttatgaggttccaaacaatactatgtcactagtgtatgaagaactttattttacagtaataaaaatgttag

SEQ ID NO: 92848 - DNA, 2699 bp, Homo sapiens
acagttggcgtcttgtcccacaggacctctccagaacccgtcttctgcaccctactgtggcattactttttcagggagctcattgagctccacacagtctgctccactgcaacctgctggaggccgtatgaccaggccttctgctggcaccttccctgagctggattctccccagcttcatttctctcttcctacagaccctgatcccatcagaggttttgggtcttatcatccctctgcttcctctccttttcattttcaaccttccgcagcctctttgactgccaacctgaggctgccaatagcctctgccttacctgagcctctttacagtcagtcctggactaccccagtagatctctgtcttctggaagaatcagtaagcggtctcgaaggaagtcaatatcctgactatggttttcaaagttgttctgaaacagaaagtcatgagctatgagaagtacttctagacagttgctttttacaaataaaatgtgatacaacagacaacagtatcccgtgcyttctggaggtaatagaggaggatgaaatagtgtgcacacagcactggcaggatgctgtgccttggactgaactcttcagtctacagacagaggtatgtgtcttatttctccttaaatctgtggttagctggcttcatagtttagaacggggctcctcaaagcagctggtcaaggaactgtctatcgtcagtctgtagtgaaggaaggggcttgtgcactggggtgtaaatcatactgcttccttcactgaggaactcttgctacagaacaaaacagacagctgaacaaaacagtgtgcttgatgctggctggtgtttccctaccaacattagaccagaacctcatgctggggaatgttactattcctcacgtgaaaatgaacatctctgaacagatgatggggtgagatcttaatttcctagattctagaactaatggattgtaatccacataaatttcccactgtgaagtagagcacaagcacttgcacctgtactctaaatattttcatataaggtcatgggagtacagatattattcaacatgtagattgtgttagagcttatcactccatttgttaagctgataaacaccctgtagatttggccccatcgctggtactaagacccagtcctgcatctgtgattacttgttttggtgtaaagcagtttagtgaaatggaaagggcttgatgtagtataaaagtaagcgtgagtcccagcccactttgtgatttggggcaagtcaggtaacctgtctgagcctcagcttcctcatccatatagtggagataatgatagtgtctacttcacagagtgggtttggggtttaaacaggataatcacagctgcccagtttccctacttgagacagtgcacccaaaagcctgccaggagcatactgcaaatggtcaggagtgtggatcccacggccactcctggctctgctgcttgttagctgggagactttagacaaattgcttaacctttctctgcctccgtgttctcatctgcaatgtgggtgtgacaaatcatgctccacaggaagtggctaaacacataaaagaacagcacctggtaccagttctctatgggttggtacacattatcactgctgtcatttttcaaattattgccatagatccttcaacctgtgcacctgcctagggccacaccctgctttctgctccctgtgttggtttccctagggcctggattctgtctccgttgaggttaatatccccaagctcaggcttagcacactctcctctgcatgtgatggggcaggcagatgatggggggtgcagggaaggtagttttaaagtgcatgtttaatataacaattttgtacttagaaaaaactgtcattttcatgtttcagactacatcagggtacatttttatgttaaacaaaaggaatcatgctggagatctactgtacaatacaccgcctatgattgacaatccgatatggtatactgaagcatttgctaagaggtctatcttatgttaagtactctttccacaaaagggaacaaaacaaaacaaaaggggtggaagaaaagttctgggagtggtggctaagttcatggcattgataagtgatggtttgatggtttcacgggtgtatacttatctccaaacacatcaagttgtatacattaaatattggtgactttttgtatgccaatcatatttcaataaagtggggtttttttaaagagggaatcatgctatttaaaagtttgagaaataccagttcaatgctcattgctagttgacaatgcagtagggtgactatagttaacaagacattgtatatgtcaaaataactagaaggaaatatttgaaatgttgccaacacaaatacatgataaatgttcaagctgagggagatcctaaataccctgacctgattatttcacattctatgcatgtatcaaaatatcatgtgaaccccaaaatatgtacgagtattatgtatcaataaaaaatgaaataaagcattgctagaagaaaaaaagtacgatttaaaaaaatctctacacatgagcctctttccacactttttataaatgccaccagatatgtagtgttcatagcatttatgaggttccaaacaatactatgtcactagtgtatgaagaactttattttacagtaataaaaatgttag

SEQ ID NO: 92849 - DNA, 2699 bp, Homo sapiens
acagttggcgtcttgtcccacaggacctctccagaacccgtcttctgcaccctactgtggcattactttttcagggagctcattgagctccacacagtctgctccactgcaacctgctggaggccgtatgaccaggccttctgctggcaccttccctgagctggattctccccagcttcatttctctcttcctacagaccctgatcccatcagaggttttgggtcttatcatccctctgcttcctctccttttcattttcaaccttccgcagcctctttgactgccaacctgaggctgccaatagcctctgccttacctgagcctctttacagtcagtcctggactaccccagtagatctctgtcttctggaagaatcagtaagcggtctcgaaggaagtcaatatcctgactatggttttcaaagttgttctgaaacagaaagtcatgagctatgagaagtacttctagacagttgctttttacaaataaaatgtgatacaacagacaacagtatcccgtgctttctggaggtaatagaggaggatgaratagtgtgcacacagcactggcaggatgctgtgccttggactgaactcttcagtctacagacagaggtatgtgtcttatttctccttaaatctgtggttagctggcttcatagtttagaacggggctcctcaaagcagctggtcaaggaactgtctatcgtcagtctgtagtgaaggaaggggcttgtgcactggggtgtaaatcatactgcttccttcactgaggaactcttgctacagaacaaaacagacagctgaacaaaacagtgtgcttgatgctggctggtgtttccctaccaacattagaccagaacctcatgctggggaatgttactattcctcacgtgaaaatgaacatctctgaacagatgatggggtgagatcttaatttcctagattctagaactaatggattgtaatccacataaatttcccactgtgaagtagagcacaagcacttgcacctgtactctaaatattttcatataaggtcatgggagtacagatattattcaacatgtagattgtgttagagcttatcactccatttgttaagctgataaacaccctgtagatttggccccatcgctggtactaagacccagtcctgcatctgtgattacttgttttggtgtaaagcagtttagtgaaatggaaagggcttgatgtagtataaaagtaagcgtgagtcccagcccactttgtgatttggggcaagtcaggtaacctgtctgagcctcagcttcctcatccatatagtggagataatgatagtgtctacttcacagagtgggtttggggtttaaacaggataatcacagctgcccagtttccctacttgagacagtgcacccaaaagcctgccaggagcatactgcaaatggtcaggagtgtggatcccacggccactcctggctctgctgcttgttagctgggagactttagacaaattgcttaacctttctctgcctccgtgttctcatctgcaatgtgggtgtgacaaatcatgctccacaggaagtggctaaacacataaaagaacagcacctggtaccagttctctatgggttggtacacattatcactgctgtcatttttcaaattattgccatagatccttcaacctgtgcacctgcctagggccacaccctgctttctgctccctgtgttggtttccctagggcctggattctgtctccgttgaggttaatatccccaagctcaggcttagcacactctcctctgcatgtgatggggcaggcagatgatggggggtgcagggaaggtagttttaaagtgcatgtttaatataacaattttgtacttagaaaaaactgtcattttcatgtttcagactacatcagggtacatttttatgttaaacaaaaggaatcatgctggagatctactgtacaatacaccgcctatgattgacaatccgatatggtatactgaagcatttgctaagaggtctatcttatgttaagtactctttccacaaaagggaacaaaacaaaacaaaaggggtggaagaaaagttctgggagtggtggctaagttcatggcattgataagtgatggtttgatggtttcacgggtgtatacttatctccaaacacatcaagttgtatacattaaatattggtgactttttgtatgccaatcatatttcaataaagtggggtttttttaaagagggaatcatgctatttaaaagtttgagaaataccagttcaatgctcattgctagttgacaatgcagtagggtgactatagttaacaagacattgtatatgtcaaaataactagaaggaaatatttgaaatgttgccaacacaaatacatgataaatgttcaagctgagggagatcctaaataccctgacctgattatttcacattctatgcatgtatcaaaatatcatgtgaaccccaaaatatgtacgagtattatgtatcaataaaaaatgaaataaagcattgctagaagaaaaaaagtacgatttaaaaaaatctctacacatgagcctctttccacactttttataaatgccaccagatatgtagtgttcatagcatttatgaggttccaaacaatactatgtcactagtgtatgaagaactttattttacagtaataaaaatgttag

SEQ ID NO: 92850 - DNA, 2699 bp, Homo sapiens
acagttggcgtcttgtcccacaggacctctccagaacccgtcttctgcaccctactgtggcattactttttcagggagctcattgagctccacacagtctgctccactgcaacctgctggaggccgtatgaccaggccttctgctggcaccttccctgagctggattctccccagcttcatttctctcttcctacagaccctgatcccatcagaggttttgggtcttatcatccctctgcttcctctccttttcattttcaaccttccgcagcctctttgactgccaacctgaggctgccaatagcctctgccttacctgagcctctttacagtcagtcctggactaccccagtagatctctgtcttctggaagaatcagtaagcggtctcgaaggaagtcaatatcctgactatggttttcaaagttgttctgaaacagaaagtcatgagctatgagaagtacttctagacagttgctttttacaaataaaatgtgatacaacagacaacagtatcccgtgctttctggaggtaatagaggaggatgaaatagtgtgcacacagcactggcaggatgctgtgccttggactgaactcttcagtctacagacagaggtatgtgtcttatttctccttaaatctgtggttagctggcttcatagtttagaacggggctcctcaaagcagctggtcaaggaactgtctatcgtcagtctgtagtgaaggaaggggcttgtgcactggggtgtaaatcatactgcttccttcactgaggaactcttgctacagaacaaaacagacagctgaacaaaacagtgtgcttgatgctggctggtgtttccctaccaacattagaccagaacctcatgctggggaatgttactattcctcacgtgaaaatgaacatctctgaacagatgatggggtgagatcttaatttcctagattctagaactaatggattgtaatccacataaatttcccactgtgaagtagagcacaagcacttgcacctgtactctaaatattttcatataaggtcatgggagtacagatattattcaacatgtagattgtgttagagcttatcactccatttgttaagctgataaacaccctgtagatttggccccatcgctggtactaagacccagtcctgcatctgtgattacttgttttggtgtaaagcagtttagtgaaatggaaagggcttgatgtagtataaaagtaagcgtgagtcccagcccactttgtgatttggggcaagtcaggtaacctgtctgagcctcagcttcctcatccatatagtggagataatgatagtgtctacttcacagagtgggtttggggtttaaacaggataatcacagctgcccagtttccctacttgagacagtgcacccaaaagcctgccaggagcatactgcaaatggtcaggagtgtggatcccacggccactcctggctctgctgcttgttagctgggagactttagacaaattgcttaacctttctctgcctccgtgttctcatctgcaatgtgggtgtgacaaatcatgctccacaggaagtggctaaacayataaaagaacagcacctggtaccagttctctatgggttggtacacattatcactgctgtcatttttcaaattattgccatagatccttcaacctgtgcacctgcctagggccacaccctgctttctgctccctgtgttggtttccctagggcctggattctgtctccgttgaggttaatatccccaagctcaggcttagcacactctcctctgcatgtgatggggcaggcagatgatggggggtgcagggaaggtagttttaaagtgcatgtttaatataacaattttgtacttagaaaaaactgtcattttcatgtttcagactacatcagggtacatttttatgttaaacaaaaggaatcatgctggagatctactgtacaatacaccgcctatgattgacaatccgatatggtatactgaagcatttgctaagaggtctatcttatgttaagtactctttccacaaaagggaacaaaacaaaacaaaaggggtggaagaaaagttctgggagtggtggctaagttcatggcattgataagtgatggtttgatggtttcacgggtgtatacttatctccaaacacatcaagttgtatacattaaatattggtgactttttgtatgccaatcatatttcaataaagtggggtttttttaaagagggaatcatgctatttaaaagtttgagaaataccagttcaatgctcattgctagttgacaatgcagtagggtgactatagttaacaagacattgtatatgtcaaaataactagaaggaaatatttgaaatgttgccaacacaaatacatgataaatgttcaagctgagggagatcctaaataccctgacctgattatttcacattctatgcatgtatcaaaatatcatgtgaaccccaaaatatgtacgagtattatgtatcaataaaaaatgaaataaagcattgctagaagaaaaaaagtacgatttaaaaaaatctctacacatgagcctctttccacactttttataaatgccaccagatatgtagtgttcatagcatttatgaggttccaaacaatactatgtcactagtgtatgaagaactttattttacagtaataaaaatgttag

SEQ ID NO: 92851 - DNA, 2699 bp, Homo sapiens
acagttggcgtcttgtcccacaggacctctccagaacccgtcttctgcaccctactgtggcattactttttcagggagctcattgagctccacacagtctgctccactgcaacctgctggaggccgtatgaccaggccttctgctggcaccttccctgagctggattctccccagcttcatttctctcttcctacagaccctgatcccatcagaggttttgggtcttatcatccctctgcttcctctccttttcattttcaaccttccgcagcctctttgactgccaacctgaggctgccaatagcctctgccttacctgagcctctttacagtcagtcctggactaccccagtagatctctgtcttctggaagaatcagtaagcggtctcgaaggaagtcaatatcctgactatggttttcaaagttgttctgaaacagaaagtcatgagctatgagaagtacttctagacagttgctttttacaaataaaatgtgatacaacagacaacagtatcccgtgctttctggaggtaatagaggaggatgaaatagtgtgcacacagcactggcaggatgctgtgccttggactgaactcttcagtctacagacagaggtatgtgtcttatttctccttaaatctgtggttagctggcttcatagtttagaacggggctcctcaaagcagctggtcaaggaactgtctatcgtcagtctgtagtgaaggaaggggcttgtgcactggggtgtaaatcatactgcttccttcactgaggaactcttgctacagaacaaaacagacagctgaacaaaacagtgtgcttgatgctggctggtgtttccctaccaacattagaccagaacctcatgctggggaatgttactattcctcacgtgaaaatgaacatctctgaacagatgatggggtgagatcttaatttcctagattctagaactaatggattgtaatccacataaatttcccactgtgaagtagagcacaagcacttgcacctgtactctaaatattttcatataaggtcatgggagtacagatattattcaacatgtagattgtgttagagcttatcactccatttgttaagctgataaacaccctgtagatttggccccatcgctggtactaagacccagtcctgcatctgtgattacttgttttggtgtaaagcagtttagtgaaatggaaagggcttgatgtagtataaaagtaagcgtgagtcccagcccactttgtgatttggggcaagtcaggtaacctgtctgagcctcagcttcctcatccatatagtggagataatgatagtgtctacttcacagagtgggtttggggtttaaacaggataatcacagctgcccagtttccctacttgagacagtgcacccaaaagcctgccaggagcatactgcaaatggtcaggagtgtggatcccacggccactcctggctctgctgcttgttagctgggagactttagacaaattgcttaacctttctctgcctccgtgttctcatctgcaatgtgggtgtgacaaatcatgctccacaggaagtggctaaacacatmaaagaacagcacctggtaccagttctctatgggttggtacacattatcactgctgtcatttttcaaattattgccatagatccttcaacctgtgcacctgcctagggccacaccctgctttctgctccctgtgttggtttccctagggcctggattctgtctccgttgaggttaatatccccaagctcaggcttagcacactctcctctgcatgtgatggggcaggcagatgatggggggtgcagggaaggtagttttaaagtgcatgtttaatataacaattttgtacttagaaaaaactgtcattttcatgtttcagactacatcagggtacatttttatgttaaacaaaaggaatcatgctggagatctactgtacaatacaccgcctatgattgacaatccgatatggtatactgaagcatttgctaagaggtctatcttatgttaagtactctttccacaaaagggaacaaaacaaaacaaaaggggtggaagaaaagttctgggagtggtggctaagttcatggcattgataagtgatggtttgatggtttcacgggtgtatacttatctccaaacacatcaagttgtatacattaaatattggtgactttttgtatgccaatcatatttcaataaagtggggtttttttaaagagggaatcatgctatttaaaagtttgagaaataccagttcaatgctcattgctagttgacaatgcagtagggtgactatagttaacaagacattgtatatgtcaaaataactagaaggaaatatttgaaatgttgccaacacaaatacatgataaatgttcaagctgagggagatcctaaataccctgacctgattatttcacattctatgcatgtatcaaaatatcatgtgaaccccaaaatatgtacgagtattatgtatcaataaaaaatgaaataaagcattgctagaagaaaaaaagtacgatttaaaaaaatctctacacatgagcctctttccacactttttataaatgccaccagatatgtagtgttcatagcatttatgaggttccaaacaatactatgtcactagtgtatgaagaactttattttacagtaataaaaatgttag

SEQ ID NO: 92852 - DNA, 2699 bp, Homo sapiens
acagttggcgtcttgtcccacaggacctctccagaacccgtcttctgcaccctactgtggcattactttttcagggagctcattgagctccacacagtctgctccactgcaacctgctggaggccgtatgaccaggccttctgctggcaccttccctgagctggattctccccagcttcatttctctcttcctacagaccctgatcccatcagaggttttgggtcttatcatccctctgcttcctctccttttcattttcaaccttccgcagcctctttgactgccaacctgaggctgccaatagcctctgccttacctgagcctctttacagtcagtcctggactaccccagtagatctctgtcttctggaagaatcagtaagcggtctcgaaggaagtcaatatcctgactatggttttcaaagttgttctgaaacagaaagtcatgagctatgagaagtacttctagacagttgctttttacaaataaaatgtgatacaacagacaacagtatcccgtgctttctggaggtaatagaggaggatgaaatagtgtgcacacagcactggcaggatgctgtgccttggactgaactcttcagtctacagacagaggtatgtgtcttatttctccttaaatctgtggttagctggcttcatagtttagaacggggctcctcaaagcagctggtcaaggaactgtctatcgtcagtctgtagtgaaggaaggggcttgtgcactggggtgtaaatcatactgcttccttcactgaggaactcttgctacagaacaaaacagacagctgaacaaaacagtgtgcttgatgctggctggtgtttccctaccaacattagaccagaacctcatgctggggaatgttactattcctcacgtgaaaatgaacatctctgaacagatgatggggtgagatcttaatttcctagattctagaactaatggattgtaatccacataaatttcccactgtgaagtagagcacaagcacttgcacctgtactctaaatattttcatataaggtcatgggagtacagatattattcaacatgtagattgtgttagagcttatcactccatttgttaagctgataaacaccctgtagatttggccccatcgctggtactaagacccagtcctgcatctgtgattacttgttttggtgtaaagcagtttagtgaaatggaaagggcttgatgtagtataaaagtaagcgtgagtcccagcccactttgtgatttggggcaagtcaggtaacctgtctgagcctcagcttcctcatccatatagtggagataatgatagtgtctacttcacagagtgggtttggggtttaaacaggataatcacagctgcccagtttccctacttgagacagtgcacccaaaagcctgccaggagcatactgcaaatggtcaggagtgtggatcccacggccactcctggctctgctgcttgttagctgggagactttagacaaattgcttaacctttctctgcctccgtgttctcatctgcaatgtgggtgtgacaaatcatgctccacaggaagtggctaaacacataaaagaacagcacctggtaccagttctctatgggttggtacacattatcactgctgtcatttttcaaattattgccatagatccttcaacctgtgcacctgcctagggccacaccctgctttctgctccctgtgttggtttccctagggcctggattctgtctccgttgaggttaatatccccaagctcaggcttagcacactctcctctgcatgtgatggggcaggcagatgatggggggtgcagggaaggtagttttaaagtgcatgtttaatataacaattttgtacttagaaaaaactgtcattttcaygtttcagactacatcagggtacatttttatgttaaacaaaaggaatcatgctggagatctactgtacaatacaccgcctatgattgacaatccgatatggtatactgaagcatttgctaagaggtctatcttatgttaagtactctttccacaaaagggaacaaaacaaaacaaaaggggtggaagaaaagttctgggagtggtggctaagttcatggcattgataagtgatggtttgatggtttcacgggtgtatacttatctccaaacacatcaagttgtatacattaaatattggtgactttttgtatgccaatcatatttcaataaagtggggtttttttaaagagggaatcatgctatttaaaagtttgagaaataccagttcaatgctcattgctagttgacaatgcagtagggtgactatagttaacaagacattgtatatgtcaaaataactagaaggaaatatttgaaatgttgccaacacaaatacatgataaatgttcaagctgagggagatcctaaataccctgacctgattatttcacattctatgcatgtatcaaaatatcatgtgaaccccaaaatatgtacgagtattatgtatcaataaaaaatgaaataaagcattgctagaagaaaaaaagtacgatttaaaaaaatctctacacatgagcctctttccacactttttataaatgccaccagatatgtagtgttcatagcatttatgaggttccaaacaatactatgtcactagtgtatgaagaactttattttacagtaataaaaatgttag

SEQ ID NO: 92853 - DNA, 556 bp, Homo sapiens
ttcagtagcttaacataaccaaagattactttcttgtccatatcacagtcaaatattggtcaggaagaaagttccacttatgtggtcatttagagaccttgactccttccatactgtggctccaccatcttcaatatatgtctttaaaattatcctggtaagagagaagaacaaagattaccctggcatcatccccctgctagacaagaggaagaatactagtcacatagccccatccatgtacgaaggcctgagaaatgtactgttaagctgmgtgtccaggaggagaaaagagctctgatgagctcctagccagcctctgccagaggcagttgttcaacctctggacctgtttcctatcatgacaacaaggggatagatgaggaagtcctgagcatccttgacccagcaagtggtttgaaggtcaaatgctagccctaggacaggagctgtttgtttgtttgtttgttttgagacaaggtctggctcccttgcccaggctagagtgcagtggtactatctcggctgactgcaacttctacctcccaggctcaag

SEQ ID NO: 92854 - DNA, 2054 bp, Homo sapiens
cctttctccttyttggacacatttgaccatggattagctttctagctctgttcccatggaaatctgataaagatggcatgtcagctgtaatagtaggcaaaattgcttatgtaattgtggcctctcattgataaattgcattgagacagggggttcaatggtgggaaacccaagctttgggcttgtcagagagcagtgactcatataattgggtatgtcccttgagggcatctggaacctaagacaatgttacaagagctatgggctcttgtggggtagggcttccaagccaagtggatctcacatccacctgacgtgagtctctttctcttgtacctgagctgacactcagagtgggaacaaagggaaaagctcctggagcctgtgtgggcctctgtgagggccactcccacagagaagtgactgtttcctggcccgagatagatctgtaggcagcacacagtggctcatgcccgtaatcccagcacttttggaggccaaggcaggcagatcatgaggtcaggagttcgagaccagcctggccaacacggtgaaaccctgtctctactaaaaacaaaaaaattagccaggcttggtgatgcttgcctgtaatcccagctactcgggaggctgaggcatgagaattgcttgaacctgggaggcagagattgcagtgagccgagatcgcaccactgcactccagcatgggcaacagagcgagactctgtcttgaggaaaaaaaaaaaaaaaacctgtaactctgaatgtctacttgagaaggcatcctggtgaatgttacagaattttatttgaacttcaggcattaattctaaatttatttttgtttcatgattattttagattggaactgtgctcttaaactgatactgacctaaggcaaaggtcatggcctctgcaaagcctcccttattgttcccagggctctgtgaccttgagccctcaatatctcatatatatatattcaggattggaagtatcacagtggattgtaatgatgagtgttatttctttctagacagtgatctctgaggccagggtgtgaagctattttcatctttgagtgtcagccctagtcgattgcttggtatatagcaggtgcttaatgaagtgtatcagtggaatgctttcagaggtgtaaatattaggaaaatatcccataagtgatgtggaacaagaacaaaaatgctatacaccctgcacccattaaacattccctcctagtgggaccctgtgctgatctactcagggggtgaggtccccacctcccatactccaaaagagaacacatttcccctttgcaaaattatttaccaggtgttagggctgaactgtacccctacaaaatgcatatcctgaagtcctaactcccaggacctcaacaatgggactgtgtttggagatagagcccttaaagaggtaattaattaattaagtgagatcataggggtgggccctgatccaatatgactgctatcctcatgtgaagagatgaggacacagacacccacaggtagaagatcatgtgaggacacagcaagaaggcagccgtctgtaagccaaagagagaggcctcacctcagaagaaatcaaccctgctgcgctttgaccttggcttccagcctttagcactgtgagaaataaatgtctgttgtttaagctccccagcctgttgcatttattaacagcagcctgagctaagacaccaggtaagaagaaaaaggttgggaggctggctggttcattgaaacgagttatgaacagaggtgaataaacacataggactcaatataaacagcattacctgcatgccatcatccaggaggaagtgtgaggatatcaggaaaggacagtccctggagtcctgcgaacactgcagttccacaaccacagcttcctggcctccctccattcccacctggaaaataggatgtgctttcagaagctgcacttgggaaacatcaaactacatgtgccatttgaaaatgttcattataattataaaataatatatgttcatttagagataaatttag

SEQ ID NO: 92855 - DNA, 2054 bp, Homo sapiens
cctttctccttcttggacacatttgaccatggattagctttctagctctgttcccatggaaatctgataaagatggcatgtcagctgtaatagtaggcaaaattgcttatgtaattgtggcctctcattgataaattgcatkgagacagggggttcaatggtgggaaacccaagctttgggcttgtcagagagcagtgactcatataattgggtatgtcccttgagggcatctggaacctaagacaatgttacaagagctatgggctcttgtggggtagggcttccaagccaagtggatctcacatccacctgacgtgagtctctttctcttgtacctgagctgacactcagagtgggaacaaagggaaaagctcctggagcctgtgtgggcctctgtgagggccactcccacagagaagtgactgtttcctggcccgagatagatctgtaggcagcacacagtggctcatgcccgtaatcccagcacttttggaggccaaggcaggcagatcatgaggtcaggagttcgagaccagcctggccaacacggtgaaaccctgtctctactaaaaacaaaaaaattagccaggcttggtgatgcttgcctgtaatcccagctactcgggaggctgaggcatgagaattgcttgaacctgggaggcagagattgcagtgagccgagatcgcaccactgcactccagcatgggcaacagagcgagactctgtcttgaggaaaaaaaaaaaaaaaacctgtaactctgaatgtctacttgagaaggcatcctggtgaatgttacagaattttatttgaacttcaggcattaattctaaatttatttttgtttcatgattattttagattggaactgtgctcttaaactgatactgacctaaggcaaaggtcatggcctctgcaaagcctcccttattgttcccagggctctgtgaccttgagccctcaatatctcatatatatatattcaggattggaagtatcacagtggattgtaatgatgagtgttatttctttctagacagtgatctctgaggccagggtgtgaagctattttcatctttgagtgtcagccctagtcgattgcttggtatatagcaggtgcttaatgaagtgtatcagtggaatgctttcagaggtgtaaatattaggaaaatatcccataagtgatgtggaacaagaacaaaaatgctatacaccctgcacccattaaacattccctcctagtgggaccctgtgctgatctactcagggggtgaggtccccacctcccatactccaaaagagaacacatttcccctttgcaaaattatttaccaggtgttagggctgaactgtacccctacaaaatgcatatcctgaagtcctaactcccaggacctcaacaatgggactgtgtttggagatagagcccttaaagaggtaattaattaattaagtgagatcataggggtgggccctgatccaatatgactgctatcctcatgtgaagagatgaggacacagacacccacaggtagaagatcatgtgaggacacagcaagaaggcagccgtctgtaagccaaagagagaggcctcacctcagaagaaatcaaccctgctgcgctttgaccttggcttccagcctttagcactgtgagaaataaatgtctgttgtttaagctccccagcctgttgcatttattaacagcagcctgagctaagacaccaggtaagaagaaaaaggttgggaggctggctggttcattgaaacgagttatgaacagaggtgaataaacacataggactcaatataaacagcattacctgcatgccatcatccaggaggaagtgtgaggatatcaggaaaggacagtccctggagtcctgcgaacactgcagttccacaaccacagcttcctggcctccctccattcccacctggaaaataggatgtgctttcagaagctgcacttgggaaacatcaaactacatgtgccatttgaaaatgttcattataattataaaataatatatgttcatttagagataaatttag

SEQ ID NO: 92856 - DNA, 1121 bp, Homo sapiens
ttttatgttgctttggttaaaggaagaacataaatgccctgctgataggtcctctgtttggttgtagcttgtataaggggggtgtgaacacaatacacagtttgccacaaaatgattctttaaaagttacaactatggtattatgaagccaagtacagctacactgggactgaattctctatgcttctttattaccttctttgctatctttgttttctggtagctgtgactcacacaggtcacggagagtgtgattccaaaatagaagcgcacctacagtggtcatcttttcttgatctattaagttcttctgccccaagtctgtggatcccaacacagtgttggtcattggtggagatacaaatggacatagatcaccaactttcaaattctcagatctttcatgaagctcattactaaaggtcaaactattaaaatccaaagctgaaaaagctgaaagtaaagttttcattattagaatgtaaatcataatacactttgaytaacgtggagaaattccttctaaaacagaagcagtcccatgtcctccactcccccagaaacacaccactcctgcatggcttattgtattctacatgtcccgtacttgccattcactcgcataggttttattaacaatcatctttgacatttttattttttagtgttacttactttgattcactcagcgatattatatattttgttttccatgagagctttgtttattaataataaagattcttcaagaatatcaactttcttttactaacaagacttatgtttaaccattagacacatgatgtgtcataagatcatgggtgcttaatgggccagagttataatgactattggaatgcatggcggtgcatgcttatattttaaattattcagcttcagtttctgatatagtaaatatcaatagatacaatccacttaaacaaaagctctttggaatctgccatcattttttaatgtttttatctttttctcaccatgaagagagtttaattaaatgtagtactgttatagcatgaaatactataggaaatgtaaactcagctagagctccttctgaaaatagcgatgatctctttggtcaaatcaatgggtgtgaacaa

SEQ ID NO: 92857 - DNA, 1121 bp, Homo sapiens
ttttatgttgctttggttaaaggaagaacataaatgccctgctgataggtcctctgtttggttgtagcttgtataaggggggtgtgaacacaatacacagtttgccacaaaatgattctttaaaagttacaactatggtattatgaagccaagtacagctacactgggactgaattctctatgcttctttattaccttctttgctatctttgttttctggtagctgtgactcacacaggtcacggagagtgtgattccaaaatagaagcgcacctacagtggtcatcttttcttgatctattaagttcttctgccccaagtctgtggatcccaacacagtgttggtcattggtggagatacaaatggacatagatcaccaactttcaaattctcagatctttcatgaagctcattactaaaggtcaaactattaaaatccaaagctgaaaaagctgaaagtaaagttttcattattagaatgtaaatcataatacactttgactaacgtggagaaattccttctaaaacagaagcagtcccatgtcctccactcccccagaaacacaccactcctgcatggcttattgtattctacatgtcccgtacttgccattcactygcataggttttattaacaatcatctttgacatttttattttttagtgttacttactttgattcactcagcgatattatatattttgttttccatgagagctttgtttattaataataaagattcttcaagaatatcaactttcttttactaacaagacttatgtttaaccattagacacatgatgtgtcataagatcatgggtgcttaatgggccagagttataatgactattggaatgcatggcggtgcatgcttatattttaaattattcagcttcagtttctgatatagtaaatatcaatagatacaatccacttaaacaaaagctctttggaatctgccatcattttttaatgtttttatctttttctcaccatgaagagagtttaattaaatgtagtactgttatagcatgaaatactataggaaatgtaaactcagctagagctccttctgaaaatagcgatgatctctttggtcaaatcaatgggtgtgaacaa

SEQ ID NO: 92858 - DNA, 1121 bp, Homo sapiens
ttttatgttgctttggttaaaggaagaacataaatgccctgctgataggtcctctgtttggttgtagcttgtataaggggggtgtgaacacaatacacagtttgccacaaaatgattctttaaaagttacaactatggtattatgaagccaagtacagctacactgggactgaattctctatgcttctttattaccttctttgctatctttgttttctggtagctgtgactcacacaggtcacggagagtgtgattccaaaatagaagcgcacctacagtggtcatcttttcttgatctattaagttcttctgccccaagtctgtggatcccaacacagtgttggtcattggtggagatacaaatggacatagatcaccaactttcaaattctcagatctttcatgaagctcattactaaaggtcaaactattaaaatccaaagctgaaaaagctgaaagtaaagttttcattattagaatgtaaatcataatacactttgactaacgtggagaaattccttctaaaacagaagcagtcccatgtcctccactcccccagaaacacaccactcctgcatggcttattgtattctacatgtcccgtacttgccattcactcgcataggttttattaacaatcatctttgacatttttattttttagtgttacttactttgattcactcagcgatattatatattttgttttccatgagagctttgtttattaataataaagattcttcaagaatatcaactttcttttactaacaagacttatgtttaaccattagacacatgatgtgtcataagatcatgggtgcttaatgggccagagttataatgactaytggaatgcatggcggtgcatgcttatattttaaattattcagcttcagtttctgatatagtaaatatcaatagatacaatccacttaaacaaaagctctttggaatctgccatcattttttaatgtttttatctttttctcaccatgaagagagtttaattaaatgtagtactgttatagcatgaaatactataggaaatgtaaactcagctagagctccttctgaaaatagcgatgatctctttggtcaaatcaatgggtgtgaacaa

SEQ ID NO: 92859 - DNA, 740 bp, Homo sapiens
ttacctgatgtgcatgcttgtacatctttcattccgaccgcctggttcgaaacacactctttgatttcaaccttaggctgaaagggttttgagacaaaatgattagtaaataatatatgtttcatatgctatgtggttaataattaaagataaatatagaaaagttattaccttcaagtgrtgatattgctcaagagaatctagaaggcaaaagggatatataatcaattatatataaatatgataaagctaaccatacactcagagttagtatcaagctgaaccttagtgcttcactttaaaaataatgagtttagatttaggggtgcgtttcttctgtcaggacagcaacatgacagaaatatcctgaagaaaactaagaagataggttgaataaaacatgcagttaacatttcaaaggcaagattctgattcagatatctgtaactaaaatagaaaagtatgcatacaaccatgtgtacatgctgaggaggagaaaagtgatctttaaccagcagagcaaattgtgaccctgggcagataaatgtccaagctgatggtagaacgctatagtgtgtctttaatgtgacacatcagaatcatttataccattctactacaagtacctactatgtccttcaattggtcctagaatgtagaaagcacacagttgtcatgacagttcatttgaatgtttaattcatttctcatcagagaaagtgttctgaagtgattacttt

SEQ ID NO: 92860 - DNA, 740 bp, Homo sapiens
ttacctgatgtgcatgcttgtacatctttcattccgaccgcctggttcgaaacacactctttgatttcaaccttaggctgaaagggttttgagacaaaatgattagtaaataatatatgtttcatatgctatgtggttaataattaaagataaatatagaaaagttattaccttcaagtgatgatattgctcaagagaatctagaaggcaaaagggatatataatcaattatatataaatatgataaagctaaccatacactcagagttagtatcaagctgaaccttagtgcttcactttaaaaataatgagtttagatttaggggtgcgtttcttytgtcaggacagcaacatgacagaaatatcctgaagaaaactaagaagataggttgaataaaacatgcagttaacatttcaaaggcaagattctgattcagatatctgtaactaaaatagaaaagtatgcatacaaccatgtgtacatgctgaggaggagaaaagtgatctttaaccagcagagcaaattgtgaccctgggcagataaatgtccaagctgatggtagaacgctatagtgtgtctttaatgtgacacatcagaatcatttataccattctactacaagtacctactatgtccttcaattggtcctagaatgtagaaagcacacagttgtcatgacagttcatttgaatgtttaattcatttctcatcagagaaagtgttctgaagtgattacttt

SEQ ID NO: 92861 - DNA, 740 bp, Homo sapiens
ttacctgatgtgcatgcttgtacatctttcattccgaccgcctggttcgaaacacactctttgatttcaaccttaggctgaaagggttttgagacaaaatgattagtaaataatatatgtttcatatgctatgtggttaataattaaagataaatatagaaaagttattaccttcaagtgatgatattgctcaagagaatctagaaggcaaaagggatatataatcaattatatataaatatgataaagctaaccatacactcagagttagtatcaagctgaaccttagtgcttcactttaaaaataatgagtttagatttaggggtgcgtttcttctgtcaggacagcaacatgacagaaatatcctgaagaaaactaagaagataggttgaataaaacatgcagttaacatttcaaaggcaagattctgattcagatatctgtaactaaaatagaaaagtatgcatacaaccatgtgtacatgctgaggaggagaaaagtgatctttaaccagcagagcaaattgtgaccctgggcagataaatgtccaagctgatggtagaacgctatagtgtgtctttaatgtgacacatcagaatcatttataccattctactacaagtacctactatgtccttcaattggtcctagaatgtagraagcacacagttgtcatgacagttcatttgaatgtttaattcatttctcatcagagaaagtgttctgaagtgattacttt

SEQ ID NO: 92862 - DNA, 641 bp, Homo sapiens
aaaatccctctctgctatcataacgctcatttgttacattttaagataaatgactgaaagcaaacagcaattgtgagacaggaaatcaaattccatcagatacagaagtctggtaccatctgccgagggtgcaatgatgaagtataaacacagagcgcattttgagccctccatagtgaccttgtacaaaagtgcccaggaaacaaaratgatgtgacacattttgcgacttatatataccagctggatataaaagtcataaaaagcaaaggtgatattatatatatttgacatatatgaactggattgttttgttttaatttatttaaatgttattttatgactatgaaagtactgagaactagtggaagaaaactggacaaattaaaaatttaaattccccataatccctccatcaagagattattttgaacatacagctatattttcttccaaacctctctatacttatgtatgtttgtatagatagatagataaatagatgatagatttaataaggtttatacaatgttttcattcttctcccaagtaatatatttacatggaaacatgttttatggaaaacatggtattttggtaggtaccatcatacataagcttatctgttaactatttcttat

SEQ ID NO: 92863 - DNA, 641 bp, Homo sapiens
aaaatccctctctgctatcataacgctcatttgttacattttaagataaatgactgaaagcaaacagcaattgtgagacaggaaatcaaattccatcagatacagaagtctggtaccatctgccgagggtgcaatgatgaagtataaacacagagcgcattttgagccctccatagtgaccttgtacaaaagtgcccaggaaacaaagatgatgtgacacattttgcgacttatatataccagctggatataaaagtcataaaaagcaaaggtgatattatatatatttgacatatatgaactggattgttttgttttaatttatttaaatgttattttatgactatgaaagtactgagaactagtggaagaaaaytggacaaattaaaaatttaaattccccataatccctccatcaagagattattttgaacatacagctatattttcttccaaacctctctatacttatgtatgtttgtatagatagatagataaatagatgatagatttaataaggtttatacaatgttttcattcttctcccaagtaatatatttacatggaaacatgttttatggaaaacatggtattttggtaggtaccatcatacataagcttatctgttaactatttcttat

SEQ ID NO: 92864 - DNA, 715 bp, Homo sapiens
ctgtggtgccaggcaggaatgggctgcttggggacccagcgagctcccagggcctttctgctgcttcctctactcccgtatttcgctggggtcggctctctaacttgactcaactccaggtaaagtcagaaacttctcccacaaacrgaccttcagcttctccagtgggggtgtgttttcaggagaggagggcctccctttcccacttctgtagttggggttactcatagtatctagggtgtcttcgaggtcctgcaggagcagtcagcttccttcagagggtctgtggctcctctcaggattgctagtttgttcctgcagttgatctggagctaaaattcacattgcaagcctccacatgctgctctgtccggagctgcaatctagtcctgcctcccatccgccacgatccctgcaaatccccactagtacttcttagtttaaaatttgtcttggctatatgaggtttaaaaaataaggtaaccaaatgatttgtgaatattctattttatatgctgtcttgtttagtatgtcagaatttattcttatttttcactctttccctaaagcctgaaagaagggaagaacaggttccacattctccctatgagacctactcatgatatattcagttgtccgtaatgtctgacaccagaaatgttggagggcttctatagagagttcattaaagtaaagctattgaagatatgtagaa

SEQ ID NO: 92865 - DNA, 715 bp, Homo sapiens
ctgtggtgccaggcaggaatgggctgcttggggacccagcgagctcccagggcctttctgctgcttcctctactcccgtatttcgctggggtcggctctctaacttgactcaactccaggtaaagtcagaaacttctcccacaaacagaccttcagcttctccagtgggggtgtgttttcaggagaggagggcctccctttcccacttctgtagttggggttactcatagtatctrgggtgtcttcgaggtcctgcaggagcagtcagcttccttcagagggtctgtggctcctctcaggattgctagtttgttcctgcagttgatctggagctaaaattcacattgcaagcctccacatgctgctctgtccggagctgcaatctagtcctgcctcccatccgccacgatccctgcaaatccccactagtacttcttagtttaaaatttgtcttggctatatgaggtttaaaaaataaggtaaccaaatgatttgtgaatattctattttatatgctgtcttgtttagtatgtcagaatttattcttatttttcactctttccctaaagcctgaaagaagggaagaacaggttccacattctccctatgagacctactcatgatatattcagttgtccgtaatgtctgacaccagaaatgttggagggcttctatagagagttcattaaagtaaagctattgaagatatgtagaa

SEQ ID NO: 92866 - DNA, 545 bp, Homo sapiens
caatattgctattggctcatattgcttgtcttgttttctactttaaaaacatctggtgatatttgttggtgaattttgaatatggtttaccttcacattttttttttttctattgctgctgcagtcataaaagatagaatgtgtgctgaggtaccaaatgcttcacttctacttttgctttgccagggactggaaatatggacactgccctttctaaactgtttgctcatcccagaactctcctgtttccttcaagaaatgtatatgacccagttgaagcttttcaatagcttccatagctctgactgccttttttatttttttctttctttttttcttttttgagacagagttgctctgtcacccaggttggagtgcagtggtgcaatctcggctcactgcaacctccacctcctgggttcaagcgattctcctgattcagcygcccaagtagctgggattataagtccccgccaccacaccctgctaatttttttgtttttagtagagacaaggtttcaccatgttggccaggctggtcttga

SEQ ID NO: 92867 - DNA, 773 bp, Homo sapiens
aaacatctacattccttagaatatgattgcttattcattcattctgttttaagacctctctcccccacagcgatccaaaggcaaggtgaactcacagagagtgactcctgaaacagtgagagctcctgtgatttgaaaaaggcttccagttggcctgagtaaggcactactgaaaattattacctgaaagtacaagttggagaatcaactgtaagctttcagaattccattgtaaaaaaatgttcttagggttgtatttatctatttttatttatgtatttattataatttttaattttggggattacatagtaggtgtatacgttaatggagtacatgagatattttgataaaagcatacaatatgtaataattacatcagggtaaattggatattcatcatctcaagcatttatcatttgtgttacaaacattctcattctactctgagttattttaaaatgtacggtcaattattgctgactgtaggcatgctattgtgctatcaaatactagatctttttcattcttactatatgtatgtacccaataaccatcygcatttcctgttcccccacactacctttcccatcctctggtaaccattgtttgactctctatctccatgagttcaattggcttaatttttagctcccagaaataagtgagaccatgtggtttgcctttctgtgtctggctttacttagatgttaatattaaccaaaagtttccactaaatgtatgaaattaaattttagtagtttaaaaatgca

SEQ ID NO: 92868 - DNA, 591 bp, Homo sapiens
ggcagtagtacttggtgctggtaaaggggttaggctctgggtcttgaaattgtttcctactcatgattctgaaatgcactacctcatactttgacttgatatccactttagaagggccaaaaggagaatgtgaagaagtcattggcttggagagagtacgataaaacctcaataggaaaactaaatgtggttgatttgtacattcatcaaatgtaaatgaatacctgttcttacaatggaatgtctataactgtgtcctgagaacccatcctagcagatactactcacagaaataggtctttcctttctattttctctccttatcattgagaccactagagtccatcttgctttaagtttacattgtaagagcagaaaaaaaaaaamcaaaaaaacaaaatctggactcaggtgtggactcttcaaagataaaccactggtaacagtcattctagtctccaccagtgatttatctctgaaaagggcctgacaaagggggatggatggaaagggggtagatgttgatcaaacggtacaaagtttctggtagacaggaatagtaacctttagtgatctttcacacaaaatggt

SEQ ID NO: 92869 - DNA, 645 bp, Homo sapiens
atatatatatatatatatatatacacacacacacacacacacacgtacgtgtgtgtgtgtgtgtgtgtgtgtgtgtgtatttccaagttaggaagacagaratttccagaagcctctagttagtattattcagtagttaaggcaaaagcactgttgactgagatttcatctgtgcaatggttttcacttacattatctcagaattatgcaattctcaggccaactttgagtctctacttaactaatggaaaaactacgtctcagactgaacaatttgctgaaaacatttcatagggaattactaacttttatagtcatttcatattctacaatgcttcctaaaagtaaaattccactttaatctttacagtagtagagaagtagctcaagaagtaggtatgaaggaagcttgttttgtttgtttttttactgttcattgctcttaaactcaatttaagattacaattattttattattatgttgctgagatcagtcagtggtctcattctgtcttgtatatatgtttcattttaaataactgttcctttttgctactcttgggaagattgtagagggagttaaattggagcctgagttgtctaagctaagcagaggtgacaattggaaagaagtattttcttgga

SEQ ID NO: 92870 - DNA, 937 bp, Homo sapiens
  misc_feature (1)...(937): n = A,T,C or G
tgcatgcacaaaaatctgggtctatatgaagataaggagccagtgaaggtacagatggaattttattgacacttgagaacaataatagggggcctgagccaggtacacacagctgtttgacagggaggaggtggacagcattctaattcagaggtatttcatgctaatgattacttttctcctgcttacctttctctaagtctagcccaagctttcctcatttgaaatacagttgacccttaaacaacatgrggttgaactgcttgggcctacttatatgcagattttcttctgcctctgccactccaagacaagaccaaccccttctctcccacctcctcagcctacttaatgtaaaggctatgagggtaaagacttttatgatgatctacgtctacctaatgaatagtaaatgtattctctcacttacaactttcataataacattttcctttctctagcttactttattgtatgaatatagttataatacacatacaaattatggccaggtgtggtggctcatgcccataatcccagcactttgggagaccaaggcaagtagattgtttgagctccagagttcaagaccagcctcggcaacatagtgaaaccccatgtccacaaaaaaattagccaggcatggtggctcacacctgtgatcccagctactcaggagactgagacaggaggatcacttgagcccaggaagttgaggtttcagtgaactgagatcatgccactgtactccagcctgggcaacagagcaagatcccatctctaaataaataaataaaacaaattatgtgttaattgactgtgttactagggcctctgaacagccaggcaaatactttagcaaacctcagaggtgctggtctgataggtcccggaactggctccccctccttggaggaaaatgtacccctctntgaaa

SEQ ID NO: 92871 - DNA, 937 bp, Homo sapiens
  misc_feature (1)...(937): n = A,T,C or G
tgcatgcacaaaaatctgggtctatatgaagataaggagccagtgaaggtacagatggaattttattgacacttgagaacaataatagggggcctgagccaggtacacacagctgtttgacagggaggaggtggacagcattctaattcagaggtatttcatgctaatgattacttttctcctgcttacctttctctaagtctagcccaagctttcctcatttgaaatacagttgacccttaaacaacatggggttgaactgcttgggcctacttatatgcagattttcttctgcctctgccactccaagacaagaccaaccccttctctcccacytcctcagcctacttaatgtaaaggctatgagggtaaagacttttatgatgatctacgtctacctaatgaatagtaaatgtattctctcacttacaactttcataataacattttcctttctctagcttactttattgtatgaatatagttataatacacatacaaattatggccaggtgtggtggctcatgcccataatcccagcactttgggagaccaaggcaagtagattgtttgagctccagagttcaagaccagcctcggcaacatagtgaaaccccatgtccacaaaaaaattagccaggcatggtggctcacacctgtgatcccagctactcaggagactgagacaggaggatcacttgagcccaggaagttgaggtttcagtgaactgagatcatgccactgtactccagcctgggcaacagagcaagatcccatctctaaataaataaataaaacaaattatgtgttaattgactgtgttactagggcctctgaacagccaggcaaatactttagcaaacctcagaggtgctggtctgataggtcccggaactggctccccctccttggaggaaaatgtacccctctntgaaa

SEQ ID NO: 92872 - DNA, 1204 bp, Homo sapiens
atatctatattatctatcaagttgatataatggtcaagagttgatgaggggctaaacagtcccaagtgtgtccttgggacaagattttgagaaatattggtgaacatttctgagagtgttcatccctaagtcttaggcaaaggtacactttgcgtaactgtccctctaaatagcttttctcacagcttacaatgacaagtgatttrttaaatcagtaggaggaaagacaacacagaagtaactgaaaaatgttgcttaacaaaagatagtgtaaaccaaaatcctctttttaaaaaaaaaaaaaatgtcctgttttgaattggagttggggcactgtaatcacaactactggattcctgagatgaatgaagtctcctaaggatcccccagttacaggaaaagtgtaggctcatctatatgggtagcagcaactgtgccacccagagccaaaggagcatgtttaatgatctttgagatattatttgaaaatttacctttggggaaaaattacagggaatcttgttccacatttgaatttaaaaaaataaagtatcagtggaatcctaagaatttctgagagctgtcagactacaaaattatattttagaatattaattttgctgcagcacagtagatagatggaacagggagggaagcagggagtcaaaagaaaagtgaaaaattaagggcgattaatagattgagtcattttaaactgtcttttctgaggatgaacaattgtcaaatattggcaatttaatatggttaaatgtagtattttacagataattgaattgtgtaataaagtgatgttagtgagagtaaataacataagagacataggtgtaagaatatttccaatttttagaatgttatttcagtgaagggacaacatgaacacattgctggctttgaagaatcctaggtttcaaccatacatccatggcaatagttgatccttactgttcaagacaagctaaacattggtttaagtgtcttacctgcataagctcctggaatttttataataacctttaaggtaggaattattatactcactcaatagattaggaaacaaaggtagaaagagttatttcccagtttgctcaagataaacacagttaataaggcattccctagtatttgaatcctaggttaatgtgtagttcttactttcagtggctcaactatagtttggattaag

SEQ ID NO: 92873 - DNA, 769 bp, Homo sapiens
aaatatcacaaatggatgatgcttacattgaggctgtactgaagtaaaaaaactgttctaatgtacaaactataattaagagaaaatgactgtgaaagagaaaggcccaaaagcaatgcctaataacaagcctaatatagaaatgctgattaaatcctttatatgtaaagaatatatccctaaaccttattttacatgacctcccagagaacttgacagtgtttagtcctcyttcaaactttcttctcctaccttaggtagcttttacaacatgattagattcttattgtcctctgacttttctaatggcttcttctcaacctcctttttctattcctgaagtctaacatgtgtccctcgcatcctcttcatgatctctattcatggcatcacattctaatgagtcacacatgtcagaatcccacttattctcaaattctttcttttccctaatcttgctaagcaatcactaaggcctgctaagtcaacctttgtaaatataaatgtctatttatatatagacataaataaaaaatctatcctttctccttcatgcccctagattaatccctcatcatttttttaaaacctgaactactgctggcaatagtctataaactgggctcaaacttttattgattttctgtgtctggttataaaaataggaagggtccaaggcaacaattttagaaaataaaaccagaaatcagttgggatattccagcccaaagactgccacctaatagactgttccccagtttttcaccat

SEQ ID NO: 92874 - DNA, 676 bp, Homo sapiens
ctgccatctatgcatttttccaactttagctattttatcacatttccttctaatcttttctctgtgcacttaacataatgctgataactatgatttttaaatcccatttatttatttttartaatttcaacttttattttagatttgggggtacatgagcaggtttgtgacatggatatattgtgtgatggtaaggtttaggatatgaacaatcccatcacccagatggtgagcatagtacccactagtgagtttttcaaccctttctccttatcctctctgcccactccattagtccttagtgtttattattgctatctttatgtccactagtacccaatgtttagctctcgtaagtgagaacatgatgtctttgattttctgtttctgtgttaatttacttagattatggcctctagctgcatccatgtggctgcaaatgatatgatttcattcctttttatggctgtgtagtaatccatggtatatatatgtactgtattttatttatccaatccatggttgatgggcacctatattgatagcatgtctttgaaattgtgaatagtaagtacttcaatgaatataggagtgcatgtgtctttggtagaatgattatttttcttttgcatatatacccaataataggattgctgggttgagtgagttctgtttt

SEQ ID NO: 92875 - DNA, 676 bp, Homo sapiens
ctgccatctatgcatttttccaactttagctattttatcacatttccttctaatcttttctctgtgcacttaacataatgctgataactatgatttttaaatcccatttatttatttttagtaatttcaacttttattttagatttgggggtacatgagcaggtttgtgacatggatatattgtgtgatggtaaggtttaggatatgaacaatcccatcacccagatggtgagcatagtacccamtagtgagtttttcaaccctttctccttatcctctctgcccactccattagtccttagtgtttattattgctatctttatgtccactagtacccaatgtttagctctcgtaagtgagaacatgatgtctttgattttctgtttctgtgttaatttacttagattatggcctctagctgcatccatgtggctgcaaatgatatgatttcattcctttttatggctgtgtagtaatccatggtatatatatgtactgtattttatttatccaatccatggttgatgggcacctatattgatagcatgtctttgaaattgtgaatagtaagtacttcaatgaatataggagtgcatgtgtctttggtagaatgattatttttcttttgcatatatacccaataataggattgctgggttgagtgagttctgtttt

SEQ ID NO: 92876 - DNA, 679 bp, Homo sapiens
gcatgtaggatccaacgcatggtagtgtaagttgcctttacatcattactctgtaacccactctgggggaaggtgtgctttccattcccacaactttaagctttggtctcgaggtctaggttcccaagggacaaattaattgtttctgtaaatataagattatagcagtagcctggtcattttggacttcttacactaatagactagaaggtaaagaaggattagtatattgaaaagaataattggctttgatgatcataaagagaaagattgctgctacataataatgacaggaagaagtatgtttgaaactcaggagattcactgggtacctctttataacttcaagtccaatgattaccataagtggaaactgctggaacaacatcctgacaaagttaaggtaactggaggggcagacctcttaggcacraaggtctgtgctatcttgttgaacgacagacctgcacgagcagaagtgctatccaagagggagaagaatctagaatgtgtgttagatgtgggagagggtgaatatcagttgtgcgcttgggatcaactgcaacagctaatagaaactgtagcttgtactagtataaacctcgttgtaagtttttcttttcttaaataaaaattgtgtctggctaccacttgaagaaacagtaacaagatgcagtga

SEQ ID NO: 92877 - DNA, 667 bp, Homo sapiens
gcatttaactgagcaactatacaggcatgaattctagtttgcatcagccattcatccgctgtgtgtcctgaggcaagttctgagatcattctttacycctctgtcaagtgaggagggtgggctaggttatctctaaagcccctctccgctctgacttgctccagattgtcagagtactgacattctccccagctagttctcctgtgtttgcttctcacacaaatgcccactgcccctgccctgggtaagagatggagtaggttggctgcagatagggcaaggtactgtccagtctgagagaggagagtataagaaaaaggtggagatgccaagataagaaggcagaggctagaaaacctgaaacaatcagcaaaatgctttacagaaaatagaattttgtgctccaaagattttttaaaactctcagcaaggctggtttgaccccatctgctagtgttaatgccttttaatgaaatattcgatgtagcaatgtaggtgtcagaagagagacttcggggccgaagaagccaagttactgattcagtatgaatatagccctgggtggctccagggccccagaagcaagttattgattcagtatgaatagagtgccattacagaaagaaagtctttgcaatttgactacctgttgcctgcgcataaagag

SEQ ID NO: 92878 - DNA, 679 bp, Homo sapiens
agatcaaatatctttaacctagagatttatcatgatacctagcaatacttgaatcttagacatacaacataagagggtacattaaattttgaaggtagctatgctgcacaatactttaaaattaaataattatacagtattgatttatgcttaaaattccagtcttaggctggtgtggtggctcatgcctgtaatctcagcagttttggargcctaggtggcagatcacctgaggtcaggagttcaagaccagcctgaccaacatggtgaaaccctatctctactgaaaatacaaaaattagctgggcatggtggtgcatgcctgtaatcccaactacttgagaggctgaggcacaataatcgcttgaacccaggaggtggaggttgtagtgaaccgagatagtgtcactgcactccagcctgggcaacaaaacgagactccatctccaaaaaaaaaaaaaaaaaaatccagtcttagaccaagctcgttttagaccagcactgacgtttttgtcatctctcaggactcacagaattagttcgataactgccttggagtctgaatgtatcctaatcctctcatgggagttgttcactttagctgagaagaagctgtcaggatctatgtgctacttggctgctgttccaaagcaagtgttattgtttcctaatgtccatg

SEQ ID NO: 92879 - DNA, 612 bp, Homo sapiens
ataataatataaatgtatgttcaatttgataggaatattttaaatttcttttaagtctttcataaactttttattgaaataatgtgccagaattcagtgtattgctgactattggtttcaaaaatactgtatctctatatctatgcttatgtctatgcctatgtctttgtctacctataagctaacctttgtractctattagtatttcctaaagaaaaaatcccagtacctagctaaagaggaattttgttttaccatcgtttggatacaaatagaagataaaaataaagaatttttttttctagaaaaactctgtgtagcagtgaacacagtaccatatccgtgagtcccttgattctgaatgtatggaaaccgtaattaatatcttaggaaactcatgaagcacctgagatagatgaagaaaatagtccctgattatttttcaggaaactggaaaataacttacatccatttgtcccagtgaaaaggaagctaaaagcagaagtttggaaacctctgagacaaaataaaatacataactattagagccatttagggttttattttcccccctcagaggaagagccaaagttaatggaatggagaatgtt

SEQ ID NO: 92880 - DNA, 612 bp, Homo sapiens
ataataatataaatgtatgttcaatttgataggaatattttaaatttcttttaagtctttcataaactttttattgaaataatgtgccagaattcagtgtattgctgactattggtttcaaaaatactgtatctctatatctatgcttatgtctatgcctatgtctttgtctacctataagctaacctttgtaactctattagtatttcctaaagaaaaaatcccagtacctagctaaagaggaattttgttttaccatcgtttggatacaaatagaagataaaaataaagaatttttttttctagaaaaactctgtgtagyagtgaacacagtaccatatccgtgagtcccttgattctgaatgtatggaaaccgtaattaatatcttaggaaactcatgaagcacctgagatagatgaagaaaatagtccctgattatttttcaggaaactggaaaataacttacatccatttgtcccagtgaaaaggaagctaaaagcagaagtttggaaacctctgagacaaaataaaatacataactattagagccatttagggttttattttcccccctcagaggaagagccaaagttaatggaatggagaatgtt

SEQ ID NO: 92881 - DNA, 612 bp, Homo sapiens
ataataatataaatgtatgttcaatttgataggaatattttaaatttcttttaagtctttcataaactttttattgaaataatgtgccagaattcagtgtattgctgactattggtttcaaaaatactgtatctctatatctatgcttatgtctatgcctatgtctttgtctacctataagctaacctttgtaactctattagtatttcctaaagaaaaaatcccagtacctagctaaagaggaattttgttttaccatcgtttggatacaaatagaagataaaaataaagaatttttttttctagaaaaactctgtgtagcagtgaacacagtaccatatccgtgagtcccttgattctgaatgtatggaaaccgtaattaatatcttaggaaactcatgaagcacctgagatagatraagaaaatagtccctgattatttttcaggaaactggaaaataacttacatccatttgtcccagtgaaaaggaagctaaaagcagaagtttggaaacctctgagacaaaataaaatacataactattagagccatttagggttttattttcccccctcagaggaagagccaaagttaatggaatggagaatgtt

SEQ ID NO: 92882 - DNA, 593 bp, Homo sapiens
tgcatataaaaaattaatgcaagctagcctatattactattagttatatgagtttaatttatgtaagataaattggtgctgtatcacaaataataaaaaaggaggctttatgtttttattaatgcaaagcaactgtttttgctttttttccccctagcagtttttatttttttttccccctagcagttttcacataaaaactctgttcctgtatttaagatttttttctattccaaaaacatagagtgattcaaataaaaactcagcatatattatataatattatataatcagcccaaaatacctatatagtctggggaggggttggatatttatttaaaaacataaatgatataatcttagtatatgagaatgagtggtaattctaagtaagagggcttaaaaaaaactggaaatacctaccrtttgtttattcagctgcaaatgagattgaaattcagtgatgtctacacatattgtagaatataaagctgataaaaaaaattgtcttctaaatggtgctgacaacaaagtgctcaaaattctccccagcttgagtcctagtggcaggtctggtctagccgacatgtata

SEQ ID NO: 92883 - DNA, 294 bp, Homo sapiens
ggggtgtattgcccatggtcagagaggaaattaagactgctgacatagcaccatatcttctccataggtccatttctctctcctttatactttgacaccttttaagttttattgaataaacatgaaaagccaagtgaytttgtttttctaactttgaagagttattcagagtgatgtttgtttacgttcttggtgttaatgacaatgtcggataatactactctagaaattccctaagtaactttaccaccatatatagtgcattgtgcatcacttcagttgagagaaaagtat

SEQ ID NO: 92884 - DNA, 695 bp, Homo sapiens
  misc_feature (1)...(695): n = A,T,C or G
cacactccctgcaccttggtaagtgtccaacaaatggttggtatcaacgttgtttaaaagagcatagcactatttctagcagggcatgatggctcatgcctgtaatcccaggaatttgggaggctgaggcaggaggattgctgaggccagaagctcaagaaaccctggtcaacatagtaagaccctgtctctacaaaaaagaaaaaattaattgggcatggtggctcacacctgtagtcttacctaattgggaagctttggtggaaggatcacttgagcccaggagttcaaagttgcagtgaactatgatcatactgcactcaagcctgggtgacaaagtaagaccctgtctcaaataaataaataaataaataaataaataaataaataaataaatagcatagcagaaaagttcatttctaggctgttcagagtatatgttcttatttagcntttatcatagcagttcatatttaacttttatcttagctattcttcattattgacataatctaatctgaggttatgtttttatttttattctgctctgtcgctcatcataataatcaatgcagtaaagctatccttyccagagatgccatcctagctcatattttcattacccagtggcatcagtagaatgtccattttagaggcaataaaaagtgatacttttaccaaattcacagagtgtg

SEQ ID NO: 92885 - DNA, 1296 bp, Homo sapiens
tacgtgaagttgcttccaaaggagattaaaatttgaattggtaggctgagtaaagtaacttccctaatgtgtgtgggcctcttccaatctggtgcaggcctgcatagaacaataagcctgagcagaagagaactgcwccttcctgactgcttttgagcttggctatcccttttttcctgcattcatacttgagctggaacattggctcttcctggttcttcatcctccagaatacctgaccagaactataccctctccttggtgtccagcttgctaaatgaagatctgggacttatccgcctacaaaatcatgtgagccaatttcttataatgagtctcactctctgtctctgtctttctttgtttttacacacacacacacacacaatttatatattggttgtttctcaggagaacctcgaatagtacaactaaattgtatgttttttaaattcgatctttcaccttgtttggagttaagataactaaattccagaaatatttttaatctggtacaggttaagtcctgaaatatttggataattatatttttatcattttaataccaccagtggctctctttcttttacatcttcatcagcctctttgcatctcacataattaaggataagaaaaactcaagtcatgtaaaaaagctcttcagtagctcttcagtgcttcacaggcttgtacatctctttgacttcatacatgctgttgccatttactggaatatcttttcattcttcattgtctagttaacctttctttaaggattcctgtccccagggaactctctcttatcctccattctgctataggtcccccactctcaaccctgccacattctctccttgtgtcttatacaggtttctgccatgggacatgtcatccagtactataattattaataaatatctttgggtcctccagtaaaaaatgttaagcactttagaagggtagaaactgtatctttataaacatgttttatgtccaactcctaaactagtgccagctgtaagtatttattgaaaaagtagttaccacataaatgccaatagtccagcctatcccatgtgataatttagaactctgagaatcttaaatatctgaactaattatattcttctttaataattttctttatacattttcttaaacctaaaagcaattctcaattatttgcaattaaataagcaaactatacaacacatttttttctcaattgcacatgaaagaggaaaccctgtgtcactaagcaatcatcatttatttgtctgttctatatgaaatatg

SEQ ID NO: 92886 - DNA, 656 bp, Homo sapiens
cgcacacgttacagtttctcctttttgctgccctccccatttgttggctaactcaaacatcacaaatgaccaaatagcattaggctaaaatagttattctagagttttgctttgctttttttcctttccaaaaaccctaactgtaaataatgggttttatagaaatgcatgaggcactctgtattgtttgtcagcttttccagttccacactagtccctgcttcctctttcacatgcacagatcagaacaacaggatagcacgaagcgcgccaagtttagaactaatcaaactgtctaggagtaagctacaacagttgctgaagaatgctttattcactctcagaatgaaagcttttgatgaggggagaggggactagaaaaactaatggagaaaaatctaaaggaaacacaaattactgttgtacttcttagcaccttgggttcacatttgccaggaccggtaagtgtcattrccaatttgatggtgactaaaatgcagcatagtcacatgtttcatctttcctattccttaggactttatttttataatgaaaacagtggaaatctattaagagaaactgatacataaaatacgtctctgcattaacatcccctagttgagctctgtgaaggagggattatttttattttttga

SEQ ID NO: 92887 - DNA, 699 bp, Homo sapiens
aagaaagatgtgtaggaggatgaggaggattggaaatgctaccagtggatggcgagaagagagttttaaacaggctggccagagaaggccacattgggaaggtaacatttgagaaaagcattgaaggaggtgagggaatgagttgtgcaagcgagtaggtaagagtgagccaagcagataagcagccagccaaagtccaggtgagagtatctggagttctggagttgggggcttccacttcccacttccaaccaagatggaggagtaatagggaccagatttaccctcctgctgtaaacaagttaaagaaaaaaaaaaaacagtccaaatactatgtgaaatgacagttttcagacatgggctacaagcagcagaggacagtgacccctgagaggaggagcacaaaggaagtgaatcttacaatcgcccagatgaccatctggagggtttccagcacaggaagggggaacccaaacagagcctggcagtcttgctgagttgcagagacagagatgagaattcagagacaaaggaggcagaagtttgcaggcagagcaytggagaagagagagctgcatggagagggagaactatgcaggtctgctcacaccctcagctgagtacttactggcacatgtacagaggaaagcacttgagaccagggaaagaaccagcagaaaggaaaagacaggcagaagg

SEQ ID NO: 92888 - DNA, 2692 bp, Homo sapiens
aacctcctatgttaaatatactttttttttttttgagacggagtctcactctttcgcccaggctggagtgcggtggagcaatctcgactcactgcaacctccgcctcccgagttcaagcaattctctgcctcagcctcctgagcagctgggattacaggtacctgctgccatgcccggctaatttttgtatttttagtggagaagggggtttcaccatcttggctgtgctggtctcgaactcctgacctcgtgttagacccgcctcggcctcccaaagtgctgggattacaggcgtgagccaccacgcactgccagttctattctttcttaacttcccttttccttgaaataatcctccccttacccaactgactcttttctcctcttttttttttttttttttttttkttgttgttgttgttgagatggagtcttcctctgtcgcccaggctggagtgcagtggcatgatctcggctcactgctacccctgcctttgaggttcaagcagctctcctgcctcagcctcccaagtagctgggattacacgtgcccgccattatgcccggctaatttttgtatttttagtagagacggagttttgccaggttggccaggctggtctcaaactcctgacctcagttgatccgcctgcgtcggcctcccacaactgactcttttcttatgttgaacaaaataaagtttccctgagtgccctgagcagctagggcgccatcaaggaatgaagcgtcctgaatggatccttctagaaaaggctgggggtgggagccacctggtggccaaagctgtgcagaccacagctgtgtaatgaggcaagttggtttaaaaaaggaacaggctgcagagccgaagtatttgtcaaagtaataaaaacgtttaaatgagtcatttggtttatagcaactcctaggaaacgcttttccaaacaatttagtctgttgagcgcacacagtactggtttccgctagagtcttgttcatgtaattgagaaattcgcaacttagacttgagcagcagttctcaaagtgtggtctgtggacttcagggacacacgaagtcccccttttcaattgtatacctggggggtgctggacttccccatctacttcaaacaaaacatatggtaacaggtcaaatgtggaagcagaaataaaaactccaccatctgcgaccggatgcgatggctcacgcctgtaatctcagcattttgggaggccgaggtgggcagatcactcgaggtcaggagttcaagagcagcctggccaacatggtgaaaccccgtctcgacgaaaaatacaaaaaattagctgggcatggtggcgcacgcctataaatcccagctactcggaagcctgaggcgcgagaatcgcatgaacccgggaggcagaggtcgcagtgagctgagattgcaccactgcactccagtctgggcaacagagcgagacaatgtctcaaaaaaaaaaaaaaagagaattccactatctgatattaaacccgctattcaagaggtttgcaaaatgtaaaccaatgccactgatgccactaactgttattttgggaaatatagttattttgcataaaacacattatttgtgttaacatgtaattggtttataatggccacttttccatctataaatattctttatttttttccattttaatttttaatatgataaatattgatagatagatagatatggatatagatatacctcctttctgtcccctcacttcatatatatgaatttgtctgaagttctcaataatttttaagagtataaagggatcctaagctcaaaaagttctagaaccactggactagagcaatgtgtcagctgagcattaaaaacagtacagaatttgacattcccctggaggggttactgtgtgatgatttgaatcaggtacacttgcagatgtgtttccatcaacctctgtattgaaggcccagttatctctacttaccttgttgctcgtgtaaacacctcttaagtaccactccaaatctttggacaccgttggacgcttactccaccctgctgccactgcagaaaccagctgtctgtggacactgccagctccatgtggcatcccaaatggcacccacctcacaggacccctggcccctatgcttgagaaacccacaataagtcagagaaaaaagtaagtgcagagaaattgaagcttgtggggcgaatcttcaaccaatgagcttaggagcaaacagataacgtttttttcctctcctacctgacacagtgtgctgagatccaggcccctccagaaacagtcccagaagcccaaacaatcagttgtcagatgcccaatggtgaccagctcctcagcccaaaactctagcactccgtaagttaaggctatgcatagtttaccatttcaccatattctcagcatctacaaactataaacagccttcaaagaacagtagtagcattttcataacatttattttgtgtctaatccgactctatgtcataagaattaaagaagtagcttctaaaatctcagtctcctgaaaatgaagctttagaattgtttcctaaaataacattattttatattacccattaccattattaaaaatggtaatactcgaccaggcatggtggctcacacctgtaatcccagtactttgggaggccgaggccagt

SEQ ID NO: 92889 - DNA, 552 bp, Homo sapiens
tgcaaaggctgggcttgatgaacagtggtccaagatgaacagaaaatggaaagctaagacatggtataaaaaataagatcaaaggcaacagtttcatctgcattgtagttctgatagaggccyggtttttgacagaagcccacccagtgactgggtacacggtgagtagaattgagaaaaggaactagcaagagttggttgaggtatcagaactgcagcctaaaaggctgagatttgggagtctgagataaaaaccaagataagagaaatataaggaggaattagagagtattacaacttaagcaataaatgtttgctaaattttcctttggtgaacaaattcaaagcttgactgaaattaaagagtgttacagttggtgtcttgggatgtctatgtctatgcaacatagaggtaccaaaataatattgttccatgaaaatgggagaaaaacacctatattcatatagtttgtgtttccagaaataaatagaaattcctgcaacataaaccattacgacaattttttgaacatctaaatgaagaaatgaaaa

SEQ ID NO: 92890 - DNA, 902 bp, Homo sapiens
aaacatttatattttgtatttcatacagctagttgtcaaataaaagcctgaaatgctcagtaaaatttttccagtatttctggccataatgctaatgtcttgatacatgagaagattacagttttagttctaaatttatcactagaattgtgcacactagaggccaccttataaaatatatttgaatttcataaaaaacacaaaaaatcgaggagaaccacatgcaataacattttggattaaaatgtttactgtgggccaggcccagtggctcacgcctataatctcagcaatttgggaggctgagcagggagaatcccttgagctcaggagttctagttcagcctgggaaacatagcaagactttgtctctattaaaaatcaacacaattagttgggcattgtggcacatgcttgtagtcccagctactcaagaggttgaggtgggagaacaacttgagcacagcaggtagaggttgcagtgagctgtgttcacaccattacactccagcctgggcaacagagcaagaacctgtcccaaaaaataagtaaataaataaaaatattcactttgctattgctttttgatattcagtaatagagataaaataattaaaattaattacaaaccgtttcctcagattatgacctaatgtaaaattttaaaacacatggcttgagtcagttatattaaatattacatattactgtagagagatatatggtatatatgctgcatgtatatattaattatacataaattaattatattaaatataattataacataattataattrtataacataatataataaatattatgatatagcattatccaatataattaattatattaaatattaggtattaaatattaggtatcagtattaaatattaaa

SEQ ID NO: 92891 - DNA, 692 bp, Homo sapiens
ctctcctgccygtttctccctcccctaggtctaccttggcttgtatcagtgggaggaaacttccagggacagaaactgccctggaaattccacaggagctcttctcactcagacaccccattacacaataaacttaccccttccttctctcctccaaggccagcctgacacaggcttctcctgctgggtctctcctcagtgcccaggactgcccaagaaatacctccaaggccgctggtgtggtggcttaattagagcataagctctgagttggacagttgtgccttgaagttttctttctctccagttgtgtgtgacctttggcatagcacctaacttctctgggcctcagtttcctcatttgtaaaatagggatagtaaagcatctacctgataggatagtttacaaggattaaacaaaacagtgtggataaagtactttatatcacacatcataagactcaataaataggcataagtattcttcttactattgttttcataatgaatattattaattaatataaccacatgtgtgccaggcatggtgctaagctctatgagagccaatatcttagacaattctctggctcatttgcccctattatctcccatttagattactatgatggtcatctcccatctggcctcacacccctccagttcatcccacaccagatctttctttattt

SEQ ID NO: 92892 - DNA, 620 bp, Homo sapiens
tgcatatatatctgtatgtattttatttgtacatcaaaaataaaaacatcttataaaggttcacaaagaagaactccaaaataccaacaatttaaagcaacagcttgcattgtcatggattaaattctcagactatagtttaacaaaacaataattatgctacactggagagtaacaactccaaaccttatgtacttgaaattgtaagagggtyggccgggcacggtggctcacgcctgtaaatcccagcactttgggaggccgaggtgggcggatcacgaggtcaggaaatcgagaccatcctgactaacacggtgaaaccccttctctactgaaaaatagaaaaaattagccgggcgtggtggcgggcgtctgcagtcccagctactcgggaggctgaggcaggagaatggtgtgaacccgagaggcggagcttgcagtgagcagagatggcgccactgcactccagcctgggcgacagagtgagactccgtcaaaaaaaagaaaaaaaagaaattacaagagtcaaaaaaaaacacataaaagacacacaaacaacaaaacttctaagcagcgatcacttagataacaattagtagtggatctgaaatgtatttttt

SEQ ID NO: 92893 - DNA, 643 bp, Homo sapiens
taaaacactcttaagaaaagatctattctatatagaaagataaaataaattttaagtattttcaattaattaatttgctattaattgcataaaatgtataatttcaaaatataatatggacatgtttacttatacttccaattaaaaaattatcaagctgtagtgtttgaagagcagggcatcaacttcaaaatttgaacaatcagagtacaagacagaaataaatactcttccaaaagattagcccaaaagcctatttamcttcaactcaattccaaattctgattacagaccagtggaagagagccagactgagcagaaacacaagcagaaatggaaaacataaataaaagtgcaagagtgggagttgggcttccctcaggctattatcatacctctttttactcagctagactgtgaactcctagatggaaaagatctagccactgaactctctttatgtatgtcaatgcagagctcagaaactgataaaatgggcaaacaataagtagttgttacatacgtgagtcaataaattggatttgttaggcttacagacattgacttatttgggaccctcctgcttttgagtctattgggaattgtaactgacacaccttgaaacagacccacagatctcagg

SEQ ID NO: 92894 - DNA, 643 bp, Homo sapiens
taaaacactcttaagaaaagatctattctatatagaaagataaaataaattttaagtattttcaattaattaatttgctattaattgcataaaatgtataatttcaaaatataatatggacatgtttacttatacttccaattaaaaaattatcaagctgtagtgtttgaagagcagggcatcaacttcaaaatttgaacaatcagagtacaagacagaaataaatactcttccaaaagattagcccaaaagcctatttaacttcaactcaattccaaattctgattacagaccagtggaagagagccagactgagcagaaacacaagcagaaatggaaaacataaataaaagtgcaagagtgggagttgggcttccctcaggctattatcatacctctttttactcagctagactgtgaactcctagatggaaaagatctagccactgaactctctktatgtatgtcaatgcagagctcagaaactgataaaatgggcaaacaataagtagttgttacatacgtgagtcaataaattggatttgttaggcttacagacattgacttatttgggaccctcctgcttttgagtctattgggaattgtaactgacacaccttgaaacagacccacagatctcagg

SEQ ID NO: 92895 - DNA, 995 bp, Homo sapiens
  misc_feature (1)...(995): n = A,T,C or G
ataannnnnnnnnnnnnnnnnnnnnnnnnnnnnnnnnnnnnnnnnnnnnnnnnnnnnnnnnnnnnnnnnnnnnnnnnnnnnnnnnnnnnnnnnnnnnnnnnnnnttaaaaagagtgttttatccctacattatgttgaatatttaaaacatttatttgtcagtactctcccataataaagagatctcagaactatatcctaggaactaaatccttagtatattcatcacacttaagatatatttccatcaaaatttttttgtgataaaagatctataattagtcctctaacttatgatgaaaaattctttttttttttttytgagatggagtcttgctctgtcatccaggctggagtgcagtggcatgatcttggctcactacaaactctgcctcctgggttcaagcgattctcctgcctcagccccccaagtagctgggactacaggcgtgtgccaccacgcccagctaatttttgtatttttagtagagacggggtttcaccgtattagctaggctggtcttgaactcctgacctcgtgatccacccacctcagcctcccaaagtgctgggattacaggtgtgagccaccatgcccagcctgaaaaattattcttaaagttctaccaaattattccactagcattgtaagagttttcacttttggttggattaattggaatgtaactaccatttatttatttcatttcatttatacaaaggcaaagcatttattagtgtttctttgattataataagatagaactttaaaatttttcaaattgtcactaatttatttatttagaacattgctctttttcttcttgacttttaatagcaatagtttttttaaaacatataaagttattacacattattttaacaaatttgaatttttaattttaatttcttttcataattatataatagtatttttaaattatagaatatttatttaatatttattatttttacgtagtatatttaaaatattt

SEQ ID NO: 92896 - DNA, 995 bp, Homo sapiens
  misc_feature (1)...(995): n = A,T,C or G
ataannnnnnnnnnnnnnnnnnnnnnnnnnnnnnnnnnnnnnnnnnnnnnnnnnnnnnnnnnnnnnnnnnnnnnnnnnnnnnnnnnnnnnnnnnnnnnnnnnnnttaaaaagagtgttttatccctacattatgttgaatatttaaaacatttatttgtcagtactctcccataataaagagatctcagaactatatcctaggaactaaatccttagtatattcatcacacttaagatatatttccatcaaaatttttttgtgataaaagatctataattagtcctctaacttatgatgaaaaattctttttttttttttttgagatggagtcttgctctgtcatccaggctggagtgcagtggcatgatcttggctcactacaaactctgcctcctgggttcaagcgattctcctgcctcagccccccaagtagctgggactacaggcgygtgccaccacgcccagctaatttttgtatttttagtagagacggggtttcaccgtattagctaggctggtcttgaactcctgacctcgtgatccacccacctcagcctcccaaagtgctgggattacaggtgtgagccaccatgcccagcctgaaaaattattcttaaagttctaccaaattattccactagcattgtaagagttttcacttttggttggattaattggaatgtaactaccatttatttatttcatttcatttatacaaaggcaaagcatttattagtgtttctttgattataataagatagaactttaaaatttttcaaattgtcactaatttatttatttagaacattgctctttttcttcttgacttttaatagcaatagtttttttaaaacatataaagttattacacattattttaacaaatttgaatttttaattttaatttcttttcataattatataatagtatttttaaattatagaatatttatttaatatttattatttttacgtagtatatttaaaatattt

SEQ ID NO: 92897 - DNA, 760 bp, Homo sapiens
ggtgattattaaaagttaagaaacaacagatgctgacgaggctatggagaaataggaacacttttacactgttggttggaatgtaaattagttcaaccattgtggaagacagtgtggtgattcttcaaagatctagaaccagaaataccatttgtcccagtaatcccattactaggtatatacccagaggaatataaatcattctattacaaagayacatgcacctgtatgttcactgcaccactattcacaatagcaaagacagaatcaacccacatgcccatcagtgatagactggataaagaaaataagcagccataaaaagaaatgaaatcatgtcctttgcagggacatggatggagctggaagccattatcctcagcaaactaacacaggaacagaaaaccaaacaccacatgttctcacttataagtggtagataaacaatgagaacacatggacacaaagaggggaacaatacacactggggcctgtcagggggttggagggagggagagcattaggataaatagctaatgcatgtggggcttaatacctaggtaatagattgataggtgcagcaaatcactatggcacacgtttacctatgtaacaaacctgcacgtcctgcacatgtatcttggaacttaaattaaatgaaatttaaaaagaaaaaaagatcaagcatgggaacattctggcattctaggaaatttctctgggagtctggatgatagtatcacttcttcccaaaaccttt

SEQ ID NO: 92898 - DNA, 760 bp, Homo sapiens
ggtgattattaaaagttaagaaacaacagatgctgacgaggctatggagaaataggaacacttttacactgttggttggaatgtaaattagttcaaccattgtggaagacagtgtggtgattcttcaaagatctagaaccagaaataccatttgtcccagtaatcccattactaggtatatacccagaggaatataaatcattctattacaaagatacatgcacctgtatgttcactgcaccactattcacaatagcaaagacagaatcaacccacatgcccatcagtgatagactggataaagaaaataagcagccataaaaagaaatgaaatcatgtcctttgcagggacatggatggagctggaagccattatcctcagcaaactaacacaggaacagaaaaccaaacaccacatgttctcrcttataagtggtagataaacaatgagaacacatggacacaaagaggggaacaatacacactggggcctgtcagggggttggagggagggagagcattaggataaatagctaatgcatgtggggcttaatacctaggtaatagattgataggtgcagcaaatcactatggcacacgtttacctatgtaacaaacctgcacgtcctgcacatgtatcttggaacttaaattaaatgaaatttaaaaagaaaaaaagatcaagcatgggaacattctggcattctaggaaatttctctgggagtctggatgatagtatcacttcttcccaaaaccttt

SEQ ID NO: 92899 - DNA, 760 bp, Homo sapiens
ggtgattattaaaagttaagaaacaacagatgctgacgaggctatggagaaataggaacacttttacactgttggttggaatgtaaattagttcaaccattgtggaagacagtgtggtgattcttcaaagatctagaaccagaaataccatttgtcccagtaatcccattactaggtatatacccagaggaatataaatcattctattacaaagatacatgcacctgtatgttcactgcaccactattcacaatagcaaagacagaatcaacccacatgcccatcagtgatagactggataaagaaaataagcagccataaaaagaaatgaaatcatgtcctttgcagggacatggatggagctggaagccattatcctcagcaaactaacacaggaacagaaaaccaaacaccacatgttctcacttataagtggtagataaacaatgagaacacatggacacaaagaggggaacaatacacactggggcctgtcagggggttggagggagggagagcattaggataaayagctaatgcatgtggggcttaatacctaggtaatagattgataggtgcagcaaatcactatggcacacgtttacctatgtaacaaacctgcacgtcctgcacatgtatcttggaacttaaattaaatgaaatttaaaaagaaaaaaagatcaagcatgggaacattctggcattctaggaaatttctctgggagtctggatgatagtatcacttcttcccaaaaccttt

SEQ ID NO: 92900 - DNA, 703 bp, Homo sapiens
tactgtacccacttctaccctttccgtaaaatcaactcaacactttgcatcttgattaaaatgaaaaggtcactctgacttttctccttcaaaatattgacagtagtcctgagaactgagtatctacaaaccaggatgaagaagataagacatacactaggcattggccttggaatctttagatctttgggtttcatcatatgcatttcctcatgactgtttctgattactttaygtctcagtggaaatgctgttgcagtgagttaggaaatgtgtttttctaagacgaccattcttagtcacagaaacaaaacagaaaagtatgaaagatcaagggcttcaaaatccttaaataatttcctgttctcgtgtttccttacactccaaaaatatggaattgttaggttaaattttgtgcattatatattgtaagaattgaggtttatttaggttgtatattcgcagttttatttcgggctagttttgtcctgtaattctacatatgaaaatttccgaaataaactatagtcaacccaagctcttgcctaagaaagtaagtaatagaagaaccataggcttgccttgctgtggttcaggtgtgttgtttcttgaaagtctccgtgttttaccagggcctgggtccagtgttgaagtagcctcctaaatgccattgcaatcttaccctttttgcctgcagctctga

SEQ ID NO: 92901 - DNA, 1117 bp, Homo sapiens
acttatttaaaataatcccaccttttaaatctattcacatattcttatatattcacaaattcattcaaaattactttcgcaaagcaagaatctgacattgtaagttgttgttagaatctcaataattgaaatctgcaagtcctagtcttttaaataatgaaatgtttaaaaagttaataaagttttatatataaataaatatatatataatattaactgaagagaatgataaaattgcaattctgtttaataacctaagatgatttcatacaaatccatgtggacagagagaaatccagatgttcaaatatgtatcaactcatcagtcttagagcttgcatgactttaccagtaatatgtaactaaaaggggctggataattggagagagggagagacaggaattactgaggagaatttctttagcacaagctcttctgtaagttctacccatatcttccccatgggacatataggtactgtctactactcaaatctaagtttaaaagggttggttttaacaggatcattcaaagaacattatttaacctgcagagtctggggtctgacctctactccaggaaacctggaaagtagcactcaatggcctaatgagattcttgggagttagagttaagatgagacctgacagtatttcataggtggtcaaagaatgcaatgtgagttttctttgaacagggagtcagcgaagagttggtgattgccgtgtcaaattcttttcacaaatgcaatagaatcaaacatttaatcatctgagaagtggcctgctggagatccaggaaccaaggattaagtgaactctgcttcactcaactattatttgtagcaattttcaaattatctttaatactctcatacttataatcacttaaaaaaatttttaaagtgtatcttggcaatggcttaagaaagcctatcatttttatttcttcttcacaatgttaaactcactttctcttgtctgaattggttcttttgtctcacagtgggtccttttcatttcattrtacatcctgcaaatttctactaaaataatctactctgaaaaattgccacttgcattttaaacacataaaacaagttatatttatgccatt

SEQ ID NO: 92902 - DNA, 2435 bp, Homo sapiens
tcatccgcatcccccaccagagtggtatgcttgctacatttaatgaacctacattagatacattaaattcataagataactcaatgaatttacgtatcattgtcacccaaaatctattatttacttgaagattactcttggagttgtatattctacaggtctgggaaaatgtataatgatacataaccatcattatagcatcatacagaatattttcattgtcctaaaaatcctctgtgctctgtgctttgcctattcatccttctacctccaacccatatttcatatttaagatctcttaaaatatcaaagtctttgtgattacaaacttttattttaagccaagaactatattcccaagggtgaaatcaggaaaagaaaactattatgtgaataactgtatgatattataatagccattatcatcacagtagataaggataaaaagtataatactcattatgagatcattaatagttgtctatggaaaaataattgctaattatatttataaaaatacatcatttttacttactttctttttgctcaccaaatcccaaactaacttagccttaactttctctatggtgatgtgttgaagttgacagcctattaaagatctatgtgtgtaccattagagctcactctttggctgtttttttggcttcaatctataacagtcagaattagccttttaccatctttattttcctcatttcttttttcccccttctgtcccatcttctctatgtaatggtaaaactgaaatgaattggcaatcttttcaaatcactgtccttctataaattccaccttcggaggaaatccagagcattttctgtaagtggaattgcttccaggattttatattagatgaataggacttgacatattttatgctgacaataaatacactaataggtttttttttctttttgccaaacatttaatactcttgtcagaaaatatattaaagttatattatatattatacatataaattagtttcagaatttacttttagattatatttattttatgtctatgtcttacgtgtgatggggtatgtctataattttttattttttgattgatgagagtatgagaataattttagagtaacaccatgaaaacactctatggatttgtagatgaatgaatgaatttaaaagaagagcataatgcattgtcgacattttctccaagaccatattgttgttaggataaattttggattctttatcatkgcattcaaatatagctattcaaatgtatgttctgtcacatctctttagagtatcctttcttctgtcttaataaaatacttttggcttgtctacttggcacggtgaaactctacatagcgcagagtttctcagccttggcactgttagcatttagtattggataattatttgccgagggaaatggcctgtacattgttgaatgtttagtggcatctcttgcctctactaaatgtcatttgtgtcattgtgcccctgtgccagtccggttttagagataataaaaaatgtagccttggtactgttggcatttagtattggataattctttgctgagggaaatggcctgtacattgttgaatgtttagtggcatcccttgcctgtttctacaagatgtcatttgtgtcattgtacccctgtcccagtccggttttagagataatcaaaaatgtctccagacattgccaaatgtactggtatttggggggtggaatgggaacaaaatcatccacagttaaaaatcactggtgtaatggaaagaagccggtacttggtgttatttttacctatattttaaattcgttttgctacggatacatcttgggtaaattacttaacttctccaggcttcagttaaataacaattaccttatgcaatttgctgcaagagttaaaggactatatataatatacatacatcagcttacatatattagcttgttgactgcctgaaatatagtaactactccttaattcattcaacacttggccagtcacttttcttaaaaaatcagtttaagggcatttacattcagaagtcttcttttacactgaaccttttagcatagcatataataggctttataattcattcccacccctcccttctttgtctgccatagtttctgagttttaatctgtcacgtttcctctcactgactagatgtaaattgtttactttcctatataaagatctacagaataacttctgagaagttcaagattcttatttgcttcttcattcctcccactagatcagaggttggcttgtcatacatgaagatgtatatatatagtagtattaccctccgtatgtgtttcctagaaccttactaagaggtctttgtaggggctagtgttctagtcttcaccagcatcttaacatgagacattctgctgttatgttatgc

SEQ ID NO: 92903 - DNA, 522 bp, Homo sapiens
tttaaaggctctgagagagcagtgcgtggcttctcccactgacatggtgacacrctgtgatccgccagctgcccctgcccactgtcagcgtgggtcacagtcaccaagggccccgaggtggtgctctttttgtgctggaccccccccatgcccataactctgaaactacatgacatcttaacctttataagaatttcttcaagacagcctttaaaaacacccaaatctttcttgacctttacattttagcagagtttttttttttttcttaaattgatgttacaataatttttttaagctgtggcatttttaaagctacttgaagaggaacttcactttcccttacccatcctatttgagaccaatcattaatcatgaagggaaggcaccaaggactcaaacccagctttattatgttttttgtgtttgtgacattttctatcaaccagggggatgtacttacccttttttttttttttaattatctacaggttgtagaatttgttttccaggttccagccc

SEQ ID NO: 92904 - DNA, 522 bp, Homo sapiens
tttaaaggctctgagagagcagtgcgtggcttctcccactgacatggtgacacgctgtgatccgccagctgcccctgcccactgtcagcgtgggtcacagtcaccaagggccccgaggtrgtgctctttttgtgctggaccccccccatgcccataactctgaaactacatgacatcttaacctttataagaatttcttcaagacagcctttaaaaacacccaaatctttcttgacctttacattttagcagagtttttttttttttcttaaattgatgttacaataatttttttaagctgtggcatttttaaagctacttgaagaggaacttcactttcccttacccatcctatttgagaccaatcattaatcatgaagggaaggcaccaaggactcaaacccagctttattatgttttttgtgtttgtgacattttctatcaaccagggggatgtacttacccttttttttttttttaattatctacaggttgtagaatttgttttccaggttccagccc

SEQ ID NO: 92905 - DNA, 522 bp, Homo sapiens
tttaaaggctctgagagagcagtgcgtggcttctcccactgacatggtgacacgctgtgatccgccagctgcccctgcccactgtcagcgtgggtcacagtcaccaagggccccgaggtggtgctctttttgtgctggacyccccccatgcccataactctgaaactacatgacatcttaacctttataagaatttcttcaagacagcctttaaaaacacccaaatctttcttgacctttacattttagcagagtttttttttttttcttaaattgatgttacaataatttttttaagctgtggcatttttaaagctacttgaagaggaacttcactttcccttacccatcctatttgagaccaatcattaatcatgaagggaaggcaccaaggactcaaacccagctttattatgttttttgtgtttgtgacattttctatcaaccagggggatgtacttacccttttttttttttttaattatctacaggttgtagaatttgttttccaggttccagccc

SEQ ID NO: 92906 - DNA, 522 bp, Homo sapiens
tttaaaggctctgagagagcagtgcgtggcttctcccactgacatggtgacacgctgtgatccgccagctgcccctgcccactgtcagcgtgggtcacagtcaccaagggccccgaggtggtgctctttttgtgctggaccccccccatgcccataactctgaaactacaygacatcttaacctttataagaatttcttcaagacagcctttaaaaacacccaaatctttcttgacctttacattttagcagagtttttttttttttcttaaattgatgttacaataatttttttaagctgtggcatttttaaagctacttgaagaggaacttcactttcccttacccatcctatttgagaccaatcattaatcatgaagggaaggcaccaaggactcaaacccagctttattatgttttttgtgtttgtgacattttctatcaaccagggggatgtacttacccttttttttttttttaattatctacaggttgtagaatttgttttccaggttccagccc

SEQ ID NO: 92907 - DNA, 742 bp, Homo sapiens
aaaacacttcctaacccagacgcccaagcaggcaggccagcctgagcaaggcctggtcaatgttaggaagcaatcttaatttctctccctttatattgtctgctgtttggtttaggctctttcaaaattttttttttttttttttttttgagacggagtcttgctctgtcgcccaggctggagtgcagtggagctatctcgactcactgcaagctccgcctcccgagttcacgccattctcctgcctcaccctcttgagtagctgggactacagacacccgctaccatgcccggctaatttttttttattttagtagagacagggtttcaccgtgttagccaggatggyccttggcctcccaaagtgctgggattacaggtgtgagccatcgcgcccggccccatttagccccttttcaaggacagatctcatggaaaaaagcacctggcaggtcacagatactcaatgagcagagttttttttctttctagttctactttttagtagaacttttctagtagtttctttactacttacagaacagtataaatgaggataattttatcctcagcagaagtggcactttggtttgagaaagaatgagggaggggggtggaaaacagctgaaaaataccagccattatctgtttggcctcttggttggtcctagagattttcacagtaaattctacccaccatcagctggtgtgaggggaaaacactgggccaggagtcaggatc

SEQ ID NO: 92908 - DNA, 821 bp, Homo sapiens
tctggaagccagccccygtcatcctgtggttatcttggaactttccccaaatcctttcattaacgtaaactcaagtgtgtttgaaaagggattgttataaataacaatctttttatctttcaccttctggcacaggaggcggaggttgcagtgagcagagatcacgccactgcactccagcctgggtgacagagagagactccgtctcaacaacaacaacaacaaaaaaaaaaaaaagaaagaaaagaaaatacaaccaagggcctatgtggtaccagcctccatcctccatcctctgtgcttcacgtgtcgcatttccacctttccatcacagtctgtgctcataagcatttttcttttttttttttttttgagacagggtttttatctgtcacccaggctggagtatagtacagtggtaggatcatcgatcactgcagtcctgaactcccaagctcaaatgtcccaagtagctgagaccacaggtgtgtggccaccacgcccttctaatttttaaatttttttaagagatggggtctccctatgaaactagtcttgaactcctgggctcaagctatcctccctcctcagccttccaaagtttgctgggattacaggcctgagccattgtgcctggccctctctctctctttttttaaattaaaaatttcaacctccagattctcaccttcttgtcttttaaataaggataataatctcaactttgtagggaattgtgagaattagagggaatgtttttaaggtgcctggcattcagaaagtgcttaataaacagtgcttaataaatgatgcccagtaaa

SEQ ID NO: 92909 - DNA, 656 bp, Homo sapiens
tggagggtagctggggctctcactgcgggctttcagtgggtcctcccttctcaccaccctcgccctcatcaccagaaatgtctgctgctcagaattcctgggtgtccaggctcctcygcacgatgtggctgggctggttctcgttgggttgcagtcttctcccctctgctgagcttttgccccttgtctttcatcctcccaagtgtcgccgccacctctcagctgctgccacctctcatttgtttcttgtcacttaggtcactttccattccttcctgttttagtgaggcttggggaagagatggggaatccatctcaattttccacgtctaatgagaaggttctccttggtagttttctggtggttcatattgtgctcaggattcatgtatcctacttacagatacttgattgcattatcacttgttcctggaaatgtaaaagtacctccgtgttgtagtgttaggatagatgcaggttttccttcaggtcctcacggttcctggctcatcatgcccatagcccttgttacagtcttttatcataatgttgggtgctttaggcctcaggggcagggctcaggaaacagaacctcgaagaccttcttccatcctcctttcacctgctccaaggcaggactttacttttcccaccca

SEQ ID NO: 92910 - DNA, 656 bp, Homo sapiens
tggagggtagctggggctctcactgcgggctttcagtgggtcctcccttctcaccaccctcgccctcatcaccagaaatgtctgctgctcagaattcctgggtgtccaggctcctctgcacgatgtggctgggctggttctygttgggttgcagtcttctcccctctgctgagcttttgccccttgtctttcatcctcccaagtgtcgccgccacctctcagctgctgccacctctcatttgtttcttgtcacttaggtcactttccattccttcctgttttagtgaggcttggggaagagatggggaatccatctcaattttccacgtctaatgagaaggttctccttggtagttttctggtggttcatattgtgctcaggattcatgtatcctacttacagatacttgattgcattatcacttgttcctggaaatgtaaaagtacctccgtgttgtagtgttaggatagatgcaggttttccttcaggtcctcacggttcctggctcatcatgcccatagcccttgttacagtcttttatcataatgttgggtgctttaggcctcaggggcagggctcaggaaacagaacctcgaagaccttcttccatcctcctttcacctgctccaaggcaggactttacttttcccaccca

SEQ ID NO: 92911 - DNA, 656 bp, Homo sapiens
tggagggtagctggggctctcactgcgggctttcagtgggtcctcccttctcaccaccctcgccctcatcaccagaaatgtctgctgctcagaattcctgggtgtccaggctcctctgcacgatgtggctgggctggttctcgttgggttgcagtcttctcccctctgctgagcttttgccccttgtctttcatcctcccaagtgtcgccgccacctctcagctgctgccacctctcatttgtttcttgtcacttaggtcactttccattccttcctgttttagtgaggcttggggaagagatggggaatccatctcaattttccacgtctaatgagaaggttctccttggtagttttctggtggttcatattgtgctcaggattcatgtatcctacttacagatacttgattgcattatcacttgttcctggaaatgtaaaagtacctccgtgttgtagtgttaggatagatgcaggttttccttcaggtcctcacggttcctggctcatsatgcccatagcccttgttacagtcttttatcataatgttgggtgctttaggcctcaggggcagggctcaggaaacagaacctcgaagaccttcttccatcctcctttcacctgctccaaggcaggactttacttttcccaccca

SEQ ID NO: 92912 - DNA, 637 bp, Homo sapiens
ccagccatgcctgaaggcatgtttctagattttcctttaattgaactagtaaaattcacttctatcttaaagttgtttgagttttgtttctgtcaatcctgtggcatctagaggaacatattacttyctaggattgttgtaaaaatcaagcgagataatatacataaagcttttagcatggcgaatggcacatggtaagtgcttaacaagtgttagcacatgttatagcaaatagtgtgtgccaagccctgtgttcggtaccagagaatcagaggtggatgagactcggtgcctgccttgaggatctcacactagtgaaggagacagataagccaacagacaggcataaaacactataaaatgagattaggtactcggtctcatagcaatacagaaaaactattgtttggaaggagtggtggagtaggtaggttaggaaaagcttcccagataacaagaggataaaaggagtcttttttattttagtcttttttttttttttttgagatggagtcttgctctgtcatccaggccggagggcagtggcacgatcttggctcactgcgacctccacctcctgggttcaagcgattctcctgcctcagcctcccgaatagctgggattacaggcgtgtgc

SEQ ID NO: 92913 - DNA, 752 bp, Homo sapiens
ggatcacttgagcccaggagttcaagacaagcctgggcaacatggtgaaaccctgtctctaaaaaaatacaaaaactagctgaggatagtggtgtgcacgtcagtagtcccagctacttaggaggctgaggtgggaggattgcttgagcccggggagtcgaggctgcagtaagccatgactgcaccactgcattccagcctgggtgacagagtgagaccccattacagataataataataataataataataataataataataataataataaaaacagagggctcttgaaaccttaaagttgataaaaaccaaagcataaatgtcagataaatgtagaaaggtataataatttcatactaattaagagctattgtttattaaatgtttgcyatgtgcctgttactgttaacatatatgttgggtttaattttcacatagttagaaaatttgggtgttaaagacaaaatgctttttttctcctccattgtaattcaaatgatataaatgtaagagctcccagtcttcttgacagtggcagtttttgtattccccattcaagtttactcaggaatttcttgaattcaatgaagtcaatttaaggtttcaaatccgtcagctcatgattctttctcaattttttctttgaaatcacgagttgaactaggacctgggtgagaaaagatgtcaaggagggactggcgaaaatattgtcctggcctagggatgagtcatctggtccagaggttacc

SEQ ID NO: 92914 - DNA, 696 bp, Homo sapiens
  misc_feature (1)...(696): n = A,T,C or G
tccctagacaaaaaaattatttttacaaaattatagtagctacatctttgttcgatttttgtttatatacaatttgcctcccagaatctctgagattgtggagttacacatacaccatgggttaagttgttacatgttccaatattagatcaccagggttttcccaggaatttctctttcctccttttcctctgccagggagtttagcctgtcctagagaagaggcttccctgaagtcaggaaagcaaagggtgggcaagtgtctttgcttagggttgtggaaaatgatgtacaggwccccaatccaaatcccctggattacccactagctgcgagataatagtgacggtcccatcactgggccatgacagagtctgggtcaagagatgatgggtaccggccagtctttggctcttccgtcatcatgggatctctgctctccagggtcccaaggttcccctagcctatttagcttctatatcactatgggttctccgtatagcttgaacaggacatcttgtttcttcttccaaagtcaaactcttcaaatatattgccagccaccaaatttatcacctaagctggtatcccctagaattagctttccctttatgagaaggggatttatttctttgaatatttcacagtcagagctaatggtcttaaatatactattctttatctccttccttnccc

SEQ ID NO: 92915 - DNA, 696 bp, Homo sapiens
  misc_feature (1)...(696): n = A,T,C or G
tccctagacaaaaaaattatttttacaaaattatagtagctacatctttgttcgatttttgtttatatacaatttgcctcccagaatctctgagattgtggagttacacatacaccatgggttaagttgttacatgttccaatattagatcaccagggttttcccaggaatttctctttcctccttttcctctgccagggagtttagcctgtcctagagaagaggcttccctgaagtcaggaaagcaaagggtgggcaagtgtctttgcttagggttgtggaaaatgatgtacaggaccccaatccaaatcccctggattacccactagctgcgagataatagtgacggtcccatcactgggccatgacagagtctgggtcaagagatgatgggtaccggccagtctttggctcttccgtcatcatgggatctctgctctccagggtcccaaggttcccctagcctatttagcttctatatcactatgggttctccgtatagcttgaacaggacatcttgtttcttcttccaaagtcaaactcttcaaatatattgccagccaccaaatttatcacctaagctggtatmccctagaattagctttccctttatgagaaggggatttatttctttgaatatttcacagtcagagctaatggtcttaaatatactattctttatctccttccttnccc

SEQ ID NO: 92916 - DNA, 697 bp, Homo sapiens
gcccaccttgccctcccaaagtgctgggattacaggcatgagccaccacgcctggcctaagccaggccttctcgccaggaccaggagtccccatggctgtctttgcaaggctacccctggcttctgttgccccttcgagagtcagccaggaagtgaccatgccttcccgcagcactggccttgcccgggggccactgtcctgagcatgccatgagtcagggtggccgccccaggtttgagggcctcaggtacctckgagatcctttcagccatgcccatgtccagccaggacagaacccacctggccacttcccatgcagcatgctctgttttcagcccaggaaccagttgtcacgccagggcagcttctaggcagaagtccccggggcagggctgggcaggccgtaggacagcgcttagagggaaggcatgagtttctttcctggctgctggcccaggaccccgcctcagatttgaatgtcacggtcgccggagtctctcccccagggccctgagaggcactggttgcgcgcgaaggctgtggcttcccctcccagcacgccccgatttcggtgagtggcctgtgagctcccgtggctgctccgacggtgccacaacttagtgccttacacaatgccgagccctgagatcccgctgtgggccgggcccgtccctcccagaggctccagaggagaat

SEQ ID NO: 92917 - DNA, 697 bp, Homo sapiens
gcccaccttgccctcccaaagtgctgggattacaggcatgagccaccacgcctggcctaagccaggccttctcgccaggaccaggagtccccatggctgtctttgcaaggctacccctggcttctgttgccccttcgagagtcagccaggaagtgaccatgccttcccgcagcactggccttgcccgggggccactgtcctgagcatgccatgagtcagggtggccgccccaggtttgagggcctcaggtacctcggagatcctttcagccatgcccatgtccagccaggacagaacccacctggccacttcccatgcagcatgctctgttttcagcccaggaaccagttgtcacgccagggcagcttctaggcagaagtccccggggcagggctgggcaggccgtaggacagcgcttagagggaaggcatgagtttctttcctggctgctggcccaggaccccgcctcagatttgaatgtcacggtcgccggagtctctcccccagggccctgagaggcactggttgcgcgcgaaggctgtggcttcccctcccagcacgccccgatttcggtgagtggcctgtgagctcccrtggctgctccgacggtgccacaacttagtgccttacacaatgccgagccctgagatcccgctgtgggccgggcccgtccctcccagaggctccagaggagaat

SEQ ID NO: 92918 - DNA, 718 bp, Homo sapiens
  misc_feature (1)...(718): n = A,T,C or G
tgatgtgagggggktgctgtcccccagagtccattcttggttgactcaggtgcccactgggcagttctgtggacaacagggctccaggtcagggtgcatgggggtgggtgtgtgccaaaggatggctccatttctcaaaaggaatgtaaatgnnnnnnnnnnnnnnnnnnnnnnnnnnnnnnnnnnnnnnnnnnnnnnnnnnnnnnnnnnnnnnnnnnnnnnnnnnnnnnnnnnnnnnnnnnnnnnnnnnnnccagattcacaggtgatggntnngggtccctggtgttacaccaagnacctggcctttaggatctgccagttttagctccaatatatccaacaatgactccttgaacttcagtttcctccttgacaaaataaggatagtaagaacaccagcatggggttactgtgagagctaaatgggttggtgtgtgccagtggccttgcagagggtctcagaaagaatttggccctttcctttctcttcccattagagaaaccgagcacctatgtaaatgacatgagtgtctgtggagaggttgtagactcaccttcaggagccacaaggctcctagatgtgtgaagtagtaggtatgagaagataaggaggggacaaagcagagacagcatcccaagggcattcaaaatagaaaccttcaaagctatgctggccaaacagcccaggaagtggccgccagcttcactttgtgtcc

SEQ ID NO: 92919 - DNA, 1621 bp, Homo sapiens
gtatgtgtacctttcaatctgttccttatattttatcatgcatataagaattcaggcagggcgaggtggctcatgcctgaaatcccaccactttgggaggctgaggcgggtggatcacaaggtcaggagatcgagaccatcctggctaacacagtgaaaccccgtctctactcaaaatacaaaaacaaaattagccgggtatggtggcgggtgcctgtagtcccagctacttgggaggctgaggcaagagaatggcgtgagcccaggaggtggaggttgcagtgagccgagwtcacaccactgcactccagcctgggtgacagagagagactctgtctcaataacaacaacaaaaaaagaattcaaattaattcatacttttttttaattgtatgattggtattttacatatcgttcttcaacttgctttccaaatttgccattatatttttgggatctattcatgttgattcatacatctcctgttcagagctgtttttctataaagggccagagtaaatattttgggctttgtgagccatagggtccctgttcactctgccacaccctaatgctatagctgagaggtagtcatagcagtacgtaaatgaatgatgtggctgtgttccagtaaaattgaacactaaaatttgattttcatagaattttacatattatgaatattcttctttcgtccttttaaaattattcaaaaatgtaaacatcattcttagcccatgagctgtacaaaatcaggcaatgggtcacttttggctcactgtttgctgacccctgctctagtgcattaatctgaacagctgtagagggttccactatgtctatacccatttcatgtgtccattcccctacagagagatatttaggttgtttccttttttattgctgttgcgaaatggagcccttaagcaagtcttcttatatcatgtgtcctatttaatagaaacaataaatgcatttcatgaatgagtgaaaaggcaatattgcgtcaataccatctgtgaccttttgaaaaatagatgcttgccaaagatgcctatggaagaattggcacaagaattaatgcttttaaaaagctccagatgaattaaattattgcccacagtacttacattttcttcctctctagcaagtgtttaggggctcaatttaatgagatttgggtgcggtaggagtgctggctctgagccggtgccagcagtagatggcggttgatcatagtgctaagtgctttaaatccaagtctcaccacagccctgtagaatcagggctgttttttagccccatttttcagatgagcaagatcgacgggcaggagtagaagtctcagtggctaagtatggcaggaaagagaaacgggatacagaagtttacaacgcctggtagagcaagaggctctcatgaaattatacggactgtggtcggttgaataatggtccccaaagatatccgtgccctagtcgctgaaacctgtgaatattttacacagtcaaagggactttgcagatacgattaaagcttttttttttttttttttgagatggactctctctctgtcgcctaggctggagtgcagtggcctgatctcggctcactgaaacct

SEQ ID NO: 92920 - DNA, 1621 bp, Homo sapiens
gtatgtgtacctttcaatctgttccttatattttatcatgcatataagaattcaggcagggcgaggtggctcatgcctgaaatcccaccactttgggaggctgaggcgggtggatcacaaggtcaggagatcgagaccatcctggctaacacagtgaaaccccgtctctactcaaaatacaaaaacaaaattagccgggtatggtggcgggtgcctgtagtcccagctacttgggaggctgaggcaagagaatggcgtgagcccaggaggtggaggttgcagtgagccgagatcacaccactgcactccagcctgggtgacagagagagactctgtctcaataacaacaacaaaaaaagaattcaaattaattcatacttttttttaattgtatgattggtattttacatatcgttcttcaacttgctttccaaatttgccattatatttttgggatctattcatgttgattcatacatctcctgttcagagctgtttttctataaagggccagagtaaatattttgggctttgtgagccatakggtccctgttcactctgccacaccctaatgctatagctgagaggtagtcatagcagtacgtaaatgaatgatgtggctgtgttccagtaaaattgaacactaaaatttgattttcatagaattttacatattatgaatattcttctttcgtccttttaaaattattcaaaaatgtaaacatcattcttagcccatgagctgtacaaaatcaggcaatgggtcacttttggctcactgtttgctgacccctgctctagtgcattaatctgaacagctgtagagggttccactatgtctatacccatttcatgtgtccattcccctacagagagatatttaggttgtttccttttttattgctgttgcgaaatggagcccttaagcaagtcttcttatatcatgtgtcctatttaatagaaacaataaatgcatttcatgaatgagtgaaaaggcaatattgcgtcaataccatctgtgaccttttgaaaaatagatgcttgccaaagatgcctatggaagaattggcacaagaattaatgcttttaaaaagctccagatgaattaaattattgcccacagtacttacattttcttcctctctagcaagtgtttaggggctcaatttaatgagatttgggtgcggtaggagtgctggctctgagccggtgccagcagtagatggcggttgatcatagtgctaagtgctttaaatccaagtctcaccacagccctgtagaatcagggctgttttttagccccatttttcagatgagcaagatcgacgggcaggagtagaagtctcagtggctaagtatggcaggaaagagaaacgggatacagaagtttacaacgcctggtagagcaagaggctctcatgaaattatacggactgtggtcggttgaataatggtccccaaagatatccgtgccctagtcgctgaaacctgtgaatattttacacagtcaaagggactttgcagatacgattaaagcttttttttttttttttttgagatggactctctctctgtcgcctaggctggagtgcagtggcctgatctcggctcactgaaacct

SEQ ID NO: 92921 - DNA, 1621 bp, Homo sapiens
gtatgtgtacctttcaatctgttccttatattttatcatgcatataagaattcaggcagggcgaggtggctcatgcctgaaatcccaccactttgggaggctgaggcgggtggatcacaaggtcaggagatcgagaccatcctggctaacacagtgaaaccccgtctctactcaaaatacaaaaacaaaattagccgggtatggtggcgggtgcctgtagtcccagctacttgggaggctgaggcaagagaatggcgtgagcccaggaggtggaggttgcagtgagccgagatcacaccactgcactccagcctgggtgacagagagagactctgtctcaataacaacaacaaaaaaagaattcaaattaattcatacttttttttaattgtatgattggtattttacatatcgttcttcaacttgctttccaaatttgccattatatttttgggatctattcatgttgattcatacatctcctgttcagagctgtttttctataaagggccagagtaaatattttgggctttgtgagccatagggtccctgttcactctgccacaccctaatgctatagctgagaggtagtcatagcagtacgtaaatgaatgatgtggctgtgttccagtaaaattgaacactaaaatttgattttcatagaattttacatattatgaatattcttctttcgtccttttaaaawtattcaaaaatgtaaacatcattcttagcccatgagctgtacaaaatcaggcaatgggtcacttttggctcactgtttgctgacccctgctctagtgcattaatctgaacagctgtagagggttccactatgtctatacccatttcatgtgtccattcccctacagagagatatttaggttgtttccttttttattgctgttgcgaaatggagcccttaagcaagtcttcttatatcatgtgtcctatttaatagaaacaataaatgcatttcatgaatgagtgaaaaggcaatattgcgtcaataccatctgtgaccttttgaaaaatagatgcttgccaaagatgcctatggaagaattggcacaagaattaatgcttttaaaaagctccagatgaattaaattattgcccacagtacttacattttcttcctctctagcaagtgtttaggggctcaatttaatgagatttgggtgcggtaggagtgctggctctgagccggtgccagcagtagatggcggttgatcatagtgctaagtgctttaaatccaagtctcaccacagccctgtagaatcagggctgttttttagccccatttttcagatgagcaagatcgacgggcaggagtagaagtctcagtggctaagtatggcaggaaagagaaacgggatacagaagtttacaacgcctggtagagcaagaggctctcatgaaattatacggactgtggtcggttgaataatggtccccaaagatatccgtgccctagtcgctgaaacctgtgaatattttacacagtcaaagggactttgcagatacgattaaagcttttttttttttttttttgagatggactctctctctgtcgcctaggctggagtgcagtggcctgatctcggctcactgaaacct

SEQ ID NO: 92922 - DNA, 2043 bp, Homo sapiens
cttggtagcccaaccagataagagtcatgaattgattccacattagcatgcagcaggcatgggaaaatgataaactcctattaccactgtcatggcaactgaaaaaatggctgctttggggggaacaaggtccacaggagaagaaaagcgaagccccgtctctttcttctgtttgacatctgttgtttaacatacaaaattgtattatcgtgacgcaagcgagtcagccagggctaaagcctggctaggaattgtcaaaaccatactgccccaactcccattcccctctctctaccatgagagtatataatttgaccccggacatttccacgaagggcagtaaattcccctcccttttcatcccaggtacaaaaagcgtgaagtgccttgggaaggtggaatagagggaggagggtctttttggggggtagtggagaagggagacatgctatcaattatgaagcaaaaataaagctcttctccgtttgcagttgcttctctaaatgattcattcctccctcctcccttcccccaaccttccctcaagaacattttagatttttcttttatttatttatttatttatttttgagacagagtctcactctgtcacccaggctggagtgcaatggcccagtctcggctcagtgcaacctccgcctcccaggttcaagcgattctcctgcctcagcctccctagtatctgggattacaggcacatgactggctgatttttgtatttttagtagagatggggtttcaccatgttggccaggctggtctcaaactcctgaccttgtgatccgcccacctcagcctcccaaagtgctgggattacaggcgtgagtcatcgcagccagccctagatttttctaaaacagcaatttgagcggggcttgtgaacacagacaaaacatgagcagataggctacaagcagggatggcagccttaggcgcagggctgaaggttgaaaatcctgattgcaggtcattgagaaaaggctagaaggaaacacacctgagtgctaaccaggagttggacaagaggtggatttttatttccttcttaatatagcccttttcaaaatgtttaataaagtacctgtgtcagtcactctcatactcagcagaaatatccaataagctttcggaggtccaggaatgggtctcaaaggagctttcaaagggtctcaaagatctcaaagtttctctcaaaggaggattgaggtgtagatgctcacacaaaaattctgttcggcaaatttccatatgatccaaacatatcacttgaagcaaatcctttgcatataaatataaatatatacaaatttatttgtatattatatataatatttatatatcatgcattatatttatacattatatattatattatattatatttatatatttatattatatattatatattatatttatatatttataatatataatatataatatataatatatwatattatatttatatattttatattatatattatatattatatattatatttatatattatatttatatattatatattatatttatatattatatatatttatatagtatatacatattatagatttatattatatataaatttatatatttcatgaaatttatataaatatataaatataaataaatatatatatttcatgaggacatttaaatgagtgactttcaaacacgcttcacttcccacctccccacagttgtgtaaccagaacaaacctagtaccattttgggttgttttcacaacacagcctttaaacagctgtgaaagattggggccatcctaaaatggactaaattgtaatttccagtaagagtgagattaagccccttgataggacaagatcagataagtgcaaacaaaagcaagaacatttatataatcaatctcggccattagcaaagttagcattttaaggtggtaaaacaaaaaaggaacctcttggccaaacccgcaccccatgtgcagtttggaacttcccagtttaaagactatcatctttaaata

SEQ ID NO: 92923 - DNA, 768 bp, Homo sapiens
caggcatgatattgcatttagctgtgtcataagctctgcaaacactgcctaggccaaaaagagggagacggcatgtcctcgaggggctggcgatgggtcagcagtgccctggtggctaggaagattgattcagttttttcaatacatagttaagcgtctgctgtggacccaacaccaggcttaccaagagatagagcagtttaataaaacagaatcaataactcaaggagctcacattctcatgaagaccagtgtcaatgtattaagggttctaaagggactgtacgatttgctaatgaaacagagatcagggacagcttcagaggatgcagatttgagctgagccyattaggacaaatagatctatagaagcaaaggatatttaggcagggaaaacgtgagaggtaggaaaacacattgtgtgacgcagggcagggacaggactggtctgagcagaatagggagtagatgctgtgggctagtgggcaacaatcagggtttaaaaaatgaggctggatggcagagagaccagcctacttatacaattatggggaggacacctaaagaaaccagttatacaataacacaaggcatgtgcgacctcaggccaattgaggggacagagaatcctgaggaaagacagatcacagagggctagaacggtcagatgaaggcttaagtgagtcataaagaggaacgaacacacagaaaacacaggtaccaaggaggcggagcttagctggggacccaaaacactttggcatgaaa

SEQ ID NO: 92924 - DNA, 563 bp, Homo sapiens
tggatattagtgaaataagaatttatgagggagtacacagtgattcataaagaccaccacttggggaggaccccagttcttcttggtcttcccaktgaaacttcctttgcctgctccaatgttttcaccctatgattcttaaattttcctgcttgatttgatttgattagaattatctggggaggctcccaatatggagaattcccacttccacaaaaatgaactagatataccttcccctattcctctgaaatagaactaaaaactccagacattatacataaaacaagcaggagaagaatctgaaagatggagagaagacagacaagctggggacctcagcacccaagagatggcatagcagcaagttccctgcattttctttttgcctcacatctcccagactggttgctggagaagctggagacctggaaacaccaatagacactgacaaaacaaaaaaggtcccaagaaagcctgttctctctaaccaaatgaccaggaaaggggcagcacagtatgacaataaaaatttttcaacagcaacagctccactccagaaa

SEQ ID NO: 92925 - DNA, 563 bp, Homo sapiens
tggatattagtgaaataagaatttatgagggagtacacagtgattcataaagaccaccacttggggaggaccccagttcttcttggtcttcccagtgaaacttcctttgcctgctccaatgttttcaccctatgattcttaaattttcctgcttgatttgatttgattagaattatctggggaggctcccaatatggagaattcccacttccacaaaaatgaactagatataccttcccctattcctctgaaatagaactaaaaactccagacattatacataaaacaagcaggagaagaatctgaaagatggagagaagacagayaagctggggacctcagcacccaagagatggcatagcagcaagttccctgcattttctttttgcctcacatctcccagactggttgctggagaagctggagacctggaaacaccaatagacactgacaaaacaaaaaaggtcccaagaaagcctgttctctctaaccaaatgaccaggaaaggggcagcacagtatgacaataaaaatttttcaacagcaacagctccactccagaaa

SEQ ID NO: 92926 - DNA, 557 bp, Homo sapiens
tgtctgtcttgttcactgccataggctcagtacctagaacaatgcytacttggcaatctgtaagtgaatgaacaaaaacaaatgcaatgaaacaagctgctccttcttccatgaggagctataacaaggagacataagaatcttggccattatgggacctgaagttaactcatggatatcagtcactgtttactgaaaagccacttagagcacttgcagcacttagaccatcaagggacagacaaatgcaacaggagataccatcccacccctacaacaacttccgatttagtcacggggagaggtcacatagacgcaaacgatgacttaagcatacctaggaagcagaaatacaagtgaatatgacaaaatctagacagaacacgatgctgcaggtaggcaggtcccgatgagaccactgggattgactttagcccttattatgtcctagcaaggaaggttgttgaaagaggggctggacaaccaaggcagatgatgcatccaatttcccagattaattttcaaagaggacagattatcagatgtgatgatatttt

SEQ ID NO: 92927 - DNA, 557 bp, Homo sapiens
tgtctgtcttgttcactgccataggctcagtacctagaacaatgcttacttggcaatctgtaagtgaatgaacaaaaacaaatgcaatgaaacaagctgctccttcttccatgaggagctataacaaggagacataagaatcttggccattatgggacctgaagttaactcatggatatcagtcactgtttactgaaaagccacttagagcacttgcagcacttagaccatcaagggacagacaaatgcaacaggagataccatcccacccctrcaacaacttccgatttagtcacggggagaggtcacatagacgcaaacgatgacttaagcatacctaggaagcagaaatacaagtgaatatgacaaaatctagacagaacacgatgctgcaggtaggcaggtcccgatgagaccactgggattgactttagcccttattatgtcctagcaaggaaggttgttgaaagaggggctggacaaccaaggcagatgatgcatccaatttcccagattaattttcaaagaggacagattatcagatgtgatgatatttt

SEQ ID NO: 92928 - DNA, 821 bp, Homo sapiens
tatgctaaggaaattatccgagttccaaattgaaaaaaaaaaaaaatcatgcttttccgctataacctctctcattcacagagtgattctctttcagaagggcaatctagaactattatgggagccatattccattggtggtgcaaccatttcttgacaaactagggtccaagaaagtattttcctggggaagatgagatttctcaaagaaggcacgcactttctaacctaagcttatttcagtaatcaatgtaacaagctggtcttgatgattgcagcagtaccaatactgtgggagtgtaccagttctagaacagctacaacattggaattgaacgcactagaattggatacaggacctgtttttgaggagctaacacccaaaggctgaacagcactcgtagcaccgtcctttctgtgcacatatkgtagtcctcagtttgcaacagaaataaagctgttagcaaattatgtgttctatttatgcaaataaaatcttgtggtatgctagaaagagcactggcctggagaccttagttttctcatatgttaaaaacccctaacacaggcctggttcatagtaggcacccaataaatagtagttttcttcctttgggggcctccgattcagtgtgcttcttcaggtaagtcacttccctggaactcctccttggaatgagagttgtactgttgtgatttttaacagttccttcaagccaagcattttggaatcctttcataaagggagaaaggaaggaaagaagaaaggaaaattaaaggaaaaagaacaaataaaacgttaaaaaggaggaaaggaaaaa

SEQ ID NO: 92929 - DNA, 1342 bp, Homo sapiens
tgtgctttggcaaggatgtgcagcattgcatatcattctatcattaattatgtttactcctccatgaactaaaaaccattagactaaatagtccaacataaaccttgaaagataaaatttgatattcttttgcctggccatttctctgacccagaattggggctgggaggggattggagacttgggggaaagaatcaaggagccttcttgcctgggggaatttggcatgcacttattaatcccatttggttgcactccctactaatccctcactccatacctgccaaggattggctctgctccctgcttctcatccctgtcctagttcttcctcacctatctccatttcccactactgatccttctctccagtaagatgctattcaacccgatgaaatataaagagtagcaccaccctggaagtcaggataccttagttttagctcctgctctaccattatctagctgtgtgacctggggcatgacttaacctttgctcttcagtctgaacagtctttaagaattggtttggaggaggaaggaagggatagacaagatccaaggcctttgaactcttttttggaaatgggtccttttcttcaaacaaaatttgatgcagagtcccaaatttacctacagaataaaatactgctgttcttgtttgaaaggaagtggggtgcttggagccacatgctcaggcccactttgccccctctcaggaaccctcgaaaaaacttataggacttataggactgttggggatctgccaagtctctcttatgttacatttcagtccttgtgaaactctatatgtttcatcagttcactttttcagaaagttcacctgcttggggtaaaggtcatgaagtggagaatgtggggctcagtaactagcaatagtaaaaaacatcattgattggcttgcagaatttactctgttctaagcatcttacacacatactcatcygaaaactcacaacaaccttgtgaggtagatctgttattatcttaagattctgaaacctgccagcatgactctcaatctttgacttgagaccagttgcccaacatggaaggttatacttttcacagtttaccaccataagcagtctttcagagtgatttctagctagagatccattcttagaaaaagtcagaacctgcccattagcatacactgtcacatggtgcagagtaccttcactgggttcatctcatttcctcctaaaaatagtcctatgcagtagtccagtcatatcatcaccattatatagatgagaaaaactgaggtgtaggagaaatcaagagatctgttcaaggtcacacattccataagactctg

SEQ ID NO: 92930 - DNA, 1780 bp, Homo sapiens
tgggcaggctggcagaagtacctgatcatccaagcctagattgagtaaatgttgcctggaaggaaaagaaggaagagaaaccaaaaaccagagaagcttacagaatttggtaccaagagagctgaggggagagaaatggaaatcccaagagaaccactgggcagtgcttcaacaagaaaggctgaagagtaatctcaggggaaagaactatgttgattaaagcaagggtgagatgagaaagaaatgggaaattgtgtaaggaaggtgtctgggaagagaaacacttgtgtatggggacgagagaggatactatccaactcagaggtgagagagttacctgagggccagttgtagccaggaccctagtggtggcagccaaacctactagaaggaaacatgtttctttgaggataaaagaagaaaaggaagcccaaatggaaaayggtctagagatagggggaatgagaaagcagacttgcctgggtcatgaataacacccgaaggtttggcttggactctctattggagcatttacctgtggttcactgcaagaggagaatttgtctttctcagtgcaagaggctctggctttgtctaccaaaaccttgtccaaagaggaggttacgaataaggacttagggatccaggtgttgaagagaaaagggttggtgaggccttggccttttccacattgtaattccatatggagcctttttttcagggactcccccagaaatcttcatacctgagctctagtcctggttctatcaccaggtggtcataggtgagtcacttcatgtctataattcttagtttccccttctgtaaatttaaaataataatcttaatctcacaggtcgttgttgaagtgttgaagtgtctcaataagtcttaagcgaatttaatgcagctgtgactctgtcctgctatccgcaagagggcagatacaggaaatcccaaggttgtaacaccacttgccttttgctcttggatgggctgggccttgggcaggagtggagcaggagtctggtgacacctgcaagattgaagataggatggatatcagggtagggacaaattgccagaattaaggttattctcagaggattgagaggaaatggcagctacaagaatgcccagtgcagctggaaagtcacctctcaccagctcctcatcttcattactacactgaaagagaaagtgtccttgacctcagttagtggaagctgtttctctcaaagtcatctggattttctgacacgtggtttaagtccctccactctccctttctccctcctttcctcttccctgcctctactttcaccagaatagctatgagaactatcctctttggggctctgcccacctccagatttccattctcggtgtgaatatttatggctatgtttcagagaatacatagccccaaatctctccacttgtcctttcagccttatacagcctttagtaaatgtgtgtgggggcggtgggggtggtaggcaccagaatttgttgagtgctaagtatatgctggacacattgtcaaacacattgcattcgttttctcatttaatcagaacaaaggttgtatgatcactttacaaatgagaaaactaaggctagggggaaggtcataaacttatgcaaggttacataatgaaaaagcagcaaagtcaagactatggttttccaactccaaatccaatgcccttgccactaggcatccctctgtgaaagcctggccttctgccttcacctcaatcatgtttatgtggcaaag

SEQ ID NO: 92931 - DNA, 1176 bp, Homo sapiens
gcatttcttaactactgaagtcatcagtataatacactgtgttgaataagtcaatttatttcactcttcctcattacactatgtacttttaaaaggaagagggtatacattttacttataagtcatttaattcttatgaggaaagatcctattgtctaagcatatacattttgatatggcttcttatattaaaccagtgtattcctttatgaaaattagaagtgttctctcagaattccagaatgtacatttaataaatgtctaaattgtacttcacaatgtttacttgcctttaatgtgaattttcttgctgtgaactttccgtccaagtaagaatacttctttttagagcttttagagcttgcatttaggattgcaagcgacatttataaaaaatgactggcatgcctgctgttaaatagttgctttttaaaaaataaatcttcccttccagtaaaaatcaactatctaaattaacccaaatggaatggaaattgccctctcaactaattatacacttggaaatgttcacttaaggataattgcctattggtaattaccctcaccattcaccatctttaagaaataaggaaatgattgcaatatgctgaggaatagttgaatggtgacattgtaaaaatatcgtaagccattgctgagaatactcaaatacttataggcctcagtttctccccctaattgcttaacattccacactagctgattcctcattttctctcagttcccctaaatatagcagcattgtctatttttttcctataaaatttatattacaatttcaacaacctaaaagtaagtcgaattctgttactcacctatattccatccctatgtttggggcttgttttttctcatatggaaaaataataagaatattattttataaagagaaaattttaaaaaattgagttgaaaacaaaattayagcaattccaacacaaatatagtagaaaacatttggaagacacgttaattaatatatagaatagtgatatggatggaggacacagtctcagattataattgtcaaaaaaagtgtagtcatacactgcattacaacatttgagatttctcaaagaacttaaaacagaactaccatagagcccagcagtctcattactgtgtatataaccaaaggcaaataaattgttctac

SEQ ID NO: 92932 - DNA, 1125 bp, Homo sapiens
gcattcaggtgacttttttacataaagatttcttttcctttagatagatactctgcagtgggattgctgggttccatagtagttctatttttgtttttttgagaaatctccatgctggttttcatagaggttgtattaatttacattcctaccagcagtgtataagcatttgcttttctctgcatctttgccaacatctgttgttttttgacttaataatagcccttcttactggtataacagggtatctcgttgtggttttaatttgtatttctctgacaattagtgatgttgagcactttttcatgtttgttggctacttgtttgtcttcttttgagaaaagtctgttcatgtcaaactgagtctgatgttctgatttcacaaaatgaagaaatggatgtccagggagaaaaagtaactttacacattgccattaaatctttattagttggttgaaatattcacaagtatagaaaacaaggctccttgaggagcaaagaactgggtacaaaagagtagtagccatggtgaccagaaaccttggaatcatttttcacagttcagcttcccagtcctctacgtaagccccactaggcactatttttcttaccattatttaccagtggggaaacagagatgacttttctcagggttacttgtggattgttgttgtcgagagcaaattggagacttctaacatctggtccagcactttgccaccacttcacttttgttctggaaaagagccaaaattagctcattgtaaagaagtcaccaagctctgatttttgtgcaaataaactttatggtttgccatttaaaaaactattactccaagatcaactttcagaattcaacaaaacgaggaccyctgtctctcaacacactatcatgccccacagatgactaaagaacacagtgggctcgtgctttacatgaggtaatgccacatggatcacaccctgtctgttagaaggaaacactagaggatgagagccgatcaggttgcaggctccagagacctcccattcttctctgtcgaaagccaaagaaatggcaaatttaacccaatttgaaaatgatttgagtcctcgctgacctggggaatttcattcagcagataa

SEQ ID NO: 92933 - DNA, 512 bp, Homo sapiens
tggcctgaaagacccttttgcagccccaaatagttgaaacagtgaagtgctatgttgtgttcttatgtttaatagtggctggtgaattttgtgggtgtctctcaccctttgctttcctccaacatatactttctctatcctccctaaatacaaatttaaggttcagtttagtgtcttaattcaggttctcaaggcaagcakatttctcttttccattcaattctacctagtaagggctggaactactatcaaactgaagtttcctatgcattcatttgagatgactctgcagatgataatgacccaggttcagtcaagcaggaagggagctgaaagatatttcagacttctgtggataataaatcaagtctaggagacaatattttacatttacattcacttattccatccttacagtaaacacaaggtttctaggtcagcagcagactgatgatctatgtctcagtgccagttttccatgtccatttcttcttcagggtatcatgacgaaa

SEQ ID NO: 92934 - DNA, 567 bp, Homo sapiens
aaaagatttttccatgatccctttacaccttcttaaggattaataagcttaaacacatgccaatatgctgccatgtcagaattcaaacagatgtgctcaggagcrgagcttaggctttgggtttgaaaatatttttgtctttccctcctcagtaaatcataattgaaaaattattatcaaaagtataactggtgtatggcttttggccatcctgtacggtgtcataagctatctctgtatttgtaacaatcatctcatttctttaaaataactctaaaagcaatcttttaaattctttctggcaagccctccacttatttcttagctcagtgaagataaagttgttgtttgagaacctggaatccagcatcccctatgatctaggtagcttttcttatgttcgtgctgctggtgccatattatggagagcccgaattatgatactgctacgttctgccctccaactgactcaaagaggaccagatgaggagtttgtgtatgtatgtcctttaaatgtgaattctgtgttacctatgagtacgttccaaataacaagttagtggatcc

SEQ ID NO: 92935 - DNA, 2129 bp, Homo sapiens
gggatctcaggggctgacagcagagaagttacctgaaggcgcaacaagcagtggtccctgtaggcagaagctacctggtgccccagtgatgtgggaggccctcagttcctgcgcttcttgctgcctgggcacatgttcctggaggatggcaggacctcctggcctctcccctgtctacccgccagagctctgcttcttaagataagaccacctctttcctccagccaatgtgctgctcttctgacttcaaaacacttgcacttccagggctcaacgtacagtgagttctcaaggattcggtgaataaatgtacaaatgtctcccgttacagctgccacattcagtggggtagtcttatgatcatttctctgaggaagggtgctgtgctcatggtctcagtctgcaaattgcagactgagaatccaacgaaggcacctgctstctgcccccgcacccccccaccggccccaaggctgaccctctcctcccctggtatcagctcgaagcattgttggagtccccagggacccggatgcttccctgtgtgccctgtctttgaggtgcccgccatctcaagtcaagacacacagcagggtgtgagaggccagggagcccatgggaattccaggggttgctctcagcgtgttttgtgaggaacgactggctcacctagtcaggcctgggacaaaatatcacctgctgaaggatgattggctgtggcgctggccttgtgctggaagagggcctctgagagcacagggaactgcccctgggcattttctcacaattgttccgagggttagaggctggatcccaggaaccgcgtgtggccactctgtccttcttcagagagagattcaacttccggagccagggtcacccctcatggctcacttcccttccttcccctgccaggattttcccccagattatcttggggttgtctcagcccttaccatacctcatccttcccagcagcagcccgccagccccacgcggagtgttctactctttccaaagacagcccacatttcggggtctcctgcacccccaaatgtgggattggtaagatgcacgcttcctgacttgggtttcttctttcatttgcagttaaaaaccatgaccacaaaagagacatccacaactcgctgtaataggcgcttgcataatagacttggggacagtgtttgggggaacaggatagggtggctctgtttttccaacagttgtgagattcattttggtgaagtaagaaggttttacagggccctctaagacagaaggggtttcctgggaaggaagctggcttatcaacctgcctcctctcgctcacctggtgctagctgcttactttccaccctttgccctctgctgaagggagagtttgaacatctttagattcttttctttgcttggcaagatgtgccgtatttattcaacttagcctcaaggttaagcacacagacccttgtcagaagccagacagcgagtgttcaaatcccagctgtgtcacttaccagctctgtcacaccttggggatgtgacttcacttgccttgatttcctcatcagtgaaatggggataataatagtacttgccccataaacagggataatagtacttaccttatataataaggattacatgtaaacatttaatatacataaagctcttgtttgtttgtttttagagacagggtctcagtctgtcatccaggctggagtgcagtggcaagatgctagctcactgcagccttgacctcctgggctcaaggaatcttcctatttcagcctcctgagtagctaggagtacaggtgcatgccaccatacctggctatttttaaaacatgcttttatatagatggggtcttgctctgtttcccaggctagttttgaacttctggcctcaagcactcctcccacctcagcctccaaagtatggggattataggcatgagccactgtgcccagccaaacagctcttaaaatatacaaaagctcttaaaatagtgcctagcacagtgtttactattgtcactatctacttggattctctgcctgttggtctccactttgcacaattatttgtggacatttgagatcgtcgagttctcgagaaccagtcaggc

SEQ ID NO: 92936 - DNA, 2129 bp, Homo sapiens
gggatctcaggggctgacagcagagaagttacctgaaggcgcaacaagcagtggtccctgtaggcagaagctacctggtgccccagtgatgtgggaggccctcagttcctgcgcttcttgctgcctgggcacatgttcctggaggatggcaggacctcctggcctctcccctgtctacccgccagagctctgcttcttaagataagaccacctctttcctccagccaatgtgctgctcttctgacttcaaaacacttgcacttccagggctcaacgtacagtgagttctcaaggattcggtgaataaatgtacaaatgtctcccgttacagctgccacattcagtggggtagtcttatgatcatttctctgaggaagggtgctgtgctcatggtctcagtctgcaaattgcagactgagaatccaacgaaggcacctgctgtctgcccccgcacccccccaccggccccaaggctgaccctctcctcccctggtatcagctcgaagcattgttggagtccccagggacccggatgcttccctgtgtgccctgtctttgaggtgcccgccatctcaagtcaagacacacagcagggtgtgagaggccagggagcccatgggaattccaggggwtgctctcagcgtgttttgtgaggaacgactggctcacctagtcaggcctgggacaaaatatcacctgctgaaggatgattggctgtggcgctggccttgtgctggaagagggcctctgagagcacagggaactgcccctgggcattttctcacaattgttccgagggttagaggctggatcccaggaaccgcgtgtggccactctgtccttcttcagagagagattcaacttccggagccagggtcacccctcatggctcacttcccttccttcccctgccaggattttcccccagattatcttggggttgtctcagcccttaccatacctcatccttcccagcagcagcccgccagccccacgcggagtgttctactctttccaaagacagcccacatttcggggtctcctgcacccccaaatgtgggattggtaagatgcacgcttcctgacttgggtttcttctttcatttgcagttaaaaaccatgaccacaaaagagacatccacaactcgctgtaataggcgcttgcataatagacttggggacagtgtttgggggaacaggatagggtggctctgtttttccaacagttgtgagattcattttggtgaagtaagaaggttttacagggccctctaagacagaaggggtttcctgggaaggaagctggcttatcaacctgcctcctctcgctcacctggtgctagctgcttactttccaccctttgccctctgctgaagggagagtttgaacatctttagattcttttctttgcttggcaagatgtgccgtatttattcaacttagcctcaaggttaagcacacagacccttgtcagaagccagacagcgagtgttcaaatcccagctgtgtcacttaccagctctgtcacaccttggggatgtgacttcacttgccttgatttcctcatcagtgaaatggggataataatagtacttgccccataaacagggataatagtacttaccttatataataaggattacatgtaaacatttaatatacataaagctcttgtttgtttgtttttagagacagggtctcagtctgtcatccaggctggagtgcagtggcaagatgctagctcactgcagccttgacctcctgggctcaaggaatcttcctatttcagcctcctgagtagctaggagtacaggtgcatgccaccatacctggctatttttaaaacatgcttttatatagatggggtcttgctctgtttcccaggctagttttgaacttctggcctcaagcactcctcccacctcagcctccaaagtatggggattataggcatgagccactgtgcccagccaaacagctcttaaaatatacaaaagctcttaaaatagtgcctagcacagtgtttactattgtcactatctacttggattctctgcctgttggtctccactttgcacaattatttgtggacatttgagatcgtcgagttctcgagaaccagtcaggc

SEQ ID NO: 92937 - DNA, 2129 bp, Homo sapiens
gggatctcaggggctgacagcagagaagttacctgaaggcgcaacaagcagtggtccctgtaggcagaagctacctggtgccccagtgatgtgggaggccctcagttcctgcgcttcttgctgcctgggcacatgttcctggaggatggcaggacctcctggcctctcccctgtctacccgccagagctctgcttcttaagataagaccacctctttcctccagccaatgtgctgctcttctgacttcaaaacacttgcacttccagggctcaacgtacagtgagttctcaaggattcggtgaataaatgtacaaatgtctcccgttacagctgccacattcagtggggtagtcttatgatcatttctctgaggaagggtgctgtgctcatggtctcagtctgcaaattgcagactgagaatccaacgaaggcacctgctgtctgcccccgcacccccccaccggccccaaggctgaccctctcctcccctggtatcagctcgaagcattgttggagtccccagggacccggatgcttccctgtgtgccctgtctttgaggtgcccgccatctcaagtcaagacacacagcagggtgtgagaggccagggagcccatgggaattccaggggttgctctcagcgtgttttgtgaggaacgactggctcacctagtcaggcctgggacaaaatatcacctgctgaaggatgattggctgtggcgctkgccttgtgctggaagagggcctctgagagcacagggaactgcccctgggcattttctcacaattgttccgagggttagaggctggatcccaggaaccgcgtgtggccactctgtccttcttcagagagagattcaacttccggagccagggtcacccctcatggctcacttcccttccttcccctgccaggattttcccccagattatcttggggttgtctcagcccttaccatacctcatccttcccagcagcagcccgccagccccacgcggagtgttctactctttccaaagacagcccacatttcggggtctcctgcacccccaaatgtgggattggtaagatgcacgcttcctgacttgggtttcttctttcatttgcagttaaaaaccatgaccacaaaagagacatccacaactcgctgtaataggcgcttgcataatagacttggggacagtgtttgggggaacaggatagggtggctctgtttttccaacagttgtgagattcattttggtgaagtaagaaggttttacagggccctctaagacagaaggggtttcctgggaaggaagctggcttatcaacctgcctcctctcgctcacctggtgctagctgcttactttccaccctttgccctctgctgaagggagagtttgaacatctttagattcttttctttgcttggcaagatgtgccgtatttattcaacttagcctcaaggttaagcacacagacccttgtcagaagccagacagcgagtgttcaaatcccagctgtgtcacttaccagctctgtcacaccttggggatgtgacttcacttgccttgatttcctcatcagtgaaatggggataataatagtacttgccccataaacagggataatagtacttaccttatataataaggattacatgtaaacatttaatatacataaagctcttgtttgtttgtttttagagacagggtctcagtctgtcatccaggctggagtgcagtggcaagatgctagctcactgcagccttgacctcctgggctcaaggaatcttcctatttcagcctcctgagtagctaggagtacaggtgcatgccaccatacctggctatttttaaaacatgcttttatatagatggggtcttgctctgtttcccaggctagttttgaacttctggcctcaagcactcctcccacctcagcctccaaagtatggggattataggcatgagccactgtgcccagccaaacagctcttaaaatatacaaaagctcttaaaatagtgcctagcacagtgtttactattgtcactatctacttggattctctgcctgttggtctccactttgcacaattatttgtggacatttgagatcgtcgagttctcgagaaccagtcaggc

SEQ ID NO: 92938 - DNA, 769 bp, Homo sapiens
cagctgcctgggtgaggggtcagtgtgccaaacgttcctggtgggaaatgacttggtttcccatatgagccccgaccttcactggcctctccctcttagaactcccattaaccaccatgtgtgctggtcactgcagctgaatccatccacaggggctgcccagaaaaagacaatgacttctgcagggctggggaggctgtccttgtgaaaataactgaatctacccgagtgtgtggcctgtgctggggaaacgtgggtgacttsaatgatgtcaggcaatcagtgcaattgaaatatgtcaaaaatggctccatcaacgcacccggctcatatttagctataaaatgtgaggccaggttacgaaccggaagcatttctttcaaccaaagtcatttggaaaggaatatctttgacacatccttgctgccccttcccccattgcggtgtccctggctgtgtggctggcagcctggctcttggtgagtcgcagctgcacctgtgcccaccttctcaccacgggagtaggtgcttctcctttgggcaccttctggctttgcaccgtaaaagtgaaatacggtgtggtcctgcaagctgcttctccagtgatgtgaaaagcgtaagagagaggctctgggaaggggcagatgctgcaggtgcaatgatgccagctgttgaggacggtgccctgtgcctggggaagtacatgctgtaactggagctccaccttggtaccccaccgctggaccctccaaagagagctctgacatgt

SEQ ID NO: 92939 - DNA, 769 bp, Homo sapiens
cagctgcctgggtgaggggtcagtgtgccaaacgttcctggtgggaaatgacttggtttcccatatgagccccgaccttcactggcctctccctcttagaactcccattaaccaccatgtgtgctggtcactgcagctgaatccatccacaggggctgcccagaaaaagacaatgacttctgcagggctggggaggctgtccttgtgaaaataactgaatctacccgagtgtgtggcctgtgctggggaaacgtgggtgacttcaatgatgtcaggcaatcagtgcaattgaaatatgtcaaaaatggctccatcaacgcacccggctcrtatttagctataaaatgtgaggccaggttacgaaccggaagcatttctttcaaccaaagtcatttggaaaggaatatctttgacacatccttgctgccccttcccccattgcggtgtccctggctgtgtggctggcagcctggctcttggtgagtcgcagctgcacctgtgcccaccttctcaccacgggagtaggtgcttctcctttgggcaccttctggctttgcaccgtaaaagtgaaatacggtgtggtcctgcaagctgcttctccagtgatgtgaaaagcgtaagagagaggctctgggaaggggcagatgctgcaggtgcaatgatgccagctgttgaggacggtgccctgtgcctggggaagtacatgctgtaactggagctccaccttggtaccccaccgctggaccctccaaagagagctctgacatgt

SEQ ID NO: 92940 - DNA, 769 bp, Homo sapiens
cagctgcctgggtgaggggtcagtgtgccaaacgttcctggtgggaaatgacttggtttcccatatgagccccgaccttcactggcctctccctcttagaactcccattaaccaccatgtgtgctggtcactgcagctgaatccatccacaggggctgcccagaaaaagacaatgacttctgcagggctggggaggctgtccttgtgaaaataactgaatctacccgagtgtgtggcctgtgctggggaaacgtgggtgacttcaatgatgtcaggcaatcagtgcaattgaaatatgtcaaaaatggctccatcaacgcacccggctcatatttagctataaaatgtgaggccaggttacgaaccggaagcatttctttcaaccaaagtcatttggaaaggaatatctttgacacatccttgctgccccttcccccattgcggtgtccctggctgtgtggctggcagcctggctcttggtgagtcgcagctgcacctgtgcccaccttctyaccacgggagtaggtgcttctcctttgggcaccttctggctttgcaccgtaaaagtgaaatacggtgtggtcctgcaagctgcttctccagtgatgtgaaaagcgtaagagagaggctctgggaaggggcagatgctgcaggtgcaatgatgccagctgttgaggacggtgccctgtgcctggggaagtacatgctgtaactggagctccaccttggtaccccaccgctggaccctccaaagagagctctgacatgt

SEQ ID NO: 92941 - DNA, 769 bp, Homo sapiens
cagctgcctgggtgaggggtcagtgtgccaaacgttcctggtgggaaatgacttggtttcccatatgagccccgaccttcactggcctctccctcttagaactcccattaaccaccatgtgtgctggtcactgcagctgaatccatccacaggggctgcccagaaaaagacaatgacttctgcagggctggggaggctgtccttgtgaaaataactgaatctacccgagtgtgtggcctgtgctggggaaacgtgggtgacttcaatgatgtcaggcaatcagtgcaattgaaatatgtcaaaaatggctccatcaacgcacccggctcatatttagctataaaatgtgaggccaggttacgaaccggaagcatttctttcaaccaaagtcatttggaaaggaatatctttgacacatccttgctgccccttcccccattgcggtgtccctggctgtgtggctggcagcctggctcttggtgagtcgcagctgcacctgtgcccaccttctcaccacgggagtaggtgcttctcctttgggcaccttctggctttgcaccgtaaragtgaaatacggtgtggtcctgcaagctgcttctccagtgatgtgaaaagcgtaagagagaggctctgggaaggggcagatgctgcaggtgcaatgatgccagctgttgaggacggtgccctgtgcctggggaagtacatgctgtaactggagctccaccttggtaccccaccgctggaccctccaaagagagctctgacatgt

SEQ ID NO: 92942 - DNA, 960 bp, Homo sapiens
atttataggtaagtcaatgaatgtaagttaaaatagcatcatataatttggaaaaaatttaaaaatattaataatttccagtattacctttgtcaaagaaaattatcagaatttttttaaagttaaaatttcatrtatttctaaactcaaaaatccatagctaagaatgtctcctacttgctagttaaagaaataattagaatacatttatttcaacaaagttgttactagccaaaacttaaaacaacctaattaatctatgaaattcaatgcaaaatattttatgcaatgattgtagataatcaggtagaaaactataaaaacaagacaaaatatttcaatgaaataagagaaataatagatgtcctattagaaataattttgccaaagatgttcagagctaggataaaaagccaagtttagagggtaatatttctattcaatccttccttcattcattcttatgacattaagggtaaagttttatttattaattcattcattttgtcatctattcactttttaaactgttatttattacaggcactaggctagctgctgctcataaaaaagaaattaacacttttgttttttaactggtaatttttgcaaagtctcagcatctgcatttggggcctatacacaaattaaagaacaaaaagtgacctttccttgaagaactgcaaaatgatacctgttctgggtatatcaatgagaagaaaagaaaggtctcttctggtagatgtagccacatcactcaatgaacacaactggcaaggaaggcagaggctgcattatagctcttggcttctgcaccattggccaggctgtgttatgtagaacataccctgacagtcttgttcagagaaactagaacttggaagacattgctgaaaatatagagatgtaattgaatccatttacttttatattttttatataaccttacttacttgtgtt

SEQ ID NO: 92943 - DNA, 756 bp, Homo sapiens
aaaaaaaaaaaaaaatagagttaaacagaagcataatgaaaatctcatataggtttcagctattagcgagtcaggatggtgtaaacgataatgtagtttagttcactttcttcagattgtaaggttgtaggtcactaaagctaacatgagaaaatagaacttaattgctaagagtataataagggtatgttatacttttaacttaagaataaagttagacaaatagttaaataaaacttgttctttggaaagtggaatagagaagtaaggcaaatgtttcactctgtctcttggagactagtttctctcatgcttttccctctttctgcatttctctgtaaatgtgtttctttgtttatcttgcacaacttcccctggaacctcatcttaaatatgacccagtgttcctgaataaccacacttatattcatcatctggaagaggaggtgtctcttggttcagatcattgagaatgaaaaarttgttagcatagatcatctttcagggtttttatttgcgagaaataagatctcatataacaagttgcagcagagtagcatttagtgaaagagattaggtagctctgaaattcttcttgttaaagaaccaagcttggctgttacacagctagaaacagagcatccagcttaaaaacctggcttttgctcagttcctctgacaccagggagtagacgctataaactccgttagcttattgaggggaactgcatttctgcattattcctgctttcctca

SEQ ID NO: 92944 - DNA, 756 bp, Homo sapiens
aaaaaaaaaaaaaaatagagttaaacagaagcataatgaaaatctcatataggtttcagctattagcgagtcaggatggtgtaaacgataatgtagtttagttcactttcttcagattgtaaggttgtaggtcactaaagctaacatgagaaaatagaacttaattgctaagagtataataagggtatgttatacttttaacttaagaataaagttagacaaatagttaaataaaacttgttctttggaaagtggaatagagaagtaaggcaaatgtttcactctgtctcttggagactagtttctctcatgcttttccctctttctgcatttctctgtaaatgtgtttctttgtttatcttgcacaacttcccctggaacctcatcttaaatatgacccagtgttcctgaataaccacacttatattcatcatctggaagaggaggtgtctcttggttcagatcattgagaatgaaaaagttgttagcatagatcatctttcagggtttttatttgcgagaaataagatctcatataacaagttgcagcagagtagcatttagtgaaagagattaggtagctctgaaattcttcttgttaaagaaccaagcttggctgttacacagctagaaacagagcatccagcttaaaaacctggcttttgctcagttcctctgacaccagggagtagaygctataaactccgttagcttattgaggggaactgcatttctgcattattcctgctttcctca

SEQ ID NO: 92945 - DNA, 1055 bp, Homo sapiens
attcatatgttaaaatcttcatccccaaggtggtagtattagaaagtggggcctgtggaaggaaggtgattaggtcatgagaacagagccctcatgaacgggattagagcccttataagaggcctcagaaagctgcctttccccttctactgtgtgaggacatagagataagacaccctatatgaaccagaaggtgagtcctcagcacraatagaatctgccagcatcttgattatggatttaccagcctccagaactgtgagaaataaattcctgttgtttctaagctaccaagtttatggtattttgttataccagcctgaatggactaagacagtcttcaataccatcactctagttaaacaacacttatttcttcatctgggtgacgcaatggttttctaattctttctcagtctttatttggttctccaacattgcaaccaaagtgtttgctgaaaatataaaattagttatatttgttctctccctaagaactttcattgtctttttttctgattccagtacacatgagaaactaatatacctagaacactagtgtggtaggcagaataaaaactaccaaagatatccatgtcccaatccctggaacttgtgaatatgttactttaacatggaaaaaatgattttgcagaagcaattaacttaaagacctttagatggggaaattatactgaattatgcaggcaggccaaatgtaatcacagggtccttaaaacagacagagaaggagatatgaaaatgaaagtagaaaattagaatgtgcagtatgataaagactctactggccattgctggctttgaagatggagggatgcaaccatgagccaagggatagggtttacctctagaaattggaaaaggcaagaaaatttattgaccctagagcctccacagagaacagagccctaccaaaatcttgattttggcaaaggagacccattccagaactgaaacatgataaatgctgttttaagccactgtttgttgtaattgcaacaaaaaacttataaactgaggaagaaagaagtata

SEQ ID NO: 92946 - DNA, 1055 bp, Homo sapiens
attcatatgttaaaatcttcatccccaaggtggtagtattagaaagtggggcctgtggaaggaaggtgattaggtcatgagaacagagccctcatgaacgggattagagcccttataagaggcctcagaaagctgcctttccccttctactgtgtgaggacatagagataagacaccctatatgaaccagaaggtgagtcctcagcacgaatagaatctgccagcatcttgattatggatttaccagcctccagaactgtgagaaataaattcctgttgtttctaagctaccaagtttatggtattttgttataccagcctgaatggactaagacagtcttcaataccatcactctagttaaacaacacttatttcttcatctgggtgacgcaatggttttctaattctttctcagtctttatttggttctccaacattgcaaccaaagtgtttgctgaaaatataaaattagttatatttgttctctccctaagaactttcattgtctttttttctgattccagtacacatgagaaactaatatacctagaacactagtgtggtaggcagaataaaaactaccaaagatatccatgtcccaatccctggaacttgtgaatatgttactttaacatggaaaaaatgattttgcagaagcaattaacttaaagacctttagatggggaaattatactgaattatgcaggcaggccaaatgtaatcacagggtccttaaaacagacagagaaggagatatgaaaatgaaagtagaaaattagaatgtgcagtatgataaagactctactggccattgctggctttgaagatggagggatgcaaccatgagccaagggatagggtttacctctagaarttggaaaaggcaagaaaatttattgaccctagagcctccacagagaacagagccctaccaaaatcttgattttggcaaaggagacccattccagaactgaaacatgataaatgctgttttaagccactgtttgttgtaattgcaacaaaaaacttataaactgaggaagaaagaagtata

SEQ ID NO: 92947 - DNA, 1146 bp, Homo sapiens
aggtggcaatgatgacacaaaacactaaactctgaaatgcctgccttgtgagctttaacagcactgtttaactttctactggtattttgtcatctggagtaactccttggtttccgcaagcagtgaagacagagaacaggaatatctttactcccacacgtcacagcatatagaaaaccttcagtaacatttctgattatacaggtgatccgataatttcataagaccacaaaccttgaatactagaatggtccttagaaattataattctgtaatttgagctaacatataaataaactgaggccctgaagacagtctgtgggtttttctaagcataaacagtaaagctgttaattgtgataatagcaattcagaaagattagtatattgggcccaagtcaaaagtatcatatcaaatatatacaaattatacatgatagtttaaaatttttttaaatttcagtttgaattcctgtgaataagagtattttgtttttcttttaaagtagtatcacctcatttgctcagataagccagttttttactacaacgatccagataactggtgcaaatctctgttacactagactccagcttgaacgaagagatagaaaggggtaaaactcctacgacaacttaccctcaggataatagactcaaggcctactttaataacatctttcttaacttcattttaacccttatgtaacctctttaataaacagatgaaaactgtctcacatccctctttaatgttatttatagtttaaaaatagattaggctgggtgcaatggagcatgcctgtaatcccagcactttggaaggccgaggtgggtggatcacctgargtcaggagttcgagaccagcctgaccaaaacggtgaaaccccgtctctactaaaaatacaaaaattagccgggcatggtggtgggtgcctccaatcccagctactcaggtggctgagacaggagaattgcttgaacctgggaggccgaggttgcagtaagccgagatcacgccactgcactccagcctgggcaacagagtgagactctgtctcaaaaaaaaaaagaaaaaagaacaaatatcatgactagaaatgaataaatgtaatagtaattttagaataaaatttgtttttacc

SEQ ID NO: 92948 - DNA, 846 bp, Homo sapiens
cttgtatttaaaattgtaggcctgatggtatgaatgtttagaaaaactacattaatcataatctatactgtaccatgtaatcttttatttacagtataacaaagaagccaacttgagacctagtaattttagaatcacaaggtaaacattaaataataatgaaacattcattataaaggaaattatctcctcaaaccaatattaagagctgaaacttttactttgcttccactttaatatattttatattttggagttgctctatggggaaagaataaaagaattatttgggtctctattcttaatttaagaaggcttaacctttttcttttttctttttctttttctagatcttttaagaagatctaaatgagtcaaaatgtctccttcatatatatatataccycttggtatcctcattttcctcctgattgcttccaccaaataagctgcatatatatatatatatatatatatatatattaaatggactcttcctatgcagagccatggctcttcatatgcagagccatggctcttcatatgcagagccatgcatatacttcatatgcagagccatgaagtatagtttttgagtccatttaatatttgaccttgcctctgcaactaaaggaaaaccctcgccacagataatgtaactacaaataaatcaccatttcatagatgccatgagacattggccagatggaaagtattttggtaaaaacattctcttaagagtcaaaaaaccctgtttcagatcccaacttcatcattaattaactgtgagacttgaactgggttccttctttcttactttcttcatctttaaaatgagagcttaga

SEQ ID NO: 92949 - DNA, 1729 bp, Homo sapiens
ttttgtctacataacactaaaaaacatgtggtaggaaagtgtacattattttttaatgattatttatgagttgtgatgttagcaagraaggacctgagttgtatgctgatagggcatcagctatatgcaaaggcaatatttaaatatttattaaaatatttaatacctggtatggtacgagtagcaccctatcagaacaaaacaacaagcccatgaatcacctaatggaggcaccagtgcataccagctgaatttagccatgcaatacataaaacgtaaattacaaatgaagccactctactttttcttttttgctcaacactctgccttttgattctcaatcttaacttgatcaagaagggtttcagaagtctcatctataaacttgaggttccacagcacctagagcatacaacccatggactaaaaggtaattctttaactttcaggagataaatttcttctgacgtttctgaaatcttctgctggtaaacccttccttagcaatttccttgccttctgccatatgctcgtttctaattattcttaaaatcagccctcctcaaaatggtcagagcaaaccaccttgagggatacacctcatgctgggcctctaatctttgaagaatatatttgttctggatttttctagaaacttctactcagcatcccaaacactcttaatttttcttctatgaaataataaagaatgtgtgctttcctctaatcacctgaatgcaaaacattctttaacagtacaacttgacgtcttaattgatagttttcctccattactgcattacttcggtcctcactgagttcttacttccttggattctaatgtctgattaaggagaaccaaccaatatagtactgtgtgtgtgtatgtgggtatttttttttcttcagagtggctttagatttctctcaaaattaaatataccttgaaggaatttttatatgcattacactctgctgattattgcttagattacaatgttatgaaatagttgcctactatcaagtcattttaaatctagtagagaattcttttcttgacttcttttacagttagtttgttgtttatgtataaacatgttactaattgttgtgccaagttggtatcctgaaacattaatgaacttgtttatttcttctgacgtttgttggtggagtctttaaggttttatatacatagatctatgacgttgctatctgcaaacagagataattttacatcttctttcctatttggatactgtttattttgtcttcttgcctaattaataggacttttaggactatatttaattattatatatttgagatattaattcctactatatcagtggtttgcatgttgagttcttatgtttaagtctttaattcactttgagttggcaagtggcaacaggagggcaggcttgtcttggttcccatcttagaggaaaagctttcagcttctcaccatcttgtatgttgttaatgttggtcttgtcatatgtggccttcattcagttggggtatatcccttatatacctaatttgctgagatttcttatcataaaatgatgttaaattttcccaagtgtttttcctgcatctactgagataagcatatattttaaaattctttattttaatatcatttacatatgttgaaccagccagaaaagtcttacttacaattgcttcaaaaataaaatacttaaaaataaaatacttaaaa

SEQ ID NO: 92950 - DNA, 1160 bp, Homo sapiens
gcatatataacccctacaccattattaaacctaacaaaaattaacaggtgtttattaataccccaaataataaaaacatattcaaatttccttgattgtctcaaacatgtcagtttacaattggttgttctattcaggatctaagtaagatttacacattgcattcattgcatttggttgctgggttttataacacttctcccttcctttccccacttctaccttatctctcaggccagttagtaaaagtgggtcatttgttctctcaaatattctatattctgaatttggctgattttycccttatagtggtatttaatgggttcttccatcctccacatttcttttaaactgaaagttaatgctggtggaatctggatttgacttgtaacttgctttaaacaatacaacgcatcagaaattatgttctagaacttatgagttcacatcttaagaggagttgcagcttccatttcttccctcttggaagctaggcaacatatatcaaaaaccaaactatcctaagactatcattttctgagaagagtaaagttagaaactggaaagtccccacagaatgaatgaaaagtgattggtcagcccccaactcttctggcaaactgaactaatgaaagcactacaattttgagcaccaaaaaaatgagtaaagaaggcatcttggctatttgagacccagcatacagcacatggagcagaactgtccacctgaacccagctcagatagcagaataataagaaaaaaattgaattttttttctttaaaatccctctttgtggcatctcattatgcagcaatgggtaaatgaaacactggttgaaggaactcttcatttctcttatttcttttttatttctatcatgctcacttggttcttttttatagattccatttctccttgacattctccatgtattcatgaattttgtttatcttttgtactatatcctttaaaatatttatcatagtcattttaaatttttttggcagataatttaaacattttggccatctgagggcccatttctataaactcttttattcttgattgcatgtcacatgttcttgcttctttacatataattgtttactatgccagacactgtgtgtgaaaaagagggggatatttaaaagtaaatac

SEQ ID NO: 92951 - DNA, 1160 bp, Homo sapiens
gcatatataacccctacaccattattaaacctaacaaaaattaacaggtgtttattaataccccaaataataaaaacatattcaaatttccttgattgtctcaaacatgtcagtttacaattggttgttctattcaggatctaagtaagatttacacattgcattcattgcatttggttgctgggttttataacacttctcccttcctttccccacttctaccttatctctcaggccagttagtaaaagtgggtcatttgttctctcaaatattctatattctgaatttggctgatttttcccttatagtggtatttaatgggttcttccatcctccacatttcttttaaactgaaagttaatgctggtggaatctggatttgacttgtaacttgctttaaacaatacaacgcatcagaaattatgttctagaacttatgagttcacatcttaagaggagttgcagcttccatttcttccctcttggaagctaggcaacatatatcaaaaaccaaactatyctaagactatcattttctgagaagagtaaagttagaaactggaaagtccccacagaatgaatgaaaagtgattggtcagcccccaactcttctggcaaactgaactaatgaaagcactacaattttgagcaccaaaaaaatgagtaaagaaggcatcttggctatttgagacccagcatacagcacatggagcagaactgtccacctgaacccagctcagatagcagaataataagaaaaaaattgaattttttttctttaaaatccctctttgtggcatctcattatgcagcaatgggtaaatgaaacactggttgaaggaactcttcatttctcttatttcttttttatttctatcatgctcacttggttcttttttatagattccatttctccttgacattctccatgtattcatgaattttgtttatcttttgtactatatcctttaaaatatttatcatagtcattttaaatttttttggcagataatttaaacattttggccatctgagggcccatttctataaactcttttattcttgattgcatgtcacatgttcttgcttctttacatataattgtttactatgccagacactgtgtgtgaaaaagagggggatatttaaaagtaaatac

SEQ ID NO: 92952 - DNA, 623 bp, Homo sapiens
gtatttttagtagagacggggtttcaccatgttggtcaggttggtcttgaactcctaaccttgtgatccacctgcctcagcctccctttctttataaattacccagtttatggtatttctttatagcagtacaagaacagattaatataccatatatttagaatatatctgtttaaaaaccctgtcaggctgggcttagtgactcatgactataatcccagtgccttaggagaatgcagggagaggattgcttgagaccaggagtttcaggctgcagtgagctatgatcatgccactgcactccagcttggaagacagtgccagaacctgttctctgaaaaataaataaataaccttgcaaaacttgacaataaggaaacacatgatccaatttttaaaagaaagaaacaatatgaatggatgttcaccagagaatatatacagatagcaaataaacatctcaaaagatgctcaacatcattagttattagagaaatgcaaatttaaaacaaaatgaaacattattacacgtstgcttgatatttattgctgtgtaacaaattaccccaaaacttagtggctaaaacaacatgatgtttatctcagtttctgtgggtcaagga

SEQ ID NO: 92953 - DNA, 544 bp, Homo sapiens
tccctgattgatcccacagcagcatggaggctctgacttcttgcaagggagagaggcgctagggaaagaagatgttagagacagtaacaaagcaaaatttcctcatgtgcagtttatccaaggatggctcacaaatagaattattctactcatgaaggaaaaagaaatacaactagccaaatgatccacctggaattatttcctccttagctacacaaacaggtaaaaacaaatccatacattacrttttacaattatattctgaagaggtgtccacttctgagcaagatggagtaggtgggactggattcaccctccagcctgaagcaataaaaaaagcaacctggcaacacatatgaaacaatggtttccgagacatcagctatcagagaatgaagagtagtcatccctaagaaatggaaaacaaacaaggtgagccctattgcttgaacttactaccatgagagagtttccgggcaacagcacagggagagggattcatagagagccgagtgtttgaggagacccagacagatgaaattca

SEQ ID NO: 92954 - DNA, 1046 bp, Homo sapiens
atgtaaactttaattatggtttatagataattaactttttattatattaacaaatataactctttacaaatgcctaagagaatacaagtttctaatagtttaacattatttcatggatttctatatattcctgccatataagagaacatcttggaagaaaagagcatcttccagtgaatttttctccatgaagatcatgctgaatttcatctttccattgatttttcccttctattcctctagagggttatgatcattgggcagcttggtaacctacttcagacaacatttagtatagcagtaaatacgtgtgagcactgaagaataaaactaaacaatattagctagaagaaattgatttaaaacatttaacaacaataatttttcatttcatttgctataagcgatatgtgtattctaaacaaatgaaaaataattggtggaaggtattttgtcactcaccaggccagcagtgacaagtgtaattgtcaacactgtcctcacatgtagcattattgtgacaaggttttgaccaacaaagaggcatcaaggtctcacagtgtgtccctgtgaatccactacccgtgcagttacagctatatctggaaagtaaatgaaattttcatgtcaactcttggtcatattgagatcagatatctttatmctgtttcttcaactgtctatcaacccaagacccatggcatcatcttactacctcaaaaactctggggaattatctatacaggactgaatgcatgatttatttccatattaatgtcttattaactttaaaaaatttaaagtacagggtcatgcaaaccatgactatttacttcagtttcttcattcataaattgaatatagtacctatattacaaggttattgtgacaattaagtatgcatataaagaatagacacagtattccacatatctgaagtactaaatatgttgctactaaatagcacttaataaaattgttaatattttttaaggtggtagagaatgatttataccatcatggcactctgttatacagagagccca

SEQ ID NO: 92955 - DNA, 933 bp, Homo sapiens
tgcatataataaacatggtagaaaaaaatgaaacccaaatttgaaaatataaataatttttataatcactgtgaaatgttcattctagaaatataaaattaagactgtctaaagacccagcgcggtgaatcattcctataatcctagcactttcggaggcccaggagggcagattgcttgagctcaggagtttgagaccagactgggcaacatggtgaaaccccaactctagaaaaaatgcaaaaaaatttgccgggcatggtggcgcatscctgtagtcccagctacttgggaggctaaagtaggaggatcctttgaacccaggaggcagaggttgcagtgagccaagattatgccactgcacactccagcctgggcaacagagcagagtgagactctgtctcaaaaaaaaaaaaaaaaaaaagattgtctacaggttaaagagtatgtagctttgtaatgagaagactgtactctgaactccagtctgaaggcatgggccaacaataacagtacaaatttttttttagtttttaaatgaaaataatccttcctttgataacacatttctctttttggattaaaggagtcaaggaaaactaaaatccaaaacaattactgcaatatgttttcagcttcatctattttataaaaagaaagtgttgagcaaaaagttcacaaactttgggaaaaaataaactctctacattttcatatagtctaatatcagtatttttacacgattcccagttaagctgcattttccatccttttaatggcaaagttaacccaacataaaaaagaaggctactatatcttgaatcacccaaatatcgtaatcagttttctctgaattttttaatttcaaaataaaccctcatacatcaatggaatactactcaggaacaaaaaaaaaattaactattgatgcat

SEQ ID NO: 92956 - DNA, 1720 bp, Homo sapiens
cagacttaaaatctcattaattcatgaatagatcaggaccccaggaggagaaccatgcagcaccatatggagaaaataaaatattgaaaatattaaaaatatttataccttggaaaccaaagtcaaggattcctcctgcccccctttaagggtgggagtatataggagctaggtggtatatggatatgtggcccaggtctgaatccccctgaaagcactctggtagccagttactccatccttgaacatgtaattgtaatgtatatacttgatccttggcacaacctccatataggttccttattctgtggtacaagagctgttatagtaggaaaagtcaagcccaagactaggaaactaataccctcacagtcaagattataaaacaaaagcaatatcgcatcttggtcatggggctgaggtggttgtagatgtcccaaagcatgcagttagatcttggagaaggatacaaacgcaggctgcaactgctgtttcagataggcatttttgttacagtagattagtgtgaacctcagatacatggtatgcagtcattgattttgtgaattcattttttccatccctatcaggaagaggattaggaacatttcaaattcattttggacagaaagtaatatatatttacagcctagacctagggctttatgaactctcataacttctgtcataatatagccagccagatgatgctgtaaaatctgaccattctgcagaattatgcatttgtccactatactgataacaccatattaaactgagtaaccatagtgttaactatgctggagatcttgacaagtcatatgtgctacagagggtgagggataaaaatatggagattcagggcctgctgtatcagtaaagattttatgggtctakttgcctgtttcatgcctggacatttcctccaaagtaaaagaaaaatcatttcatgtcatatcttccaccactaagaagaaaagataacacttggtaggtctcttcaaattttagaggcagtatattccacacttatgaatgctgtcctggtctattcactgggtgattaaaaaaaaaaaaaaagggctgctagctttggatagggctcagagcaggatagggctcttcagtacatctaggctgtggagtaagcagctctgatgtttcagctatagtaaccagaagcccttatggtattagaatatcagtagtggcaaaaaaaaagtctgacttacacagaaagctttagttgaagaatctggagccatttgtgtaggaatgcagtttaaagatctttgtattacatgttaatatgttcaagagaacattcacagtgagagagacactaacctaattagacaaaatgatttggctagttgacaaaagccagcatctataattggctaccccagtgctggcacaatgagcctaataatagaagtaccatgatgacagaaattggggctatgtatgggcccaagagtggactcccactaaaaaaaaaaagcagataaattacttccactgatggtattcaaccaaaagcatgaccagcactgagtctctcgtatagaatcatctttgaaagaaaccaaccagccacttggtggtaagttgataacaaaccatcagagtggcagcaattcatcttgactgtatgaaatcacatccataggtataagttattctttcctgtctacatggactcggctagattacagag

SEQ ID NO: 92957 - DNA, 1720 bp, Homo sapiens
cagacttaaaatctcattaattcatgaatagatcaggaccccaggaggagaaccatgcagcaccatatggagaaaataaaatattgaaaatattaaaaatatttataccttggaaaccaaagtcaaggattcctcctgcccccctttaagggtgggagtatataggagctaggtggtatatggatatgtggcccaggtctgaatccccctgaaagcactctggtagccagttactccatccttgaacatgtaattgtaatgtatatacttgatccttggcacaacctccatataggttccttattctgtggtacaagagctgttatagtaggaaaagtcaagcccaagactaggaaactaataccctcacagtcaagattataaaacaaaagcaatatcgcatcttggtcatggggctgaggtggttgtagatgtcccaaagcatgcagttagatcttggagaaggatacaaacgcaggctgcaactgctgtttcagataggcatttttgttacagtagattagtgtgaacctcagatacatggtatgcagtcattgattttgtgaattcattttttccatccctatcaggaagaggattaggaacatttcaaattcattttggacagaaagtaatatatatttacagcctagacctagggctttatgaactctcataacttctgtcataatatagccagccagatgatgctgtaaaatctgaccattctgcagaattatgcatttgtccactatactgataacaccatattaaactgagtaaccatagtgttaactatgctggagatcttgacaagtcatatgtgctacagagggtgagggataaaaatatggagattcagggcctgctgtatcagtaaagattttatgggtctatttgcctgtttcatgcctggacatttcctccaaagtaaaagaaaaatcatttcatgtcatatcttccaccactaagaagaaaagataacacttggtaggtctcttcaaattttagaggcagtatattccacacttatgaatgctgtcctggtctaktcactgggtgattaaaaaaaaaaaaaaagggctgctagctttggatagggctcagagcaggatagggctcttcagtacatctaggctgtggagtaagcagctctgatgtttcagctatagtaaccagaagcccttatggtattagaatatcagtagtggcaaaaaaaaagtctgacttacacagaaagctttagttgaagaatctggagccatttgtgtaggaatgcagtttaaagatctttgtattacatgttaatatgttcaagagaacattcacagtgagagagacactaacctaattagacaaaatgatttggctagttgacaaaagccagcatctataattggctaccccagtgctggcacaatgagcctaataatagaagtaccatgatgacagaaattggggctatgtatgggcccaagagtggactcccactaaaaaaaaaaagcagataaattacttccactgatggtattcaaccaaaagcatgaccagcactgagtctctcgtatagaatcatctttgaaagaaaccaaccagccacttggtggtaagttgataacaaaccatcagagtggcagcaattcatcttgactgtatgaaatcacatccataggtataagttattctttcctgtctacatggactcggctagattacagag

SEQ ID NO: 92958 - DNA, 1720 bp, Homo sapiens
cagacttaaaatctcattaattcatgaatagatcaggaccccaggaggagaaccatgcagcaccatatggagaaaataaaatattgaaaatattaaaaatatttataccttggaaaccaaagtcaaggattcctcctgcccccctttaagggtgggagtatataggagctaggtggtatatggatatgtggcccaggtctgaatccccctgaaagcactctggtagccagttactccatccttgaacatgtaattgtaatgtatatacttgatccttggcacaacctccatataggttccttattctgtggtacaagagctgttatagtaggaaaagtcaagcccaagactaggaaactaataccctcacagtcaagattataaaacaaaagcaatatcgcatcttggtcatggggctgaggtggttgtagatgtcccaaagcatgcagttagatcttggagaaggatacaaacgcaggctgcaactgctgtttcagataggcatttttgttacagtagattagtgtgaacctcagatacatggtatgcagtcattgattttgtgaattcattttttccatccctatcaggaagaggattaggaacatttcaaattcattttggacagaaagtaatatatatttacagcctagacctagggctttatgaactctcataacttctgtcataatatagccagccagatgatgctgtaaaatctgaccattctgcagaattatgcatttgtccactatactgataacaccatattaaactgagtaaccatagtgttaactatgctggagatcttgacaagtcatatgtgctacagagggtgagggataaaaatatggagattcagggcctgctgtatcagtaaagattttatgggtctatttgcctgtttcatgcctggacatttcctccaaagtaaaagaaaaatcatttcatgtcatatcttccaccactaagaagaaaagataacacttggtaggtctcttcaaattttagaggcagtatattccacacttatgaatgctgtcctggtctattcactgggtgattaaaaaaaaaaaaaaaggrctgctagctttggatagggctcagagcaggatagggctcttcagtacatctaggctgtggagtaagcagctctgatgtttcagctatagtaaccagaagcccttatggtattagaatatcagtagtggcaaaaaaaaagtctgacttacacagaaagctttagttgaagaatctggagccatttgtgtaggaatgcagtttaaagatctttgtattacatgttaatatgttcaagagaacattcacagtgagagagacactaacctaattagacaaaatgatttggctagttgacaaaagccagcatctataattggctaccccagtgctggcacaatgagcctaataatagaagtaccatgatgacagaaattggggctatgtatgggcccaagagtggactcccactaaaaaaaaaaagcagataaattacttccactgatggtattcaaccaaaagcatgaccagcactgagtctctcgtatagaatcatctttgaaagaaaccaaccagccacttggtggtaagttgataacaaaccatcagagtggcagcaattcatcttgactgtatgaaatcacatccataggtataagttattctttcctgtctacatggactcggctagattacagag

SEQ ID NO: 92959 - DNA, 1720 bp, Homo sapiens
cagacttaaaatctcattaattcatgaatagatcaggaccccaggaggagaaccatgcagcaccatatggagaaaataaaatattgaaaatattaaaaatatttataccttggaaaccaaagtcaaggattcctcctgcccccctttaagggtgggagtatataggagctaggtggtatatggatatgtggcccaggtctgaatccccctgaaagcactctggtagccagttactccatccttgaacatgtaattgtaatgtatatacttgatccttggcacaacctccatataggttccttattctgtggtacaagagctgttatagtaggaaaagtcaagcccaagactaggaaactaataccctcacagtcaagattataaaacaaaagcaatatcgcatcttggtcatggggctgaggtggttgtagatgtcccaaagcatgcagttagatcttggagaaggatacaaacgcaggctgcaactgctgtttcagataggcatttttgttacagtagattagtgtgaacctcagatacatggtatgcagtcattgattttgtgaattcattttttccatccctatcaggaagaggattaggaacatttcaaattcattttggacagaaagtaatatatatttacagcctagacctagggctttatgaactctcataacttctgtcataatatagccagccagatgatgctgtaaaatctgaccattctgcagaattatgcatttgtccactatactgataacaccatattaaactgagtaaccatagtgttaactatgctggagatcttgacaagtcatatgtgctacagagggtgagggataaaaatatggagattcagggcctgctgtatcagtaaagattttatgggtctatttgcctgtttcatgcctggacatttcctccaaagtaaaagaaaaatcatttcatgtcatatcttccaccactaagaagaaaagataacacttggtaggtctcttcaaattttagaggcagtatattccacacttatgaatgctgtcctggtctattcactgggtgattaaaaaaaaaaaaaaagggctgctagctttggatagggctcagagcaggatagggctcttcagtacatctaggctgtggagtaagcagctctgatgtttcagctatagtaaccagaagcccttatggtattagaatatcagtagtggcaaaaaaaaagtctgacttacacagaaagctttagttgaagaatctggagccatttgtgtaggaatgcagtttaaagatctttgtattacatgttaatatgttcaagagaacattcacagtgagagagacactaacctaattagacaaaatgatttggctagttgacaaaagccagcatctataattggctaccccagtgctggcacaatgagcctaataatagaagtaccatgatgacagaaattggggctatgtatgggcccaasagtggactcccactaaaaaaaaaaagcagataaattacttccactgatggtattcaaccaaaagcatgaccagcactgagtctctcgtatagaatcatctttgaaagaaaccaaccagccacttggtggtaagttgataacaaaccatcagagtggcagcaattcatcttgactgtatgaaatcacatccataggtataagttattctttcctgtctacatggactcggctagattacagag

SEQ ID NO: 92960 - DNA, 1720 bp, Homo sapiens
cagacttaaaatctcattaattcatgaatagatcaggaccccaggaggagaaccatgcagcaccatatggagaaaataaaatattgaaaatattaaaaatatttataccttggaaaccaaagtcaaggattcctcctgcccccctttaagggtgggagtatataggagctaggtggtatatggatatgtggcccaggtctgaatccccctgaaagcactctggtagccagttactccatccttgaacatgtaattgtaatgtatatacttgatccttggcacaacctccatataggttccttattctgtggtacaagagctgttatagtaggaaaagtcaagcccaagactaggaaactaataccctcacagtcaagattataaaacaaaagcaatatcgcatcttggtcatggggctgaggtggttgtagatgtcccaaagcatgcagttagatcttggagaaggatacaaacgcaggctgcaactgctgtttcagataggcatttttgttacagtagattagtgtgaacctcagatacatggtatgcagtcattgattttgtgaattcattttttccatccctatcaggaagaggattaggaacatttcaaattcattttggacagaaagtaatatatatttacagcctagacctagggctttatgaactctcataacttctgtcataatatagccagccagatgatgctgtaaaatctgaccattctgcagaattatgcatttgtccactatactgataacaccatattaaactgagtaaccatagtgttaactatgctggagatcttgacaagtcatatgtgctacagagggtgagggataaaaatatggagattcagggcctgctgtatcagtaaagattttatgggtctatttgcctgtttcatgcctggacatttcctccaaagtaaaagaaaaatcatttcatgtcatatcttccaccactaagaagaaaagataacacttggtaggtctcttcaaattttagaggcagtatattccacacttatgaatgctgtcctggtctattcactgggtgattaaaaaaaaaaaaaaagggctgctagctttggatagggctcagagcaggatagggctcttcagtacatctaggctgtggagtaagcagctctgatgtttcagctatagtaaccagaagcccttatggtattagaatatcagtagtggcaaaaaaaaagtctgacttacacagaaagctttagttgaagaatctggagccatttgtgtaggaatgcagtttaaagatctttgtattacatgttaatatgttcaagagaacattcacagtgagagagacactaacctaattagacaaaatgatttggctagttgacaaaagccagcatctataattggctaccccagtgctggcacaatgagcctaataatagaagtaccatgatgacagaaattggggctatgtatgggcccaagagtggactcccactaaaaaaraaaagcagataaattacttccactgatggtattcaaccaaaagcatgaccagcactgagtctctcgtatagaatcatctttgaaagaaaccaaccagccacttggtggtaagttgataacaaaccatcagagtggcagcaattcatcttgactgtatgaaatcacatccataggtataagttattctttcctgtctacatggactcggctagattacagag

SEQ ID NO: 92961 - DNA, 399 bp, Homo sapiens
cagaaaacawggctcacaaggttaggtgatatgttcaaggtcacataactaacagagcataaggtcagatatgaacctgcctatatgactccaacttcaccaacagatatgttatttgagttaactatttgataagcaagacatcttagtaaaaaggatttagtgatgggggaagttatctgtgtaacacattcacataggatatatcgggctttcattggcatggttattaagaattatctataaatacttcggaagaagaagctttaccttcccttaaagcaagcaaaactctaaggatggtcttcttaaaaatctgcaatggaccctggaacagtaaacttttcctgagtgttattataatatattcttcttttgaaagatttctggatgacatta

SEQ ID NO: 92962 - DNA, 516 bp, Homo sapiens
aatcctgcctcgtagtgattatggtctacttgaggagacagtaattaatcaaatagtggtacaagtaaatataaaactacagctatgctagatgctttgaaggagaggtgtatggttcctggagaatacaaaacagaagtttagtaaagtcgaagaaaacttccctgagaaagtaccaattgagcattgattaattaactaaagtgaagaggaaagagcattccaggaagtgatgtgaaggcctttatgaagggaggatgacaccataagggacttgaagaaaggacttgaaaaatggcagtatgtctggagaagmagcagtggggataaaacgtgagatggtgctggggaagaaggcgggggacacataacacaagatcataaagatagatttttctgcatagcatggaaacatgtcactaattaaaaagtacaaggaaactgccaagttagcagggtcagtgcatacttcgatatcaacacataactaggttgtcccagttgattcctaccatt

SEQ ID NO: 92963 - DNA, 693 bp, Homo sapiens
aggtggattgctagttactgttggaaatttaagttatggtaaagatataaacatcggaaagagaaggatagtgcactttgcagtatttcagcatgctctaattcgtgacatttgtctgacttgatcttcatatcatcaaaagtattcaagtgattctgggaagttggaagagtaggaagcaccagaaatctgtctccccacctaaagcactggcagaatcagtctgatgtaactattttaagactcagtccattaaaggcttgcagattccaaggggaaggtttctgtggtaaattgtggttaatttggtcaatttcagcttttaacacagtagccactaccgatcccccaccttcaacccagtggcaggcagctgtgcatatgattctggggcagcttacacacagcttgaaggagccagactggccaaaaatgaccctttcctacaaatagcagggatctgtgctctaatcacttattgctgtttctgatcacagaggtgcagtgaggccagcagtcatggtttatgcacctcctcccattgttgcaagcccctcaccctctgtctgaagtgactgccaaggrctacagtgttcttatttttacttcccttcatttttctcttttttcctttttgggagccagacattaaagactataacattcaaaagaaactgcatatacagcgaaaat

SEQ ID NO: 92964 - DNA, 613 bp, Homo sapiens
aatataagacttagatcatttttctgactttataattcactaattatgaatcttttaataaagcatacaatttgtatgtatgtctaatattcaaattacttgctttctttttctggccgactttgcaaactcaggtaatgaccaagaggacattcatgtatattacatcacttggtcttcaaaacagccttgcaagctgaacaaaggccatggcctccattttgcagatcagatcatggaggattagctaaactcacagactgctcatggctcagtgcacctttttgcagtttcctaagtcctaggctcacatttatagagggttatcttcctctcaagcaccctcctcttaayttcagaaaatagccaagttttgggttgaaccaacacttccctgataagccattctctcactaccacctgttgcagctgccaccactgtggactttaaaatgcatttttgcagactgactcagttactccattatcccaagtgctccccagagaattttaagggagagattaagaaacacacaaatagaaaacaaacccaaaatcagttacattggtataaagaaaagaattaacttttcccttcttttacccagtaaag

SEQ ID NO: 92965 - DNA, 613 bp, Homo sapiens
aatataagacttagatcatttttctgactttataattcactaattatgaatcttttaataaagcatacaatttgtatgtatgtctaatattcaaattacttgctttctttttctggccgactttgcaaactcaggtaatgaccaagaggacattcatgtatattacatcacttggtcttcaaaacagccttgcaagctgaacaaaggccatggcctccattttgcagatcagatcatggaggattagctaaactcacagactgctcatggctcagtgcacctttttgcagtttcctaagtcctaggctcacatttatagagggttatcttcctctcaagcaccctcctcttaatttcagaaaatagccaagttttggkttgaaccaacacttccctgataagccattctctcactaccacctgttgcagctgccaccactgtggactttaaaatgcatttttgcagactgactcagttactccattatcccaagtgctccccagagaattttaagggagagattaagaaacacacaaatagaaaacaaacccaaaatcagttacattggtataaagaaaagaattaacttttcccttcttttacccagtaaag

SEQ ID NO: 92966 - DNA, 749 bp, Homo sapiens
tgaattgctgcaatctcatgataaaacgtgaacaaatgatgggttgcttcttatggatgagcaaagaaagtagtttcttgagataaaatctactcttggtgaaaatgctgtgaacattgttgaaatgaccaccaaggatttagaatattatataaacttagttgataaagtagcagcagagtttgagagaactgactccaattttgagagaactgactccaattttgagagaagttctactgtgggtgaaatgttttcaagtagcattgcatactacacagaaatctttcatgaaaggaagtcaatttcaatttgatgtagcagactttattgttatcttaagaaactggtacagccaccccaacctttagcaaccaccatcartcagcagccatcaacactgaggcaagatgctccaccagcaaaaagattatggctcactgaaggtgtagatagttcttaacattttttagcaataaaatattttaaaattaaggtatgtacactgtttgagacataatgctatttcacacttaatagactacagtagagtgtaaacataacttttatatgcaccaggaaaccaaaaaacttgtgtgactcattttattccaacatttgctttattgtggtggcctggaactgagcctgcaacatctttgaggtatgcctgtatatactggcatttatctctgagctagatcaattctctcattcatggcagtgcaccatttcctaatttagatgca

SEQ ID NO: 92967 - DNA, 607 bp, Homo sapiens
cttagcccctagtacctggatgttgagagggataaaggagacaaggctatagtcttcgatgagctgcactagcttctcattgagctggcggtagtggcggaagaaagggtcagaagccaggtggtcaagcaggtaggagaggtccagaacctctgtgtagtagtccaggttgaaggctaaagagagaaaccagtgttcaggagcaaccagtatcaggctaaagacctgaggacgaggttcctttttccttttttcctttgtgcactcatgcactcaaatatttcttgacacagtaaaatgaagttactaagaaaaaaagcatttggttttacctgctggctctgctatttactagctatataggcaggtatctacttcataggactgttatgaagattaaatgctataaaccccagtgtctggtacagagaagtgcttgatcaataactgcaaacaggctgggcacggtggctcatgcctgtaatcccagcactttgggaagccgaggtgggtgattacctgaggtcaggagttcaagaccagccaacatggtgaaactccatttctcctaaaaatacaaaattaggccaggygcggtggctcaagc

SEQ ID NO: 92968 - DNA, 1150 bp, Homo sapiens
aaaaagtagccgggtgtggtggcgggtgcctgtaatccctcagctcgggaggctgaggcaggagaatggcttgaacccaggaggtggaggttgcagtgagctgagattgcaccattacactccagcctgagcgttgcagcgagactctgtctcaaacaacaacaacaamaaaaaaaaaaccacaaagattagccgggtgtggtggcatgcgcctgtagtcccagcttctcaggaggctgagacaggagaattgcttgaacccaggaggtggatggaggttgcagtgagccaagatcttacaccactgaactccagcctgggtgacagagtgagactctgtctcaaaaacaaaaaacaaaaaacaaaaccaagcccttcagtctggttaccaggctgctctggtcacctgacccgcattaccccatcaggtcagggactgtgccatttgatgccagctgtgcatggaacatgcaatctttgctgatctgggagccatgtgggatcccaccttctgaatggcactcatccccttgaactcagaccctggatcccttccctggaactggggaacctgaactgccatccctgcctaagaggctggggaaggagcttcccactctggtccctgggtctggagacctgtccctcagcatcctacaaccaagcagctgggaccagcctagcaatccctcttgggcctggaagcttcaggcccagccagagagcctgctaaggtcggggtgggaggatcccaggatccccacccctgggtggtggggggacagcagccagccagagctggagcttcaacgtgcatgagcaggagggacctgatccagaactcaacggctgagaaactattcagtgcatgtttatgatgtgtctgcagtgggtcctgggctacaagacaccatgtgacctgacccttacacatttgtttttaaactttgtaatgtgaaatatctcatacattgagaagaatatatgtatgtgtgtgtatgtatacatgtgtgtatatgtgtatacatatatacatataaaatatacatgtttgtacatatatctagataaaagtatatgtatcatttaaatattaaaaatgtaatgaacaggcgggtgcggtggctcatgcccgtgatcccagcacttt

SEQ ID NO: 92969 - DNA, 348 bp, Homo sapiens
gcagccctgctgccgctagagcccaccagccacctccccgtgastgtcacgtgcctgtgtgtacaaatgtatcgaactgactgtatttctgtagttacagtgttcaaaatagtagcacccttttacttagtgtttactatgtgccaggctctgtgctaaccgctttcatgcattacttcattttatccacaattgtgtaaggtaggtcctttttttattattttttttatttttttgagaccaagtctcgctgtcacccaggctggagggcaggggcacgctctcggctcactgcaacctccacctgcccggttcaaacgattctcctgcctcagcctcccgagtagc

SEQ ID NO: 92970 - DNA, 574 bp, Homo sapiens
tggctctgtcacttgggctggaatgtagtggtgcaatcatagctcactgtagccttaacctcctggtctcaagtgatcctgccacctcagcctcctgagtagctgggactataggtgcacactgccatgtccggttaattattttttatttttgcaccatgtttagctagtacccaaacatgtcagagagcccagcatgaaaccttacacaaaagagtacaaactgtatgatttgagattcttccaaactgttgaatgtattcgtagttgattcctctttctcgctgagtagtatttcattrtataaatatgccaccatttgtttatccatttccttgttgatagacatttagtctctctctggttttttattcttgtgaataaagctatgaacattcatgtacacgtctttctgcagtcaaggatcatttcttttttcttttttttttgagacagagtttcgctctgtcgctcaggctagagtgcagtggcgcgatctcggctcactgcaagctccgcctcccgggttcacgccattctcctgcctcagcctcccccagtagctgggactaca

SEQ ID NO: 92971 - DNA, 574 bp, Homo sapiens
tggctctgtcacttgggctggaatgtagtggtgcaatcatagctcactgtagccttaacctcctggtctcaagtgatcctgccacctcagcctcctgagtagctgggactataggtgcacactgccatgtccggttaattattttttatttttgcaccatgtttagctagtacccaaacatgtcagagagcccagcatgaaaccttacacaaaagagtacaaactgtatgatttgagattcttccaaactgttgaatgtattcgtagttgattcctctttctcgctgagtagtatttcattatataaatatgccaccatttgtttatccatttccttgttgatagacatttagtctctctctggttttttattcttgtgaataaagctatgaacattcatgtacamgtctttctgcagtcaaggatcatttcttttttcttttttttttgagacagagtttcgctctgtcgctcaggctagagtgcagtggcgcgatctcggctcactgcaagctccgcctcccgggttcacgccattctcctgcctcagcctcccccagtagctgggactaca

SEQ ID NO: 92972 - DNA, 801 bp, Homo sapiens
tacgccctagcttgcctgggacacttccagtttatttctgttattctggcttacttattgatagtcctttccatcccttcactttcaaagatctcctggtttggataataaatacattcatcctacatatagcattttacacttaatttttcctagagcaaagattattttaaatctartaattcctaagaaattataatcacaaattacaaattataattataatcacaattttaatatgtctttgacttggaacccaggttatatgcaatgcagcagaagatactgaatattttatctgcaatctgaataaattacacagattggcatctaaactatgaaatgttttcacagaaaattttctagtggcattttattaatggatcataatatagcaaaagagagaaaggaagaaagatttgcaagaccgaaagatgaccaaagcaaatggaaacctgtgctgggccactggtgggcagggtcactggtgggcagtatctgctgggcagtcactgctgggcggggtcactggcaggcagtcagtgatgggcagggtcactggtgggcagtcatggatggccagggcaggatggataactctgacatcaagtgtgcttatgctgtgccctcgatggtttggaagctccttccaaatctgataaggaagataaaaggatcttattttgattgactagaaaatgatttttttttttttttgagatggactctcactctgttgcccaggctggactgcaatggtgcaatctcggctcactgcaacctccgcctcccgggttcaaa

SEQ ID NO: 92973 - DNA, 690 bp, Homo sapiens
actgatctctagttttattattctgttgttcctgaatctctcacaaatcaaaatccaatttcataagtgctttctctcttcaatgataaggagccagatgtctgcttcctcactagaagggtactgggagagagacttcacttgatctggtccagaggggctggcagatggcaaccacagggcggtgggcctggaatctgaagacctggaaaacccatggtttaccacggaaaccatgacaggacctcacgttaacacccagccttccctttcctccccgagcctcccaagccccctcgcagtgaaaggacagaggccaccgtgctggcagctggaagcccactctgtggtttgacctttattgtcctcccacatactgcagagtgggctgcgctgctattactcaygggccgcctcgctcgcagcactgagggctggggaaatcacaggcactggcagcttctgactggttccagaagagcctcgattaacatcaactgcagaccaaagcgtttcccatccacaccttcccttctcttctgaacacagggatctctcctgcaattgcttttgagaagaaaaggacttcatggcagcctctcttttctccccaacaaccacaccttttaagaaactattgtcgcgatcctactttgaagacattcaaaaagttttctaatagctgcagac

SEQ ID NO: 92974 - DNA, 724 bp, Homo sapiens
ccaacttttcctctcacaatcctaacacttaagagatggtttcgtctcttcattccacttgcaaaattcgcagaaaacagctgtatcctaatttgggtctggtggttattcctgaaccaaggacttactatggccaggagcagcatggagacatccctggcccaggaagagccactcatccacctctaaaccaagcaaatatggccagrggcagcaccacgtcctaacacaacttccccacaacaatgaggatggccctgagaaagcagtggagatgctgtaacagagcagaccacttacacaggccatcccactagaggctgtctttatgtcagattactttacctttcaattaataaacgtgtaaatacctcagtgcagaaaaatctgaaatagaggcaatttaacttgcagaactgagaatctgtgccaaactaacttcagtttctcttttcctgcaccgaaatcattcttctccttccacattatttaaagagagaggccgggcgtggtggctcatgtctgtaatcccagaactttgggaggccaagacaggcagattacctgagatcaggagtctgagagcagcctggccaacatggcaaaaccccatctctactaaaaatacaaaaattggccaggcatggtggcacacacctgtaatacgagctactcgggaggctgaggcaggagaatcatttgaacctgggaggcagatgttgca

SEQ ID NO: 92975 - DNA, 724 bp, Homo sapiens
ccaacttttcctctcacaatcctaacacttaagagatggtttcgtctcttcattccacttgcaaaattcgcagaaaacagctgtatcctaatttgggtctggtggttattcctgaaccaaggacttactatggccaggagcagcatggagacatccctggcccaggaagagccactcatccacctctaaaccaagcaaatatggccaggggcagcaccacgtcctaacacaacttccccacaacaatgaggatggccctgagaaagcagtggagatgctgtaacagagcagaccacttacacaggccatcccactagaggctgtctttatgtcagattactttacctttcaattaataaacgtgtaaatacctcagtgcagaaaaatctgaaatagaggcaatttaacttgcagaactgagaatctgtgccaaactaacttcagtttctcttttcctgcacygaaatcattcttctccttccacattatttaaagagagaggccgggcgtggtggctcatgtctgtaatcccagaactttgggaggccaagacaggcagattacctgagatcaggagtctgagagcagcctggccaacatggcaaaaccccatctctactaaaaatacaaaaattggccaggcatggtggcacacacctgtaatacgagctactcgggaggctgaggcaggagaatcatttgaacctgggaggcagatgttgca

SEQ ID NO: 92976 - DNA, 1484 bp, Homo sapiens
cgggagcccctaccttacagtatgtgtgtgtccttgtgtctgtggggttccctctcctcagcccaccttctgtcctcgaccccccagaacttgactcctgctgcacagagctgggactccccagagtttgagttgggaaaggagggactccccctaagaagtcttttccatcctcctcccttgaaagctcaggaagttctttctgataccaagtcacatgcagctgccatccagcaaacaggggataggggagaggggaaggcacacagtcagaaatggcttgcaggggtcttgggccagaactcagggcagctctactgaggaaacttgaaagttccgggaatggagggtggtagggagagaagagtcatcagtattgtgcaatggacagggggaagcaggaaaggggacgggggaggaaagggatggctggtctctggaggacaggcaaaggcctggggctgtgggctgcccatcacccccttcctaggggcctgcccggccagagttcaaagtcgctgtcaccccacccctcattaaccctagtatcaccaggctggagtggcagtgtttttatgggcaaagcgacgcgaatgtgccccttccttccctgctacctcccccaagcagccaacatcttgctgtctctgaggccagaagaggaaggaggctgttgtgaggaccagaggtggaagagaaagcaataagcagtcatcccgttttctccatagtttcttcttcttccttctccttcttttcttcttcttttttttttttttttttttttttgagacagggtcttgctttgtcactcaggctggagtgcagtagcacaatcacggcttactgcagccttgacctctggggctcaaatgatcctcccacctcagtctctggagtagctgggactactggcgtgtgtcaccatgcccagataattttttattttttaaattttttgtagagacgaggttttgccatgttgcccaggctggtctcaaattcctgggctcaagcgatcctcccacctcagccttgcaaagtgctagaattacaggtgtgagccactgcagcatagtatcttggyactgccttagtccctaggagagaggaaagatgggacttctctcttggactgtgagctccctgagggcagggacagcttccgggtccccagcaccccacgaaggaactagcactaaaaagggctcatccctgctgatgggggatgggaaattttatccttgaaggggactcttccccttgtgacccatttcagggttcccaagaggggagggctgtggggcttccccacagggcagcaccgggaatctgtggcagcaggaacaaaaagaggaagttgaagtcttgttgggccctggagttcagctctcctgtcctagacaagcagccctgccaacatgggggatgaaggccccggggggtaggcatggtctacaggctgtccatgacagggctcaggt

SEQ ID NO: 92977 - DNA, 1484 bp, Homo sapiens
cgggagcccctaccttacagtatgtgtgtgtccttgtgtctgtggggttccctctcctcagcccaccttctgtcctcgaccccccagaacttgactcctgctgcacagagctgggactccccagagtttgagttgggaaaggagggactccccctaagaagtcttttccatcctcctcccttgaaagctcaggaagttctttctgataccaagtcacatgcagctgccatccagcaaacaggggataggggagaggggaaggcacacagtcagaaatggcttgcaggggtcttgggccagaactcagggcagctctactgaggaaacttgaaagttccgggaatggagggtggtagggagagaagagtcatcagtattgtgcaatggacagggggaagcaggaaaggggacgggggaggaaagggatggctggtctctggaggacaggcaaaggcctggggctgtgggctgcccatcacccccttcctaggggcctgcccggccagagttcaaagtcgctgtcaccccacccctcattaaccctagtatcaccaggctggagtggcagtgtttttatgggcaaagcgacgcgaatgtgccccttccttccctgctacctcccccaagcagccaacatcttgctgtctctgaggccagaagaggaaggaggctgttgtgaggaccagaggtggaagagaaagcaataagcagtcatcccgttttctccatagtttcttcttcttccttctccttcttttcttcttcttttttttttttttttttttttttgagacagggtcttgctttgtcactcaggctggagtgcagtagcacaatcacggcttactgcagccttgacctctggggctcaaatgatcctcccacctcagtctctggagtagctgggactactggcgtgtgtcaccatgcccagataattttttattttttaaattttttgtagagacgaggttttgccatgttgcccaggctggtctcaaattcctgggctcaagcgatcctcccacctcagccttgcaaagtgctagaattacaggtgtgagccactgcagcatagtatcttggcactgccttagtccctaggagagaggaaagatgggacttctctcttggactgtgagctccctgagggcagggacagcttccgggtccccagcaccccacgarggaactagcactaaaaagggctcatccctgctgatgggggatgggaaattttatccttgaaggggactcttccccttgtgacccatttcagggttcccaagaggggagggctgtggggcttccccacagggcagcaccgggaatctgtggcagcaggaacaaaaagaggaagttgaagtcttgttgggccctggagttcagctctcctgtcctagacaagcagccctgccaacatgggggatgaaggccccggggggtaggcatggtctacaggctgtccatgacagggctcaggt

SEQ ID NO: 92978 - DNA, 1495 bp, Homo sapiens
tgtgtttcggctgtagtgcttggttgcatgttgtgtgtccatggcgtcaacatgagtgtgcaagcgagcatgtgtgtagataggtgaatcccgagcttctcagtgtgggtgtgtgtcagcgcctgtcttgatgtacrgacacgggtgagcgtatcttgagtttgtgcgtgaagggtgtgggtgcaggcaccagtgcaccggtgggcacgtctccgtgtgcatgtgtgtgcgagtgcgactgcacggacgctgccgtgtgtgcgccagcacaggtacaggtgtacgtacgggtccgcgtatctttgtacaacggtgtcgacgtggatccgagtgtcgtcgcctgcgcgccctttccggctgtgtgcagctgctgctctccagccccaggcgctgtccgctaaaggccctcctccctcttttctcttgtcccggccacccaggggtctgaatccagccactcaccgtggcggcggctctggttgcggcttctctccgcgcccgacccacctgggaccggtcgcgacacctcgcctgccagcagggctcagggccgggaaagccccttctcggccccccggaggggggaattcccatgacgtttccgtgcgtcacgcctcgcgccctttttcattggctgaaagtttaactctggactggcgcagccaacccggagcgactcgggcgcgcccctgagaggggacaggctcactcagggcggggagcggggtgacaggacaccaggcgcgagttcggccggccaggggaccgccgagaaggtacccgctgacccagcgccaccccgggccgggagcttccgctgcctctcggctttggctgcgcctaacgcttggctttctctgaagcgggggatccccagggggaagccgacggccccagccctcggggcccccaccctgagcggcgcgctgccgggaagttagcggaagaggaaggaagttattcttgcggtcggtcccgggcgccctctggcggcctccctgggcccgcgagtagactccattcggccccggcccctctctcgctccgtctcatcagcctcaaggctccgggagagacagtccggacctcgaacttttttagaagtgacaggttcccagcgggccagggctcaggagctctgctcaggagaagggaaatgaagtgtttatccaccaaggagatctggaatattagaactgaaaaaggcatccagagtttaaacagctcaaatttccaccgatgtgggaaatcgcctcttttttttagtctcaggctggaatgcagtgaggggattttggctcactgcaacctctgcctcccgggttcaaaccattctcctgctgcagcctaccgagtagctgggattacaggcggccaccaccacgcccgcctaatttatgtatttttagtagagttgggggtttcaccacgttggtcaggctggtcccgaactcctgacctcaggtgatccgctggcctccgccttctaaaatgt

SEQ ID NO: 92979 - DNA, 2397 bp, Homo sapiens
gcccaggagttcaagaccagcctggacaatatggggaaaccccatgtctataaaaaatacaaaaattctcctggcatgttagcacacatctgtagtcctagctactaaggaggcttaggtaggaggatcacttgagccccagaggtcgaggcagcagtgagccatgattgcaccactgcaccccagcctgggcgatagagcaagaccctgtctatttaaaaacaaaaaaagaaaaaaaaaagtttaggttctcagccatcccctgagctttaggctcaggaactctctgatttcaggtaccaagaaagagaaaatgggctgggcacagtggcccaagcctgtaatcccagtactttgggaggccaaggtgggtgaatcacctgaggtcaggagtttgtgaccagcctggccaacrtggtgaaaccccatctctactaaaaatacaaaaattgctgggtgtggtggcaggcacctgtaatcccagctactcaggaggctgaggcaggagaattgcttgaacccaggaggcagaggttgcagtgatccgagatcatgccactggactccatctggcctggatgacagagtgagactctgtctcaattcaaaagaaagagagagaaaaaataacaacaatcttataattcctgtgactaaaattagggggtgttcctgcattacaccatgccacctctggagcaactttctctgtcactcacaaagctttttcatatgcctgccctttccccctacttaggctccccctttagaactaaacagctctggaaaggatccttcagagcagacctagggcaggagctaggcaagacccttgatggtgacaacttatttggctatttctcgtggctatttaatacatgaatgggagctgagttccctgcttaatagcatttgtgttcatttccagcgtggtgccggttgtctgacctctagcttctcccctcttattctgtacagctgaaattctccctcctgcctaccccccagctagtcagcctccagtcctgtttagtttatcttttttctctcctaatgcctgttaagctggaaacaggattcttgctcgtcgtcatattattttaaataagaatgaaactaaagaagaggtctttgggccaggcatggtagctcacacctgtaatcccagcactttgggaggccgaggctggcagatacctgaggtcgggagttcgagaccagcctgaccaacatggagaaaccctgtctctactaaaaatacaaaattagccaggcgtggcggcgcatgcctgtaatcccagctactcgggaagcctcaggcaggagaatcgcttgaacctaggagacggaggttgcagtgagccaggatctcaccatagcactccagcctgccaacaagagcgaaactccatctccaaaaaaaaaaaaaaagtcttcaatctgctgtaatgtggcactcagatatgagtattggcggcagtgagtgttcatttcctcctcctgctcccctaattcagttgcgcctgaacacaaaactccaaaagcaaccagagagagaagctgtgttgaaagatgaaaggagaaaaggccacaagctttggccctacctggttcttgttctgagtcaaaaactcttgtttccaggcccctcgtctatgaaattagtagatttatactagtgattcccagagtatggtcccctgctcggtggtgtttaacttcaactggggtcttgttagaaacacaaattctcaggccccactctgggcatacaaaatcaaaactttgtggtatgggtccagcaattgagaaccacagttttacccagtggattttgtgttgaggagctcattaaaaccagttatggggccgggtgcagtggctcacatctgtaatcccagcactttgggaggccgaggcaggtggatcacctgaggtcaggagttcaagaccagcctagccaacatggcaaaaccccatctctactaaaagtacaaaaaaaattagctgggcatggtggtgggcgcctgtaatgccagctactcgggaggctaaggcaggaaaatcgcttgaacccaagaggcggaggttgcagtaagctgagatcacgtcattgcactccagcctgggccacaaagtgagactctgtctcaaaaaaaaaaaaaaaaaatcagttgtgggcaaaaattctcaggtagctcaaggagccacgggttagggaactgaagaggaaaaactgtctctcaaagctagacaggctgccttaccttttatctctctcctctccacatcacttaatctttcctttttcgctggagcagatcccacccatgagggcacagcagagggcatggagaacatggcagatgctgtcacccatgctcgttttgtgggcac

SEQ ID NO: 92980 - DNA, 2413 bp, Homo sapiens
ccacctataagacagagaatggggaggcaaagaatccaaaaactagaagaaaagttgctgagagaccagggtgggaaaggaagaacccaggaataactattaactcaattttttcagtaaatatctggagtgccttagggagagttaracatgaagaggttgtggatgcagggagaaaaatgagactgggattctatgaacaagtatcttatgtaagaagactggaaagaagaaaaaagtggaaatgagaaatgctgctggttttataaatggatataatcataaaatctaacatttacttagcacttatgatgagccaggcattgttctacgtgtcttacctacagtttctcaattaatcttcccaacaaccctttggggtaggtactcttagtctttcatgttacagttatggaaacataatcatcacatgttgccttcacttgccaaggtcatacagcagtctggatgcagagaccatgaacacaaccaccatgctatactgatttacttcgaaccaggaagtaaaattctttctaaattacttttttcagcctagctcaatgtgtttaacatcgctttttgaaatgtatacaactaagatcccaaaccatgtaagtcatagcttcaatatgatcctgtttgggtaagaaaggtgctgtcccagatgaaagtgcagtggtcaactaactatgcctctttaccccttattaaaaccatcactttgcacataaagcaacagtgatatttcccactgatggtaaagtgttgaaatgagagtaaagcacaaatcatagccaaatctaagccaggatattcctaaaataaaactaaaaaatcaaaacgacatcgtagtattccatttctatgtatgcaccccctcaggccccagttgctaccaggaccactcgttcgtctaatccatgtggcacctttgagtgaattagaagaatggacacagacttatgcttacacacaggtaggccagcaacattcaagctggattacagtccccactttccccataggccagatatccttatgtagtgaccaccctaccccacaatactggtttggaggctgctgctgatggtggccctaaggtttgcagaggagcaatactggaagaaacaaaggatgggtgacctgtcccagtctgatgttcccagcaacttcctctcctccagtgtggaagctgagacccagggtattctgtgaaggagcattctttacaggagcaatgaagtagaactgccttaatgttcaacacgaagggaatagttaactaaagaactgtgcatccctaaaatgggtaaaatattgttcagtcattacaaccacttttaaaagtggacaaactgtcatcatgtgatgtgaaaaagcagcatttacagaatgtaaagtgtgtctccattgtgtgtacacacacacctttttcatgtttccatggttttcaaaaatttagggaatgtacattaccgtaattatcagaaaataattttatttttgaaagaaagtaattcggcagggtgagattccaaagaattatggatcctgaggttatctggcacagaggaagaaacagcttcaggcttcagccctgggcatgtctctgattttaaaactctgattttttttttccgaagaaacggatggccctgctcttccctggtcacctcaagtcagtgactgcctctcctgaccactgttgtgcgggaaaagggcagccccttacccagaaaataagaggacaagggccgtcgctcaggtgcgcaacctgcctgggtcctgccccagacctgggaggaggacctgtgggctccccaaaccggtggcagctcctcctggaggggcctgctccactgggaacaaattaaagctaccctgcctgccctcatctcaaagttgatgtttctggtccccacccacttgcagcaccgctttcaccacttcctactggcattttagcacttttactgttgttattggtttttctgtttgtttgtttgtgaagaggcctcatagtctagggtaaataccagaggttcattgtctcatgctagggaaatcgaggatgcggacacacaagaagtgagtttaagagtggaggtttaataggtgaaagaaagagaaaagagaatagctctgtctcctgcagagagagacgggtgcccaagtgggtcttcgggtttcctggtgaaacgcacagggttttatagacaagcttgaggaggcagtgtctgattaacatacggcctgagagattgctcggaccaggtgtgctgtttgtatagagtgtgaagaagctggccatcccccgctaatattttattatgcagatggggtctctaccagtccggaccatgttgcctgcctttttactgcccaagtggcgacaaagaaaagagaagag

SEQ ID NO: 92981 - DNA, 2413 bp, Homo sapiens
ccacctataagacagagaatggggaggcaaagaatccaaaaactagaagaaaagttgctgagagaccagggtgggaaaggaagaacccaggaataactattaactcaattttttcagtaaatatctggagtgccttagggagagttaaacatgaagaggttgtggatgcagggagaaaaatgagactgggattctatgaayaagtatcttatgtaagaagactggaaagaagaaaaaagtggaaatgagaaatgctgctggttttataaatggatataatcataaaatctaacatttacttagcacttatgatgagccaggcattgttctacgtgtcttacctacagtttctcaattaatcttcccaacaaccctttggggtaggtactcttagtctttcatgttacagttatggaaacataatcatcacatgttgccttcacttgccaaggtcatacagcagtctggatgcagagaccatgaacacaaccaccatgctatactgatttacttcgaaccaggaagtaaaattctttctaaattacttttttcagcctagctcaatgtgtttaacatcgctttttgaaatgtatacaactaagatcccaaaccatgtaagtcatagcttcaatatgatcctgtttgggtaagaaaggtgctgtcccagatgaaagtgcagtggtcaactaactatgcctctttaccccttattaaaaccatcactttgcacataaagcaacagtgatatttcccactgatggtaaagtgttgaaatgagagtaaagcacaaatcatagccaaatctaagccaggatattcctaaaataaaactaaaaaatcaaaacgacatcgtagtattccatttctatgtatgcaccccctcaggccccagttgctaccaggaccactcgttcgtctaatccatgtggcacctttgagtgaattagaagaatggacacagacttatgcttacacacaggtaggccagcaacattcaagctggattacagtccccactttccccataggccagatatccttatgtagtgaccaccctaccccacaatactggtttggaggctgctgctgatggtggccctaaggtttgcagaggagcaatactggaagaaacaaaggatgggtgacctgtcccagtctgatgttcccagcaacttcctctcctccagtgtggaagctgagacccagggtattctgtgaaggagcattctttacaggagcaatgaagtagaactgccttaatgttcaacacgaagggaatagttaactaaagaactgtgcatccctaaaatgggtaaaatattgttcagtcattacaaccacttttaaaagtggacaaactgtcatcatgtgatgtgaaaaagcagcatttacagaatgtaaagtgtgtctccattgtgtgtacacacacacctttttcatgtttccatggttttcaaaaatttagggaatgtacattaccgtaattatcagaaaataattttatttttgaaagaaagtaattcggcagggtgagattccaaagaattatggatcctgaggttatctggcacagaggaagaaacagcttcaggcttcagccctgggcatgtctctgattttaaaactctgattttttttttccgaagaaacggatggccctgctcttccctggtcacctcaagtcagtgactgcctctcctgaccactgttgtgcgggaaaagggcagccccttacccagaaaataagaggacaagggccgtcgctcaggtgcgcaacctgcctgggtcctgccccagacctgggaggaggacctgtgggctccccaaaccggtggcagctcctcctggaggggcctgctccactgggaacaaattaaagctaccctgcctgccctcatctcaaagttgatgtttctggtccccacccacttgcagcaccgctttcaccacttcctactggcattttagcacttttactgttgttattggtttttctgtttgtttgtttgtgaagaggcctcatagtctagggtaaataccagaggttcattgtctcatgctagggaaatcgaggatgcggacacacaagaagtgagtttaagagtggaggtttaataggtgaaagaaagagaaaagagaatagctctgtctcctgcagagagagacgggtgcccaagtgggtcttcgggtttcctggtgaaacgcacagggttttatagacaagcttgaggaggcagtgtctgattaacatacggcctgagagattgctcggaccaggtgtgctgtttgtatagagtgtgaagaagctggccatcccccgctaatattttattatgcagatggggtctctaccagtccggaccatgttgcctgcctttttactgcccaagtggcgacaaagaaaagagaagag

SEQ ID NO: 92982 - DNA, 571 bp, Homo sapiens
acagacctagtcaaaggtggaaaccgagaacagattcattccctagagaatttgagctctgtgcaaacttctccaaaataaggttagacatactaaagggcaaaaatatatggctcttagcttgagttgcaagcctaggtatatgtaaggcttctcaracaaccttgtctgacactacagatagaaaaaaagagaagggcttgatttaaaaatatacatcatttttgcagaaagcaggctattgttatgtggccatggccctgaaaagatgctcatgtcctaatcctcggaacctgtggacatgcgaggttatatggcgagggggaattaagattacagatggaattaaagttgctaaccaactgaccttgagacagggagattattccggattatgaaggcaggcccactgtaatcacatgggtccttatatgggaaggagggaggcaaaagagtcagaaccagaaagcattaagaaaaagactctattgtcccttgctggctttgaagatggaaggtaccacagccaaggaatgcaggtgaattacagaagctagaaatacaaggaaat

SEQ ID NO: 92983 - DNA, 698 bp, Homo sapiens
cctaatgcactccctctccttgacacccctgccttgacaggccccggtgtgtgctgttcccctccctgtgtccatgtgttatcattgttcaactcccacctatgagtgagaacatgcggtgtttggttttctgttcctgtgttagtttgctgagaatgatggcttccagcttcatccatgtttctgcaaaggatataaactcattctttttaatgtctgcatagtattccatggtgtatatgtgtcacattttctttatctagtctaccattgatgggcatttgggtcagttccaagtaaaagtgtatcttttttaaaaaaacaagggatcgatttctgttcccagatcgggaggaggagggttacagtttttttaatatgggtcctaawtgtcccttaacaggcccaaccttcagtgttttatcatttgtgcttttattgaaaatgatatcttttcttctacatgattgttattagcattcaagaaagttctttaattttgagtattaattttgtattctatcatttgtttgaactctcttataaattctactatttttttcttttgaagctttcacaaatacaatcttaagtctacaccattttgtctccttaaattttatatcttttctttcttttgtctaatttattgacaagtacatctaatttttgaacattgtttaaaaatataatagtaa

SEQ ID NO: 92984 - DNA, 513 bp, Homo sapiens
actgaacatgccaatcacaccaatcacactgactgcctggagacacctcttcctggctcatgcctgctaagagctaattcaagagcaagattccatggtacctagagaccagcagtgcctactcaagagaagctcctgtagtcctgacccacatcgctcagtcccagatgacagtgacgaggagctgggtcccctgtcttgccgtggcgctctgaggaggccatgtcttctgcagcagccacagcatgatgcccatcaatgccyggagattttgtctcctcctgtgccatgcaaggtggtgcccattcagtaccaaggtcctggcatccagctcccaggactgtgggctgctgaggctgatggcaagtgcctccgtgcagtgcctgggggtggccctgcaggggagccctgcccagctaccactgggtctgggggcacaagccccactcctctgcttcagtgagggctgctctgaagggcccttccagtcctgagcctccgtggaagctgtcg

SEQ ID NO: 92985 - DNA, 513 bp, Homo sapiens
actgaacatgccaatcacaccaatcacactgactgcctggagacacctcttcctggctcatgcctgctaagagctaattcaagagcaagattccatggtacctagagaccagcagtgcctactcaagagaagctcctgtagtcctgacccacatcgctcagtcccagatgacagtgacgaggagctgggtcccctgtcttgccgtggcgctctgaggaggccatgtcttctgcagcagccacagcatgatgcccatcaatgcccggagattttgtctcctcctgtgccatgcaaggtggtgcccattcagtaccaaggtcctggcrtccagctcccaggactgtgggctgctgaggctgatggcaagtgcctccgtgcagtgcctgggggtggccctgcaggggagccctgcccagctaccactgggtctgggggcacaagccccactcctctgcttcagtgagggctgctctgaagggcccttccagtcctgagcctccgtggaagctgtcg

SEQ ID NO: 92986 - DNA, 648 bp, Homo sapiens
cttggctcactgcaacctctgcctcccgggttcaagcaattctcctgcctcagcctcccaagtagcagggattacaggcacgtgccactacacctggctaattttgtatttttagtagacaaggggtttcaccatattggccaggctggtctcaaactcctgaccttgtgatcctcccgcctcggcctcccaaagtgctgggattacaggcgtgagccaccacgcccagcctgtttgttttaatatttactgaaggtcacagtcacattttataacttattatatctgaatttagagtgattatacgctgtggatctcagggcctaatgttaattcatacttcggggaaatgaagagtatgataaattcaggccaatgccggcacctccctgcttttctgcatggtttgagaattgacccagcagttcagtccagttttgtgtaaggaaagctcacagtggccgggtgaggaagccaggggctgaatactgaagccacacaaagcgtggactcagcccctccgcgggagacaaaaaagatggatgtggacgatgagagrtgcccttgacatcgttctgtgagtagttagcgctttaggggcagcaaagccctcagctctgcagagctgcagagctgcagaggggaggc

SEQ ID NO: 92987 - DNA, 658 bp, Homo sapiens
tgtaaagaaaacggtgctgcggctgccccagtgagtcatttagatgctgggctgtttctgcttgctctgctgtgaggtcagtttcatgtgcttaagcaactttgcttcaggtcacaccctacgggacacccacggcagcctgccgcctactaatcatagagcccttcstgttccttttttgtctttttcttaaccaacaatgggtcatttagcaggacatttatttcagtcctaagttgtattatccctggtaatttgcatataccattattaaagtgtggcagtcttttgtaattattgtcttaatctagtgaaaaataatatatctgtatatctggagagaaggctgttctctggatgcagctgagcacttgcatgcactcgatgaacgggaataggactgcatgaggctgacctggatttgacaaccgcaccaggacaaggccgcgtgctgccctgaacagtggcccttgtgctaaatacgaatcctctctctcccacaggcatagcccgtcacctgcgtctggtttttgctcctcattttcttcaattttcactctatttatagttgagaaccttccatttccccctggttgaaatacattagttgctatggaaactgcgatccccccggtgtggatggagctgaatgacacct

SEQ ID NO: 92988 - DNA, 2056 bp, Homo sapiens
  misc_feature (1)...(2056): n = A,T,C or G
atagttactccagattgccaacactgtgatttaagcctttcacaaattacctgttgtaattcacaaaactgggtttcatattatctgtggcaactattttttttaaagattcctcaaagatgtaataatacttgcacaagtggtggcaactaggacagaatggttcaaaacaagaggaaagaacatactatgaaatgctatagagagccacctacgaaattcccacgtgtcagtagaacttccttccttccttcctttcttccttccttccttccttccttccttccctccttcctcccctcccctcccatccctgtcttcctgccctccttcctttccccctttcttcctttctttcattcattaattnnnnnnnnnnnnnnnnnnnnnnnnnnnnnnnnnnnnnnnnnnnnnnnnnnnnnnnnnnnnnnnnnnnnnnnnnnnnnnnnnnnnnnnnnnnnnnnnnnnntgggactataggtatgcactaccaggcccacctaatttatttattttttattatgtagagacagtgtcttactttgttgcccaggctgatctccaactcctggactcaaatgatcctcccaccccagcctcccaaagtgctgagattataggtgtgagctaccatgcctggcccggaacattttcaatatggttatggaaacattatcaactggacacagttgcttgatttctcagcttaattggagttatcttgatgtaatggaattgaacaaatgtgaccattgagctctcagacttggttttgaattccactttttccattgaccagctatgaggccttagtcaagttccttaatctccttgacccttagtctccttatctgtaaaatggcgatataatagtaccaatcatgctcaattgtcatgaaaattaaattaattcatgcatgtgaagtatttacattatagaggaagaaaaatttattttccttccactcgtctaagttcttggctgctaactctgtaacaaaagacaaattaacaaagaaaagcatcaatttttatttaatataaattttatgtgacacatttccttcataaggaaatgaagacttgaggaaacaattanagctgaatgtttttataggttcgatgaagaatggacagtcctggaaaaatgtgataagacaaaaaagagtatgtgctaagagtagtaaaccgaaggaaacgtagcaaggccttcttatttagattccttttgatgtccttccattttcagatatacagttgcttttttcctctgggttttgggaagggcacctctcacatgacgatcttatggcctgcttctggggaaaaggatggggaaatgtcagagagtccttgcatatatcatctctcaaaactcttaatcttaaatattcagtatgtcaaggtgccatattttggggtagcatgtcctgagctccatcaacattaatgtaaaaatatttagcctaatgcctggcacatatcaagagcttaagaaatgctgactctaaaattatgacatctaggaagatgtggggcagaattgtaaacttacctgctaaattacctatgagctgcccaccattcgttaattatggcaataataatgggtttatcatgctgtatcctcactcttgcaagcagtgttccttgtgcttagcagtaaatgttgcctaatttggggcatgctggtgtgtctgcagactgttcttgtatgtggaaaggtaactggcctgcttggctttttttttttttttttttttttktttttttttttttttttttttnaaaaaaaacaaagtctcactctgtcatccaagctggaatacagtggcccgatgacagctaactgcagccttgacctccagagatcaagtaatctttccacctcgacttcccaagtagttggggccacaggcatgtgccaccacacccagctattttatttttatttttatttttttgtaaagacagggcttccctgtgttgccaaggctggtcttgaattcctgagctcaagggatccttctgcctcagcctatcaaagtgctggaat

SEQ ID NO: 92989 - DNA, 2056 bp, Homo sapiens
  misc_feature (1)...(2056): n = A,T,C or G
atagttactccagattgccaacactgtgatttaagcctttcacaaattacctgttgtaattcacaaaactgggtttcatattatctgtggcaactattttttttaaagattcctcaaagatgtaataatacttgcacaagtggtggcaactaggacagaatggttcaaaacaagaggaaagaacatactatgaaatgctatagagagccacctacgaaattcccacgtgtcagtagaacttccttccttccttcctttcttccttccttccttccttccttccttccctccttcctcccctcccctcccatccctgtcttcctgccctccttcctttccccctttcttcctttctttcattcattaattnnnnnnnnnnnnnnnnnnnnnnnnnnnnnnnnnnnnnnnnnnnnnnnnnnnnnnnnnnnnnnnnnnnnnnnnnnnnnnnnnnnnnnnnnnnnnnnnnnnntgggactataggtatgcactaccaggcccacctaatttatttattttttattatgtagagacagtgtcttactttgttgcccaggctgatctccaactcctggactcaaatgatcctcccaccccagcctcccaaagtgctgagattataggtgtgagctaccatgcctggcccggaacattttcaatatggttatggaaacattatcaactggacacagttgcttgatttctcagcttaattggagttatcttgatgtaatggaattgaacaaatgtgaccattgagctctcagacttggttttgaattccactttttccattgaccagctatgaggccttagtcaagttccttaatctccttgacccttagtctccttatctgtaaaatggcgatataatagtaccaatcatgctcaattgtcatgaaaattaaattaattcatgcatgtgaagtatttacattatagaggaagaaaaatttattttccttccactcgtctaagttcttggctgctaactctgtaacaaaagacaaattaacaaagaaaagcatcaatttttatttaatataaattttatgtgacacatttccttcataaggaaatgaagacttgaggaaacaattanagctgaatgtttttataggttcgatgaagaatggacagtcctggaaaaatgtgataagacaaaaaagagtatgtgctaagagtagtaaaccgaaggaaacgtagcaaggccttcttatttagattccttttgatgtccttccattttcagatatacagttgcttttttcctctgggttttgggaagggcacctctcacatgacgatcttatggcctgcttctggggaaaaggatggggaaatgtcagagagtccttgcatatatcatctctcaaaactcttaatcttaaatattcagtatgtcaaggtgccatattttggggtagcatgtcctgagctccatcaacattaatgtaaaaatatttagcctaatgcctggcacatatcaagagcttaagaaatgctgactctaaaattatgacatctaggaagatgtggggcagaattgtaaacttacctgctaaattacctatgagctgcccaccattcgttaattatggcaataataatgggtttatcatgctgtatcctcactcttgcaagcagtgttccttgtgcttagcagtaaatgttgcctaatttggggcatgctggtgtgtctgcagactgttcttgtatgtggaaaggtaactggcctgcttggcttttttttttttttttttttttttyttttttttttttttttttttnaaaaaaaacaaagtctcactctgtcatccaagctggaatacagtggcccgatgacagctaactgcagccttgacctccagagatcaagtaatctttccacctcgacttcccaagtagttggggccacaggcatgtgccaccacacccagctattttatttttatttttatttttttgtaaagacagggcttccctgtgttgccaaggctggtcttgaattcctgagctcaagggatccttctgcctcagcctatcaaagtgctggaat

SEQ ID NO: 92990 - DNA, 542 bp, Homo sapiens
gtgaatcatacattttctaagacttattatagtagtactggctaacggagggtccattagccccaaaattaaacttattccttgaatttgaaaaaaatacctattcacatcaagaggacttactatcctttacagaatggaagaggataaatggacacacttggcaccaggtaggtagttagttcttctcaaaggatgatgtcctactcagtattgtctctatctggatagttgggcattcagcatctagattagttagaacagacattgtaaaygggagctcaagctgttggtcccaaacattgcttccatgtctgccaccatagctacttggctcaggagtttgttgtgacagcactggggtggccaattacagaggctgactgctatcaattggccaagtcatttagtctgcttgattgtatagaataacaaagcttggatttcatgcttctctaacagagaattatggggacctttcatgcagccacaagcagggactggtagaaagtcaccggggcaatagtggtgaataatacagg

SEQ ID NO: 92991 - DNA, 1146 bp, Homo sapiens
ggagagacagggaacccacccccagaaagagagaatgaatagtagtttgagtgatttcctcaagtcattggaaccaactgacagaagccttgattattttggcttttcccaatcctgcaatctgagaataagcaaaacaccaagaaagaaataaaggcaaaaagaaggaagggagaaagagaggaaaggaggaagggaaggagggagagaatggaaggcaggagagaagaaagggagggagggagggagagacaaccaaattcatataagaaattcattaagagcgatgttaagtgtgaaccatgtaccatctgcatcagagtcaccctaggtrcgtcataacaagacagaccctctgaagcagggtttgggaatctgaactgtgagcagtccctcagaggatgcttaggcactctgaagtcagaggcccactagtctggacactgcctaaggccagtccatgtgctcagacctctgcatctgctgctacatctccagctaccaaactacctaataatctcacatacagaagactggtcctaaggtgagacaaagtcccaagtcatcagataaagaggaacttatgttcacaatttgtcgtgggctttggagtgaggcagactccaatggaaagcccagttctccttcttcctagcagagactttagggaaattacttaaacccactgaacgtcagggtcctcatctgtaaaatcctcataggatggttgggagggtgatcaggtaggaaccatggctttctctaagctgccttttatttgctgacttttgagaggggacgtcttactcaggcacagtcacatgtgcctgtagccctagctactttggaggccaaggcaggaggatagtttgagtccaggagttcaagactgcagtgtgctgtaactgtgcctatgaatagccactgcttaggcaacacagtgaaaccccatctctaaaagaaaaaaaaaaaaagaccagacatcttagaaagattcttcaaatcctaaccctagttagacattagacattgaatgcctctcctagacttgactaatggagaaaaaatgcctttaagtgtttcatctgtttcatcttactcattcctcagaacattctgctgacatcaacagcctccaggcctttg

SEQ ID NO: 92992 - DNA, 1146 bp, Homo sapiens
ggagagacagggaacccacccccagaaagagagaatgaatagtagtttgagtgatttcctcaagtcattggaaccaactgacagaagccttgattattttggcttttcccaatcctgcaatctgagaataagcaaaacaccaagaaagaaataaaggcaaaaagaaggaagggagaaagagaggaaaggaggaagggaaggagggagagaatggaaggcaggagagaagaaagggagggagggagggagagacaaccaaattcatataagaaattcattaagagcgatgttaagtgtgaaccatgtaccatctgcatcagagtcaccctaggtgcgtcataacaagacagaccctctgaagcagggtttgggaatctgaactgtgagcagtccctcagaggatgcttaggcactctgaagtcagaggcccactagtctggacactgcctaaggccagtccatgtgctcagacctctgcatctgctgctacatctccagctaccaaactacctaataatctcacatacagaagactggtcctaaggtgagacaaagtcccaagtcatcagataaagaggaacttatgttcacaatttgtcgtgggctttggagtgaggcagactccaatggaaagcccagttctccttcttcctagcagagactttagggaaattacttaaacccactgaacgtcagggtcctcatctgtaaaatcctcrtaggatggttgggagggtgatcaggtaggaaccatggctttctctaagctgccttttatttgctgacttttgagaggggacgtcttactcaggcacagtcacatgtgcctgtagccctagctactttggaggccaaggcaggaggatagtttgagtccaggagttcaagactgcagtgtgctgtaactgtgcctatgaatagccactgcttaggcaacacagtgaaaccccatctctaaaagaaaaaaaaaaaaagaccagacatcttagaaagattcttcaaatcctaaccctagttagacattagacattgaatgcctctcctagacttgactaatggagaaaaaatgcctttaagtgtttcatctgtttcatcttactcattcctcagaacattctgctgacatcaacagcctccaggcctttg

SEQ ID NO: 92993 - DNA, 853 bp, Homo sapiens
atgcatcggtgtccatatcaatcttgtaaagttgtacatatttacaaattctcttggctctgtactttgcctttctgggaataataatctctggaatttaggactgtttgtttacaatttaggaatataatgtttaattttttctgatatgaatgggacttattggtaatggcatagtcttattgtaaacacacccatttctcaataaattcacagcttggtgctttggcaaaaaggaaatgccatttaaaggacagactgcaaactgaaataggatgcagagaaacaggagtgaggaaattattcaaaataaaactcattccactactagttgaacattattgaatcaatcaagattataatttgggggctaatttcacctgctaatggagaagtctgtcacaacctctaagattttgaactcagattttatatgttttacaaacttaaaagataaagcaaaggtttgactactgtttcccacccctttctgagtctttaacttatgcaaaagctttgttaggcaggctggcagcagccttaagtattttatttctccactgctacatgaagtcaaattgccatggagtgataattgctcagaaactgaactataggaggctctgtccatacggtgtatcatcagacaaatatttcaaagggaatattgaaactcagagaggcacaaatgatctcggctgtggaagtcttaggatttcaacttcaatcaaagggaataggacctgcttcaaaatagtcgtctccacgcacactgcagcctgaagttagccctgcataatwacagacagtccgtgtcaagtgaatggaaggctccccttaaagcaggaatgca

SEQ ID NO: 92994 - DNA, 707 bp, Homo sapiens
attaaatgcatatctaggtgtcgcggcatgtgcctgtagtcccagctacttgcaaggctgaggtgggagaattgcttgagtccagaaggtcaagggtgcagtcagctgtgatcttaccactgcactccagcctcggcaacagagtaagattctgtctcaaaaaaagaaaaaaaaaagatggagagaacatagatgcatagatgaaagtaatcatggcctagaagtactatacattccaagtcactatggagatttttgttttatgcctgtgttctgggtaaaataattagtattctccccctcacttgcaaagatagtttggtacaacaataaattatatgtttactctacttgaaggctcttcataatctgacctctccttagctatacagccacaattttcacaattctctttcccacctgtatcctgaacttagccaaatcagttttcttccatttcctcaaatgcatcacaatctcttttgcatctgtgcctgtgtggattatttttcccccgtatatctatttcactttatttttcaagacaattcaatgcattstttgaaccccagagcatgaatgattttcccagagaccagcccttcctaatcccaagcccctgcctagattctatgtcttgcctgctcctctgcagccagtacatttctgtacttccaaaacttttttggttcgtttgttttttttta

SEQ ID NO: 92995 - DNA, 1555 bp, Homo sapiens
taaaatcagagaggctattcttgccttatggttaataaaagtatctataggtaactgaaccttgaggagccaaattgaggcctgatgaaggagactgtacatcatccagagagaatgaacttggagcaggatgtaaagactgcaggggagaaatcagggtttttctgctggaggaagaagcagagggtacatagacataaggtatccaaagaagcccactatagaagctgggacagattgcatacttattctcaattcttcactccttcctatgcagtagagcagagaaaatcgagtatacctgtgacttgctttgaccaatggaaagttagaggggacaagagcacaggctttaaacatgcccatatgggacttctgtgcctaccatgagaacatgccccataattgttaatgcagggagaatgaggagatgtggtgcagactcttagccaatcccaagagctgggttcaagggtagccaacactcatcctagagaagtgtcccctctgacctgcagacacatggccaagaaaaatcaatgcatgttgttgtaaaccattgcatttcaaggctgtttgtgatgcagcatcctggctaataaaccagccaggtctattctaacaattgtagctcagagtaaagaatgtgggcatctcatcagcagacatgatcactaaaaagacagagaaaagatacaatgagaaaactataagcaaacgcttggaaatccaaagaaccaaatagaagaaagaagaaagattaagaaatttctagaaacatcctacagtggtcaggaagactgagacattgagcctagggataaaaatggacaggcagattcataacatgcttaaaaagaaacagcaaatgattgagaagtttttttttaaaagtggaactatttcaaaagtaagaaattagtaaagggacaaagttgttaatgcaccataaacaagtgatcaaaagcagaaaaaaaaaatgaactgctgtggaaatggacacagtgtgatcctatttttagtggactacttgagttttttaaaaaattaggaggaaggtaaaaggttcagaaaatagaaacagaagtgtaaataatactatgaaatgggcctagctgaaacagctgacttttcaaaagaatacattaaatgaagaatacagaatgagatmcttaaaaaaagaagtcaggaaagtattacatagagtaattgcaaaggccttctctccttataacacggaaattgatggatttgagaataaggatattaaaaaagatctttaagagtctacaggaaatagaagagctaggacaaagcatggatgtcatgtagaatattttatgacaaactgctgacctgagccaataattcttgggctggggaaaaaaactgtttctctatagataggtgggtgggggtgagggtggggagggaaaattgtaatgcctactttctaaatagatttcaaaggaatgcgggagaacacaaagagaactagcttgcattgattttttttaatattagcattttgttgataaaacagaaagcaggaaga

SEQ ID NO: 92996 - DNA, 457 bp, Homo sapiens
atgctggtattcttttcttcccttatgacaacttgacaacacacacaggaattctcattcccctaatctgcattatttttctctttttttatttttgggtggaacatgttccatcaaatttatgtgcttcgctctctgtatctctgtctctttctcttggtttagaataattcatctataatggctcctgagagtcattgcctgggacactgcaacgtaacattgttttatttattttcctaggttatccacaatatcctgtcatgaaagtttaaaatgtcttttcctaggggaggatgataatcatgttttctgtctgataacmtaacaatgtatggcccaaacttttcaaaacattttcaagtatgtcagtcaattaattgttaattcaaatcagttttcatctttctcaaggttaaagaggagaataaaatcaaagaccatgaataaaactatg

SEQ ID NO: 92997 - DNA, 1190 bp, Homo sapiens
agtacaataagtaatacaaaaattacttcaaatttcttcaattgtcaaagttaacaattttctgggtgttgcttgttttctcttggctatagcattctcataaaataagggtgctgtacattccaggcttgaagttctatgattaaaatctcttggcattaaagggattaatatatgtaaagtgtttagaacaaggaatagcacatgctatttaagtgtatgcttaatgattattaatgtttatcttattttcttgcattatgacattgacagagagaagaataatttacttttataagaaacctgcagtacaaagtcacctttataacatagcttataagagtttaagggtataagctctgcttgtgagttatgtctttgaaacactatatgtgttatctcaggcaatatattttagcactctctgtgcctcagtttactcatctgcaaagagaggataatggtacttattttataagatagtttatgaatattacattagccgttaaagttgagaccgtaaaaagtgtctagaccagtactggcacaaagaaatgtaaataaatattttttgttagctattatttgcataaagtttaaataaaaatttcaaatattttcttagtattctctgggttcagtaaaaatatttctgaaaatttgaaaatgtctattagaattgaaacttgcctgatactcaaggagataataatttgaaaaatctaatttctatcaagtaaatatatattttgaggagtttaaagatttttttttctaagataagatggtcagaaatattccatagttaaataaggagttgtggtttattttgttacttttcattttagggtaacaaagctttatgtgcaaacataatattttttctaaatttaggtttaacatttaaattgctttataagcttgtggatatagttgtctccaaacaattacatagatcccattaaaagctcttcatattggatgatattcttcttcttattattatccaccccatccttttcctccaaatattagttaatgttggtcatttcaacctaataaataattagttcattggtaggataaattactgggtttctgtagactttrtgcaatttttaaaacttaaaattttctgttgattttagtgtctgtggtgttgatgtatttaaaggtttcctctcttttaa

SEQ ID NO: 92998 - DNA, 1436 bp, Homo sapiens
agaattcggccacctctcccagcccaggaaccctggggaaagtggagtgccagacgctcttgctaacctacacttctccctaaagccacgagcacctytctcacctaaaggtgatctattccatgcctgatttatctggataattgtctgctatccttcaccttgatcttgaccttactcctatcctgcctttaggaaggaaggggcattcagaagcattgacagcccaggtgacatttgagatttccctagagacaagaggagatgctaagtttttagtttcctcaaaatagctataccttaatgaaaacaaaattgcagcaaggtaggagaaacaagttctagtgttccatagcactgtagggtagatatagttaacaataatttattatatatcttcaaaaacctagaagaggatttctaacgttcacaacaaaaagaaatgataagtgtttgaggtgagagttatgctaattacccttatttgattgttacatattgtatgcatgtatcaaatatcattctgcatcccacaaatatgggatttacatacaattaaatcccatatttgtggggttgtaataattgtagtaaattatttactacaattattatgcatcaactaaaaataaaaggaaaagatctggaccagtgtctatagtctatgttatttgtctatgttaattatctatgttaattgtctatgttagtgcatagatgctgcagggtccaactttatatctaggatcctgctgagcaactctgggcaaatgccaccgctcaccccctctagaccagtttcccatacaatgttagccttggagaccctgcaagctctggcatttcaggctctacagcctgcacctgcctccttgatgtaagccagttttctggcaatggaagagaagactccacagtcacctaggaccagtagccaagaccctctgtgtggtctagaggggagggggctagcagcaccaggccagagaacaggtccaaggccacacaatggagcctctcagctgctctgcaataacctggatcctgacccccaggcaggctgcaggggctggacatagcgggaaaggtaagaggtaagaatcttgggaggagggctgactgctccactgctgccctcactgcactccattagcaccttcactttgtgctccatgttcccatccttgtctgcagtagggaaggaaattggaagaaggatacgtcctaatttttgttaaggaacagaggaataggctgggaactcaggcagggactcattcctaacccttccactccaatcctcttcactcacatttctccagcctctgcccaagacagccagggagacttactgtactcacagactcacactgatacatcacaagtataccttagcacacacatagtcattcatcaatcttcacccctaagcacat

SEQ ID NO: 92999 - DNA, 1436 bp, Homo sapiens
agaattcggccacctctcccagcccaggaaccctggggaaagtggagtgccagacgctcttgctaacctacacttctccctaaagccacgagcacctctctcacctaaaggtgatctattccatgcctgatttatctggataattgtctgctatccttcaccttgatcttgaccttactcctatcctgcctttaggaaggaaggggcattcagaagcattgacagcccaggtgacatttgagatttccctagagacaagaggagatgctaagtttttagtttcctcaaaatagctataccttaatgaaaacaaaattgcagcaaggtaggagaaacaagttctagtgttccatagcactgtagggtagatatagttaacaataatttattatatatcttcaaaaacctagaagaggatttctaacgttcacaacaaaaagaaatgataagtgtttgaggtgagagttatgctaattacccttatttgattgttacatattgtatgcatgtatcaaatatcattctgcatcccacaaatatgggatttacatacaattaaatcccatatttgtggggttgtaataattgtagtaaattatttactacaattattatgcatcaactaaaaataaaaggaaaagatctggaccagtgtctatagtctatgttatttgtctatgttaattatctatgttaattgtctatgttagtgcatagatgctgcagggtccaactttatatctaggatcctgctgagcaactctgggcaaatgccaccgctcaccccctctagaccagtttcccatacaatgttagccttggagaccctgcaagctctggcatttcaggctctacagcctgcacctgcctccttgatgtaagccagttttctggcaatggaagagaagactccacagtcacctaggaccagtagccaagaccctctgtgtggtctagaggggagggggctagcagcaccaggccagagaacaggtccaaggccacacaatggagcctctcagctgctctgcamtaacctggatcctgacccccaggcaggctgcaggggctggacatagcgggaaaggtaagaggtaagaatcttgggaggagggctgactgctccactgctgccctcactgcactccattagcaccttcactttgtgctccatgttcccatccttgtctgcagtagggaaggaaattggaagaaggatacgtcctaatttttgttaaggaacagaggaataggctgggaactcaggcagggactcattcctaacccttccactccaatcctcttcactcacatttctccagcctctgcccaagacagccagggagacttactgtactcacagactcacactgatacatcacaagtataccttagcacacacatagtcattcatcaatcttcacccctaagcacat

SEQ ID NO: 93000 - DNA, 1039 bp, Homo sapiens
attagtgaagcttaagcaagagggtcccttctttttgggtgggggacagttaaggcctggtacaaaacaatggcacagggattatatgataagtgaatgaacgagcaaatagctcaatgaacaaatttatcaattcaaccaatatttattgagcacctactatatgccaggttctgttttaggaggggaatacaggggtgacaatggcaaaattcttgcccctttggaggcaacatgtgcaatggagcttttgaacttcatgaggcttttctgaggattatttttgttttgttcttatttttaaaggtagccaacccagtctaatggaaaatttggaaggatgttcatcatcttgccgcgtctctgtttgtgttctatttcarcctaacatgaagggagcatcatcttcgttttcaccagctcagagggcaaagcatcttgtcctgggtcacacagcacatctgcagagaaactggtaggggttgggacagcagtttcccactttctgtgctgagctattcctgctcgccatgtaaccagtgtctccacaacttctgactgtggtaggataatggggtgggaggtatgggtgcctggatttcagctttctggagggaaatcttgacatgcttttattttcttgtttctttggggtggagcaaataaaaggcagtcagggggtccatcaggcccatgggtactggttccaggcatagcctgtcagtgggaatatctggcctcaatgaaaggtaagggtgcatgcaggacctagctgcccactcttataccatggacaccagagaaggtgtggggagtggggagtcagcatttgttaaagtgtgtgtgagcacaagtgcatacacacagacacacatcaacagtgcagatacttgtgcaaacacaaatgtacaagtccttattcggattcacaagtatggatatatagccacatatacaggtgcgcacacacacacacaaatacactcatgttcgtgcataaatacccaggcacatgtgcacacgtccaaacagacataca

SEQ ID NO: 93001 - DNA, 1039 bp, Homo sapiens
attagtgaagcttaagcaagagggtcccttctttttgggtgggggacagttaaggcctggtacaaaacaatggcacagggattatatgataagtgaatgaacgagcaaatagctcaatgaacaaatttatcaattcaaccaatatttattgagcacctactatatgccaggttctgttttaggaggggaatacaggggtgacaatggcaaaattcttgcccctttggaggcaacatgtgcaatggagcttttgaacttcatgaggcttttctgaggattatttttgttttgttcttatttttaaaggtagccaacccagtctaatggaaaatttggaaggatgttcatcatcttgccgcgtctctgtttgtgttctatttcagcctaacatgaagggagcatcatcttcgttttcaccagctcagagggcaaagcatcttgtcctgggtcacacagcacatctgcagagaaactggtaggggttgggacagcagtttcccactttctgtgctgagctattcctgctcgccatgtaaccagtgtctccacaacttctgactgtggtaggataatggggtgggaggtatgggtgcctggatttcagctttctggagggaaatcttgacatgcttttattttcttgtttctttggrgtggagcaaataaaaggcagtcagggggtccatcaggcccatgggtactggttccaggcatagcctgtcagtgggaatatctggcctcaatgaaaggtaagggtgcatgcaggacctagctgcccactcttataccatggacaccagagaaggtgtggggagtggggagtcagcatttgttaaagtgtgtgtgagcacaagtgcatacacacagacacacatcaacagtgcagatacttgtgcaaacacaaatgtacaagtccttattcggattcacaagtatggatatatagccacatatacaggtgcgcacacacacacacaaatacactcatgttcgtgcataaatacccaggcacatgtgcacacgtccaaacagacataca

SEQ ID NO: 93002 - DNA, 665 bp, Homo sapiens
ccaaggcaggttactgagctagcagtgtggcataccgcactcartgaatgctgttcactaatacttctgttcgttgctgcttcaagaaaggctaagaaatcattttatttccactgaaaaacttattggaagggaacagtattctctcattatttaaaagcagtattttataacaaacgcagatccttatctcagcgtaaaaagtttatttaaataaattatgaagaaatcaaagagaactataattagaaggaaatgaaaagccatctatactaagggcatagaatgctttggagagagaagtttcagttgttggttcatctcttcagagtgctgaaagtgactctttcaaaaggggagccatgttttaaaattttatctttaaattaacatacagtaaaatggactttttttgtggtatgaagttctgtgtgttaaaattcaaggagttgttcacccaaaaaagcaactctagggtatgttaaaaaataaaatgaattttaacacatcaagagattcatgtaccaaccacaccatcaggatacagagcttccattatcgtaaaaactaaagggaagaaacgtcgttctgtttcgcaaacattcactgagcactcacttctgctgaccttgtgctggataccagggaggaaacactgaatgaca

SEQ ID NO: 93003 - DNA, 665 bp, Homo sapiens
ccaaggcaggttactgagctagcagtgtggcataccgcactcagtgaatgctgttcactaatacttctgttcgttgctgcttcaagaaaggctaagaaatcattttatttccactgaaaaacttattggaagggaacagtattctctcattatttaaaagcagtattttataacaaacgcagatccttatctcagcrtaaaaagtttatttaaataaattatgaagaaatcaaagagaactataattagaaggaaatgaaaagccatctatactaagggcatagaatgctttggagagagaagtttcagttgttggttcatctcttcagagtgctgaaagtgactctttcaaaaggggagccatgttttaaaattttatctttaaattaacatacagtaaaatggactttttttgtggtatgaagttctgtgtgttaaaattcaaggagttgttcacccaaaaaagcaactctagggtatgttaaaaaataaaatgaattttaacacatcaagagattcatgtaccaaccacaccatcaggatacagagcttccattatcgtaaaaactaaagggaagaaacgtcgttctgtttcgcaaacattcactgagcactcacttctgctgaccttgtgctggataccagggaggaaacactgaatgaca

SEQ ID NO: 93004 - DNA, 880 bp, Homo sapiens
ggatgacttttaggtctcttcatggtcccttacctgtaaaagtaagtggttaatttgcattgtcagggtgaaattcaacagaactgctttagggtaaaagtctcggggcctacaaggagtttcctcctgagcaaaaggtgagggaggtawgtagctatctattcaggaagaaaatgggaagttggtgtgtgtgacccagttcccagcttgcccttcatcctttgtgtgacccagttcccactgagcccttcagcttagtgagtttctgggcctgagattttattttccttttacagcactcaaaatttttaaaaagttattgtgcaataaattacatgcaagaaaagggttaacatgtcctggtgttagcagttagggaacgtatccaagtcaggcggcaccaaagtatgggtctgcagcaacctcaattcttgcctcttcagaagaaataattcaaccaaggggcataaggcagaaggagatactgaggcaggcttcagagcaggagagaacgtttattaaaaagctttagagcagaaacaaaaggaaataaagtacatttgaaagagggccaagctaacgacttgagccagtcaagggcacagtttgacctttgacttgggattttatatgagggcatatttcttgggagttgcatcccttctccccttgtagcaggactagccacagacaaaacctctcagacaccaagttaaagaaggaagggctttattcggccgggagtgttggcaagactcatgtctcaaaaaccgagctccccaagtgagcaattcctgtcccttttaagggcttacaactctaagggggtccacgtgagagggtcgtaatcgattgagcaagcagggggtgcgtgactggg

SEQ ID NO: 93005 - DNA, 712 bp, Homo sapiens
ttagagtaaaaaggcttaaacattttattctttgaatcttttagaaggctcctaaggtattccaccttcttaactaaaaaagtaattgggacagctactatgaaagtacacagaaagaaaaaagggatttcatgtaaagattatgtaagatcaagactcttatagtataaaaattttttatttgctttgattttttccttattaattagaactatgttatgacatagctattgcactcttgttctcctgtttttaccatcccacaagtttaagagtaaaatgaccactgcattatcttaggaataattttacttgtcatatagtactatttcttatggttttactcaaaaaattttactgtacacttctgcttcattaatactgaagaaggtggaaagaacttaaaattatttctattggtcttacctacctatgtcatttattacttggcttgaaatagatgtttacatatattgaaaataatgtcatttggataactgaatacaattataacaaaaatttgcacagatctgagtatttttagatcaaatcatataccatgcccgaatcagagcaacttttaaaagtaaacaggacactgtattattatccaaccttactgttgctataaagaggttctactgagtatgtttaaatcatgacttaaaattctatttaaattgagaagcaayccttgcaaatatcccaacct

SEQ ID NO: 93006 - DNA, 509 bp, Homo sapiens
tttttttgagacagggtctggctgtgtcaccaggctggagtagtggtatgatcatggctcactgcagcctcaacctctccgggctcaggccatccaaccacctcagcctcctaagcagctgggactacaggcatgcactaccatccccagctaatttttgtgtttttgtagagatgggggcaggggtctccccgtgttgcccaggctggtctcgaactcctgggttcaagtgaactgctcacttctacctcccaaagtgctgggaatacaggctaagccactccccaggccaaagcagatggtatttgaaaacacaattcaatcccttcagggcccaagattccgtccctgtwcccaccctctctccaccccatggcctctgcctccacctgcttcaagcacacccctcaggcctcagtttaccaccacctagaaaggcccttcctcaaatgtagactgaagaaaaagggactttttaaaaactcattaaggggccgggcgcggtggct

SEQ ID NO: 93007 - DNA, 3269 bp, Homo sapiens
  misc_feature (1)...(3269): n = A,T,C or G
taagaaagtttaaaccctgaggacagagctaagagacacttaggagagaacagagctaagagacacctaggagagaaagagtgtggagattgtgagtgagcctgtgtatgtggtgtatacgtgtttgtgaatgtgtgtgtgtgcagaggtgtgaatgtgtttgtggatgtgtgggagcttgartacttgtgtgaattgtgtgtacacatgggtgtgtggaagtgcgacagcgtatgtgtgtgcagctgtgtatgagtgtaggtctgtgtgagtgtgtgtaggtgaatgtgtgtgtgcttgagagtgtgtatgaatgtgttgtgtgtatgtgcatgagcgtgagtctgtgtgtttaggtctgtgtgagtgtgaagctgggaagctgtgcaagtgtctggatgtgtgtgtctggatgagtgtgactgaagctgtgtgagtgtgtctgggtatatgtatgtccctgagtctgcatgactgaagctgtgcaagtgtgaagctgtatgagtgtgtgggtgagtctgtgtgagtgtgtgtgggtgtgagtctgggtgtgaagctgtgtgtggatttgagtctgagtgtgaagctatatgaatgtatgggtatgactgggtgagtgtgtgggtgtgtgtgggtgagtctgtgtgtgtgagtgtatgggtgagtctgtgtaggtgtgagtctgggttagtctgggtgtctggatgagtctgtgtgtgtgtgggtgtgtgtctgggtgagtgtgggtgtgggtatgagtctgggtgtgtgtgtgtgggtcgtctggatgagtgtgtgggtcccggtgagtctgtgtgggtgtgtggggaaagtgtgtgggtttgagcagctgtgtgcgtgtctgtgtctaggtnnnnnnnnnnnnnnnnnnnnnnnnnnnnnnnnnnnnnnnnnnnnnnnnnnnnnnnnnnnnnnnnnnnnnnnnnnnnnnnnnnnnnnnnnnnnnnnnnnnnacatatgtcccaagggcagtttgctcagcccccagagattccaggcggctatttctgccttgctctgaccagatccggcttcagactgtgatgcattatgctctgagtggagtttctctagcctccttttcctcatttctcttgaatagctggggaatgtccgtgcccccctctctgagctgttgcttaaaatcatgtaaggcctcagcacatagtaggtggtcagtccacagtggctcttccacccctcattcacttctgtcagtaggcggtggatgcttgtcctcctggcatgcgattgagcctagtgccccttcaacagcgtcagaagacctgggttggagtccacttgggcccctaaccccatacaggacccccagcaactcatgtcacctctctggattatatagttacttcctctctgagttcctcagtttccttatctgtaacatgggggtactcttcctgccctacacagttgtttgtgtggtcaaataaggtagactgctgagggcttcatgctggaggctggatcctgttccactgctacagagcccggaaacagatttttcaatccatctctgctcttgctcttcttcctctctggttctcgttggtgcattgtaggaaatctgggtgcagtttctctatgataactgatcattacatgcacctgtgctgcacgtgtgtccatgcacctgtttctatccacagacctcctactttcagttttgataaaacataactcaggcttaccatatttgtttgtacttcttttattcacttcaggagacactgggccttggttttccaaatagggtttttgacctgggatttcctttgccatgcaaagtaggatagaaagttgagaaatcttcccagagaagcaaagtgttgggttttcctgggaggtgcatggtaggacacacatgggattagcttggaagtcctgaaagggctttgtctcacccaaacgataaaatatatgcatgagttgtagttgctgttcccaaaattacattcactggtcctgtgctctgatatctacacccattcatttacttgagaccccttgtgacaggctgtccccacctttaacaagccagaacatttggacacagaatgcttccatcagacggattggaaggctggggcggggtgggaagaaatgggtttcctggtgacttgttctgggcaggaacagaacctctcaagggtttgtttccttttccttgcaagaaaatgcaaaccactggtctctgcatatccctccagacattcatgggagaaaccaggctaatgtttatagaagcctattgggagtggctgccttcaggatggagagaaagctcattacctcgagctgctaaaatttaatccaaagaaaatatactattcccttagaaaatgggttgggtacatgtgaactgtgttaactttaaaatcaacaaatcagttatcaaaatactaattttctaagcagtatgcgaccagggaaatgaacacattgtgtaatttgatgtgtgtctgtaagtcttagaacccgcatctatgtttatcaacaaagggcttcaccttctctaatgaagttttgttaaatgtttggtttggtatttttaattttaccatccaagatctgttaatgtagtgtttttgttcaatttcaaggtaaagtttattattgtttggtgcttacaaaataacaaatgctcattgtaagaattttagaaaagatgggaaataaaaaaaaacctataaaaataacagtggttgaacagaaaagggcatgaggaaactttctggggcaatgggaacattctagttctttatagggtcttcggtttctacacaggcatacataattgttgaaacatcagccagtgcacccttaagatttgtgaacttcattgtacgtacattttacattaaaatctgtgaacagtttttgaattgggttaatgatatgtatgatgaagtatttggaagaagtgtacagatgtctgcaatttactctgaagtgaatcaaaaaaataagaaagcttgatgatgaatatatggatagatatgtaataaagcaaataaagtaaaatattaatggagaatccagatcttgggtatattagtgttcattataaaattctttcaactttgctgtatatttgaaaacttacataataaagtattagggaagagagattactaattcagaaaaaaatccatatttacaatccgaacttaccactattagcatcttagtgcacattattttctttcatttttgttttcaagaatgca

SEQ ID NO: 93008 - DNA, 3269 bp, Homo sapiens
  misc_feature (1)...(3269): n = A,T,C or G
taagaaagtttaaaccctgaggacagagctaagagacacttaggagagaacagagctaagagacacctaggagagaaagagtgtggagattgtgagtgagcctgtgtatgtggtgtatacgtgtttgtgaatgtgtgtgtgtgcagaggtgtgaatgtgtttgtggatgtgtgggagcttgagtacttgtgtgaattgtgtgtacacatgggtgtgtggaagtgcgacagcgtatgtgtgtgcagctgtgtatgagtgtaggtctgtgtgagtgtgtgtaggtgaatgtgtgtgtgcttgagagtgtgtatgaatgtgttgtgtgtatgtgcatgagcgtgagtctgtgtgtttaggtctgtgtgagtgtgaagctgggaagctgtgcaagtgtctggatgtgtgtgtctggatgagtgtgactgaagctgtgtgagtgtgtctgggtatatgtatgtccctgagtctgcatgactgaagctgtgcaagtgtgaagctgtatgagtgtgtgggtgagtctgtgtgagtgtgtgtgggtgtgagtctgggtgtgaagctgtgtgtggatttgagtctgagtgtgaagctatatgaatgtatgggtatgactgggtgagtgtgtgggtgtgtgtgggtgagtctgtgtgtgtgagtgtatgggtgagtctgtgtaggtgtgagtctgggttagtctgggtgtctggatgagtctgtgtgtgtgtgggtgtgtgtctgggtgagtgtgggtgtgggtatgagtctgggtgtgtgtgtgtgggtcgtctggatgagtgtgtgggtcccggtgagtctgtgtgggtgtgkggggaaagtgtgtgggtttgagcagctgtgtgcgtgtctgtgtctaggtnnnnnnnnnnnnnnnnnnnnnnnnnnnnnnnnnnnnnnnnnnnnnnnnnnnnnnnnnnnnnnnnnnnnnnnnnnnnnnnnnnnnnnnnnnnnnnnnnnnnacatatgtcccaagggcagtttgctcagcccccagagattccaggcggctatttctgccttgctctgaccagatccggcttcagactgtgatgcattatgctctgagtggagtttctctagcctccttttcctcatttctcttgaatagctggggaatgtccgtgcccccctctctgagctgttgcttaaaatcatgtaaggcctcagcacatagtaggtggtcagtccacagtggctcttccacccctcattcacttctgtcagtaggcggtggatgcttgtcctcctggcatgcgattgagcctagtgccccttcaacagcgtcagaagacctgggttggagtccacttgggcccctaaccccatacaggacccccagcaactcatgtcacctctctggattatatagttacttcctctctgagttcctcagtttccttatctgtaacatgggggtactcttcctgccctacacagttgtttgtgtggtcaaataaggtagactgctgagggcttcatgctggaggctggatcctgttccactgctacagagcccggaaacagatttttcaatccatctctgctcttgctcttcttcctctctggttctcgttggtgcattgtaggaaatctgggtgcagtttctctatgataactgatcattacatgcacctgtgctgcacgtgtgtccatgcacctgtttctatccacagacctcctactttcagttttgataaaacataactcaggcttaccatatttgtttgtacttcttttattcacttcaggagacactgggccttggttttccaaatagggtttttgacctgggatttcctttgccatgcaaagtaggatagaaagttgagaaatcttcccagagaagcaaagtgttgggttttcctgggaggtgcatggtaggacacacatgggattagcttggaagtcctgaaagggctttgtctcacccaaacgataaaatatatgcatgagttgtagttgctgttcccaaaattacattcactggtcctgtgctctgatatctacacccattcatttacttgagaccccttgtgacaggctgtccccacctttaacaagccagaacatttggacacagaatgcttccatcagacggattggaaggctggggcggggtgggaagaaatgggtttcctggtgacttgttctgggcaggaacagaacctctcaagggtttgtttccttttccttgcaagaaaatgcaaaccactggtctctgcatatccctccagacattcatgggagaaaccaggctaatgtttatagaagcctattgggagtggctgccttcaggatggagagaaagctcattacctcgagctgctaaaatttaatccaaagaaaatatactattcccttagaaaatgggttgggtacatgtgaactgtgttaactttaaaatcaacaaatcagttatcaaaatactaattttctaagcagtatgcgaccagggaaatgaacacattgtgtaatttgatgtgtgtctgtaagtcttagaacccgcatctatgtttatcaacaaagggcttcaccttctctaatgaagttttgttaaatgtttggtttggtatttttaattttaccatccaagatctgttaatgtagtgtttttgttcaatttcaaggtaaagtttattattgtttggtgcttacaaaataacaaatgctcattgtaagaattttagaaaagatgggaaataaaaaaaaacctataaaaataacagtggttgaacagaaaagggcatgaggaaactttctggggcaatgggaacattctagttctttatagggtcttcggtttctacacaggcatacataattgttgaaacatcagccagtgcacccttaagatttgtgaacttcattgtacgtacattttacattaaaatctgtgaacagtttttgaattgggttaatgatatgtatgatgaagtatttggaagaagtgtacagatgtctgcaatttactctgaagtgaatcaaaaaaataagaaagcttgatgatgaatatatggatagatatgtaataaagcaaataaagtaaaatattaatggagaatccagatcttgggtatattagtgttcattataaaattctttcaactttgctgtatatttgaaaacttacataataaagtattagggaagagagattactaattcagaaaaaaatccatatttacaatccgaacttaccactattagcatcttagtgcacattattttctttcatttttgttttcaagaatgca

SEQ ID NO: 93009 - DNA, 700 bp, Homo sapiens
tgtctgcaacttcaagaattggtattcaaatgctgaaactgttaagtaacttgtttcattcctttgttggtgggactgtcccagcgtgatgttatcagctatgaggtgctagataccatcctgaattaaccttaactctacttagagcaataaatgatagtgttactgcttttggcaactgcagatatcacttcaggttaaaaaggggaagtgtatttataaaaatccttagacttatagaacaagtaactttcacaagaattaaacaaaataaagatcatactgatttttaaaagtattttatatttcttcaggaagtctgaagaaaaatgtaataattgagttaggtcttgaagagatcttgagaggtcactctgagaatacctgtcttagaagagaaaaattagctaataccaagtaaagatttcagatactcatcwtactttccaaattgattaaaaaatttattgctttaataactcaaagttcaattgttattacctaccctgatactcttttcaaatggccacattgttttgttctaatgattttgcttttccaaagaccgtaaatcttatatgcaaaatttaattgcttcccatgaaggaaagaggagatgacggaaatgcctagtgtggggctccagaaaaacaatgaatttatctctatttctgtctgttgaaatgttttaaggttaata

SEQ ID NO: 93010 - DNA, 534 bp, Homo sapiens
tttttcaggttattctgtattaaatgcaaaataaatgcttttattaacaatgacaaaaagaaaggtaattgtaataaatacaatttaccacttcgtaattactttaytatattttactcatactttgaggttatttgtgtctagtgtatgtgtggtggatgtaccatataatggtatgctattgtcatttcttccagactccacctttagtgatttcatgtttgtaattggcagcttgaaatcgatcttggaacaatggaaataaaaccacaatggaaataaaaaaggatccaaatcaggactttttgcctatgaggagccagtgataaccagcccattactatatgcaaaacgagtttatatgttttttctctactccaaaaacttaacaaaagaaggaattattaaactttaaaaaacgattttaattttattttactacattggtttcagttttttattttattttatcatttatttatttatttttgagacggagtctcactctgtcgcccaggctggatttatttattt

SEQ ID NO: 93011 - DNA, 553 bp, Homo sapiens
catggatggcagcaggcaaagagagagcttgtgcagagaaactcccatttttgaaaccatcagatctcgtaagacccattcactatcatgagaacagcacgggaaagacgcaccacctgattcaattatctcccacaaggtccctcccacaacacgtgggaattatgggagttacaagatgagatttgagtggggacacagagccagaccatatcaccccgcaatgaaaggaagaaacgaccactggggacattgcttgagtatgacatatttttaatccttagtgtgaagagaaccccatctaggataatgaggacatcaaactactatgtagacattattctcacaaactactcatgttctaacttaaagagacttctaggcaatgaaaaaataaatgggcaaactgattgaccaggaaggtcaaggtggatgaggaaagacgggtrtgtattaatgaagtagtaattgtctttctataacactggctgtaataatttgaaactgtgtggccattttgtgttttggagaaacatacagcacaaaaaccatg

SEQ ID NO: 93012 - DNA, 334 bp, Homo sapiens
aaaaacaagtttgaacacttgcagaatacaattttgaattctctgttatatgctagataagkgctaggttttgctaactgtctagaatgttgatagcaaatagtgcgatttggtttaggaatttttacttctcaagcactatcataagtgatatttccaaatttctatatattatcctacctctgataacggtaacatagtgtcattgctcccattctagaagtaaaaacaaaacaaagcaagacaaagagttaccaaaaatgtggataacttggattaaggacttggttatatgcatgaaataaattattgaaaagtagactggcagtggaat

SEQ ID NO: 93013 - DNA, 1120 bp, Homo sapiens
tcccagcctgtgaagactcattcttcttctgaggcctcatgccttgaatatgagaccaaatagggccagcatttattggtcttgggccgctctgtttgtgcaggctgtctaaccgcagtaaccccgagcgtctcttaaggagcgtggggagaggcggctgggagcaagctccgccgtgagaatgctttcgtttgagtgaaggcctccacaggcccctgccgtggattgcttatttaagttcaagaaataaatattgaagaatgaaaatcaaaacccgcagaaatttagacagcgaaattctgggtggtaaggaagattgtgtgatgatttcacaaggaggatttcggagaggattcggtccttatactaaatatgtttgagggtggaacgctcccttttctcgctgcagtgcarttacctgaagtccttggattctaggcccctgttcttccctgcttttgctcttaccttgcctccatttattaagcacttactggatgctacgctttgcaccgaaagccttctgtgaactccgaatatttgagatgggtctcagttaatttagaaagtttattttgccaagtctgaggacccacgcctgtggcacagcctcaggaagtcctgcccacacggagacttcacattcccaggtctcatttccagggcccactggccagaactattcttgttctgggtaggttagttttctacgttttagggagacacgagacatcaatccatatatgtaagaagtacattggttcagtctggaaaggcgggacaacttgaagcaaaggcaagaagacttaaagcaaagcgaaggggtcctccaggtcacacatagatgagagactaatggttgcattcttttgagtttctgattagcctttccaacagaggcaatcagatatgcatctatgtcagcgagcagaggggtgactttgaatagaatgggagcagttcccagcttgaaggggcccaagatcttttcctttcacacttatatgctgtgctcatttaactctcacaattcagtgaggcaggcaccattactatacctatgttacaaatggggaaacatacctaaagaggtcacatcattcgccaaggtcgcagagca

SEQ ID NO: 93014 - DNA, 989 bp, Homo sapiens
tattttaaaaagttacttacagagcagagctgatggctttcccagatgccctgccaccagacaagactgcgcacactgggaaaacacaaatgaattctcatgcacgctggaaaggttcaaaatgacaacaggaagttagagaattgtgaggaaaatggaaaatccttaggcaatttatgaagatgacagattggaattctccagtctcttgcttctctgccaagcatagctactgctaaagagagtagcacaaaaatgcaggatggcctctttcaagatggcggcctccagaaagccagagtcgctgctggagaggcaagggagcagccaaagagcacccacagaagacaaggaagtcagagtcctcgtggaaaagcatgcagcagagcacactttctcaagcacacccagactcatcgacttctattaaagttgcccaaagctgtgcggtggcttatgcctgtaatctcagcactttgggaggctgaggtgggtggatcaccttaggttaggagttcgagactagcctggccaacatggtgaaaccctgtctctactaaaatacaaaaattagccggacatgatggcaagtgcctgtaatcccagctactcaggaggctgaggcaggagaatcgcttgaactcgggaggtggaggttgcagtgagccaaratggtgccactgtgctccagcctgggcgatagagcaagactcagtctcaaaaaaaaaaaaaaaaaaaaaaaaataaaagttgcccaaagctatggtagaaaatggcccaggatttctatggcccagcccatgtccatgccagggaaatatcataaatttggtatggaagcagagaatcaaacatgctttgagctcatctgccacattgtgcccacatgctcttcctgtgtttgccatggggtcacacacacaggcccctgctgctcacctttacagaccttttctccaggtggcttttctgtgttctgctctgtgcaa

SEQ ID NO: 93015 - DNA, 751 bp, Homo sapiens
cacatgggttgatagcttgattttgttatcagcatgggagtattcctattttttcaaagcaccaaccatgtaactctgaactatatattttaatgtttttatgtgattgtatacagctccttaatctcactgaagcatattaggtagaaagtgagttttctcagtgttgacatgtaagcttccaagaagcagtcattaaatggtaataactttccccactgttattatgcctaatgggcaagaactatactttcaaataacacctgatatattttcccctctcgataatcaatttgtttttagttatgcaaycattccaccattaaaactagatggagataagttttattatttaagagagaacaaggaggataaaatcataccactgacattttagcttctgagtatacttttgcaaaattacagcaaaagtgatcactattgaagcccatgttttaaagagccaggcttgacacagaaaagttttgctgttgtatttgttttggaattctacaaaccttaaaagatctagaacccaacccctggaaagattgtaaatttttttcacagatggattgaaaaaagtttacatgatgatttaggagttagctgagggaagaaaagcattaccagttaacaggaaagggagaattagagggggtatgactatacattttctgcagtgggcctccaactgtgctcagctctccaactcattttgggttttgtggtgaatagacttcaggatgga

SEQ ID NO: 93016 - DNA, 751 bp, Homo sapiens
cacatgggttgatagcttgattttgttatcagcatgggagtattcctattttttcaaagcaccaaccatgtaactctgaactatatattttaatgtttttatgtgattgtatacagctccttaatctcactgaagcatattaggtagaaagtgagttttctcagtgttgacatgtaagcttccaagaagcagtcattaaatggtaataactttccccactgttattatgcctaatgggcaagaactatactttcaaataacacctgatatattttcccctctcgataatcaatttgtttttagttatgcaaccattccaccattaaaactagatggagataagttttattatttaagagagaacaaggaggataaaatcataccactgacatttyagcttctgagtatacttttgcaaaattacagcaaaagtgatcactattgaagcccatgttttaaagagccaggcttgacacagaaaagttttgctgttgtatttgttttggaattctacaaaccttaaaagatctagaacccaacccctggaaagattgtaaatttttttcacagatggattgaaaaaagtttacatgatgatttaggagttagctgagggaagaaaagcattaccagttaacaggaaagggagaattagagggggtatgactatacattttctgcagtgggcctccaactgtgctcagctctccaactcattttgggttttgtggtgaatagacttcaggatgga

SEQ ID NO: 93017 - DNA, 598 bp, Homo sapiens
gaatatatccctattcttataaatcacacatcccattgttttataaccatttacttacatttcgacctcattcactagactgtcagctcctaaatgtcagaattcaagtcttcattttgtctacccgaccrtagttcaacacatggtcattggctaggcaaaaacatccattcaaatgcgcttataaaggtattctcaaaataatattccaccaataattgctccaattaactaacatttaaaaaaacaacttgtagctgggcgtggtggctcacgcctgtaatcccagcacttcgggaggccgaggcgggcggatcatgaggtcaggagatcgagaccatcctggctaacacggtgaaaccccgtctctactaaaaatacaaaaaattagccaggcgtggtggcgggcgcctgtagtcccagctactcgggaggctgaggcaggagaatggcgtgaaccagggaggcggagcttgcagtgagccgagattgcgccaccgcactccagcctgggcgacagagaaagactccgtctcaaaaacaaaaacaaaacaaaacaaaacttgtaaatatattgttgaagattgttgaagatcat

SEQ ID NO: 93018 - DNA, 598 bp, Homo sapiens
gaatatatccctattcttataaatcacacatcccattgttttataaccatttacttacatttcgacctcattcactagactgtcagctcctaaatgtcagaattcaagtcttcattttgtctacccgaccatagttcaacacatggtcattggctaggcaaaaacatccattcaaatgcgcttataaaggtattctcaarataatattccaccaataattgctccaattaactaacatttaaaaaaacaacttgtagctgggcgtggtggctcacgcctgtaatcccagcacttcgggaggccgaggcgggcggatcatgaggtcaggagatcgagaccatcctggctaacacggtgaaaccccgtctctactaaaaatacaaaaaattagccaggcgtggtggcgggcgcctgtagtcccagctactcgggaggctgaggcaggagaatggcgtgaaccagggaggcggagcttgcagtgagccgagattgcgccaccgcactccagcctgggcgacagagaaagactccgtctcaaaaacaaaaacaaaacaaaacaaaacttgtaaatatattgttgaagattgttgaagatcat

SEQ ID NO: 93019 - DNA, 694 bp, Homo sapiens
acagaaatcatccagtatttatgtaaatttaaaaagtacttaatttagacaatatctaccatctatccatttcttctacagcaacagataatgtaggatgtaaataaaacagaaagttacttttctttctttctatgtcaatcccctgccctccccttcccttccctcccccttcctttccttcttcctgtctttttctttctttctttctttctttctttttttttttgtgacggagtctcgccaggctggagtgcagtggcacgatctcggctcactgcaacctctgcctcccaggttcaagcgattctcctgcatcagcctcccrcgtagctgggactacagtcgcggtgccagcatgcttagctaattttttttttttttttttttttttgtgcagacggggtttcaccatattggccaggatggtctgatctcttgacctcgtgatccgcccacctcggcctcccaaagtgctgggattacaggcgtgagccaccgcccctggcctctatgtcaatttcaataaatacctattaagtgcctactataggctaggcattggataaggctcaataatagcgtctccacttaacagaatttatattctagctcagaactcagattcacagacaaataatgaggatagaatgggccaagtaccactatgtaattttatatacaaaatgccatg

SEQ ID NO: 93020 - DNA, 694 bp, Homo sapiens
acagaaatcatccagtatttatgtaaatttaaaaagtacttaatttagacaatatctaccatctatccatttcttctacagcaacagataatgtaggatgtaaataaaacagaaagttacttttctttctttctatgtcaatcccctgccctccccttcccttccctcccccttcctttccttcttcctgtctttttctttctttctttctttctttctttttttttttgtgacggagtctcgccaggctggagtgcagtggcacgatctcggctcactgcaacctctgcctcccaggttcaagcgattctcctgcatcagcctcccacgtagctgggactacagtcgcggtgccagcatgcttagctaattttttttttttttttttttttttgtgcagacggggtttcaccatrttggccaggatggtctgatctcttgacctcgtgatccgcccacctcggcctcccaaagtgctgggattacaggcgtgagccaccgcccctggcctctatgtcaatttcaataaatacctattaagtgcctactataggctaggcattggataaggctcaataatagcgtctccacttaacagaatttatattctagctcagaactcagattcacagacaaataatgaggatagaatgggccaagtaccactatgtaattttatatacaaaatgccatg

SEQ ID NO: 93021 - DNA, 694 bp, Homo sapiens
acagaaatcatccagtatttatgtaaatttaaaaagtacttaatttagacaatatctaccatctatccatttcttctacagcaacagataatgtaggatgtaaataaaacagaaagttacttttctttctttctatgtcaatcccctgccctccccttcccttccctcccccttcctttccttcttcctgtctttttctttctttctttctttctttctttttttttttgtgacggagtctcgccaggctggagtgcagtggcacgatctcggctcactgcaacctctgcctcccaggttcaagcgattctcctgcatcagcctcccacgtagctgggactacagtcgcggtgccagcatgcttagctaattttttttttttttttttttttttgtgcagacggggtttcaccatattggccaggatggtctgatctcttgacctcgtgatccgcccacctcggcctcccaaagtgctgggattacaggcgtgagccaccgcccctggcctctatgtcaatttcaataaatacctattaagtgcctactataggctaggcattggataaggctcaataatagcgtctccacttaacagaatttatattctagctcagaactcagattcacagacaaataatgaggatagaatgggccaagtaccactatrtaattttatatacaaaatgccatg

SEQ ID NO: 93022 - DNA, 918 bp, Homo sapiens
tgcatcattatagaaagagtcagtcaagctaattaacatatccctcacctcaccaacttagtttttttatggcaggaaaagtcaatctcatagaaacagagcatagaaaggtggttcccagcggctgtgggaaagagggagggatggggagagatgcagatcaaagcgtctacagtttcatttagactgcaggaataagttattgcacagcacggtgatcattgttaataataatgaattgtgtatttcaaaattgctaaaagaacacatttttaacattcatgcactgctgttttttatttttacattttatttatttattttaaggtggatgccagggtgttactttgtatgaaggcaaaccagcctatgaaaaggaggagggatgctgtgagtctaaaatggcttgatggttctgctttgttttatttgtatgttcattgctaatactttattaacttttttttgtattttcttaaacgtttaagtttggcgtacatgtgcaggtttgtgtaaattatgtgtcatggggatttgttgtacacattattctgtcacctagggaataagcatagcacctgataaggaggtttttgatcttccccctccaccgtcaagtaggccctgatgtctgttgttcccttctttgtgtctatgtgtactcaatatttagttcgcacttataagtgagaacatgtggtatttgtttttatgttcctatgttagtttgcttaggataatgacctgcggctccatctatcttgctgcaaaggacgtgatttygtgtatttttttatagctgcatagtattccgtgatatatatgtaccatattttctttatccagtatattgttgatgggcctttaggttgattccataccttttctattgtgaatagtgctgcgatgaacacaggc

SEQ ID NO: 93023 - DNA, 740 bp, Homo sapiens
ggatccagagaaygaagaagttaaggtttgagcccagataacaggggataatggttcagttggagaaatagggaaaccaaaaaaaaggattaaggaggagatgcagaggaaggagtgaatgagttgaagctgaaaggcggagttgaggtgcagatggactattcatattgactcttaataatcaaagcttttctttgattatgttctaagtgctcacaaatctttgctaatttttattctgtagtttttctgaaaatcagcaacctcttcctaattcattttctaaagtggttttgcaattccatctccaggttttttcaggactctgtatataatttgtgtgggcctggagtcttgaattcatttaaaacaactatgtctctttcaatcttctcttccatcttgagctttaattccctcttactgatttttacttttttaaagagatagcaagttcagagtaattcagtttggcctttaccccttgtcatttagttcaaattagtaacactgtagtgtttcattttagactctattttagtttggaaatcagattatcagataggattttgaatggtcctattatgggagggtttactgtaaaagactttccgtataaattgcaacttcatgtcatttaattattattttagctaacagactaggaatggagtgttttcacagccactggttacccaataaatgagccaacctatggccctttctgggtgggagagatc

SEQ ID NO: 93024 - DNA, 740 bp, Homo sapiens
ggatccagagaatgaagaagttaaggtttgagcccagataacaggggataatggttcagttggagaaatagggaaaccaaaaaaaaggattaaggaggagatgcagaggaaggagtgaatgagttgaagctgaaaggcggagttgaggtgcagatggacyattcatattgactcttaataatcaaagcttttctttgattatgttctaagtgctcacaaatctttgctaatttttattctgtagtttttctgaaaatcagcaacctcttcctaattcattttctaaagtggttttgcaattccatctccaggttttttcaggactctgtatataatttgtgtgggcctggagtcttgaattcatttaaaacaactatgtctctttcaatcttctcttccatcttgagctttaattccctcttactgatttttacttttttaaagagatagcaagttcagagtaattcagtttggcctttaccccttgtcatttagttcaaattagtaacactgtagtgtttcattttagactctattttagtttggaaatcagattatcagataggattttgaatggtcctattatgggagggtttactgtaaaagactttccgtataaattgcaacttcatgtcatttaattattattttagctaacagactaggaatggagtgttttcacagccactggttacccaataaatgagccaacctatggccctttctgggtgggagagatc

SEQ ID NO: 93025 - DNA, 740 bp, Homo sapiens
ggatccagagaatgaagaagttaaggtttgagcccagataacaggggataatggttcagttggagaaatagggaaaccaaaaaaaaggattaaggaggagatgcagaggaaggagtgaatgagttgaagctgaaaggcggagttgaggtgcagatggactattcatattgactcttaataatcaaagcttttctttgattatgttctaagtgctcacaaatctttgctaatttttattctgtagtttktctgaaaatcagcaacctcttcctaattcattttctaaagtggttttgcaattccatctccaggttttttcaggactctgtatataatttgtgtgggcctggagtcttgaattcatttaaaacaactatgtctctttcaatcttctcttccatcttgagctttaattccctcttactgatttttacttttttaaagagatagcaagttcagagtaattcagtttggcctttaccccttgtcatttagttcaaattagtaacactgtagtgtttcattttagactctattttagtttggaaatcagattatcagataggattttgaatggtcctattatgggagggtttactgtaaaagactttccgtataaattgcaacttcatgtcatttaattattattttagctaacagactaggaatggagtgttttcacagccactggttacccaataaatgagccaacctatggccctttctgggtgggagagatc

SEQ ID NO: 93026 - DNA, 740 bp, Homo sapiens
ggatccagagaatgaagaagttaaggtttgagcccagataacaggggataatggttcagttggagaaatagggaaaccaaaaaaaaggattaaggaggagatgcagaggaaggagtgaatgagttgaagctgaaaggcggagttgaggtgcagatggactattcatattgactcttaataatcaaagcttttctttgattatgttctaagtgctcacaaatctttgctaatttttattctgtagtttttctgaaaatcagcaacctcttcctaattcattttctaaagtggttttgcaattccrtctccaggttttttcaggactctgtatataatttgtgtgggcctggagtcttgaattcatttaaaacaactatgtctctttcaatcttctcttccatcttgagctttaattccctcttactgatttttacttttttaaagagatagcaagttcagagtaattcagtttggcctttaccccttgtcatttagttcaaattagtaacactgtagtgtttcattttagactctattttagtttggaaatcagattatcagataggattttgaatggtcctattatgggagggtttactgtaaaagactttccgtataaattgcaacttcatgtcatttaattattattttagctaacagactaggaatggagtgttttcacagccactggttacccaataaatgagccaacctatggccctttctgggtgggagagatc

SEQ ID NO: 93027 - DNA, 740 bp, Homo sapiens
ggatccagagaatgaagaagttaaggtttgagcccagataacaggggataatggttcagttggagaaatagggaaaccaaaaaaaaggattaaggaggagatgcagaggaaggagtgaatgagttgaagctgaaaggcggagttgaggtgcagatggactattcatattgactcttaataatcaaagcttttctttgattatgttctaagtgctcacaaatctttgctaatttttattctgtagtttttctgaaaatcagcaacctcttcctaattcattttctaaagtggttttgcaattccatctccaggttttttcaggactctgtatataatttgtgtgggcctggagtcttgaattcatttaaaacaactatgtctctttcaatcttctcttccatcttgagctttaattccctcttactgatttttacttttttaaagagatagcaagttcagagtaattcagtttggcctttaccccttgtcatttagttcaaattagtaacactgtagtgtttcattttagactctattttagtttggaaatcagattatcagataggattttgaatggtcctattatgggagggtttactgtaaaagactttcygtataaattgcaacttcatgtcatttaattattattttagctaacagactaggaatggagtgttttcacagccactggttacccaataaatgagccaacctatggccctttctgggtgggagagatc

SEQ ID NO: 93028 - DNA, 942 bp, Homo sapiens
atagagtcaacactttctacctgagggtgtctttagcagagaaaatagcctggagacagaagtactcctgggagcagttaagttacggctaggggaagacagaacactgaggtatgttacagagagatgcaagctcaaagatcaggctttctgcatatttctggctgattactacctaagtccccagaaaatttctgaccagccatggacgttttatgaaggttgaattactggagtgacatagccaagcaaacattgttccaatttacgcaaccacataggatctaggtaatctcttatcacaccttttgtgccataataacataaactaagcttttgaagggatagggatcagagaagaagaatcttcccccaaccgtatccctctttaatggccacagaagaataagaaatgagagcctcatggaatttagaaacagaggcagctcgtttagctattgtcattcctctgtcaaggctcttgctgatcatgcctggtaaaaccaatgcaatagcactttatacctgttaaactggcaaaaattagacagctgacaatgccaagtaaagacagtgatagggaggtgtaaggatccttgtgcactgcttgggaagaggtaaaatggtttgacatttttagagaggatttggagcacttaatcaaaatacacgttcacattcctcaagatccattggctctgtgtgtgtgtgtgtgtgtgtgtgtgtgtgtgtgtrtgtacataaactctcacataggtcccgaaaaaggcctgtatgaggatgtttatctccaaggcaacttgagtatccattattggtagagttaataggaaaaagatagtggatgcccacattgatttaagcaacagattagatgtacacgtagtaacataaatggatcttatacatctagttgggaaaaaataagaaacagaataaaat

SEQ ID NO: 93029 - DNA, 942 bp, Homo sapiens
atagagtcaacactttctacctgagggtgtctttagcagagaaaatagcctggagacagaagtactcctgggagcagttaagttacggctaggggaagacagaacactgaggtatgttacagagagatgcaagctcaaagatcaggctttctgcatatttctggctgattactacctaagtccccagaaaatttctgaccagccatggacgttttatgaaggttgaattactggagtgacatagccaagcaaacattgttccaatttacgcaaccacataggatctaggtaatctcttatcacaccttttgtgccataataacataaactaagcttttgaagggatagggatcagagaagaagaatcttcccccaaccgtatccctctttaatggccacagaagaataagaaatgagagcctcatggaatttagaaacagaggcagctcgtttagctattgtcattcctctgtcaaggctcttgctgatcatgcctggtaaaaccaatgcaatagcactttatacctgttaaactggcaaaaattagacagctgacaatgccaagtaaagacagtgatagggaggtgtaaggatccttgtgcactgcttgggaagaggtaaaatggtttgacatttttagagaggatttggagcacttaatcaaaatacacgttcacattcctcaagatccattggctctgtgtgtgtgtgtgtgtgtgtgtgtgtgtgtgtgtatgtacataaactctcacataggtcccgaaaaaggcctgtatgaggatgtttawctccaaggcaacttgagtatccattattggtagagttaataggaaaaagatagtggatgcccacattgatttaagcaacagattagatgtacacgtagtaacataaatggatcttatacatctagttgggaaaaaataagaaacagaataaaat

SEQ ID NO: 93030 - DNA, 1193 bp, Homo sapiens
gagttttgtaaaccaaggtttaaagacactgatagttaaaagctctgtggattaaaaattgagttctgcttttatttgttttctaataaaaagtttcaagataagaccaaatggaaattggaatattttgctatatcttctatgttgtagttgttaaacaatatgtattaaatcactttcggcatttgttaaaatgtaaatgtgtaagactgacttactgaatcagaatcttggggtaaagctcctgaagtcataatttttactaagtattaaagatgaatcttatcataccaaatctggtgagaaacactgaattatacagcaacctttccatggatgagataattgaagtctgaagacattaagtgatatattctgatgtcatacaaccagtaagtactagagttggttgtctcattcaggccttttgattcatagttccattttttcttctaccacatgaactraacagaaaaaagctttttgacttattaattttttagatatcctttgcttttttttcattttattgcatttgttacactctgaaaatgagaagcaactcatggaaaggcatgctcatgtagctatttttcctgtaaaggcatgaattttccacagtattattcaagcttgcttactattagatttacagaatgttatatattaatttacataatccactttgtagttttagtggctgcatctaacaattgtcaaatttatttttctccttataggtaaggagaaaatcttataggtaaattttagaaaaattaacaatacaacatttaacctagaaagttttaatggtgaattcccattgtcagtgaatgaataatccatgttatttgaacttcagaaaaatgagatatataaaaaacagtatataaagctgccacaattctatgtaacccagaagaaaaagaagaaaactatggaagcaattatacttatgagtataaatgcaaaatttctaattaacatattagtaattctgtttcagcaaatattaagggaatagtgcaccaactttgaatgggattaatattaggagtatagtcaaagttaaatattagaaatttttctacatctttattttaaaatttaatggattctgctttggggcagaatagagtaggcacaccctacctgtctctcccactgattgcaactataaaactttgacagaa

SEQ ID NO: 93031 - DNA, 557 bp, Homo sapiens
ccacttgcttgttgacacattcaacgaggagcagttaactcatcttactcagcagatatagaacagtttaggtgttcttgaaatcacatgatgagttctacatgtactcacgctacatggactcaaagatgcctactaattgtctgcagcagaacctttacaacacaatgtctcaaagttagtttgccaatgataacccaaaagtgctcaatctagaatttatttccttcattaagaaataatttgaacttaactgtaactttacagagtaaattattgaatttggcttctgataaaaatagaaattctgaatatacagcatcatttgtttcattttggataaaaatttaaaatgaatatcctgagattgctgaaactgccttaaaatcttttgtttcattcccattaacawagctttgtgagacttgtttctctactatcagttgttaaaattaaagtaggtctggcatcgtggctcacgcctgcaattccagcactttgtgaagtcgaggatggcgcatcatctgaggccaggagttcaagaccagccgaggcaa

SEQ ID NO: 93032 - DNA, 2896 bp, Homo sapiens
catttagactattttaataataatatctagcctccataaaggtatgttctattctacattcttcctgtgtcttaactcattcaatccaagtcctgtgagatgaataatattattagcttcatttgacaggttaataagctaagggccatagtcagttttcactaggtaatgctgtaataagaaacaacgtcaaaattccaatagcttctaacaataaatacttatttctcacatatattattttggtggctgcacctcactttccttagctcttctctgtgggtcttctcattccaggccccaggctgaaggagtagccccctcttctgaggggacacatcatttccttggaagagggtaaaagcaagagagatggtggaaacccactgcagatcttgaagctgcttgctagatatagtatacaccatgtttactcacataccactggccagagcacactcatggccaagaacaaggtcaatagaacaaagaagtatcatccccttagaagaaggagaaatgattattcaggagcaataatagtctgtcacagttacgctgtctttttttgtcccttttgttctgctataacagaatacttgagattgggtaatctctacagcacagagatttatttctgaaagtcttggaactaggaagttcacggtcaaggggcccacatctggtgagaattgtcttgctgcatcatcctatgatggaacgcagaagggaaagagggcatgtgcatgagagaaagttggagagtgggggagaagggactgaacttattttatcaggaacctactcctgtaatagtggtgttaatccactcataactgcagggcccttgtgacataatcactatttatttatttatgcatttatttatttgagatggggtcttactctgtcacccaggttggagtgcagtggcacaatatcggctcactgcaacctccgcttcccaagttgaagcaattctcctgccttagccttctgagtagctgggattacaartgtacgccaccacacccggctaatttttttatttttttatttgtagtagagacgaggtttcaccgttgccgaggctggtctcaagctcctaacctcaagtgatccacctgccttggcctcccaaagtactgggattacaggcatggaccaccacacccagccctaatcacttcttaaaggtcccacctcttcaggctgttgcttccaacacatgaactttgggggacacattaaagtcacagcacacaacttgtgagaaattatgctaatattcaaacctagcagtctagcactgaagtctattcacatagcatcatctctcctattcccaagaaggttgcatcagatggagaaagaaaaatcccagcagtgctttctctctcctatatccaacatggtataaaaattgatgactatatagaatccatgaagccagacagaaagcccaaggacaagaagttcaaggtctctcaggcctatagagtttcatcatcagtgtattttcaaccatagagagagatgcctaacttggagagcacagatgagatacttaataaatgtccatgttccagttccaaataatgacaaatgttagaatttaaggtcagtatctgctattctcattctgttttctcttttcttttaaatgttacttaagacaaaagaaagcttaactcctcaaaaagtacatttggcactgtactgttaggcttgtttccaagtagtaatattattaacaatatgctgaagatactgcattaaccatctattttgcactgtctcatttaatatgcatatatgatatagtgcatttataattttctcttttgtttaagtctatgtgtagattgtttgccacctagtggcagttgttttcaactcaaacattaatattcatgaccaattctaattagtttggcaatgtgcttttttttttttttaaggaaagattccaaagtcataaagtgtttaaaagtgttgacaatgacattattctgctctagcaaactttaaaaaaagtaccttgcaaatttggttcatatttaatccttgacaatgatagatgaggcagtgtattcagaagtcatttcctgttgcaagaagaatgtagagaatgataaaatgaacatttcaatttttagcaaataatactaggatgttctttggatgtgttggttttcggttttacattcagtattgcttggcaaaatatatacacatagctactaaattgacttatctcatgcgtatgttcacctatgtaacttaaaagagttaatcagttagtagtgatgttttaattgttaacattttattaaaagttatctagtcaaaatctcataagagcctaggcagcaggactgaaataatttccacaaataatataaaaacaacattccacgttttacaaaaacataaaatcccaaacttccgtatttaatgtatttgaatatattagaatggtaggaggaaagagacatggaatcatgaagtggatataaaagggaacaagtgaaggaatgaattaacgactaagctaacagaaaggagcttagaggcagggcgcggtggctcacacctgtaatcccaacactttgggaggccgaggtggatggatcacctgaggttaggagttcaaaaaggggcttagaggataatgtgtcttgaactgaaaactcagtgatgatgaagatcaactaaatctctaaatgtgaggtccaaacaataatgagggtggttttacattcaggaatcaaatttaaaagtatttttttcaaaaacgaaattttccctttcaagcaaaggaggtatttctctgaagtacaggagatacttattttagttggatgatttggggtttgggatcgaagtaaacagt

SEQ ID NO: 93033 - DNA, 2896 bp, Homo sapiens
catttagactattttaataataatatctagcctccataaaggtatgttctattctacattcttcctgtgtcttaactcattcaatccaagtcctgtgagatgaataatattattagcttcatttgacaggttaataagctaagggccatagtcagttttcactaggtaatgctgtaataagaaacaacgtcaaaattccaatagcttctaacaataaatacttatttctcacatatattattttggtggctgcacctcactttccttagctcttctctgtgggtcttctcattccaggccccaggctgaaggagtagccccctcttctgaggggacacatcatttccttggaagagggtaaaagcaagagagatggtggaaacccactgcagatcttgaagctgcttgctagatatagtatacaccatgtttactcacataccactggccagagcacactcatggccaagaacaaggtcaatagaacaaagaagtatcatccccttagaagaaggagaaatgattattcaggagcaataatagtctgtcacagttacgctgtctttttttgtcccttttgttctgctataacagaatacttgagattgggtaatctctacagcacagagatttatttctgaaagtcttggaactaggaagttcacggtcaaggggcccacatctggtgagaattgtcttgctgcatcatcctatgatggaacgcagaagggaaagagggcatgtgcatgagagaaagttggagagtgggggagaagggactgaacttattttatcaggaacctactcctgtaatagtggtgttaatccactcataactgcagggcccttgtgacataatcactatttatttatttatgcatttatttatttgagatggggtcttactctgtcacccaggttggagtgcagtggcacaatatcggctcactgcaacctccgcttcccaagttgaagcaattctcctgccttagccttctgagtagctgggattacaaatgtacgccaccacacccggctaatttttttatttttttatttgtagtagagacgaggtttcaccgttgccgaggctggtctcaagctcctaacctcaagtgatccacctgccttggcctcccaaagtactgggattacaggcatggaccaccacacccagccctaatcacttcttaaaggtcccacctcttcaggctgttgcttccaacacatgaactttgggggacacattaaagtcacagcacacaacttgtgagaaattatgctaatattcaaacctagcagtctagcactgaagtctattcacatagcatcatctctcctattcccaagaaggttgcatcagatggagaaagaaaaatcccagcagtgctttctctctcctatatccaacatggtataaaaattgatgactatatagaatccatgaagccagacagaaagcccaaggacaagaagttcaaggtctctcaggcctatagagtttcatcatcagtgtattttcaaccatagagagagatgcctaacttggagagcacagatgagatacttaataaatgtccatgttccagttccaaataatgacaaatgttagaatttaaggtcagtatctgctattctcattctgttttctcttttcttttaaatgttacttaagacaaaagaaagcttaactcctcaaaaagtacatttggcactgtactgttaggcttgtttccaagtagtaatattattaacaatatgctgaagatactgcattaaccatctattttgcactgtctcatttaatatgcatatatgatatagtgcatttataattttctcttttgtttaagtctatgtgtagattgtttgccacctagtggcagttgttttcaactcaaacattaatattcatgaccaattctaattagtttggcaatgtgcttttttttttttttaaggaaagattccaaagtcataaagtgtttaaaagtgttgacaatgacattattctgctctagcaaactttaaaaaaagtaccttgcaaatttggttcatatttaatccttgacaatgatagatgaggcagtgtattcagaagtcatttcctgttgcaagaagaatgtagagaatgataaaatgaacatttcaatttttagcaaataatactaggatgttctttggatgtgttggttttcggttttacattcagtattgcttggcaaaatatatacacatagctactaaattgacttatctcatgcgtatgttcacctatgtaacttaaaagagttaatcagttagtagtgatgttttaattgttaacattttattaaaagttatctagtcaaaatctcataagagcctaggcagcaggactgaaataatttccacaaataatataaaaacaacattccacgttttacaaaaacataaaatcccaaacttccgtatttaatgtatttgaatatattagaatggtaggaggaaagagacatggaatcatgaagtggatataaaagggaacaagtgaaggaatgaattaacgactaagctaacagaaaggagcttagaggcagggcgcggtggctcacacctgtaatcccaacactttgggaggccgaggtggatggatcacctgaggttaggagttcaaaaaggggcttagaggataatgtgtcttgaactgaaaactcagtgatgatgaagatcaactaaatctctaaatgtgaggtccaaacaataatgagggtggttttacattcaggaatcaaatttaaaagtatttttttcaaaaacgaaattttccctttyaagcaaaggaggtatttctctgaagtacaggagatacttattttagttggatgatttggggtttgggatcgaagtaaacagt

SEQ ID NO: 93034 - DNA, 1043 bp, Homo sapiens
aggcatagaggaaaagtaacttacacactacttataaacagactgcaatcagtagagctaggatttgagctttgttttaattttgtacaatgtgctttttataatacttgcaatgtgtggccacaaggcagtggtcacaggtgctaatctggcagaagtagattttggggaaatcttgagacttctgctcctggcagatgtatttcatggtgccatgacaaggggacatattctgatttcacactctwtgtcctcatgcctgatgaacttatgccactctcttagaattaaacataaaaaaattcaaggacatcatacgacaacctctacagaaagcagatctctaaaaaaaccaaccagaatttagaaatcattagctacaaagtaggtgaataatgagagcaaaagtgagggaaagggagaagtgagtgagatccagtgacacataaagctgacagttttattatgaccctaagggacaaagattattataggcaatgaaatatatatattggtttacggtttgaattttattttgatcaaaagcagattttttctcaggcaatcctcagccacagccttcttggctgcaaaaccaaatggctggctactcatgtactgttgaatgtctgagtatatttagacaactgagtgcaactgcaaaaatgtcacaagtcagccttttttgctcctgtatcagcagaagaaataagcttacataatgagcctgtgagatcgataggaagaacccaagttataatgccgcagcccaaagccccattttgcatcattcctctactgagctggtaaactaaaaaacaaaaacaaaaacagagaggattacttatcaaaaggagggataaagcagttatacttcatgtaatgctttttagaactttctaatcatgaatgccaagtggcgcccactgaatttcaagcttgcactaagttgcatatttcagaagggtccctcttccctccaaagcctgtggctgaataatatggggaggctctggcagccaacagccccagaaactgtgatg

SEQ ID NO: 93035 - DNA, 850 bp, Homo sapiens
gcagaaactgggagaacaagcccggtaatatatctcaagtggcctggatcaaacaaacaaaaaacacttcctcctagatgagagaaaatttgttccccatttgagttatgttgagattttttcctatattgtgagttaaacatacgagggctcctttctgtgacatagtatttaacagctcggcaaaggacccgggagaatgttgtaatacactaactggatggatcctggaggctgtataaaagtgacagcacatattaaacgatgcctgatctgctatgccctttggagaaagagaaaaagctcagagaagtctgtgtgctagaataggtgtactctataggaccaaaatrtcccaagctcattatattctataggaaagctggagtgcattccatttaccaagtcagtgagaaatgcccttataagagaggcacaagcattattgagaagctaagaggttgtcatcttctgtaggctgtggtaatgaaaagaaatgctgtaaaacagttgggcattctagtaacaacagagataacaggatttcagaattactgagccaagtagaagcatttaactgtcagaacaatgtggatgtaattataagtagcatatatgaatggcagcaaggaagccctgacttacagggatctttggaacttacatagagaatataatattcatagagccaaagtattttggaagccagcaataatatctgtatcaatatatctcaatctagctatatcatctatatctatatatttgtacctttctacatctctatatatttatctatcttcagacatacacatatatatatatgtacacaaatatgttcttgatcttt

SEQ ID NO: 93036 - DNA, 1868 bp, Homo sapiens
tatagaattccctcccttcttatgtccgaaaacatgttatatcctttctacatcttcactgtattatttctcctctactgagcaatccttctcatctgtaatttaacttatatagtgctgcctccattatcttttgaaataataatagtgatcatctattcaaaaaaattactctcacctctttctgagcttgaatttaaccctttctttagtatgacaccacatttccttttttatcatatttattaataatttgtcttactccttgtcctgacatttacttccacaaaattccatttgcactagattgcaaaccatttaacagaaagaaccatgctattcaacttgatgtctccactcccccagatttttttaaaaaattattataatattaatcagattgcctgatgtttgtgaatgacatgtatgtttcattgactcagtacctaacaccttttccttttggatactcagtagatatttattgactgtaaaaatgaatgtgtgtctaagtgaagggaaacttcttaattatctactaggggtgcattgataatcagacacatactgttgcttacctctactcactcttgataaagcagcaggtgtttcttgataaagcagaaaatcagcaggtgcttcttttctgtgccaagaaaactctcgttgaaattcacaatgaattagagctttgtaatagtcaggaaaaaaaaaaagagaaatgtcacccataaaacccataataccaagcacgtggatccagatctagtttggctttcgggtttatgaaaatagttgggggtggataggtggataaagataatagaaagctcaaaataacacaatgtcttgggtcaaatgaaaatatatttctttgaaaatagggatgattatcacttaatttttagaggcccaccttgtctctagagtgtatagtgtgagtgtgtgtgtgtgtgtgtgtgtgtagtgaagggaggtgtaaaagaaaccaggacactgcgtttttaaactgttaccatcacatacttgttgtggtccttacagagaaatgcatggtagtctggcaaaaaaaaggggtctatacaggtcagattaaagaaaaattagtcttgaatttattttttctttatgattgttgttgatataaacagcttttgattacccaaattttcattttataataagttgtattcaagatgtgtgcatggtccaaaatagtaaactaattttattgcatctttacacaattccaactaattgtaaatagaaatcacacgtaaaactttrtaatacttcaaatacaatttggagattattatgaatgctgattttctctccttatagctaaataatggattaagttgccaatcacaaattagttagaagatgataaaattattggttatgttctcatatgaggaccataatctcgaacctattaaatatttttgtttggctgagtactaatggaattgttcagatcagcatgtgcttaatttatgtgccaggaaaactcttattgaaatccacaaacaaattagaactttgtaatagatgtgtggggctggggaggatgggtggtatcacccataatgcaaagcatcaggattcatatctagtttgatttcaagtttgataagaatagttgggaatggatgagtggataaagacaatgaaaatgttcaaaataccaattaagtgtgtgcattggcactcgttatattgaatagatgtataactttatttcttttttttaaattttactttaagttccaggatacaagtgcagaacatgtaggtttgttacataggtatatgtgtaccatggtggtttgctgcacctatcaacgtgtcaactaggttgtcag

SEQ ID NO: 93037 - DNA, 745 bp, Homo sapiens
cagtaccccccacccatatacctggcccttacacacacagacacacagtagaaaagcttaacagatccttgtcctctccccatgtggctagtgatacacccacctgctctaagctatatgagggcagactcttgttcactcgtgtagccttggggcccagaaaactatcccatacaaacacaatacatgtttgctgacggttgcaacatgcctacccgcccttcttattttgccagttcacattatgcctccctggggaacagctgtgagtatacactgggagagaggatgggaatcaaacccaggtgccatggtgttccacatccagctgggttgctgacctgggtgaacatgggcttgccatgctgggtcaccatgctgccctggtcacagtcgagggacacaaagttgctgtggaatgcctccttggggtgcttaagaacatagtacagctccgtagcacccccctcaaagatgctgcggaagtagcgtgggatcagggtccggccaatggctgtagagatgggacaaactcttcaggacaaagggacygcaaaaggggccaggcagatgcctcccctaccaatctagatatcccctggcactcccagacccacttctagaccttagaacgacataggaggtatacaccctcatagcaagaccccagaggccacttactatatctctttggtccatcctccaggcagaaagtgatggtcaacatggcatcatcctcaaagaa

SEQ ID NO: 93038 - DNA, 761 bp, Homo sapiens
cccgccccagccacagccctagggaagcgtccaagctggctctttgtgtataaatcatggtctgtttactgaacagggagtgtgtctttcctcctggggagctgccccagggtggctgcaggtgcaaatagggttgaattcaggatagggccttctctcctgcccagcctgaccgctgagtagcctctggactggaatgaaaggctttccagtaagtgccttgctggactgcagctcagccatgtgccaggtgggaatgggggtgggagaccaaccaagagaaggattcaggagcctgagagcaggggcaggaacttgccaacaaatctcttagcaagctgctttctcagctggcctcatagagcgtccccagggacgtcacrgggcagagctggtcacgaggagtcctggctgccctcccagcctgatctagaggaagaagggcgcatggggtgaaaacaccagggagctcaaggcaggattcagaaatcagacactgcggctgcctctcccctggccttgaaggacatacggcctgggcctctcttgatccgtaactgatcagagtgggtggggtggggtgagcaatcagatctgcaactgttttcacagagaattgagcggccctgcaatgcctgatgcgtggaaaacacattccacttggcctggggctgggccagtccccccttggtctaatcttgagtgtgtcccatcccctctctgaggtcttcatctatgacaatgaaggggtaggggcagca

SEQ ID NO: 93039 - DNA, 499 bp, Homo sapiens
aacagaataaaagaaaygctgctcattgaaaatcttaattgacccagtaaattttattttattttattattttttcttttgagatggagtcttactctgtcacccaggctggagtgcagtggctcaatctcagctcactgcaacctccgcctcttgggttcaagcaatcctcctggcctcagccttctgaccagggagttttttagtcatcaaatactcaactgactgcttagaaagttcaaattgttatatttataattctcatattgactacaaaggattcagaaagtataaaaagttattatactaatcctacagcatttttactgccttttgccaaatttattgtatatattgacttgtgatattgttatgtatctacctgtattttcccttccactggattaaagttcagctttgcatttctgcaaactgccttgtaaataataagtagcaaatatatgccaaattaaattgatagtctagcggtactaataat

SEQ ID NO: 93040 - DNA, 499 bp, Homo sapiens
aacagaataaaagaaatgctgctcattgaaaatcttaattgacccagtaaattttattttattttattattttttyttttgagatggagtcttactctgtcacccaggctggagtgcagtggctcaatctcagctcactgcaacctccgcctcttgggttcaagcaatcctcctggcctcagccttctgaccagggagttttttagtcatcaaatactcaactgactgcttagaaagttcaaattgttatatttataattctcatattgactacaaaggattcagaaagtataaaaagttattatactaatcctacagcatttttactgccttttgccaaatttattgtatatattgacttgtgatattgttatgtatctacctgtattttcccttccactggattaaagttcagctttgcatttctgcaaactgccttgtaaataataagtagcaaatatatgccaaattaaattgatagtctagcggtactaataat

SEQ ID NO: 93041 - DNA, 709 bp, Homo sapiens
aaaagaaatattccactactattttttaaataaatattttcataacggctaaaagtaggatggaagtaataaacaaaaataactttgctgtttttctcagctcttcataaatttgcatcagagtttgtagatgatacaaaaatcattgagacaaagtattctcataaaaacactatttctcaccctcccgttttgttatataaaaataaacaaagctctgtgagataaatgagcacaaaataaattgcctttaaataaggtagttatttttttcacagtcactcagaagttttattattttaatgaaggtcattatcacttcacatataaaaattacgtaacatgagggccgggtgcggtggttcacacctgtaatcgcagcactttgggagcctgaggtgggtggatcaccaggtcaggagatccagaccatcctggctaacacagtgaaaccctgtctctactaaaaatacaaaaaattagccgggcatggtggcaggcgcctgttgtcccagctactcaaaaggctgaggcaggaaaagcacttgaacctgggaggcggaggttgcagtgagccgagatcacaccactgcacacccagcctaggcgacagagcaaggctgtctcaaaagaaaaaaaaaatatatgtaacatgaaaaastcagttatgtgatgccagctccagtagtatcacaagacgaactatgca

SEQ ID NO: 93042 - DNA, 1832 bp, Homo sapiens
cggaaggtagcttggtgagcaggaagtcagaacaaggggagttgaatgaatggactgtctaatagcatcagggtaagataacctgatgtattcagctcacagtggtcttgctattgatatggaaatacctaaatcactcagcctcacttcccattggactctgcttgcaagagctctgctatcatttgtgcacaaactcttctttttctattcttccaaggctgattaattccactactgttcaacacgttcatgctttgggtatattgaaacattcaaaaagtgacattctagtcctgctggcatgagagtcacttgctctcttttagttgactttgtatttcttggctcttgagcatgtcagtttaacagtgtaattcccaaaagactatcttatttcccttattttcagagttggtgttccccaatgtcagatgttcctccaaactctctcatgcaaataatagataataaccacatcagtaatcatcatatatcatataaggatacatagttggaaatgatttgaaactatttgctctttaagatttctacttagttttgggtattgtgattatatctttcctaggattcttatttctaagttttaatctatatattcataaagcttagaagtgaccttagggatcatttgattcaatagtttcattttataggcaaagaaagtgctgctccagagatttttgagccatacaatatgtaagttgtacattgtggaaactgaagttggggttcactgactttcagcctcccctattttctgccaccttacaggtataagacttcaagaattagatctccacatagagttcccctgtattcttcaggctagtaactccatctttgaatatttctcttttttaaatacttctaccatagtgcaatgcatataaaaaattaatgcaagctagcctatattactattagttatatgagtttaatttatgtaagataaattggtgctgtatcacaaataataaaaaaggaggctttatgtttttattaatgcaaagcaactgtttttgctttttttccccctagcagtttttatttttttttccccctagcagttttcacataaaaactctgttcctgtatttaagatttttttctattccaaaaacatagagtgattcaaataaaaactcagcatatattatataatattatataatcagcccaaaatacctatatagtctggggaggggttggatatttatttaaaaacataaatgatataatcttagtatatgagaatgagtggtaattctaagtaagagggcttaaaaaaaactggaaatacctaccrtttgtttattcagctgcaaatgagattgaaattcagtgatgtctacacatattgtagaatataaagctgataaaaaaaattgtcttctaaatggtgctgacaacaaagtgctcaaaattctccccagcttgagtcctagtggcaggtctggtctagccgacatgtatacctcaaggcggagtcacacttaagcgatcttagcaaagactccttatattataaacatctaggggatcatctaatatcttctagtaaacacttacctcttttcttacacaaacacacacacacagtaacaactattttattctaatccaccaaatctgtctataatttaaagtggtgtttaccacaggaacagaaaaccaaacactgcatgttttcactcataagtgggagttgagcaacgagaacacatggacagagggaggggaacattacacaccagggcctgtcgggaggtgggggcaagcgaagggagagcattaggacaaatacttaa

SEQ ID NO: 93043 - DNA, 1832 bp, Homo sapiens
cggaaggtagcttggtgagcaggaagtcagaacaaggggagttgaatgaatggactgtctaatagcatcagggtaagataacctgatgtattcagctcacagtggtcttgctattgatatggaaatacctaaatcactcagcctcacttcccattggactctgcttgcaagagctctgctatcatttgtgcacaaactcttctttttctattcttccaaggctgattaattccactactgttcaacacgttcatgctttgggtatattgaaacattcaaaaagtgacattctagtcctgctggcatgagagtcacttgctctcttttagttgactttgtatttcttggctcttgagcatgtcagtttaacagtgtaattcccaaaagactatcttatttcccttattttcagagttggtgttccccaatgtcagatgttcctccaaactctctcatgcaaataatagataataaccacatcagtaatcatcatatatcatataaggatacatagttggaaatgatttgaaactatttgctctttaagatttctacttagttttgggtattgtgattatatctttcctaggattcttatttctaagttttaatctatatattcataaagcttagaagtgaccttagggatcatttgattcaatagtttcattttataggcaaagaaagtgctgctccagagatttttgagccatacaatatgtaagttgtacattgtggaaactgaagttggggttcactgactttcagcctcccctattttctgccaccttacaggtataagacttcaagaattagatctccacatagagttcccctgtattcttcaggctagtaactccatctttgaatatttctcttttttaaatacttctaccatagtgcaatgcatataaaaaattaatgcaagctagcctatattactattagttatatgagtttaatttatgtaagataaattggtgctgtatcacaaataataaaaaaggaggctttatgtttttattaatgcaaagcaactgtttttgctttttttccccctagcagtttttatttttttttccccctagcagttttcacataaaaactctgttcctgtatttaagatttttttctattccaaaaacatagagtgattcaaataaaaactcagcatatattatataatattatataatcagcccaaaatacctatatagtctggggaggggttggatatttatttaaaaacataaatgatataatcttagtatatgagaatgagtggtaattctaagtaagagggcttaaaaaaaactggaaatacctaccgtttgtttattcagctgcaaatgagattgaaattcagtgatgtctacacatattgtagaatataaagctgataaaaaaaattgtcttctaaatggtgctgacaacaaagtgctcaaaattctccccagcttgagtcctagtggcaggtctggtctagccgacatgtatacctcaaggcggagtcacacttaagcgatcttagcaaagactccttatattataaacatctaggggatcatctaatatcttctagtaaacacttacctcttttcttacacaaacacacacacacagtaacaactatttwattctaatccaccaaatctgtctataatttaaagtggtgtttaccacaggaacagaaaaccaaacactgcatgttttcactcataagtgggagttgagcaacgagaacacatggacagagggaggggaacattacacaccagggcctgtcgggaggtgggggcaagcgaagggagagcattaggacaaatacttaa

SEQ ID NO: 93044 - DNA, 463 bp, Homo sapiens
cccccaaagaagtggaagacagttagatgtgtgatttatatcaaagaagatgatattcttagtgggaggtagaaaggatagaagacagatgttaaaaaaagttaaaataaattcctgctgttttataggtggacttgaaattaaatatataagtagagccctaggttatatttcttagatgctaataaaataatatgtgaacactagagtcaatacaatgattgatatgggaagaatatagatctgtaaagtgcttatcgtcctaaccctggaaggatccagctgtatgactcagtgttctcatctataaaacaaagaaattatactaaataatctctatggactgttctcagttttggcatcctgaaagtaatatttagaatgggattaactagaatcatttctcataggctactatctagtggcatattgggattttttttatttatatttaaraaaagta

SEQ ID NO: 93045 - DNA, 620 bp, Homo sapiens
ttaatcttgagtcaagcacagataacacacccattttacttggacacccagcattgaaacttttaaaattatactacttaagtatatgtcagtataaaattgactaggtataagattcctttgcttagaactcttatatataactataaaccaaaacaaactatcaaatgaataaattctcaatgtgtagatgatatttggctgacctggaagggccccatcccagggctgtggagggctgctgccstgcgagctcccttgcattcagcacacctgggcctttgtgtgtccaagatgtctgcaccctccagccctttgccaaatttgagctactttgaatgtttctacagtgtgtcgtgctattatttggcctccactgggtgtgactgaattacttccctgttaaatcccactctgttccctactcattagctcagtgcttctcagaatttaatgtgcagaggattcacctgtgggtcttgttgaacggcagatccttcagtatgaaacgaatgcttcagtaggtctggggtggagtctgagatgctgcgttaccagcaagctcccagttgacagtagcaaggcttagctgtgatgctccaagtaataccacgtggcac

SEQ ID NO: 93046 - DNA, 645 bp, Homo sapiens
ttcctgaaatcccgtcagttctaggaattcatgacacttctctcctcccaatttgggatgtggttacacaatcatggtcccttcagtctccatctcaaaccggaagctttacccctgtcagccctgtagaatgtcttgggtaagaatgaataccctggttgggcgcggtggctcacgcctgtaatcccaacactttgggaggttgaggtgcgtggatcacctgaggttaagagatagagaccaacctggccaacatggtgaaaccccgtctttactaaaaatacaaaaattagccaggggtggtggcgggtgcctgtaaatcccggctactcggaaggctgaggccggagaatcgcttgaaaccggaaggcggaggttgcagtgagcgaggatcgcgccactccactccagcctgggcaaaacagcaaaactccatatcmaaaaaaaaaaaaaaaaaaaaaaaaaaaagacaaatgactaccctggggcactatagctttcaggaggtttgtgatccatttctccattccccttattcccaagtttctaaaatttggtcagcaccttagaccacagcaacacccatgactttggtcagtgtgacatgcggtagaaccaacactggatttgaagtcagatctagga

SEQ ID NO: 93047 - DNA, 645 bp, Homo sapiens
ttcctgaaatcccgtcagttctaggaattcatgacacttctctcctcccaatttgggatgtggttacacaatcatggtcccttcagtctccatctcaaaccggaagctttacccctgtcagccctgtagaatgtcttgggtaagaatgaataccctggttgggcgcggtggctcacgcctgtaatcccaacactttgggaggttgaggtgcgtggatcacctgaggttaagagatagagaccaacctggccaacatggtgaaaccccgtctttactaaaaatacaaaaattagccaggggtggtggcgggtgcctgtaaatcccggctactcggaaggctgaggccggagaatcgcttgaaaccggaaggcggaggttgcagtgagcgaggatcgcgccactccactccagcctgggcaaaacagcaaaactccatatcawaaaaaaaaaaaaaaaaaaaaaaaaaaagacaaatgactaccctggggcactatagctttcaggaggtttgtgatccatttctccattccccttattcccaagtttctaaaatttggtcagcaccttagaccacagcaacacccatgactttggtcagtgtgacatgcggtagaaccaacactggatttgaagtcagatctagga

SEQ ID NO: 93048 - DNA, 645 bp, Homo sapiens
ttcctgaaatcccgtcagttctaggaattcatgacacttctctcctcccaatttgggatgtggttacacaatcatggtcccttcagtctccatctcaaaccggaagctttacccctgtcagccctgtagaatgtcttgggtaagaatgaataccctggttgggcgcggtggctcacgcctgtaatcccaacactttgggaggttgaggtgcgtggatcacctgaggttaagagatagagaccaacctggccaacatggtgaaaccccgtctttactaaaaatacaaaaattagccaggggtggtggcgggtgcctgtaaatcccggctactcggaaggctgaggccggagaatcgcttgaaaccggaaggcggaggttgcagtgagcgaggatcgcgccactccactccagcctgggcaaaacagcaaaactccatatcaamaaaaaaaaaaaaaaaaaaaaaaaaaagacaaatgactaccctggggcactatagctttcaggaggtttgtgatccatttctccattccccttattcccaagtttctaaaatttggtcagcaccttagaccacagcaacacccatgactttggtcagtgtgacatgcggtagaaccaacactggatttgaagtcagatctagga

SEQ ID NO: 93049 - DNA, 1030 bp, Homo sapiens
aaccctgggttatcaaaaggcaggggaacatcactgagtgggaaaggtgatgcagagacgagttggaatagaaacaccaataaatataaacacttggagtttacggaatgcttgtggcagaaggtgccttacrtgccaagagacaattactccaagtctgcaatacataaccactagctgttattaatatcttaagggaaattttcagcccgaaaattaatatcactgactggttcttagttgttgtatggtttcttttccttcaggttagagttcttaattcttctgttcccttgtttctccagttgtaaacttaagatgatgacgtcttctgtagatatcacttgtcaagtgtgcacaaataacctgtaccaggaagctaaagtctgctcccaggccacttggctgatacctgaccaggatgctgacctcctctatggagttctgtttccttatctctgcactgggcagccctgagttggccttcctctgaagggctgcctcttggcacagctcctagccagtgataaaggacttgacaaacatggtgtgctgaatcatatctgctgtgggagggtgagccagaggtgaggcattgatatggagaaggatggcgacatatttctgatacctactgtgggcgcctatgagcaaaagtctttcctggatgtagttatgcagcaccacacactaacaatattcatcatcatcatcatagctaccactgaattgggggctttctctgtcccaggtaggggaatgcttggcagatttgacacctcaagttggtcgttttttaaccatgcaccttatgacacaattattttcagtaccaatcatgaaataaatcaagtaataatagtggttagaaaagaaacatgaacatggaacacttttaatgaactttgcatatttaatcatgccaacaaataataataacaaagagcaaaaaagcaaacaagaaaatagattaattcttttaaatagaattaatgtatattttggaaaaaatacagaagaatggattctg

SEQ ID NO: 93050 - DNA, 711 bp, Homo sapiens
taaccactactcctcactacagactttttcttaatggaagagaaaacctcttcctgtaatcccagtgccttaagccaatcacagtgatgttttgggtgctttttcctgtatcttttttgcacatctttaacagttgtaataataaaacataataatttgccttctttttgtttgtgtcactgagatttatagcaagaacaacttttctatatcacctttataatcctcactttctagtgagcattaaataaggaacttaatcattatcctaattttgagaaaatgtttctttataaaaaacattgtaatgaacatctctggctctaaagaatgtttcttatattcgatttttctcaagcctgaattctcagaggtaaatttacagagacaaaatgtaggaactttttttttcttgttaattgttggtacatactgcaaattttcccccaaactgtactacaaggctgaatgttttgtcaccatytaatcacttatcaagcagagttttgaagaatgaataaagtatgtgagtgaacaaaaatataagaagagtccatgctgatggaagggagattataaacagaatggcaagttcatggaacccctggaaaataagcagggaattctgggatgtgaagctggaggaagcagagatgagatcgtgcaggggcttcctcacactccatgttgaagaacagggactagattctg

SEQ ID NO: 93051 - DNA, 672 bp, Homo sapiens
aagcaggcctgcttagccagatcctctgctccatggtgtctcatatcaagatgatggccaagggtctcctctgaaagctcaactgggaaacaatctgtacccaagctcactgacgtggttgttggtaagagtcagtttctsaaggcctcagtcccttacaggctatgaactggaaactgccccagtctcttcctgccctctcttctctaacatggcagcttgcttcattaaacagtgagagagagagatagagagacagagagagaatgcactagcaagactgaagtcttgtgtaacctaatcatagacaccccctcaatgttcccatattctctttttcagaagtaagttactcaaaaggaggatactacccacggctgtgaataccaggaggtagagatcattggtggccattttgcagactgcatgtcacatagtgagaaaaatttttgcatggtaagtccctatagagtggctggctattcttattcttttgaaaatcctatcaaaattggttagtcagtagtacttgctaatttatcaccctagagagacaaaacatccaggaaaatgccagtgggggaagaaaaaacagaaaacagagtaggggacttgtcattggtggcctgtggtgtacaacttcttgagacaatcttagactgtgactgcagg

SEQ ID NO: 93052 - DNA, 672 bp, Homo sapiens
aagcaggcctgcttagccagatcctctgctccatggtgtctcatatcaagatgatggccaagggtctcctctgaaagctcaactgggaaacaatctgtacccaagctcactgacgtggttgttggtaagagtcagtttctcaaggcctcagtcccttacaggctatgaactggaaactgccccagtctcttcctgccctctcttctctaacatggcagcttgcttcattaaacagtgagagagagagatagagagasagagagagaatgcactagcaagactgaagtcttgtgtaacctaatcatagacaccccctcaatgttcccatattctctttttcagaagtaagttactcaaaaggaggatactacccacggctgtgaataccaggaggtagagatcattggtggccattttgcagactgcatgtcacatagtgagaaaaatttttgcatggtaagtccctatagagtggctggctattcttattcttttgaaaatcctatcaaaattggttagtcagtagtacttgctaatttatcaccctagagagacaaaacatccaggaaaatgccagtgggggaagaaaaaacagaaaacagagtaggggacttgtcattggtggcctgtggtgtacaacttcttgagacaatcttagactgtgactgcagg

SEQ ID NO: 93053 - DNA, 965 bp, Homo sapiens
gaggcaattctttttaaattttttttctttttttttctttcacgtccatctgtgatccaagttaggggcaattcaaaggaggagttgaagcattatcttcctaaagagaatggaacctcacctgggaagatgaaatggactgctggggaggatagaccggtgaggaagtggggccagtattggggtagagagggtgacgtgtctgatttaggacactgttctagggactcatggggaactttggtactttagggaactgaatgggatttgattaaagagctgaccatcaggctactgcagagtgtaatgagagaccagatgaggctgtaaagagggaccataatggggagtggaggatgggcctgccggacggcagaggactgaccccagagggagaatgggcacaaggcagacgcagaagacggggagggacttccaagaaggaagttggtagcgtggcagacgagcccatcaagagcttccygaggctgaaagctgcaaaaatactgttggattgagaagagctgtgagactgaaaattaactcacaggggcttaagcaagaagggtctgtgctcagaaggaatcacaggcgaaaggggcatttatatcgttatttttaaaagtggagagagggtaagcaaaggagtgagtttcctgaggaggtgggaagggatgaggttggttttaaaattcctcttcccttaagtcagagtggagggagagagaatgaacgagctgcgcagaggtgtgggaggcacagtgatggagggcaaaggaggtcacatcaccatctccgtcggcctcaggaggtcaggcaaggcaatctgttctgaggacggcgtgcaggtggggagcacggtgaggggcagattcagaaaaggactgtgcagaggtgccggggcagctgcagaggaggaataaagggattgcagcagagaggactggttgaagctggaatcatga

SEQ ID NO: 93054 - DNA, 965 bp, Homo sapiens
gaggcaattctttttaaattttttttctttttttttctttcacgtccatctgtgatccaagttaggggcaattcaaaggaggagttgaagcattatcttcctaaagagaatggaacctcacctgggaagatgaaatggactgctggggaggatagaccggtgaggaagtggggccagtattggggtagagagggtgacgtgtctgatttaggacactgttctagggactcatggggaactttggtactttagggaactgaatgggatttgattaaagagctgaccatcaggctactgcagagtgtaatgagagaccagatgaggctgtaaagagggaccataatggggagtggaggatgggcctgccggacggcagaggactgaccccagagggagaatgggcacaaggcagacgcagaagacggggagggacttccaagaaggaagttggtagcgtggcagacgagcccatcaagagcttcccgaggctgaaagctgcaaaaatactgttggattgagaagagctgtgagactgaaaattaactcacaggggcttaagcaagaagggtctgtgctcagaaggaatcacaggcgaaaggggcatttatatcgttatttttaaaagtggagagagggtaagcaaaggagtgagtttcctgaggaggtgggaagggatgaggttggttttaaaattcctcttcccttaagtcagagtggagggagagagaatgaacgagctgcgcagaggtgtgggaggcacagtgatggagggcaaaggaggtcacatcaccatctccgtcggcctcaggaggtcargcaaggcaatctgttctgaggacggcgtgcaggtggggagcacggtgaggggcagattcagaaaaggactgtgcagaggtgccggggcagctgcagaggaggaataaagggattgcagcagagaggactggttgaagctggaatcatga

SEQ ID NO: 93055 - DNA, 965 bp, Homo sapiens
gaggcaattctttttaaattttttttctttttttttctttcacgtccatctgtgatccaagttaggggcaattcaaaggaggagttgaagcattatcttcctaaagagaatggaacctcacctgggaagatgaaatggactgctggggaggatagaccggtgaggaagtggggccagtattggggtagagagggtgacgtgtctgatttaggacactgttctagggactcatggggaactttggtactttagggaactgaatgggatttgattaaagagctgaccatcaggctactgcagagtgtaatgagagaccagatgaggctgtaaagagggaccataatggggagtggaggatgggcctgccggacggcagaggactgaccccagagggagaatgggcacaaggcagacgcagaagacggggagggacttccaagaaggaagttggtagcgtggcagacgagcccatcaagagcttcccgaggctgaaagctgcaaaaatactgttggattgagaagagctgtgagactgaaaattaactcacaggggcttaagcaagaagggtctgtgctcagaaggaatcacaggcgaaaggggcatttatatcgttatttttaaaagtggagagagggtaagcaaaggagtgagtttcctgaggaggtgggaagggatgaggttggttttaaaattcctcttcccttaagtcagagtggagggagagagaatgaacgagctgcgcagaggtgtgggaggcacagtgatggagggcaaaggaggtcacatcaccatctccgtcggcctcaggaggtcaggcaaggcaatctgttctgaggacggsgtgcaggtggggagcacggtgaggggcagattcagaaaaggactgtgcagaggtgccggggcagctgcagaggaggaataaagggattgcagcagagaggactggttgaagctggaatcatga

SEQ ID NO: 93056 - DNA, 2040 bp, Homo sapiens
  misc_feature (1)...(2040): n = A,T,C or G
tgggagcttcccaactggctgtcccatgcaattggctttggtttccccactagcttccttaaatatgtctcccaccctctcagggccccaagggaatcactttggaagatctgtcaccagaggacctcggctctccagccttggagacagaggacctgacacagcagacaggctgggagggccaaggtggaggggagacattgttcctctggctactttatttctttggtttgtggctgtttgacaacagcagtaaaaacagctgataaattaggtgcctggctgtaaactgcagcaccagccatggtgcagggagcagaagtgctccccgccctccagctccctgcacactcttcagacccatcagggcctcatcctctccagcacccccaggtctcagtcctgaggctcrgacacagacaggggcaggggtaggagggcccgtgtctccctactcccaagtgctttctctgatcacagaaggaccggagagccgctgttggctcctcagaggctcttcaaacagagagatgtttatatcttttcagggcgatccaaattacaagcagggaactggagcctagggaaagtaaaccaagggataccagatagagattttttttaaaagcttggtttaaatcaacttccagaagacctcaaatgaggccagtggggcggaggaagtgccagaagaagaaggccggcaggtctggctctccagagtccagcgtgacccaatgcccagttcctttctgccccgggctcagtttccctctgtgtaccgtggcctcttctctcccagcttgttcaggaggccagttaatctaatggagaaggagccctgcagaactgaggatggagtcctggtgcagctttgaggagctgccagggcaggccagatcttctggcagccatcgactgcatcggtggccacaggaggaggctggcctgaggcctatatggaggcacttgttctaccccttggcagagacagtctgtctggtctcctgtcacttcacctttctgctccaggccccgcaggtgcctcggaccctgggtcagagcccatggggtctaaggcatccattcgatagtgctccatgccagactatgcaagaggccttgaggcataggtaccagctagagcttgcccttagagttcagttcctgaacacagaacacagctgctttgactcagcacccccggttctgtttctccactcatccgtccgccccctggcacggctgtataaagcttctacagnnnnnnnnnnnnnnnnnnnnnnnnnnnnnnnnnnnnnnnnnnnnnnnnnnnnnnnnnnnnnnnnnnnnnnnnnnnnnnnnnnnnnnnnnnnnnnnnnnnntaattgacattgagggctaggacacaagtctagtgggggctggttttttccaggcattttaattttttacttattccctcatcctgcagggcagctgcactcacatatgaccctagtcgagacttaggaggtcttaggggggcaagttccaggctgtattagaccaatgttagacctgttgcatattagatgaatgagctgcaaagcaatgtaccatttctctttgatatagatgacatttctcacctactggaactatctaggtagcattttgtccaatctaaggagctgtgtgactttaggcaagtcacttaacctctctgagttcagaacttttatcttggaagttaggaaagggatccctgtgaaattgttatgaggatcaaatagataagaaacagctctgaaaagtcaaagtgttctagagtgactaagattctataacaaccattaagattagcagagatggactatggcaaacactagaaggaagctaagaactctataaggccttaaataggctgtactttctttcaccacttgtgctggcctgcccattcttctctactgctttttctctgtgtagtgtgtgtatgtttcattttacacacacacacacacacacacgagttgtccagatccatctgtacctacatagattgccccaaacagagat

SEQ ID NO: 93057 - DNA, 526 bp, Homo sapiens
ctgaagttactaatattgacctcctctgtttaattttttaatttttaaatgaggatatatttaacaacatttttgaaaaagagataaaactcaaccatattccaccatcctaacacaatgttctttttggtatattgccctcctgtctttgtcttgatgcatacgtattttataatcttataattacagcataagaggtaaagtataatactggattcagaacttttcaccaggatcataaagagttttctagtttttcagtttcaacaatgatctttttttgtacttttctatgttcaaccgtatatccattctttatttgtccttttccaatttctgagtatttagattattttcagattttattttctgtttaccctataatatcgataatacaaaaaagaaaacaamaacaacaaaagaatgattctgactcagtacaacctggcctttacttctttctctagcttcttctcttctctctcctgacctccaattccatgctcaggtcatggtaatacctgga

SEQ ID NO: 93058 - DNA, 540 bp, Homo sapiens
  misc_feature (1)...(540): n = A,T,C or G
gnnnnnnnnnnnnnnnnnnnnnnnnnnnnnnnnnnnnnnnnnnnnnnnnnnnnnnnnnnnnnnnnnnnnnnnnnnnnnnnnnnnnnnnnnnnnnnnnnnnnacttatattcataccccctcctagtttaaaagcaaggttatatcaatttatacattacaacagggtaaaaaacagacaaaaagtttgggcaaggggaattgaggttaatttaatacacaaaatacagatcttaaacagctacagataggccaccaaatctgtcctgaatctcctagtggcaaaacagaggraaactgttacaattttcttttcttttttttttttttttttttttttgagacagagtttcgttcttgttgcccaggctggagtgcaatggcctagtctcggatcactgcaatctccacctcccagatttaagcaattctcctgccgcagcctcccaagtagctgggattacaggtgcctgccacctcacccggctaatttttttttgtatctttagtagagacggggtttcaccatgttggccaggcca

SEQ ID NO: 93059 - DNA, 2237 bp, Homo sapiens
cattcaaccaaccttgactgaaaatatttggaaaaaaaattccacaaagttccaacaggcaaaacttgaatttgctacattctgaatactatgttgaatccacacaaataaaatgatgtgtaggcactgtagtaggtattataaataatctagaaatgacttaaagtatataggagactgtgtgtaggtcacatgcaaatactatatgccattttttataagagacttgaacatccctggattttgttatctgcaggggtcttgggaccaatcctccgtgtctactgagagatgactatcctttaagcaacaaaacacttattctagaaaaaatggcagcagtggcaacagagttattcaatctctccaaatcactgtctacaaagagaactaactagaagcaaaacccaaaaatccatagccaacactcacaacaaggtaacaagatatccccacaaaccccaaagtacaagctctgtgtattctcctttcctttcaaaatgctatcaattttataaacattccatataacaaaccaagacagcctagagtttttttttaatcctagttatagtaagttacaactaaataaggtattctcataggagttgagtagtgcaacatgtagaaagctaattatttccataagctggacattacacttctacacagcatgagaaactatgcctctgagaaagttccttaactttgctggtcacccacaagtggccacaatggtcttgatgttgttaccttagactcaggaaaaaaatgaactttctaagaacatttgaaacctaatatttttacaagtaaaaaaagttatgcaattgattaaagtcttttgtgaatcacacgtaaaacattaaaaatgattgtacactaagactgctacattttacttgtttttttaaaaacaaggtagtgtaattatcagtataaaataatacttgtttactaaaagaagcaatgccataacatgatatcagagaacactacttgcaataggtaatactactacttcccaactgtagtagttgtcattttcctctttttcctattagccacagccacactgagtgtttctcagtcaaacatatcaagagcattaccctggagagttagggtaaaggtctttggaatttactgtacgtgagatgggctcgttacagaattttaggcagaagcatagtacgatctcacttatattttaaaaggatcactctggatgcatcaaaacaaggatcagcaaatcatgaccctcagggcaagtctggcctgccacaattttcataaatttttatcggaacacagccatacccatttatgtattgtctataaatgctattatggcagagtagctggccttctgtagaaaaaatctgtcaacctatgctttaaagaatagaccctagggagaaacaaggagaaacaggaagacacatgagatgctaccacagtaatataaatgagagttcagggtgattcacaccaatgtgatggcagtggagtggtgaaaaacagtaaagtgctgaatatacttataatccattagataattaattccctgatggactggatgtggaatatgagagaaaaagaggaatcaaagatatctccagggtttctggtataaacaactaagagagtcgtcatattactgagataaagagggctggggtacagcgggtttgagraaaaagcttggtaaataagttttgtaggtgttggatgtgaggagtaaaatgatatccaaacagtaatttgatatatacacagttatcaaataaagtagccattatgttatgcactgagtatatcacagagatcccacaacccaggaacttccactgtgctttattcagagcagctgctatcagttttgtatactgaggagctaaaagtttgtttgaaaaaggtttcctttgactaataaaaaggaaaagaaagacagaaaagtttgaaaatcataattctagcctcaatatggactattaattgctaggcaaggatttctccccataaggaatttatctatgttcaatggggaagctaacaacttttacatcaagacaggtaagttgtatattaaataagaataatcatatgtatgactgaaagactttgggcatcaccaaaaatcattatgaggacatatcttattccccaataattcctgaggaacttagaatgtttggttgaggaagatttctgtcacttattaattataaccatta

SEQ ID NO: 93060 - DNA, 2237 bp, Homo sapiens
cattcaaccaaccttgactgaaaatatttggaaaaaaaattccacaaagttccaacaggcaaaacttgaatttgctacattctgaatactatgttgaatccacacaaataaaatgatgtgtaggcactgtagtaggtattataaataatctagaaatgacttaaagtatataggagactgtgtgtaggtcacatgcaaatactatatgccattttttataagagacttgaacatccctggattttgttatctgcaggggtcttgggaccaatcctccgtgtctactgagagatgactatcctttaagcaacaaaacacttattctagaaaaaatggcagcagtggcaacagagttattcaatctctccaaatcactgtctacaaagagaactaactagaagcaaaacccaaaaatccatagccaacactcacaacaaggtaacaagatatccccacaaaccccaaagtacaagctctgtgtattctcctttcctttcaaaatgctatcaattttataaacattccatataacaaaccaagacagcctagagtttttttttaatcctagttatagtaagttacaactaaataaggtattctcataggagttgagtagtgcaacatgtagaaagctaattatttccataagctggacattacacttctacacagcatgagaaactatgcctctgagaaagttccttaactttgctggtcacccacaagtggccacaatggtcttgatgttgttaccttagactcaggaaaaaaatgaactttctaagaacatttgaaacctaatatttttacaagtaaaaaaagttatgcaattgattaaagtcttttgtgaatcacacgtaaaacattaaaaatgattgtacactaagactgctacattttacttgtttttttaaaaacaaggtagtgtaattatcagtataaaataatacttgtttactaaaagaagcaatgccataacatgatatcagagaacactacttgcaataggtaatactactacttcccaactgtagtagttgtcattttcctctttttcctattagccacagccacactgagtgtttctcagtcaaacatatcaagagcattaccctggagagttagggtaaaggtctttggaatttactgtacgtgagatgggctcgttacagaattttaggcagaagcatagtacgatctcacttatattttaaaaggatcactctggatgcatcaaaacaaggatcagcaaatcatgaccctcagggcaagtctggcctgccacaattttcataaatttttatcggaacacagccatacccatttatgtattgtctataaatgctattatggcagagtagctggccttctgtagaaaaaatctgtcaacctatgctttaaagaatagaccctagggagaaacaaggagaaacaggaagacacatgagatgctaccacagtaatataaatgagagttcagggtgattcacaccaatgtgatggcagtggagtggtgaaaaacagtaaagtgctgaatatacttataatccattagataattaattccctgatggactggatgtggaatatgagagaaaaagaggaatcaaagatatctccagggtttctggtataaacaactaagagagtcgtcatattactgagataaagagggctggggtacagcgggtttgaggaaaaagcttggtaaataagttttgtaggtgttggatgtgaggagtaaaatgatatccaaacagtaatttgatatatacacagttatcaaataaagtagccattatgttatgcactgagtatatcacagagatcccacaacccaggaacttccactgtgctttattcagagcagctgctatcagttttgtatactgaggagctaaaagtttgtttgaaaaaggtttcctttgactaataaaaaggaaaagaaagacagaaaagtttgaaaatcataattctagcctyaatatggactattaattgctaggcaaggatttctccccataaggaatttatctatgttcaatggggaagctaacaacttttacatcaagacaggtaagttgtatattaaataagaataatcatatgtatgactgaaagactttgggcatcaccaaaaatcattatgaggacatatcttattccccaataattcctgaggaacttagaatgtttggttgaggaagatttctgtcacttattaattataaccatta

SEQ ID NO: 93061 - DNA, 1835 bp, Homo sapiens
  misc_feature (1)...(1835): n = A,T,C or G
tgactttggacatgttacatacacttcttgtgcctcagatttctcacctatgcgtacctcataggattgtcacaaaactaaatgagggtgaagagatgagacagtgtctgacacatggttacagctttatcttctaacactgcttttgctggtgacagtattcatattcttattttaataatatcattattattattttaaaaagagcattccataatgtgactataaagtatggtcaaaagcatgaaaatgtgaaacaatgtgagtagttcatagaactgcaagcagcctgcaaggtaatttagagtgtgaggtgaaggcataaggatgaaaaagtaaaaaaaatttgtgaaaggccttttacggtttactaagaaaagtggtgtgtaatgagggtcactgaagatatcaaacaggtgagtatcaggatcatacttgtgttttctaaagatcatcctggcatcagtgtgaattaggctaagacagaaaggagaccagctgaaagttgttaaaatagtatggtcaggagagaataagtggtaacacaaattattatagcaaaaaagaataatcaaagacatggttataacagctgtttggggaataaaagggataaggagcacatcactgattatctgttggaagtgaaggaagagctgtagcagactatgactcccagaaagctggtctatacgcacatcggaaacacattagggatttgctgagtaaaaaaaatgctttagggcattcattcaaattaagttctctacatttcacannnnnnnnnnnnnnnnnnnnnnnnnnnnnnnnnnnnnnnnnnnnnnnnnnnnnnnnnnnnnnnnnnnnnnnnnnnnnnnnnnnnnnnnnnnnnnnnnnnnaatcatgacatcatgttatgcttcacaatactgatacaattcatatcattcttatgaatctttgaataagagtgtgttttacattccactataaagatgcttcacatatttttcatgttaacaaataaaaacaccagtcttttgaccaaaatgtcagttttaatgaaaggagcaatggtaatctgtgacctaaaattaacctccagtgactttcaccaattaaaatgtaacaggaagtcctactatattcctactgggtttatcatttagttatcttaccactttagtattgcttgattaaatttgctctttttagacaagtgctgaaaacaaacaaaaatgcatatgcttccctctgagtgcatattatctcaattaacctttcttttcttccatcaaattgccagagagagaaatttttgaccatcctttcacaaaaatctctccattatcctcttccatgacccacagaagtttgctgcccctacccctaattctacccctcaggactcccggaagattttccaacagaaytgcaagcattcttaagcaatttctatctcatatatcatcgcttgtgataattaatttaactttatggaaatttgaaacaaaagataatctgagcatgaattcaatgaaactcttttaagatgactatacaatatacaagtactcaaaaataattgactagaagaactgcagaggaaaaattaaatgtattgggaaaaaatgtttaaagcactataaatgtgttttattttattatttatacatttccttatttactttgagacagtcttgctctgttaccctggctggagtacagtggcgtgatcatggctcactgtgacctccacctcccaggttcaagtggttctcatgcctcagcctcctgagtagctgggattacagatgtgcaccactacacccagttaatttctgtatctttactag

SEQ ID NO: 93062 - DNA, 1835 bp, Homo sapiens
  misc_feature (1)...(1835): n = A,T,C or G
tgactttggacatgttacatacacttcttgtgcctcagatttctcacctatgcgtacctcataggattgtcacaaaactaaatgagggtgaagagatgagacagtgtctgacacatggttacagctttatcttctaacactgcttttgctggtgacagtattcatattcttattttaataatatcattattattattttaaaaagagcattccataatgtgactataaagtatggtcaaaagcatgaaaatgtgaaacaatgtgagtagttcatagaactgcaagcagcctgcaaggtaatttagagtgtgaggtgaaggcataaggatgaaaaagtaaaaaaaatttgtgaaaggccttttacggtttactaagaaaagtggtgtgtaatgagggtcactgaagatatcaaacaggtgagtatcaggatcatacttgtgttttctaaagatcatcctggcatcagtgtgaattaggctaagacagaaaggagaccagctgaaagttgttaaaatagtatggtcaggagagaataagtggtaacacaaattattatagcaaaaaagaataatcaaagacatggttataacagctgtttggggaataaaagggataaggagcacatcactgattatctgttggaagtgaaggaagagctgtagcagactatgactcccagaaagctggtctatacgcacatcggaaacacattagggatttgctgagtaaaaaaaatgctttagggcattcattcaaattaagttctctacatttcacannnnnnnnnnnnnnnnnnnnnnnnnnnnnnnnnnnnnnnnnnnnnnnnnnnnnnnnnnnnnnnnnnnnnnnnnnnnnnnnnnnnnnnnnnnnnnnnnnnnaatcatgacatcatgttatgcttcacaatactgatacaattcatatcattcttatgaatctttgaataagagtgtgttttacattccactataaagatgcttcacatatttttcatgttaacaaataaaaacaccagtcttttgaccaaaatgtcagttttaatgaaaggagcaatggtaatctgtgacctaaaattaacctccagtgactttcaccaattaaaatgtaacaggaagtcctactatattcctactgggtttatcatttagttatcttaccactttagtattgcttgattaaatttgctctttttagacaagtgctgaaaacaaacaaaaatgcatatgcttccctctgagtgcatattatctcaattaacctttcttttcttccatcaaattgccagagagagaaatttttgaccatcctttcacaaaaatctctccattatcctcttccatgacccacagaagtttgctgcccctacccctaattctacccctcaggactcccggaagattttccaacagaactgcaagcattcttaagcaatttctatctcatatatcatcgcttgtgataattaatttaactttatggaaatttgaaacaaaagataatctgagcatraattcaatgaaactcttttaagatgactatacaatatacaagtactcaaaaataattgactagaagaactgcagaggaaaaattaaatgtattgggaaaaaatgtttaaagcactataaatgtgttttattttattatttatacatttccttatttactttgagacagtcttgctctgttaccctggctggagtacagtggcgtgatcatggctcactgtgacctccacctcccaggttcaagtggttctcatgcctcagcctcctgagtagctgggattacagatgtgcaccactacacccagttaatttctgtatctttactag

SEQ ID NO: 93063 - DNA, 1835 bp, Homo sapiens
  misc_feature (1)...(1835): n = A,T,C or G
tgactttggacatgttacatacacttcttgtgcctcagatttctcacctatgcgtacctcataggattgtcacaaaactaaatgagggtgaagagatgagacagtgtctgacacatggttacagctttatcttctaacactgcttttgctggtgacagtattcatattcttattttaataatatcattattattattttaaaaagagcattccataatgtgactataaagtatggtcaaaagcatgaaaatgtgaaacaatgtgagtagttcatagaactgcaagcagcctgcaaggtaatttagagtgtgaggtgaaggcataaggatgaaaaagtaaaaaaaatttgtgaaaggccttttacggtttactaagaaaagtggtgtgtaatgagggtcactgaagatatcaaacaggtgagtatcaggatcatacttgtgttttctaaagatcatcctggcatcagtgtgaattaggctaagacagaaaggagaccagctgaaagttgttaaaatagtatggtcaggagagaataagtggtaacacaaattattatagcaaaaaagaataatcaaagacatggttataacagctgtttggggaataaaagggataaggagcacatcactgattatctgttggaagtgaaggaagagctgtagcagactatgactcccagaaagctggtctatacgcacatcggaaacacattagggatttgctgagtaaaaaaaatgctttagggcattcattcaaattaagttctctacatttcacannnnnnnnnnnnnnnnnnnnnnnnnnnnnnnnnnnnnnnnnnnnnnnnnnnnnnnnnnnnnnnnnnnnnnnnnnnnnnnnnnnnnnnnnnnnnnnnnnnnaatcatgacatcatgttatgcttcacaatactgatacaattcatatcattcttatgaatctttgaataagagtgtgttttacattccactataaagatgcttcacatatttttcatgttaacaaataaaaacaccagtcttttgaccaaaatgtcagttttaatgaaaggagcaatggtaatctgtgacctaaaattaacctccagtgactttcaccaattaaaatgtaacaggaagtcctactatattcctactgggtttatcatttagttatcttaccactttagtattgcttgattaaatttgctctttttagacaagtgctgaaaacaaacaaaaatgcatatgcttccctctgagtgcatattatctcaattaacctttcttttcttccatcaaattgccagagagagaaatttttgaccatcctttcacaaaaatctctccattatcctcttccatgacccacagaagtttgctgcccctacccctaattctacccctcaggactcccggaagattttccaacagaactgcaagcattcttaagcaatttctatctcatatatcatcgcttgtgataattaatttaactttatggaaatttgaaacaaaagataatctgagcatgaattcaatgaaactcttttaagatgactatacaatatacaagtactcaaaaataattgactagaagaactgcagaggaaaaattaaatgtattgggaaaaaatgtttaaagcactataaatgtgttttattttattatttatacatttccttatttactttgagacagtcttgctctgttaccctggctggagtacagtggcgtgatcatggctcactgtgacctccacctcccaggttcaagtrgttctcatgcctcagcctcctgagtagctgggattacagatgtgcaccactacacccagttaatttctgtatctttactag

SEQ ID NO: 93064 - DNA, 1302 bp, Homo sapiens
ctgctttttcctaacgttaacctttaagtacctaaactgcctgtatgatttcagaagacaaaaagtgaaccacaaactccaaaaataagtaagtacaatcagcaataccaagagaaaaaaggaatttagtaagcatacttgaagtgtgacttaacagttttcaattctattttttatatttcattaaggtatacagaaattcacttgttttaggcatttttaccaatctagcatttgaaattcatcattaacactatacccaaacttttcactgaaataaaattataattgcggcaagttccactcaacaattacttagtcttttaatttcttactttctgtaagcaagtttccccaaccaacaatcaatcaagactccacgctaaaaacaacaaacaacataaaatccaacctgtcttccttcatctcaatcacccttaatactcactcactctccctttcctgtaaaaggaaacaaaaaagaaacaaaaataaaacaactattctttttaaaayagaggacactccttgtgtctatttccttatccaattgctgtcgtcgtattacttaacctgctttttcccaaagacctgaacaagctataaatgctatggctttttcttatctaaatattctcatgttccttctgtgtcataagaaaactgtaagtcacttacttcctttatgcaatgttttcctgttcctcagctatcacagtacttgagttttctcgtggctagcataggctagagcctgaaagacttgggttcaaataacgtatctgtataactttgaatatattaattatttttgaacttcattttccttgtctataaaatagaaatggtgatgtctacctcctggtagtttttgactaatgagttctattaaagcactccacattttgacacacagttaagttaaaatgaattaagttagcaattaatctgaatcagttttatttttaaactcaaagagaaaagtagttatgttctcattttcttaccaaaaaggatttaaaagtttataaaaacatatagcatgaaatgaattaaaaattagaaaaacaaggtaaaagaatatgataaaaaagaaaattggagccaggagaaaagttaatagaacacaactgcatgctgttgacagttgttcctcagatgcatactagtgacacttaacaaaaagctactatatagtttaataagaagcattcttgacaccaccactacctcacactaaacataaagtttcaaagagctgtatcttatgaccctacacagactgattattatgctaaagag

SEQ ID NO: 93065 - DNA, 642 bp, Homo sapiens
ctctgagtatttacattgtactgtgaaatgcagacatcgtctattcccctttttattgtgtgacccaggaaagtgtactatatcttagcttttcatctctaaaatgaacaaaatgattaaagtaatacctaccttataaggtgttgtaactattaaacaaattgccacatgcaaatagcttgcttaagagcaataactatgcgtgcattctcaccgaatcggaactctaagaaaaggagaatgtggtcggatttgtggaatttcaaaaagctttctattgctatggttgtttctgcgccaactaccactgcacaaatttgcataaatgttgaaatttagaaaggtatagctcttcttcaagccatgacctataaaatatctgcttcacatatttgagaatctccatcgctttcctctatcttctctcctacyctttaaagtactatgctggttgtagaaacagtttttatagaccgctttaatcttggctgatagggaacaattttcaattgggtaactaaaataggctaccctgctgttctaagggagttttctatgttattaacaggtttttattgttaaatacttcctaacatcctgagtacccgagggttttcaatttaagttcttcatgtctattta

SEQ ID NO: 93066 - DNA, 642 bp, Homo sapiens
ctctgagtatttacattgtactgtgaaatgcagacatcgtctattcccctttttattgtgtgacccaggaaagtgtactatatcttagcttttcatctctaaaatgaacaaaatgattaaagtaatacctaccttataaggtgttgtaactattaaacaaattgccacatgcaaatagcttgcttaagagcaataactatgcgtgcattctcaccgaatcggaactctaagaaaaggagaatgtggtcggatttgtggaatttcaaaaagctttctattgctatggttgtttctgcgccaactaccactgcacaaatttgcataaatgttgaaatttagaaaggtatagctcttcttcaagccatgacctataaaatatctgcttcacatatttgagaatctccatcgctttcctctatcttctctcctactytttaaagtactatgctggttgtagaaacagtttttatagaccgctttaatcttggctgatagggaacaattttcaattgggtaactaaaataggctaccctgctgttctaagggagttttctatgttattaacaggtttttattgttaaatacttcctaacatcctgagtacccgagggttttcaatttaagttcttcatgtctattta

SEQ ID NO: 93067 - DNA, 642 bp, Homo sapiens
ctctgagtatttacattgtactgtgaaatgcagacatcgtctattcccctttttattgtgtgacccaggaaagtgtactatatcttagcttttcatctctaaaatgaacaaaatgattaaagtaatacctaccttataaggtgttgtaactattaaacaaattgccacatgcaaatagcttgcttaagagcaataactatgcgtgcattctcaccgaatcggaactctaagaaaaggagaatgtggtcggatttgtggaatttcaaaaagctttctattgctatggttgtttctgcgccaactaccactgcacaaatttgcataaatgttgaaatttagaaaggtatagctcttcttcaagccatgacctataaaatatctgcttcacatatttgagaatctccatcgctttcctctatcttctctcctactcyttaaagtactatgctggttgtagaaacagtttttatagaccgctttaatcttggctgatagggaacaattttcaattgggtaactaaaataggctaccctgctgttctaagggagttttctatgttattaacaggtttttattgttaaatacttcctaacatcctgagtacccgagggttttcaatttaagttcttcatgtctattta

SEQ ID NO: 93068 - DNA, 601 bp, Homo sapiens
agctaaccatgtgacctcagacaaggcacttatcttctccaaaactcagtttcacctgtaaaatcagaataacagagagagagacacttacctcattgaggcatggtgagaaataggtaacaattagcctcacacttaataaaccctcagcaaatgttaggtgtaacttgtttaaactgaaaatttttttaatgttttacttgtttcaaagaaattataaataaaacacatcatctttgtgaacatgtrcagaagttcgtgtttgtgaaatgtacaaaagttcttaaggttaaaaagtgaaagtcaaatgcttcaccatttctctccctccctctgttctcccgacaaatagactacttggattctaaacttgcttccaattcatgtgggtctgggcatgtttgcctccaatttttaatctctgtagtgggaataatactaaaaactacttcagagaggtgtcaaatgcttagaatagtgcctggcatggagtaagctttcaataatatttgttctcatctttcaagttaaaaaaatgagtacataatgtctaagcttgcttctattctataattatgcacagtagtttatggactttcat

SEQ ID NO: 93069 - DNA, 601 bp, Homo sapiens
agctaaccatgtgacctcagacaaggcacttatcttctccaaaactcagtttcacctgtaaaatcagaataacagagagagagacacttacctcattgaggcatggtgagaaataggtaacaattagcctcacacttaataaaccctcagcaaatgttaggtgtaacttgtttaaactgaaaatttttttaatgttttacttgtttcaaagaaattataaataaaacacatcatctttgtgaacatgtacagaagttcgtgtttgtgaaatgtacaaaagttcttaaggttaaaaagtgaaagtcaaatgcttcaccatttctctccctccctctgttctcccracaaatagactacttggattctaaacttgcttccaattcatgtgggtctgggcatgtttgcctccaatttttaatctctgtagtgggaataatactaaaaactacttcagagaggtgtcaaatgcttagaatagtgcctggcatggagtaagctttcaataatatttgttctcatctttcaagttaaaaaaatgagtacataatgtctaagcttgcttctattctataattatgcacagtagtttatggactttcat

SEQ ID NO: 93070 - DNA, 793 bp, Homo sapiens
cctataaatgtgtttcctttttctgcttgttaaatacttgcatgatatgttgttactttcttaccttatcgttgattggcagtcttcaagtgtttaccgttataaaaattgacatatacagctcttgaagcactcctctcctcagccaccaaagtgctgatttttgcgcatagctcaagcactctctgccctccatttcttgttgatggaacaaacaaattaaaacattttttcatatttaaggtgttaaaatatcttgagtaccactgggcattcatatgtgttagcttctggttgcatattttagaattgggttgcaaatattataacttgagcctcaatacagtagaattttaaaggatctggccatgcttataaatggaatcaaagcaactttgactactatggctagggcttctgacgataatttgataaatgtgccagatacaaaacataatccaagattgtattgcaaagtgtcagatttcaaggtctgcattctacttatttaaaagtattataaacttattgtgccttagcaattattgataatgattaatatgatagtaattttaattcctaccagttcaattgtatttacaatcatggtaatgtataaaatatgtaaaccgtaactgtatttgcatggcatgtttagttctgcttatgcaaactatgctaatccaggaagtatccataagtcatctcataatctcrtctgtgatctttcatggttacaaaggagccagaaaggaataatttctttttagaagcatacaaataatttcagtga

SEQ ID NO: 93071 - DNA, 2596 bp, Homo sapiens
  misc_feature (1)...(2596): n = A,T,C or G
tgatagcgatttacttcctaagtgacttttcaggatgagttttatcatccaatgacattcattaagttgtttagtccaaactgaacattttttattttttacctgactgtacaatgaatgaagggttcaaataaccacctgaatagttttgttctcatctcttgtaccaaatgttttactttcttttaaaaggtcatgacaaggaatcaccagttcgatggtgtttttttgctgtgatttatttcgcatatatggtatattttgtgttgctttctttctaactggcacatcacctctgtttggataacggtcttccccatcagcatttcactaaagggaaataatgctaacattccactagaaaattaggaataaaactaagctttgcaaattgtttttgaattttcttcttaaacactattttgagttgtaagacggtttggtggaaacagcaagtatggtggacatctgcaaatctggagaagtgagttcagcctgcctctgcccggagttctctgtaattctaatcccactcactctgactctcagatccccacctgtgtgggtaaaatgtatgactgcattatctgttccagctctaaacttctgtaatttcatttccagtgttattacagaaaatcacagtgtcgcctcttttatgtctcagcttttatgtctcatatgtttatgagcaagtgggaacagcggaagtaggaactgaaagtggggtaagtattcagaaaagggaagacacattttctaaatagggtaagttgctgtgattttgtgtcacttcgacagtgtggcttttaggatgttgtcaatccccaaaccttaccactgtatgattcctacccaccttgccacccatactgcaatcacggaatctcaatgtctgctaaataaattttgcgattttgcaagatgtcctttagattatgtctactactcaggaagcttgcaacatggggagtgtgtgatatcttgagtgcacgggctaatgtcttagcagggatgagtcagttgggggtccttaggaaggagccacaggaaagctatccagaaataaagatggaaaggtgcataaatggaagaaagagacagaaataactagtatctcagttgtcacgtggctcagggaattagaggaggtcggaaaataaatcacttagtgctggagcccctgcacatcacagcatggctgtgccttctgctcaatgccccagctggtgctttacttaggctctgtggaaggagcacctgttgaaaggcgctgaaagggagaggctccaatccaggggtcacagattcgaatgtatatggataaataaataaaattaaacatatgcatgatgcttcatcaaactagaaaattcaatgacacgggctaaatgttgatcagattctagagagattggtacaagcacagaagtcaggacatttgtgagaggggaggggaataattgatgaataaagaccaaacatcaccaaaaacttgccttctagaatgctagtcattgattggaataaaatgaaatgggagatatgagttaacataggcaagatgcaaggttaagaacaccgtgccccggcgggtrcagtggctcacgcctgtaatcccagcacttttggaggccgaggcgggtggatcacgaggtcaggagatcgagaccctcctggctaacacggtgaaactccgtctctactaaaaatacaaaaaaattagccaggcatggtgatgggcgcctgtagtcccagctaactgggaggcagaggcaggagaattgcttgaacccaggaggcaaagtttgcagtgagccaaaattgtgccactgcactccagcttgggcgacagaccgagactccatctcaaacaaacaaacaaacaaaaaacaccgtgcccctgccccaatgcctctcccttgaataagatactggaaaacctgcatagttaatgtctgtaaacaaagggaatcatatcagatgcagtgtgtgagtgtgaaaatatctatgtcctgccctcccttattattacaccattttccctcaaataacacagagatacattcatattttgcccgtgcatcccaatttctagttcattctgcgtttgttctacgctacacgtactctaagtgtagattctcagttgctctttacattaactgtgtaaggtagggctatcacttaccccatttcctagatggggaaattgaggnnnnnnnnnnnnnnnnnnnnnnnnnnnnnnnnnnnnnnnnnnnnnnnnnnnnnnnnnnnnnnnnnnnnnnnnnnnnnnnnnnnnnnnnnnnnnnnnnnnncactaatataaagtggagtcatgatctaaaccccagggccattcttttgaacaactgtgcttcaagcaaactttaccacaaaggagtcatgtgcccctaataattttaaacatgctacagcaaatagcataactctattcagaggttaaaaaatatactgtttgttacttttcttttgagaactattatcaagatttagaaagaattgattccaatattattactcatattgaaatgattttttgggacgtggtcatagataatattatttggatttt

SEQ ID NO: 93072 - DNA, 2596 bp, Homo sapiens
  misc_feature (1)...(2596): n = A,T,C or G
tgatagcgatttacttcctaagtgacttttcaggatgagttttatcatccaatgacattcattaagttgtttagtccaaactgaacattttttattttttacctgactgtacaatgaatgaagggttcaaataaccacctgaatagttttgttctcatctcttgtaccaaatgttttactttcttttaaaaggtcatgacaaggaatcaccagttcgatggtgtttttttgctgtgatttatttcgcatatatggtatattttgtgttgctttctttctaactggcacatcacctctgtttggataacggtcttccccatcagcatttcactaaagggaaataatgctaacattccactagaaaattaggaataaaactaagctttgcaaattgtttttgaattttcttcttaaacactattttgagttgtaagacggtttggtggaaacagcaagtatggtggacatctgcaaatctggagaagtgagttcagcctgcctctgcccggagttctctgtaattctaatcccactcactctgactctcagatccccacctgtgtgggtaaaatgtatgactgcattatctgttccagctctaaacttctgtaatttcatttccagtgttattacagaaaatcacagtgtcgcctcttttatgtctcagcttttatgtctcatatgtttatgagcaagtgggaacagcggaagtaggaactgaaagtggggtaagtattcagaaaagggaagacacattttctaaatagggtaagttgctgtgattttgtgtcacttcgacagtgtggcttttaggatgttgtcaatccccaaaccttaccactgtatgattcctacccaccttgccacccatactgcaatcacggaatctcaatgtctgctaaataaattttgcgattttgcaagatgtcctttagattatgtctactactcaggaagcttgcaacatggggagtgtgtgatatcttgagtgcacgggctaatgtcttagcagggatgagtcagttgggggtccttaggaaggagccacaggaaagctatccagaaataaagatggaaaggtgcataaatggaagaaagagacagaaataactagtatctcagttgtcacgtggctcagggaattagaggaggtcggaaaataaatcacttagtgctggagcccctgcacatcacagcatggctgtgccttctgctcaatgccccagctggtgctttacttaggctctgtggaaggagcacctgttgaaaggcgctgaaagggagaggctccaatccaggggtcacagattcgaatgtatatggataaataaataaaattaaacatatgcatgatgcttcatcaaactagaaaattcaatgacacgggctaaatgttgatcagattctagagagattggtacaagcacagaagtcaggacatttgtgagaggggaggggaataattgatgaataaagaccaaacatcaccaaaaacttgccttctagaatgctagtcattgattggaataaaatgaaatgggagatatgagttaacataggcaagatgcaaggttaagaacaccgtgccccggcgggtacagtggctcacgcctgtaatcccagcacttttggaggccgaggcgggtggatcacgaggtcaggagatcgagaccctcctggctaacacggtgaaactccgtctctactaaaaatacaaaaaaattagccaggcatggtgatgggcgcctgtagtcccagctaactgggaggcagaggcaggagaattgcttgaacccaggaggcaaagtttgcagtgagccaaaattgtgccactgcactccagcttgggcgacagaccgagactccatctcaaacaaacaaacaaacaaaaaacaccgtgcccctgccccaatgcctctcccttgaataagatactggaaaacctgcatagttaatgtctgtaaacaaagggaatcatatcagatgcagtgtgtgagtgtgaaaatatctatgtcctgccctcccttattattacaccattttccctcaaataacacagagatacattcatattttgcccgtgcatcccaatttctagttcattctgcgtttgttctacgctacacgtactctaagtrtagattctcagttgctctttacattaactgtgtaaggtagggctatcacttaccccatttcctagatggggaaattgaggnnnnnnnnnnnnnnnnnnnnnnnnnnnnnnnnnnnnnnnnnnnnnnnnnnnnnnnnnnnnnnnnnnnnnnnnnnnnnnnnnnnnnnnnnnnnnnnnnnnncactaatataaagtggagtcatgatctaaaccccagggccattcttttgaacaactgtgcttcaagcaaactttaccacaaaggagtcatgtgcccctaataattttaaacatgctacagcaaatagcataactctattcagaggttaaaaaatatactgtttgttacttttcttttgagaactattatcaagatttagaaagaattgattccaatattattactcatattgaaatgattttttgggacgtggtcatagataatattatttggatttt

SEQ ID NO: 93073 - DNA, 856 bp, Homo sapiens
aaaaaagcttgattccctggagagacagcgttcacataaacagacactctgacctcacagcatgtagaagactatgctaatcctctgaaatgtaaagaagtggctttgatgttttttatgattcacaactaaaaattaaaacaattttcatcatgacaaaagtcacacaaatacacacatgttcctaaatattttcatttaatgatattcttactgcatataataaaaactgacatttcttgttatgctattttttgtgtggtagagactcataaattgattccttgaaccaccaatgggttataacctgcatgttgagaaaaaagctggtttgtaaaacaaaacaataaagaatatcaaaatccaaatagatgaagastcgccttacactttaccacactatttgacatcttctacgtatgattaaataaagaaaatcctctataataatatttcttagctggatatgaattttcctgtggaaatgtaaaaatgtgatcatgtgttccttttggtaatgggcagcacaaaactatgaaagcctggctgctggtgctaaaaaatagacacaaaaggcacagagcatccaaacattagaatggcaagagagacagaataatcaaattaaaaagagaagtgagttggggtaaaggccatcaaaaggcacatgggaatttcagacttaggtcagcagaagctttgacagcatggactagtgggaagaaaggagaaggcagggctggccagaagggtcagtgggttgacggcaagattatagataacatagaagagcacagataatttaggattgattttaatgagtgttcagatccagaatccaagggatcatgctgat

SEQ ID NO: 93074 - DNA, 1112 bp, Homo sapiens
aaaagacatatacaaagatattcctagcagcattattcttgatagctccaaattaaaatgaacctaaatgtctgttaatagtaaaatgaataaataatttgtggtatgtttaaatcgcatacaagaatgaaaacaggaatgaaaacatataagctacaagtgcatacaataatcataataaattttacaaatacaatgtgcagtaaaagaagccagtttcaaaataatatatgctgtttgattccacttatagaaactaaattttaaaacaaatttaatcaatatattgtgttgagaaggagtgttggggcgatagtgtgtgttatgaggaatagagtgaatattttggggatgagacataatgggggtttcctggggagtggcaatgttttccttcttaccttgtgtttatttgggtttttgccctgtgagctgtgcatttatgcttcatgagttgttttatatatatatacttatatattacttaaaataactcaaaactaatataaaaataacatctagctgattaaatttacagctttagaatggtataatatgatacaaaaggaattctattgagctgagtaaagaacaaagcaaactgaataattttgagaaatactgatagtactactaaaacagaatactttgaggtcaagaatataataatttaagtgtaatctggaacttataaaccaaactgtactaacaaagagttggaagttagttaatcgtgagggaaagttgtaaaatattctacatgcaacgtttctcatcctacatgtcatatgagtatctgggtgaagttaagtcacaaaggcaactcaattgtttaacwggttattctatcctagaggatccttccagaaacatgtagagtattgtagcagagttatcaaacatacttattcataattaattgttagggaagattaaaaaaataccaccacagcaaaaaatattatttatatttaaataggcagaaactgggggtaaaaagttcctaagagaaaaaaaaaggatgaagggtaagatagacagacattttttaaaatcactattaccaataacaaaaagtaacctaaagcaaagtataaatgaataaaagacag

SEQ ID NO: 93075 - DNA, 828 bp, Homo sapiens
agtagaatttatagacacacatgtgcagtaggatcttccttgctaatagcttttttctccttgttcttggggaaaatgggttcaataataagacagacattcgcagaaacactggaagcacctttgtaatcctgcagttagaaaactactaactgcttcatctggaaaggtttgggacaaaactgtgacctcaggagaaaggcaagccatgaaggctcatcggctctgaaccaaggtgagattttggatggctgtgtagcagaggagttgggtggtctgcagggcaagaaacctagcccaggatgccatcatgyttgatgggtgagagaatgagattcctcaaggtgatttctgctccaggcttggctccagttaccaaacagcagagtatggtctaattttggtgacctaggatttctgggacagtcctgatttcaaatgttgtgtgtcactatctctgaactcttgaatgtactagaatcacgctctgatcttaagttaaggtcatcatcactcacagcccctaggaaggagccaggaaacccactcacctactgtgcatggcatgtcacatttctttttctttttctttttttttttagatggggtgtcactctgtcacccaggctggagtgcagtggtacaaccatagctcactgctcactgcagcctcaaactcctaggctcaagcgatcctcccatctcaacctcccaagtagccaggactacaggtgtgtgccaccatgcctggctaatatataaatatatttttgtagagtaggggtctcactgtgttgcccagtctagtcttaaactcctgggcttaag

SEQ ID NO: 93076 - DNA, 828 bp, Homo sapiens
agtagaatttatagacacacatgtgcagtaggatcttccttgctaatagcttttttctccttgttcttggggaaaatgggttcaataataagacagacattcgcagaaacactggaagcacctttgtaatcctgcagttagaaaactactaactgcttcatctggaaaggtttgggacaaaactgtgacctcaggagaaaggcaagccatgaaggctcatcggctctgaaccaaggtgagattttggatggctgtgtagcagaggagttgggtggtctgcagggcaagaaacctagcccaggatgccatcatgtttgatgggtgagagaatgagattcctcaaggtgatttctgctccaggcttggctccagttaccaaacagcagagtatggtctaattttggtgacctaggatttctgggacagtcctgatttcaaatgttgtgtgtcactatctctgaactcttgaatgtactagaatcacgctctgatcttaagttaaggtcatcatcactcacagcccctaggaaggagccaggaaacccactcacctactgtgcatggcatgtcacatttctttttctttttytttttttttttagatggggtgtcactctgtcacccaggctggagtgcagtggtacaaccatagctcactgctcactgcagcctcaaactcctaggctcaagcgatcctcccatctcaacctcccaagtagccaggactacaggtgtgtgccaccatgcctggctaatatataaatatatttttgtagagtaggggtctcactgtgttgcccagtctagtcttaaactcctgggcttaag

SEQ ID NO: 93077 - DNA, 639 bp, Homo sapiens
atgtgtacatttatctttataatagaattatttttattccttggggtatatacccagtaatgggatcgctgggtcgaatggtatttttggttctaggtcactaaggaatcgccacactgccttccacaatggttgagctaatttacactcccaccaacagtgcaaaagcattcctatttctccacagctttatttctacacaggtcaccttggaagacaaagatgtgggagtgtgaaaagaggcaaggcaggtgagagtgatataaaatacaaggcagaggaggaagcatcaccaggaaagagcatggtggggcttgaagagggaaaatgtctaactgaaaggactgagggcttgtgaaaaaaaaatgatggggttggggaagaaaagtggaactagagagactaggtttagccaaaatgaaatgatgtggcaagtaaagatgagaataaaataagagattcctctgggtctattcttcttgttaactgatttgaaaggtacraggacattgagacactgaaaatttaagagacagagaatccattccagaaataggtattgagtttggattatgtgccaaaccctggaaattgaataatgatgaaaataaaggtgtggtccttatccccttggcacat

SEQ ID NO: 93078 - DNA, 861 bp, Homo sapiens
ttttttttttttttggatataggaatgcatttgtactattgatgctcctatctggtccattttgagaccaatatcacccttttgcaaaatcacccttcaggcagaagggtgcaagccatggctttagtaataatccttttaattactataactttccacttgccaacattttatattgtgtagatcagttcaatggaaaaagaagaaggagacatgttgacccacatagagaatcagatatgtgacctccatctcccaaagttgaacctctaaccctcaaatccaacgagctacaacctccagacaaccattaccccttaagactggtatatatcatgacattccttgtaacatatcaaaacatattgaatagaatgtgcactgcatttcacccttgaagaacactaggtgaatgatcctatactcaatattatttcacaaccacagagacgtattcagacacttcaacccacatagaaacatggaatcttagaaagggaagccactagagaagccagtgaatgccaccctggtattcgatgaattcaatgaatatctgaatttccttcagagcacccccaagtcagtggcttggccatcttctagaacacttgcaaacaatgggatcttcacaacctcacagggtagcctgtcttatactcagacagtcttaatatttgtaaagttattctattatcaaggtaaaataggcttcyctaattgttcttcctattaaacatagttttttcctctggaaactcttagggctctgggtttgagagaaaagttctggcaattaaatccccaggtgctgctgtggctgttatcagtacatgtccactgagaacaacgaatttcttt

SEQ ID NO: 93079 - DNA, 551 bp, Homo sapiens
ggattacaggcgtragccactgtgcctggcccccattatatcattcttaagccttcacgtcatcatggcttagctctcacttataagtaagaacatacagtatttggttttccattcctgagttgcctcacttagaataatagcctccagctccatccaagttgctgcaaaagacattattttgttctttttcataactgagtagtattccatcttgtatataaatcatattttctttatccattcattggtgtttgggcacttaagttggtttcatatttttgcagcctttacctcccaggctcaagtgatcctcttgtctcagccgcctgagtagctgagaccacaggcatgagccaccatgcccggcccaaagacttaatattggcaattatcttaacgccacaggttaacccttaaacctcaaggcctgataagattgttgtcaatattaagtctccaggcctggcacagtggctcacaccagtagtggaatattatagtaggttccaatatgactccacaaattgccaacagggtcttaagttttg

SEQ ID NO: 93080 - DNA, 551 bp, Homo sapiens
ggattacaggcgtaagccactgtgcctggcccccattatatcattcttawgccttcacgtcatcatggcttagctctcacttataagtaagaacatacagtatttggttttccattcctgagttgcctcacttagaataatagcctccagctccatccaagttgctgcaaaagacattattttgttctttttcataactgagtagtattccatcttgtatataaatcatattttctttatccattcattggtgtttgggcacttaagttggtttcatatttttgcagcctttacctcccaggctcaagtgatcctcttgtctcagccgcctgagtagctgagaccacaggcatgagccaccatgcccggcccaaagacttaatattggcaattatcttaacgccacaggttaacccttaaacctcaaggcctgataagattgttgtcaatattaagtctccaggcctggcacagtggctcacaccagtagtggaatattatagtaggttccaatatgactccacaaattgccaacagggtcttaagttttg

SEQ ID NO: 93081 - DNA, 551 bp, Homo sapiens
ggattacaggcgtaagccactgtgcctggcccccattatatcattcttaagccttcacgtcatcatggcttagctctcacttataagtaagaacatacagtatttggttttccattcctgagttgcctcacttagaataatagcctccagctccatccaagttgctgcaaaagacattattttgttctttttcataactgagtagtattccatcttgtatataaatcatattttctttatccattcattggtgtttgggcacttaagttggtttcatatttttgcagcctttacctcccaggctcaagtgatcctcttgtctcagccgcctgagtagctgagaccacaggcatgagccaccatgcccggcccaaagacttaatattggcaattatcttaacgccacaggttaacccttaaacctcaaggcctgataagattgttgtcaatattaagtctccrggcctggcacagtggctcacaccagtagtggaatattatagtaggttccaatatgactccacaaattgccaacagggtcttaagttttg

SEQ ID NO: 93082 - DNA, 1282 bp, Homo sapiens
  misc_feature (1)...(1282): n = A,T,C or G
tgcataagccactgggtacataaaatctgtattatcggaaaataaacaccagactccttcagacctcaagcactctctagcagtttagttaatggggattcttgccaccaaagacaggacaaaccagagagcacaggccgttaggctcatttgtgatgctatgatgtctaagcaccattctcttatgtcaggccataaattaggacaaagtgggcctattttttgttttgttttttcttttgtgtgtgtgtgttctgtttgagcatctttgttttctgtggcaggctttaaaagggtattcagtaaaggcaacgaaggagggtttttccattctttcaaaacagctcattagactctgcaaattgatgcagtacaaacaacattgagagggtctgggttcccacataaattagctcagtttgtgcaanatgaaaaatgctttggccataacagccagcactacaaacacaccccggcttaaaaaaaaacaaggtgtgcccaccgtgtctcttacgtcacctgcagtcataaaagtgctgtaattaaaactgagctgacaatttgcttaatgatctgtgaggcagaggagaatccaaggagggcccccaaatgtggttggctggagtttctgccatgccaacagcggtgcccacagaaaaactcttcttcacttgagaaaatgtgactcatccgagaagacagtgaggtggatggtgagccaagccagctgcctttaaatcatcaacaccattttcacaataatgagtttgtgtgagtgagaaggtgcttaaggtgctttgaaaccatccatttataattagccaggtcaaatttaagaaaattaaactattcccagcaatacaacttagaccaattaacgacttaattggttcaccataataatatgaggtagtttctagttcagttttcttacttcagaattactattatattattatataagaaaagaatctttttatttgtgagacattgagtctcaactggagccgacacaatgctgctagtccagattttgcataagctctggaatccaattcccccacagattcatcgttgacccttgaagaggcacttgacctcatcctttcctgacccatgaaattagaagcccaactgccacagagagatgatttagatttgattcctgatatgcactctatgtatgggaaacttggaaactttccaatagatccagtatatatctagrtgcttaattattgggataaaaataatactcattatttcctgagttattctttaa

SEQ ID NO: 93083 - DNA, 875 bp, Homo sapiens
aaacacctatacctgtatatgtaatataagtatatataattttaaaaattattttgtaacttttatagcatgctggttaatatgtctagattaagtctaccaaatgtgttatgaatatttttttccacataaaagataaactgttaataaatcttttccaggcatcagtgtctagtccacataatcattagcagacaactcccttggcagcagcatcttactcttgattaactgcttctcttagattaactgaaggattgaacagtgtatgaataatcattttttattcccagtttaaattttccttttcataactgctatctgctgtatgatgttaaggaaaccgatcagtttagctaagataaaaattattatcaatttatgaaaaaggaaaagttgggaaactggtaacttcttggttactgaaggtgtttgcttctaaaacaggtagaggtaaaaatataatacccgactctcttaactgtggtttggctttctgtggttttagttactcaaggtcaactatggtccaaaaatattaaatcraaaattccaggcccggcatggtggctcacatctgtaattcaaggacttcaggaggccgaggcagtaggatctgctgggcccaggagtttgacaacagcctggcaatagtgaaacctcatctctactgaaaaaaaaaaaaaaaaaaaagtagccagccgtggtggcacacccctgtagttccagctactcaggagactgaggcaggaggatcacttgaacccaggaattgaaggctgcagggctccagtgagctatgattgagcctctacactccagcctgggcaaggaaatgaggccttgtcacaaaaaaaaaggaaagaaaattgcag

SEQ ID NO: 93084 - DNA, 797 bp, Homo sapiens
attgactatcatagattaacgatggctgcattttcattacaacactcactgaaaagttttctaatcactctctgcttgaatctggtctagcttattaacttgcttaaccaataaagtatggcagaagtgatgcatagccaattctgaggatagcctcttaaaggaccggcagattctacttttcccacttagagccctgagcatccataagggaaattcaaatatcctaaaggtgtcmtgctgtagggaaattcaagcaacatggaaagatcgtaggtagagaccacatggaatgattccagtccccagccatttgcattagctcaactgaggcccagacattgtagaagagggatgagtcttctccatagagccctgccaaaatttcagatttgtgagttaaagacatgattgttgtggttttaaataattatgatttggggttatttgttatggcataatagattactggacagtagttcatagagactagttaacatggcttcttacattgggacctgacccagctgaatgcagttttactgtctttacttgtacagattccactcaaaactgtcagcctcatgggctacttggtaaatagagcagaatatcctaatgcagtatgtaatgcctccaaagttcaaagaggcaaccgagtgttgtgacattctcttagcgatggaatgtacaaaataaagcaacatgcatttcattgtggacctgaaaggaacagttcaaacattagatacctaaaattttgttgtggttacagctccctgaatttcctggtagtt

SEQ ID NO: 93085 - DNA, 593 bp, Homo sapiens
  misc_feature (1)...(593): n = A,T,C or G
gtacaaattgtcaagagccacatccatcagctctgaatgaatggagtgattagagatgaatggagctaattcagaaagactttatgaaatggttgaatttgtgctgcatttgtaaaacaatttaaaaaataatgatatacttactatatcctataacatgtttattccaaaaaaaaatggattatatagagaagcacaaagaagaaaatgagcattaccaggaacccagtctcacagagaaaaaccacagctaacattgcactggctttcctttcattcttctcttctctttgttttttttcttagactacattgtgaagggctacagaaacaaggtgtcgcccagagaatgaggtacatgtggggagtacattctagaagagcaatgaaagaagtgtgtacctgaagctaccttatctcaaggctgnnnnnnnnnnnnnnnnnnnnnnnnnnnnnnnnnnnnnnnnnnnnnnnnnnnnnnnnnnnnnnnnnnnnnnnnnnnnnnnnnnnnnnnnnnnnnnnnnnnngggtattgtgtctatccctgaaactttgccatagggacaggctcgcttgatcttagttgmctcctc

SEQ ID NO: 93086 - DNA, 567 bp, Homo sapiens
tgaggaaataggccaagacagattaagtaatttgctcaagattagcaaggactggttttagaagccagccagtctctggccagtttctctgtctcctggtattctatttatttattttatttttatttttttgtttttttgagacagtctcactctatcacccagactggagtgcagtggcatgatctcgactcactgcaacctccacctcccgggttcaagcgattcttctrcctcagcctccggagtagctgggattacaggcgcacgccaccacacccagctaatttttgtgttttaagtagagatgaggtttcactatgttggccagcctggtctcaaaatcctgacctcaagtgatctgcccgtatcggcctctcaaggtgctgagattacaggtgtgagccactgggcccagcctttctcctggtattctaaaatgtctctgtcataaaaaaaaaataaagtaaggttttgcccaggttttggcctaatgctatttgcctcatcattagctgtttgctccattgactcatgacagcacctctgcgatatacctggttccca

SEQ ID NO: 93087 - DNA, 632 bp, Homo sapiens
cttcagaatggctgcttgaacgaatttattgctcaacttgaaaggccattttttataacccactgcagttgtgcttcatgggtttctccacctatcctgtgaagtgtattgggaaattaattttgtagatttcctcacactgcagtgactagggaaatcacccattcgttattatctaatgaggagaaagtggaaacatctagaagcactgctcccatcctcctccccagcccacacagacacctacctcaggccctccctgtcccaggtgagcagagggccccaccttcagaggttgcctcccttccaccttcaccaatcctatgaccagattatccccaaggaaatgtcaatttccaggcagcaagggaatcatataaagataagatcattsagagatttttttcctccgtgattggcagtttatattttcttgggtctacaaatctgacagcatttattaaattttctagtttgatactgacctctgtctgatgctgggctgtcaccatgcccaagactgaggggacccacagtctagctagaaggcatggatcaattccaactgtcctacccctagcctgtgggcaggagaaatctctcaggctctggcagaggagtcccaggggcag

SEQ ID NO: 93088 - DNA, 632 bp, Homo sapiens
cttcagaatggctgcttgaacgaatttattgctcaacttgaaaggccattttttataacccactgcagttgtgcttcatgggtttctccacctatcctgtgaagtgtattgggaaattaattttgtagatttcctcacactgcagtgactagggaaatcacccattcgttattatctaatgaggagaaagtggaaacatctagaagcactgctcccatcctcctccccagcccacacagacacctacctcaggccctccctgtcccaggtgagcagagggccccaccttcagaggttgcctcccttccaccttcaccaatcctatgaccagattatccccaaggaaatgtcaatttccaggcagcaagggaatcatataaagataagatcattgagagatttttttcctccgtgattggcagtttatattttcttgggtctacaaatctgacagyatttattaaattttctagtttgatactgacctctgtctgatgctgggctgtcaccatgcccaagactgaggggacccacagtctagctagaaggcatggatcaattccaactgtcctacccctagcctgtgggcaggagaaatctctcaggctctggcagaggagtcccaggggcag

SEQ ID NO: 93089 - DNA, 632 bp, Homo sapiens
cttcagaatggctgcttgaacgaatttattgctcaacttgaaaggccattttttataacccactgcagttgtgcttcatgggtttctccacctatcctgtgaagtgtattgggaaattaattttgtagatttcctcacactgcagtgactagggaaatcacccattcgttattatctaatgaggagaaagtggaaacatctagaagcactgctcccatcctcctccccagcccacacagacacctacctcaggccctccctgtcccaggtgagcagagggccccaccttcagaggttgcctcccttccaccttcaccaatcctatgaccagattatccccaaggaaatgtcaatttccaggcagcaagggaatcatataaagataagatcattgagagatttttttcctccgtgattggcagtttatattttcttgggtctacaaatctgacagcatttattaaattttctagtttgatactgacctctgtctgatgctgggctgtcrccatgcccaagactgaggggacccacagtctagctagaaggcatggatcaattccaactgtcctacccctagcctgtgggcaggagaaatctctcaggctctggcagaggagtcccaggggcag

SEQ ID NO: 93090 - DNA, 632 bp, Homo sapiens
cttcagaatggctgcttgaacgaatttattgctcaacttgaaaggccattttttataacccactgcagttgtgcttcatgggtttctccacctatcctgtgaagtgtattgggaaattaattttgtagatttcctcacactgcagtgactagggaaatcacccattcgttattatctaatgaggagaaagtggaaacatctagaagcactgctcccatcctcctccccagcccacacagacacctacctcaggccctccctgtcccaggtgagcagagggccccaccttcagaggttgcctcccttccaccttcaccaatcctatgaccagattatccccaaggaaatgtcaatttccaggcagcaagggaatcatataaagataagatcattgagagatttttttcctccgtgattggcagtttatattttcttgggtctacaaatctgacagcatttattaaattttctagtttgatactgacctctgtctgatgctgggctgtcaccatgcycaagactgaggggacccacagtctagctagaaggcatggatcaattccaactgtcctacccctagcctgtgggcaggagaaatctctcaggctctggcagaggagtcccaggggcag

SEQ ID NO: 93091 - DNA, 1359 bp, Homo sapiens
tttctggcccaagccactatctccaagggctcatgggattgggcctattttggcctccagccacccgtctgtgccttctctagggctcttcccctcctaggccctctgtggagtcgtctgtaatcatcccattgatcccttccctcactgcctctgaacgcagaatcctgagttcaacccaacagggctgtaagagttttcactgcccttgagtacacgatgtcaaaaagaacacaaagtgataaaaatcatctccacccacaggcaaggggaaacattcttgtatgcctgcctccctcctggctggtatccctggaagtgctcctttccctggtgtctgtcttatttttccatctgccctcctgggttttccttgccaacttcctggtcacctggccattccccttctctccatccctaccaggtccagaaagcccaattggatgggtcaaggaaaggcttaagtcacaaaaaagccagactcataggatcttaggattggaaggagcctttggctgatctggttcatccaagccccacttccctccttatcagctatgcttgtgcacctctgcagcaaccccacaagggacagtagaccctggtctcatgctgaccacattcacaacctgtgccctgatcgaggtcgcagccagcttgccactgcctccctgtgcccagctttctcctagctctttagatttatttaagaaataaagaaaactaagataaataaaaaacatgtgcatgagcccaagcgatggccaaacttttaaataaagctagagaactagaagcacctgccaggcacctgccttgattaccccgggagcctggtaagaaggaggacagctcccagcacctggtcccactattgcagctgcagcccctcaagagggctgaggcatcctccctgtggggtacacgtgactgcctggacagttcctctggattacacaactgcatgcctcagactcgccctcagaatgcctgagctgggacacttacaggactggaagttctgggacggcttgttttttctccagaaggaaggaaacaggaagagagcagggtatgaaaataattcactgatcccagctccccagccccacctcccaccctcayattggcactccttgttgacctcaccagaaataaaccactggagggattgggaagagcaagcatacgtcaccactttcctctctgcttctcaagagcctaaagtaagctttgctccaagaatcagatcggaaaaggatttcaacattgcctagtggaaccctgacctctctttaaaggtggaaacgtgcggtacaaagaccaaagggaacagtccagcatgagttaagggagacc

SEQ ID NO: 93092 - DNA, 783 bp, Homo sapiens
tatatagaactctgtgctttctgctcaattttgctgttaaataaactgctttaaaaatatctattaatttttttataaaacaaagcaccattaaacgaacactaaacgtgggtcttaataactagaaatatttgtcttcaggatgacagttaaagatgacagaattcagtaaaatttyatagaatataattctgttgagcaaaacagtagataactgacatctgaacaaaattggtaagtgtattaaaatcaaacataagctaccctgtatttccctagggattttattggtggtctattcaaaatcatgcttatatacactcttatccacctattgattcttttgtcaaattaattattgtgtccttaagaatcaacattgttttctatgatacaaaaaagagtcaatataattacagataaattatatctaaatattactatcttaaacagtttggactgctttaacaaagtatcatagaatgagtggcttataaacaacagaaatttatttctcacagttccagagggtagaagctccagatcagggtatcagcctggtcgatttggatgaagaccctcttctagactgtagactcagcctgctggattttggtgaagactctcttctaggttatagactgcctactctctgtcctcacaaggtagaaagagagagttagctttctggacttccttgcaagggcacccattcacaaaagctccatcctcatgacctaagtacctcaccacctctaaatattatcacattagagattagat

SEQ ID NO: 93093 - DNA, 783 bp, Homo sapiens
tatatagaactctgtgctttctgctcaattttgctgttaaataaactgctttaaaaatatctattaatttttttataaaacaaagcaccattaaacgaacactaaacgtgggtcttaataactagaaatatttgtcttcaggatgacagttaaagatgacagaattcagtaaaatttcatagaatataattctgttgagcaaaacagtagataactgacatctgaacaaaattggtaagtgtattaaaatcaaacataagctaccctgtatttccctagggattttattggtggtctattcaaaatcatgcttatatacactcttatccacctattgattcttttgtcaaattaattattgtgtccttaagaatcaacattgttttctatgatacaaaaaagagtcaatataattacagataaattatatctaaatattactatcttaaacagtttggactgctttaacaaagtatcatagaatgagtggcttataaacaacagaaatttatttctcacagttccagagggtagaagctccagatcagggtatcagcctggtcgatttggatgaagaccctcttctagactgtagactcagcctgctggattttggtgaagactctcttctaggttatagactgcctactctctgtcctcacaaggtagaaagagagagttagctttctggacttccttgcaagggcacccattcacaaaagctccatcctcatgacctaagtacctcascacctctaaatattatcacattagagattagat

SEQ ID NO: 93094 - DNA, 836 bp, Homo sapiens
atacccaagaaatattatatccacacaatcatatatattcagcaacaggatacttttgatacatgtcgcaacatggatgaacctcatatgctaaggaagacaaatgcaaaagaccaaatattgtatgattccatttatatgaaatgtctacaaaagtcaaatctttatcgagagaatagactaatggtcatctgagtgtggagatgaaactgagaggtgaattcaagtaatacaaaggttgtgaagtgatggttgctcaacgcagtaaatttactaaaagtaccttcaagctattaagttgtatgtttaaaatttaaaatgggtggattttatggtgtatagattacttaaccaaaatgctcttataaattaaattatcttttaaaaaacaagcaaaataaaaacaagccaacaaactcctggtttgttttggagacaaggtctcactctcacccaggctggaatacagtgacgtaatctcagctcactgcagcctcgacctctccgggcttaggtgatcctcccacttcagcctcctgagtagctgaaactacaggcacatgccacaacgtctggttaaatttattttgtattttttgtagagacgtggtttcaccatgttgccctggctgatttctaacacctgtactcaagcaagccacccactttggccttcaaaagtgctgggattacyggtgtgagccaccgtgctcagccaaaaacttttaaacaacaacaaaaaagtttttgtgggtgagtggtaaatgacaaatctttcatttggaatatacattgcatatatttagtgattttaacattctctctgtgttttgtta

SEQ ID NO: 93095 - DNA, 919 bp, Homo sapiens
tgcataacactcctttgcttatcgagtcacacactggggtaggaaggggcaaagggatgtcctttggttgctcacatataacaaggcctaacacagcatgcaattctcggcttaagggattggttaccaggacacttcattgttgcaaacaggcatgccatttattcaagataggtgtttgggatttaaacggaggtgggtgatttaaataatccttctatacatcccttgattggtagaccagttctcacagtcatgggaagggtctttgctaattattccaccttctgtaaagcatacactgctagcacttgttcaatgggagagtactgatagggacaggaggcagataaattctaggcagaagaagtggagtccctgacgagggccccaccttcaagcttggaaccgcagcccaaagtgagaacttcacatccccgttttcctgatcgaatgttgccttttccaaaaccacccctggcccgccatgctctccatcctgtacatataaaaaccccaggctccactggcagagagcagagaaggggagaagaaaagaagcagctgaacattggagaggtgcagtttgacttcagagggatggcttgatggcagaactttggagaacagtctggctgaagatggccagacttcaggggaagaatactctcctgctccttcctctttccagctccctttcctgctgagagccacttccatcggcaataaaatcccctgcatttgttatccttcaattcgttcgtgcaatctgatttttcctggatgctggacaagagctcggaatacaaaaaggctgtcacactgaccctttgccctcacgaaaaggcagaaggtycactgagctgttaaacacttacttaagccatcctcgggcagtaaagctaaaagagctcactgt

SEQ ID NO: 93096 - DNA, 1786 bp, Homo sapiens
aggtcacacctgtagggaatgacggtagaggatacccaggacagagagtgggagtcctcgctctgcagcagcaaagttagcctcacatagcttgtgcatgcacactgtgggccctcagatagtttctgaggggctgtatcactggctcctctgccccccaactcccaccaaccctaaaagatttcctcctttgtgtaggtgtgtgtgtacaaggtggttggagatgacgtttaggtgctagaaggggcgacacttgatgggccctaaaggaccagccctttctattttctacctcctaatgcattgagagagtggataaattgtatacccaggaggtgctgatgtgtcagggagcaacagatgtgagttccttttttactttctttctttctttgtcttgtctactgggaagctccattccttttgttgttgttgttgtttgtttgttttttgtttttgagatggagtctcactgtgttgcccaggctggagtgcagtggtgtgatcttggctcactgcaacctctgcctcccgggttcaagcgattctcctgcctcagcctccagagtagctgggatcacaggcgtgctaccaagcccggctaatttttggtgtttttagtagagacggggtttcaccatgttggccaggctggtcttgaactcctgacctcaggtgatccgcctaccttggcgtcccaaagtgctgagattacaggcgcacgccaccgtacccagcccaatatatgtgtatttttaacgttactatataatgctagattgcttcagactggtctttacagatcggatccttcttatggtttcccatatgtccagaatgaaatatgagctccctggccaaggaggccctacagcacctggccccagcctacaccccctacactcccaacacactgacactgtctactcatccagaaaaagcaacctgttagccaccacttaatataccccttcacccccggtgtgtgtgtcccacatcgccgtttatttttcagcttgtttgtctgcataccgacccaccgtccttcaaacgctacaacgtaaactcccagtcctggccactggatgaagccagtggcttttccctacctcctactctttgtgcacgcagagcaatttagccacgcatcccgccttcccgttattttacacctgcaacyctgttgctgccctccaagttcaaagtgcgaaattgccgcctgctagaatcttttccttagttgggcacttcccctccccgccctgccgtaagaaaattggtgtctgaagtcttaggagtgcctgcctctgcataactaagtaaacaaccgctttgcgacgcagccccagcagcaaaaggacacggtgggcacggccatctggcctggagcagtgacgtcaccggcaaggctaccttccctctgcgcctgcgctgcggccccatgttgactattggcggacggggtctcaaaggcgccactgagcgtgcgcagaaccgacccctgcagccctttaggctgcggtgccaaagagtcggtcccgaagcggaagtgcttgttggggccaggctttgtaacggtctcctgagcagcgagcagaaaatctgttatcgagagagagtgaggttgagggggcaagtgctaggggtcgtgggctgagtgatggggagttctgtgggatgagtgaagtgggagttgggggttgagtgatgggggaccgagaggtcagtggacgaggttctaggggctcactggtgaacaaagttatgggggctaagcaggattaaa

SEQ ID NO: 93097 - DNA, 999 bp, Homo sapiens
tacctctacattttttccccaaaatggctaccatattttctatatctgtctccctggggcctttgctatttgcttcctcttcagctgagacgattactttaacagacttcaatgcccaagacttgactaaaactgcctacrgtggcccttctccccactggagtactgaagaggccagatgttttcccaaaaccaatactttgggacctacatgttttccaattaatttctttgcattcttgttctgtgtccccagtgcttatattttctgtcactgtacttggagagaaaaacaattgctcactatatatatataaatgttcactatatttttttgttcatttacaaattggtataaaattttggcctagaaagataactatatttataatagcacacacaaatgtaaagtaggtactctgtcatagttcattttaaatcctaaatatattatatacccaaaatacattacttaaaattgaaatggaaaaatagaaacatgatttattaattataattatagctatataattatgtatttataaactctcaaggcatttactgtattaatttgtaaaaagaattactatccctaggaagtatataggtcgcaaatatcagtaatttcattatatcaaacttttctgtagtggttgcagacacaaatgagttttggaaataccacaatagtgttgggagaggcaatctgccctgggccttgaatgtccctgaatgtacttactgggtatgccaagaatgcaaaagcttgactccactttactgggaccattttccagagtggggtttgcagtgagcaatcttgagtgacgaggtaatgtcacccaccagggcaaagaacaagcaggcttgcttactactctatttactaaaagctggagattcccaaaatctagcactcttcagatgtcatgcaaacccactgtgtgctgggcccatctgagtcctccatattgcccccataatccttggaggggaggg

SEQ ID NO: 93098 - DNA, 696 bp, Homo sapiens
catcttttcatgtgcttattgaccacttgcatatcttctttgatataatgtaatttttagatacacatttcctaattgttaatctaaaataatattaatgagacttaatcaatctattagaatgtactggcttctactatgtgactgcctaataccccatgtatacacctggcctggatatatagcaaccccagcagggcaatgtcttttattttttactcagctagttatcgtagccaaggtgacaatggcgaagtctcccaygtagagggagtaggatggagaatcttccagatagcccaaaatttgaagtggttctcttcctcctgaaacttccagcagccgcagtgcttgcagaaggcacttgatggcagctttcaggggcatttcctggcagctgtggcaaggattttgcagaattagaatggcatgtattaaaaccagagccataaaagtacagttcttggatactctgtactttaaatctgcattctgagcaattttagacttgggaaccaaggattccttgcaattagggttcccattttcaacagcagaaagtaatgcagtcatcacttggcacaggatacacaggcaagtttgaagacaagcagagaagagaatggcccagaaccaaggcacatacttcccgtagccacaactgccttagggtctcaccaatatctgaaggataca

SEQ ID NO: 93099 - DNA, 660 bp, Homo sapiens
gagagcccaggacaacagcccttatatttagctctgggaagatggtctgcacgggagccaaaaggtatgaggaatcatccctccacccctaccagagaaacaatttagtatgtaaaacaaggaagcatagaattaatgtgctaaagcacatagtagaagcaaaatgcctttctttgctgaagactttattcaatgaaatgccacattttgggttaaaaacactcctataaatactgacttgggccaggcatggtggctcacatctgtaatcccagcactttgggaggcctaagcaggaggatcgcttgagcccaggagtttgagaccagcctgggcaacacagtgagactccatctctgttaaaaaaaaaaaaaaaaaaaaaaagagaaatctaaaaagtagctggatgtggtggtgcatgcctctagtcctagctacttgggaagctgaggtgggaggatcacctgagcccatgagtttgaggcygcaatgagctatgatcataccactgcagtccagtctgagtacagagcaagacctgtctctattaccaacataataaatactgacatatccccattttacagtttccctattaaaccgaggggacttaactgcgctgctacaacttgtttctaaggtgaattttttttaagttac

SEQ ID NO: 93100 - DNA, 660 bp, Homo sapiens
gagagcccaggacaacagcccttatatttagctctgggaagatggtctgcacgggagccaaaaggtatgaggaatcatccctccacccctaccagagaaacaatttagtatgtaaaacaaggaagcatagaattaatgtgctaaagcacatagtagaagcaaaatgcctttctttgctgaagactttattcaatgaaatgccacattttgggttaaaaacactcctataaatactgacttgggccaggcatggtggctcacatctgtaatcccagcactttgggaggcctaagcaggaggatcgcttgagcccaggagtttgagaccagcctgggcaacacagtgagactccatctctgttaaaaaaaaaaaaaaaaaaaaaaagagaaatctaaaaagtagctggatgtggtggtgcatgcctctagtcctagctacttgggaagctgaggtgggaggatcacctgagcccatgagtttgaggccgcaatgagctatgatcataccactgcagtccagtctgagtacagagcaagacctgtctctattaccaamataataaatactgacatatccccattttacagtttccctattaaaccgaggggacttaactgcgctgctacaacttgtttctaaggtgaattttttttaagttac

SEQ ID NO: 93101 - DNA, 1836 bp, Homo sapiens
gggaatggctgcttttcaaaaaggagtgctccgcaaatgttaccacagcaaagctggaagagtctacagtgttacccagcatgctgttggcattgtaaacaagggcaagatttttgccaagagaatgaatgtgcttactgagccaggctggtcttgaactcctgacctcagttgatccatctgcctgggccttggcactctaagagccaagtaagtttcctgaaacgcgtgaaggtaaataatcagaaaaagacgtcaaagggagaggtgtctgagttcaactgaagcgccagcctgctccacccagasaagcacttagaaccaatggagggagcctgggctgctggaacctattccctatgagttcatggcataataggtgtcaaaaaaaattctgaactgtacaaatgtttctcttcattgagaagtgtggcgccgccccctccccttaaagaaatatttaaactacattttgtatccaaaaacctcagtgctctgctgttaagtaatacattaatatgcgttctctgaaaatatatagcaacatataggagtttcaaataactgcataagctagatactatctgtgatatcatctagcacgataggaattaatgtgtattttttgccttttaaaatattgaacagttgatcctgatcattaggtattaagcactgtgaaggatcctgtctgaatacaaatgaaacataagcccgagaccttaaaaaataatccttttgtttgaaatgatcagagagaaagacttctcacttaaaaataaatcttaaactttcaggaaccattcaagtttagtgtaaactgtattctgaatatagagaatttttgcttttgcttgtttttgtaatcctacgtgatttgtatttaaaaagactgggtaagattaagaagacggaggagcaaagggctcagattcaagacctaattagcttgtagaatcaccagttttcgatggtgatgtggagattaacagggagggacgggctaatatgaatcatggctcttggctgtaaatcatcagtgattacgtcctttaccaaagtaagaaaacaggtttgtagggaggcagaagtcagtttccaacactttgagtttgtggtgtcctggaatgtcacctgatacctagtaagtagttctggatctttgggtatggaacttgagaaaggaatcctggctagagagagaattcagggcagtttatcagtagatagcctagtaaaatcatccttgagaatcactggtctatttaatctcacctataaactcacttttctctgtagtttagaggcatattcaaacactaattactctgatatgatcctcccaacacatcaccttatatatcccctatccaccaaaagaaacttgaagggaagtcctaaccatctacctagttcaaattctcttagagcatggcccagggtagggaaggtacgttagccacgtgattaacttttcagaaggatacaattctgattttgcacgttcactttggttgttttcactattggtaaagtataatactattaaccatattaatcctcacggcattagatgggtactataattctatccatttaacacgagagaacaggcgcagagagattaaggaacttgccccaagtcacacagctattaagcaggtgagtgagccaaaattcaacctagttccaagacccagccccttcaccctactttgtttgctgtagtttagccagattttaaagcatccacagcaagttaaattcccttattccgctcccattccgttttcccagaatccttagggtatggtattacaattttctgcacaagtt

SEQ ID NO: 93102 - DNA, 570 bp, Homo sapiens
taggattacaggcctgagccaccgcgcccggccccttatgggttcttctacactgctgggatctctgttttaagtgctcagcttcatgattgattgctgggcttccattttcccatccagttctggagttcgtagagagtgaagatggtagacttgaacagataaataaacttaacgatcttgtaagagttgtctagctacttaaaaccctcagaagtaagagcttagtctcacgagttgtaagagtgggatttggagcttggtggtggagactgacttcagctgagagatgcacaacagtcatggttttcttaagcctcttatgaaaccatgaatgwgagatgaagctaaagaatagaatccagagatcacaaactcatctagagtacttccacaaaatttacaaagatgtgggaactttatggataggatatattttgtttgttgttgttaatatcaactagaggcactttacatagggttaagtgatcgaacccttttgtggttttgaacaccaacatactggcttacactgctgaaatattttgggtttcattattttgcactgga

SEQ ID NO: 93103 - DNA, 2126 bp, Homo sapiens
ggttcaagatcagcctaggcaacaaaggagactccatctctacaaaaaaaattaaaattagccaggcatggtggtatgtgcctgtagtcccagctacctaagaggctgaggcaggaggactgcttgagcctgggaggtcaaggctgccatgagccatcatcacaccactgcactccagcctgggtgacacagtgagaccctgtctcaaaaaaataaaaaagtgattaatacaaaattatttccacatacaaggttttatctctgccttgcatatagtagattctcagtattatttgaatgagtaaattcttccaggctaaagagaaaagcaaacagagccaaatccacccagcatatgggttcattttagaaagcacttctcttcacctgccccagtcaactctccttctccctcaagtctcaatctaaaagccacatccaggccaggggcagtggctcatgcctgtaatcctagtactttgagaggccaaggcgggtggatcacctgggttcaggagtttgagaccagcctggccaacatggtgaaatcctgtctctactaaaaatataaaaattagctgggcatggtggcaggcacctgtaatcccagctactcaggaggctgaggcaagagaatccgttaaactcaggaggtagagcttccagtgagcctagatcacgccactgcactctaacctgggtgacagagcaagaccatctcaaaataaataaacaaataaataaaagccatgtcccggccaggtgctgtggctcacgcctgaaatcccagcacttcgggagggcaaagcagacagatggcttgagctcaggagttcaagtctagcctgggcaatgtggcaaaatcccatctctacaaaaaaaaaatacaaaaatttgccaggtgtggtggtgcgcacctgtagtcccagctactaaagaagctgagatgggaggttcacttgagcctgagaggttgaggttgcagtgagccataatcatgctactgcactccagcctggagcaagaccctgtctctaaataaataaataaaatagtaataaataaacatcatgtcctaaggaagcctttgcctctccccaatccctgatcccaaaattaaagtaactrtagttgtactaattccttacagcatgggtcacaatttcatttgtaattatgtttctgtatatgtatttaaggtgtctctttcccattaaaccaaaagtttcttaagctcaaggatcctgtctgtcttcactattgtttctttaatacctagcactggcattgccccataataggttatcactaagcatttgttgaatttgtgaataaatgagtaagtaaatgagcaaataaacaagcaaacgaccttgtggcgaaatcacatttggcagctaggcatggtggctcacgcctgtaatcccagtgccttgagaggctgagatgggaggattggggccaggcgttcaagaccagcctgggcaacacagtgagaccccccccaatctctacaagaaatttaaaaattagcaggccatggtggcaggcacctgtagtccttggataaagctacttgggaggctgaggtgggaggactgctggagcccagaagtttgaggctgcagtgagccatcaccacaccattgcactccagcctaggtgacagagtgagaacccatctattaacaaaaaaaagaatcacatttggttaggcccacagcaagataatatatgagttgtctttccttgaggtgtttaaaatgaaatagaaaaagaaataaagaaattgatcatgacagactaaaactagcaaggaaatggttctaaagcaacatattcagaaaaaaaaaaatctctggcagggcattaaaaatatacccgagatttgcactttgggaggccgaggcgggcaaatcacgaggtcaggagattgagaccatcctggctaacatggtgaaaccccatctgtactaaaaatacaaaaaaattagccaggcgtggtggcgggcacctgtagtcccagctacttgggaggctgaggcagaagaatggcatgaacccagggcacggagcttgcagtgagcagagatcgcgccactgcactccagcctgggcgacaaagc

SEQ ID NO: 93104 - DNA, 2126 bp, Homo sapiens
ggttcaagatcagcctaggcaacaaaggagactccatctctacaaaaaaaattaaaattagccaggcatggtggtatgtgcctgtagtcccagctacctaagaggctgaggcaggaggactgcttgagcctgggaggtcaaggctgccatgagccatcatcacaccactgcactccagcctgggtgacacagtgagaccctgtctcaaaaaaataaaaaagtgattaatacaaaattatttccacatacaaggttttatctctgccttgcatatagtagattctcagtattatttgaatgagtaaattcttccaggctaaagagaaaagcaaacagagccaaatccacccagcatatgggttcattttagaaagcacttctcttcacctgccccagtcaactctccttctccctcaagtctcaatctaaaagccacatccaggccaggggcagtggctcatgcctgtaatcctagtactttgagaggccaaggcgggtggatcacctgggttcaggagtttgagaccagcctggccaacatggtgaaatcctgtctctactaaaaatataaaaattagctgggcatggtggcaggcacctgtaatcccagctactcaggaggctgaggcaagagaatccgttaaactcaggaggtagagcttccagtgagcctagatcacgccactgcactctaacctgggtgacagagcaagaccatctcaaaataaataaacaaataaataaaagccatgtcccggccaggtgctgtggctcacgcctgaaatcccagcacttcgggagggcaaagcagacagatggcttgagctcaggagttcaagtctagcctgggcaatgtggcaaaatcccatctctacaaaaaaaaaatacaaaaatttgccaggtgtggtggtgcgcacctgtagtcccagctactaaagaagctgagatgggaggttcacttgagcctgagaggttgaggttgcagtgagccataatcatgctactgcactccagcctggagcaagaccctgtctctaaataaataaataaaatagtaataaataaacatcatgtcctaaggaagcctttgcctctccccaatccctgatcccaaaattaaagtaactatagttgtactaattccttacagcatgggtcacaatttcatttgtaattatgtttctgtatatgtatttaaggtgtctctttcccattaaaccaaaagtttyttaagctcaaggatcctgtctgtcttcactattgtttctttaatacctagcactggcattgccccataataggttatcactaagcatttgttgaatttgtgaataaatgagtaagtaaatgagcaaataaacaagcaaacgaccttgtggcgaaatcacatttggcagctaggcatggtggctcacgcctgtaatcccagtgccttgagaggctgagatgggaggattggggccaggcgttcaagaccagcctgggcaacacagtgagaccccccccaatctctacaagaaatttaaaaattagcaggccatggtggcaggcacctgtagtccttggataaagctacttgggaggctgaggtgggaggactgctggagcccagaagtttgaggctgcagtgagccatcaccacaccattgcactccagcctaggtgacagagtgagaacccatctattaacaaaaaaaagaatcacatttggttaggcccacagcaagataatatatgagttgtctttccttgaggtgtttaaaatgaaatagaaaaagaaataaagaaattgatcatgacagactaaaactagcaaggaaatggttctaaagcaacatattcagaaaaaaaaaaatctctggcagggcattaaaaatatacccgagatttgcactttgggaggccgaggcgggcaaatcacgaggtcaggagattgagaccatcctggctaacatggtgaaaccccatctgtactaaaaatacaaaaaaattagccaggcgtggtggcgggcacctgtagtcccagctacttgggaggctgaggcagaagaatggcatgaacccagggcacggagcttgcagtgagcagagatcgcgccactgcactccagcctgggcgacaaagc

SEQ ID NO: 93105 - DNA, 539 bp, Homo sapiens
tggatactctttctcaaagtcaaatgatttgggaccttaattacatctgtaaagtgckgcatagcagcacttagattggtatttgaataactgggagaaggtgtgtatatactagggataggaatttagggggcatctcaccgttctgcctaccacatatgatgagagactttataagtctatgtgtaagactggtagggctgccacaacaaaatactacagtctgtggtggcttaaacaacagaaatttattttcttacagttctggaggctggaagtccaagatcaaggtgtcagcagggctggtttctcttgaggccgctctctttcattcgcagatggctgccttctcactgcatcctcacctggccttctctgtgtgaacatccctggtgtctctgtgtgtccagatttcatcttcttgtgaggacaacagtcagatcaaatcagggcttcaacatataaattttggggggaaacaattcagtctataacagtctaataacaaaattaagagctaatatttgagctactaggca

SEQ ID NO: 93106 - DNA, 539 bp, Homo sapiens
tggatactctttctcaaagtcaaatgatttgggaccttaattacatctgtaaagtgcggcatagcagcacttagattggtatttgaataactgggagaargtgtgtatatactagggataggaatttagggggcatctcaccgttctgcctaccacatatgatgagagactttataagtctatgtgtaagactggtagggctgccacaacaaaatactacagtctgtggtggcttaaacaacagaaatttattttcttacagttctggaggctggaagtccaagatcaaggtgtcagcagggctggtttctcttgaggccgctctctttcattcgcagatggctgccttctcactgcatcctcacctggccttctctgtgtgaacatccctggtgtctctgtgtgtccagatttcatcttcttgtgaggacaacagtcagatcaaatcagggcttcaacatataaattttggggggaaacaattcagtctataacagtctaataacaaaattaagagctaatatttgagctactaggca

SEQ ID NO: 93107 - DNA, 527 bp, Homo sapiens
tactttgctaaacatatccagattgtcttttgtgcttaatactattattatttgttatttactgctactgataactaacagaagtaactggcctaaactttaagttactgaaacttgaaataaaattttttccttgccatttatatatgtagtggttttatgaagctccttgccttctaatagcactgaggaactaatcaatatattctctgatttgttgacttattttgtattcattcatttagtcattcagtaaatacagaagaaacatctactattcagaaaccttttcaargaattattccaaatcaagatctacttttaaaaccttgctaaaaagacaatgtttgcactctgaacaatgaagttctgatctattagaaataaaaaagaaaggcttgagttctcaaattcatctcaacatagactccataaagattatataactggaagtaaataccagcagtctttaccctacaatgtttgatcagtgtccagatatctttatttcctatggccagatttta

SEQ ID NO: 93108 - DNA, 894 bp, Homo sapiens
ttaacgtgtttagggggatggaaattgcctccaacatatcagagaggcagcaaaatcaacaatattagctaattctataggctcaaacactgacccagagtgaatattcttcctttgcatcagttcttagccacataggtctcttcattccaagtggttttagatggtgctattgcttgaaaatagctgtgagcatgctattttgcattccactgtttctcgcagtcagagagtctcaatcaatgggcccttctgtcctcagtgtcccagttaggacttcaccttaagactaggctcacaggagagagtggcaaaatggaaaacttacctggaagcacatagacctgggttcaaaattcacccataatatattccatagagctgcatggatcccaaaatctcagttttgccacctgtgaaaagggaataaccatttttattagcratctgagactgaatagctatgaagcagtgatttagaaatggagctaattctacaggcagacactgtggtaaagatgaggcatatttctcatgaaaactcttcagaaagagtggaccagattgtcagaagtgaccaattctcagaaagattctgtttcataatcaaaatgaaatccctttctgtaattgtcaacgtcaaactttagtttcatgattgatgtgggctttaagttgctaatatttaaaaaggcacttcattgactgtggcacacacattttcagcaatcacatttctacaagaaagataccacaggaggaaaaaagcctactataaaaatcttttgtatatataccttgaagagctcatttctaggaatagtctgacacctttagaagataaacagtactgtctcaatcaattacaaagattttaaggaagacaataccgct

SEQ ID NO: 93109 - DNA, 608 bp, Homo sapiens
  misc_feature (1)...(608): n = A,T,C or G
cactcataagtgggaggtgaacaatgagaacacatagagaggggaacaacacataccagggcctgttgtggggtgggggatgagggaagggaacttanngggacgagtcaataggtgcagcaaatcaccatggcacatgtgtacctatgtaacaaacctgcacgttctgcacatgtatcctgatttttttagaagaaatatatataatatatatgtttatatattttatatatattaaataaataatatatatttaatatatacttttatatattaaatatatatttatatatrtgtttcagaagagatatatatatatacatatatatagaaagaaatcaacaccatctaagaacctgctccctcaagccagctgcttccagtaagggtgagtgaaaagtggcttctaaacaaggaaattttcactttgccttgaacattctgagaacatagtgtgtccggaattggtgggttcttggtctcaccgacttcaagaatgaagccgtggaccctcgcagtgagtgttacagctcttaaggtggcgcatccggagtctgtcccttctgatgttcagatgtgttcggagtttcttccttctggtgggttcg

SEQ ID NO: 93110 - DNA, 1134 bp, Homo sapiens
gttccccctgctatagttcacatgataggcaaacaagaaatccttatattaaattaggaaatgttgcagagggaaagtataaaatagtctaaattaatgtcctcaaaaaacttatacagaatctagatatctctgctaaattacttattgtttagaaataagtgtaatgggctcaccaaatgattgaactactgttgagtgtagtttccttaagaaaaagatagttatcaggcccattttagaaacacaaatattctgaaaatagaatgaggaaaaaaattttaaagaggtaaactcacctcagacagtccagaatatttattttagatgctccctcaaacaaaaataccaaaatttaaaaagggccacctagccctttgcgtactaaacatttacaccaacaagaatatgttctgaacaaatgtttagcacagcatgagatatttagacctgactccagattgcttctgaaaagtgcagtgtctggcattttttaaaaggaagttttctagattttataaaatacaggatgatgtattaatctcatatgattgatatgtgctaaggtatatgagtctattagaatattccaataaaccattttcatgtaaggcacacaatgaaaatgttttgtgtttgtgtttgtgtgttgtgcatatgtgtgtgtgtgtgtgtaatatcctactgtgggatccacatatatttatatgagacccttagtcactgttttcttctaagggaactgttcacaagtgaaccctcaattctattcttaaattgaataagggtaaaaaaaatttcctgttttatttcctttttagcagtaaagaatttgtttattcatcaatttttaaaatattttamaattcaaatttaaatttttaaataggacaaagaatgggtgtgtttttgttcactgataggcaaattcctctatgaacaaagcagattataaataaacaagctgagattacaaatagacacatagacacaaaagatgttttttgccaagtatattttgaaaaacataatcaaacttgttacaaatctagcatttgaattttgtcctcccctaacgattctttttttgttattcgttactaagatgagatagttagagctgcaagaaatgca

SEQ ID NO: 93111 - DNA, 541 bp, Homo sapiens
tctgcctactccactcctagggtgcaagcactcttagggcatcaatattatcatttacaactcctatacctagaaatatatgactgaaatatatttagcattctgaaaatatttttttgccatcttaaaagcaatgctggaattagaaggaactgaattaagtgtcttgtgcatattaagtgatgaataattatttgttcatctattttatctcaattattttctatcttaagtctaccttgagttcttttattaaacatatctatacatactgtgaattttagaatctacatttattcctacatacacttgaaagaaaagaggtaaatttatgttactcatctatttcctattattaatcacaaacagttaccaacatygttatgagttgagacacattgtatatgtaacacagactgtgattgcactcatgttgcagaggataatcattcttaatttaaaaagattgtaacgggtcttaactcttttgttatttacataaataaaacaaatttttttgactgagagtaattaatgccac

SEQ ID NO: 93112 - DNA, 769 bp, Homo sapiens
aaaatttctaaatgaaaacaaacagtaagggggagatgccgttttcagaagagacaggcaatggacagacaaaaaaaaaaagatgtccaccatcgaaactgtatttaaggaatacagccttggaattacctttgacccctctttctctccctctccctgcctccccaagtattcaagtattaacaaagctggttaacagtgtctgtgtattagttttctgtggctgctgtacaaaaattaccacaaacttcatgrtttaaaacaacacaaatttatcttatggtcctggaggaagtctgacaagagtcacactggactaaaatcaaggcgtcagcagagttgagttcctttatggaaactttttgggagaatcttttttcttgccttttccacattctagagacctcccacattccttcattcatggctgtattccattttcaaagccaacaataatattactctgacacactgacacttctgcctacctcttccacatgtaaggacctttctgattatattgggcacattaagataatccaaaacagtctccctatctgaagggcaaatgattagcagccttaattatatctgtaactttaattcccttttgccatgtaacatattttcacaggttttgggtactggcatgtggatatcttttggggggcattaatatccctactacagtctttctttacataaaagtaacaaagcctaagccactgcttttcaaactgaaacacttgtaaaaaaaatactgatatct

SEQ ID NO: 93113 - DNA, 620 bp, Homo sapiens
tgttaacaagctcaattttaaaacatcatcttacacaaatctatgtaattttcatcaattaaatttttaaattaaaaaaaatggaggactgaaaaactgttaaaacatctttaaagcatgaaaaaatgaaatgttaacccagaattttatattcagcaaaaatatcactgaagtgtgaaagtgaaataaaggtattttcacataaaactaaaagcatttgtcatcagccaacctgcactataagaaatgctagaagttatttacatagaagagaaatgataccagatggaattgggatactcagaaatgaatgaagaraatcagaaagggtaaatggtggagaaaatgcaaaatactattttatcctttttttcctctatataaaccaaataactgtttaaaagtaaaatgataatagtgccttgtgggctgtgtgagtagaggggagtttgttttacatgtaataactacaatcaaaagaataggggtgtgggcctggaaatttgtaagatttccatattttacttgaagtagcacattattaactaagtaagtggactatgaaagctatggctgtatcttataatccctagggcagccactatcaaaaaaagtacaaa

SEQ ID NO: 93114 - DNA, 603 bp, Homo sapiens
catatgtgattaaaagaacactggrgttgatgtcagaaaccctaggttaaaatcttgggaatgcattctgaatcttgatctaggtgccaattacacaactgtgtttgtgaaaagtcatcgagttttaatgttggcattttttatgtaaatgtgttgataagttttaaaaaacccagtcctaagatcctcctatttactatgcaaacatgagtaagtccatttctctgaaatttagttttatcatttatcaagaagtctttttgtacctatctcatagagttgttgcaagcactgatgacataagtgaaattgccttatcataatagatatacaacaaataccagttgaatttctattctttgaaggatgtagaagcagaaagatgcagaggtgaaactcccagaggccaaataggatgaaactttcacttacagaagagctcttagatagccaaagagagttgtgactttaagagacaccacgaggagggaatgaactccagggagcgcctgatctctagagtatgccacagggcccttagatccttttacccttaaaaattagaagggccttggggtctggggaagagcaagaggctgggat

SEQ ID NO: 93115 - DNA, 468 bp, Homo sapiens
taaaacaacgttcttaaataaccttttctctttctgccatggtaaattatttgtttagtatttccatctttccaaagttgttttcagtaatttataatcataaatatttattattctattcaaaatcatattaatatttttctatttatattttcacatttaatctcattcattacagtctcttctgacttttcagtttcttccaaatgcatggctacttgcctatttttatttattgattaggttggctaatatgtgatctcttattttcttcttgttaatattattaatattgtctttgttactaaaacagctctgggatttatttcattatggaacttttttgattttgtttttctctttttttgttttgttttgttttagagacaagatcttgctctgtcacttacactgtagtgagtaatgcaatccacggctcamtgcagcctcaaactcctggggttaagg

SEQ ID NO: 93116 - DNA, 891 bp, Homo sapiens
cagtagccattttgaggtcatgatgcaaagttcaggagaatcacagaggcttcagtcctcaaattctggaacctgttgaaccaacaccaggttcaacagcagatgtctactagacttcttgctaaataagaaaaaaaagaaagaaatacagtagacccttgaacaacatgagtttgaactgcatgggtccacttatacatggatttctttttcaaccaaatgtggataaaaaatacacagtattctcaggatgtaaaatctgcttataagaaagactgactttttgtrtatgttgattctgcagggacaactctaggagctacctagagttggagctacctagagttaaagctacctcttaagaggttaatccatgtattaggatacaggctaagcttctgtaacaaaggcaccctaaaattcagtagctcaaaccagatagttcattctgtctttcatgtaacagttcagaggtgagaagtacagagcatacaggctgctctgctccgtgatgtcacccagagctccagggttgttttggttgtgggtctaccatttccaggattgttgctctccatgacatgtttgagggtgggtggttcaaaaagaaccatgtttgcacgccagcccctaggaagggggaaagaagacgggaggctgagtagtctcctttgtaaggggcatgacccaggggtttctgaagtcactactgctcacaggccattggccagaccttcgtcacagcaccttgccttgctgcaagggaagctggaaaatgtagtctctagctgtgtgactctgtgtatgtgtgtgcattgacagcagttttattattaaaaggacgaggagattgtggggccattagctatcttgattgcattttctgtttcc

SEQ ID NO: 93117 - DNA, 659 bp, Homo sapiens
aaccctgagcagccgaagaccagaaaagccatgaagactttctgcttaattcaggggcttacaggattcttcagagtgtgtgtgaacaaaagctttatagtacgtatttttaggatacaaataagagagagactatggcttggggtgacaatgtgctgattacaaggtctacagacaattaagacacagaaacagatgggaagagggtgtccagcatctggtggttggcttctcaagggcttgtctgtgcaccaaattacttctgcttggtcttctgctgagctgggcctggagtgaccgttgaaggacatggctctggtagctttgtgtagcctggcacaggaactttggtgtatccttgctcaggaactttgatggcacctggctcaggaaacttgatgaagccttggtcagggaccttgatgctgcctggttcagggaccttggtgtagcctggctcagggaccttggtacaacctggctcagggaccttggtacakcctggctcagggaccttggtacaacctggctcagggaccttggtacagcctggctcagggaccttggtacagcctggctcagggaccttggtacagcctggctctggaatctttgtgtttccaggttgtggaacctttgagtggcatggctccttggtt

SEQ ID NO: 93118 - DNA, 690 bp, Homo sapiens
gcatccccaaaaccaaggagccctgccaccccaaggtgcctgagccctgccaccccaaagtgcccgagccctgccagcccaaggttccagagccatgccaccccaaggtgcctgagccctgcccttcaatagtcactccagcaccagcccagcagaagaccaagcagaagtaatgtggtccacagccatgcccttgaggagccggccaccagatgctgaatcccctatcccattctgygtatgagtcccatttgccttgcaattagcattctgtctcccccaaaaaagaatgtgctatgaagctttctttcctacacactctgagtctctgaatgaagctgaaggtcttagtaccagagctagttttcagctgctcagaattcatctgaagagagacttaagatgaaagcaaatgattcagctcccttatacccccattaaattcactttcaattccactcttgactgtgtgtcattgactctacaacttcattcctttccctcgtgaagcgggagctgtacacagagatgagttggtgaagaagggctttgtccagaaggcatctgatgctcacattaggagggtgaagggctgcccccacaagcattcctgggctgcctatgggaggttgtgtaatgccacctagaggctgttgctttgggcatccagggctggaaaagggctctcct

SEQ ID NO: 93119 - DNA, 690 bp, Homo sapiens
gcatccccaaaaccaaggagccctgccaccccaaggtgcctgagccctgccaccccaaagtgcccgagccctgccagcccaaggttccagagccatgccaccccaaggtgcctgagccctgcccttcaatagtcactccagcaccagcccagcagaagaccaagcagaagtaatgtggtccacagccatgcccttgaggagccggccaccagatgctgaatcccctatcccattctgcgtatgagtcccatttgccttgcaattagcattctgtctcccccaaaaaagaatgtgctatgaagctttctttcctacacactctgagtctctgaatgaagctgaaggtcttagtaccagagctagttttcagctgctcagaattcatctgaagagagacttaagatgaaagcaaatgattcagctcccttatacccccattaaattcactttcaattccactcttgactgtgtgtcattgactctacaacttcattcctttccctcgtgaagcgggagctgtacacagagatgagttggtgaagaagggctttgtccagaaggcatctgatrctcacattaggagggtgaagggctgcccccacaagcattcctgggctgcctatgggaggttgtgtaatgccacctagaggctgttgctttgggcatccagggctggaaaagggctctcct

SEQ ID NO: 93120 - DNA, 690 bp, Homo sapiens
gcatccccaaaaccaaggagccctgccaccccaaggtgcctgagccctgccaccccaaagtgcccgagccctgccagcccaaggttccagagccatgccaccccaaggtgcctgagccctgcccttcaatagtcactccagcaccagcccagcagaagaccaagcagaagtaatgtggtccacagccatgcccttgaggagccggccaccagatgctgaatcccctatcccattctgcgtatgagtcccatttgccttgcaattagcattctgtctcccccaaaaaagaatgtgctatgaagctttctttcctacacactctgagtctctgaatgaagctgaaggtcttagtaccagagctagttttcagctgctcagaattcatctgaagagagacttaagatgaaagcaaatgattcagctcccttatacccccattaaattcactttcaattccactcttgactgtgtgtcattgactctacaacttcattcctttccctcgtgaagcgggagctgtacacagagatgagttggtgaagaagggctttgtccagaaggcatctgatgctcrcattaggagggtgaagggctgcccccacaagcattcctgggctgcctatgggaggttgtgtaatgccacctagaggctgttgctttgggcatccagggctggaaaagggctctcct

SEQ ID NO: 93121 - DNA, 662 bp, Homo sapiens
ttcacagcagtattaaaacgttcggatttctcttcagcccaaatctgttttattatgcttctggctcaaggcagagtccatttcctccatcccagctaacaccgttttactatacttatctggactaattggtgtccctgtccccagtcttgccctactccaatccatacttcatatcaatgctagagtgaattggaaaatattaataaggatatcatactgtgcttaaaactctttaatatattcccatcacttagtgggtcaaggtcaaactccttaataaggcatttgaaaccttgtcgaatctgtgtttctggatattttctgttattttcccatcagtcactccttctcccacacccacctgatgattacatgggggttcaatagtctcttagcacacagtacatgcttttaccatcttctatatatttytcattttctacatttttatattaccatcttctatatctttctcatttcatctacctgagatgttctgccctgatactctaatagacagaattaattgttgttacttcattcttatgactcttattttagcacttctcacataaaacatgtttcctcttctgactatgagctctctgactatagactaaagattagttcccagaaaaaaacaggataaggatccccta

SEQ ID NO: 93122 - DNA, 662 bp, Homo sapiens
ttcacagcagtattaaaacgttcggatttctcttcagcccaaatctgttttattatgcttctggctcaaggcagagtccatttcctccatcccagctaacaccgttttactatacttatctggactaattggtgtccctgtccccagtcttgccctactccaatccatacttcatatcaatgctagagtgaattggaaaatattaataaggatatcatactgtgcttaaaactctttaatatattcccatcacttagtgggtcaaggtcaaactccttaataaggcatttgaaaccttgtcgaatctgtgtttctggatattttctgttattttcccatcagtcactccttctcccacacccacctgatgattacatgggggttcaatagtctcttagcacacagtacatgcttttaccatcttctatatatttckcattttctacatttttatattaccatcttctatatctttctcatttcatctacctgagatgttctgccctgatactctaatagacagaattaattgttgttacttcattcttatgactcttattttagcacttctcacataaaacatgtttcctcttctgactatgagctctctgactatagactaaagattagttcccagaaaaaaacaggataaggatccccta

SEQ ID NO: 93123 - DNA, 662 bp, Homo sapiens
ttcacagcagtattaaaacgttcggatttctcttcagcccaaatctgttttattatgcttctggctcaaggcagagtccatttcctccatcccagctaacaccgttttactatacttatctggactaattggtgtccctgtccccagtcttgccctactccaatccatacttcatatcaatgctagagtgaattggaaaatattaataaggatatcatactgtgcttaaaactctttaatatattcccatcacttagtgggtcaaggtcaaactccttaataaggcatttgaaaccttgtcgaatctgtgtttctggatattttctgttattttcccatcagtcactccttctcccacacccacctgatgattacatgggggttcaatagtctcttagcacacagtacatgcttttaccatcttctatatatttctyattttctacatttttatattaccatcttctatatctttctcatttcatctacctgagatgttctgccctgatactctaatagacagaattaattgttgttacttcattcttatgactcttattttagcacttctcacataaaacatgtttcctcttctgactatgagctctctgactatagactaaagattagttcccagaaaaaaacaggataaggatccccta

SEQ ID NO: 93124 - DNA, 697 bp, Homo sapiens
aagccagaccaaaatagagaatatattgtatttatacaaaattctagaacatcctagcttatctatagtgaccaaaaaaaaaaaaaaaaaacagatcagtggagattcagggatgagaggaagacattacaaatgcgcataaggaaaatgttgggggtgatgcatacactcataatttttattgtgatratggtttcacaaatatatatatgtgtcaaaacttatcaaagtatatacttttaatatgtgtagtttactatatattggttatacctcataaaacttttttattttgaaaaacaaaagagtgttctaataatatgcaaatatccccaagagctatcacaccctaagctttatcaactaatatcttactgcggaaagagaatgagaaataggtattagggacaaacctcaatttttccaagaactggccctgatgacacacttactaaacagcccaaaatgctgacaaaagtttttacaatggcacataatactaagtccactaagggacatttccttttcactcaaagctgacattcaagcccatgtagaataaaaaggtgggtactacctggcttggagcaatttttctcaccatttgtgcacccagcctttttattcctctcctctctccacccaagtcccccaaagcaagaatcaactagtcccagaaacaacagaacaatttcct

SEQ ID NO: 93125 - DNA, 766 bp, Homo sapiens
aagattataaataaggtgcaagatctcagtgagctgagatctgccttaatattaagggaaatagcaaacatttctactataaaatttgtttccttccctcagcttaaaaattatgcttatctattactttggagcccacatggtagatagacaaactcaatatctgttctaacagatattgacagtgtttacctgttcctccttgagtgtttacctttgctgcagaagctggaaagtaataactacatttcctaggttcccttgcagctaaacttcagaatgatttaggttctaccagtcagatactcttttgtgaagcttgaatgtagaacagaggacaagtatacatattatagtattattttttaaarcctagtctagtgatattttatgctgccagtccattatacttttgctcccattcttatttatactacttttcatttgcatatttttgtaagccaccttaagaactttcaagaacagtcaatgttgaacatgtacttttagataattttgaacactcttatgtccaataatattatcaaaaatcttctccaagagcattatataaaagtttttaaactcttggctagtctgatgcttagaaaaagccatctcattgtgttttaatttatatttacctagtttttgaaggtgttgatttttttaatgctttttagaagtttatggaccttctttggaaaaattaaaattcatgcctactggagtttgaattcatcccccaaagcttatttgttagaaa

SEQ ID NO: 93126 - DNA, 1284 bp, Homo sapiens
acttgactgcctcctactttcagagacctgcagataatgaatgtaggtggccttacatacagatctacacttgtcccagactctgacattaggtttcccatccatctcttcacaacataaaagttaacagagcatagacagtatggttttgtcttcttttctgtgttgtcttagtttttttttattgttagtttgagttttttttttgagggggttaatttgtttttcatggagagttaggagatgctgtgttatactctcctrtagagatatcatttaaaacagtccaagtgtgctttaaaaggaaattcagatataatcttaggaaaatgaagagaagcctcagagcataagaatgatggagggtgggagaagagtggggaacgagagaaatagatcacttggcaggaagaggtattacaagctgcttaccccctcccccacctttggcaatcagagtgagtgacaatacaaagtagagtacacctgtttcaataataacacaaactggaaatggtgaagccatatttcaagaatttgagccgtaaaaatctttagataggaagaggaaaacaaacgactgggaaataagaggtgattaatgaccaggaaataatttaaaataataattaaaaataagagaagtgaggaatggatagacttttgtcttgtttcttctttttctttctttttgttttacatacttgctctaaacaaggatagacacatttcatataaattgactataatgtactaatgaaattattttaatttttacaataatattatgaaatgggtattagtaactcccttctataggtgagaaatgtgagaaacatacagtataaataatttgccttaggtcacagaggcacctttgtttcctgtctttagtgttctggagcaacagattatgtgctcctccatagttggtgtagccctttctacttggtaacattaattttggaaatattgtttattacatttataataaagatgtaaggcatgtatattatttaaatgtaaaggcaatgtgtgttagatggggttgtggatatatccatgcttttatgactcgtgtatctgaagtaaatatatataatttccaggtcctttttgattattctagaacaactaatcagctattgccagtcttcccagatgaagacatacttctgagaaactgaagagtatctcttgccctgtcttggaaacttcaagtctgtttttgaaaggaaacatcagatgaataagaagagatgttagaagaaatatcctttgata

SEQ ID NO: 93127 - DNA, 1999 bp, Homo sapiens
gcattatactttctggagaatggagttgggagaatctgggtagggaaacttttgcctattgttttatgctttcctttatatattatctgtctattgctgcataacaaggcaacccaargcttggtgacatcaactaaaatccatttacttgcttacagttgtgtaattggcaatttgggcaaggttcaatttggatggcttatctttattctgtgtgatgtctaggttcactcttgtgtctaaaaaaagttggtgggttagttagggactagctagtcctgaataatctctctcacatgtctggggcctgtgctgtgctgtaatgacttgagatagctaggcctctttctccatggtttctatctaagtttgttcacagggcagcagtgctccaagagggcaacatcattacaaaacagaacaaaaaaccacaatctatcttgaagcccaggcttggttgtcacccagggtcacttctgctgtattttattcttcaaagcaagtaacaaagctaggctagattaaaagaatggggaaatagacttcatctcttaacgggaggagttgcaacaaattgtggccctatttagtccaacacactctactatatgaatgttttataataagcattaattattttaataagaataataaaaataaaaagagaggtatttatcttttttctgtcgtaaagtactggtttgcccaactaccatctgtgtctttgagttacacaagagcctgtttctgttttcataatgtaatgtggttactggttagttaggaatgattctgtaacttatatacaaaaacaagttttgagtaagtttagtctcagccaagagatccattccagatgtgaaattctaacatccatgtgaaatgcatatatacttcactttactagtagccactaatgacttaggcacaatgagtaaatagcctgacatgaaattgtattatcttcctgtgtgtatgtctgtgtgtagctgtaatagaatttaaaatctctctgtcttataaacatttatcattcagcactttaatattataatgttctctactttaagcaataaggtcttattgaaggggaatttaaatagaaatgttatgaattattgtaaatgggtgttgtaagtattctttagttctctcccaaaataaattcaatggttaattgtcttattaaatgtaagtatgccctaatctttttatttctaataatgcaacaggggaggatagtgtggagagggacaatcctaccctgttgcattcttggaatttacctgtcccctcatagtctgttttctttctctcctccccttgcttgattttgagttttctcagtatagaaatccacagcagtgaaatatgaatttttatggcagaattacatgtctagtacttactttgtttactctgtatttacctttttttcttccctctcactggtcctctggttccctctcctagtcctcattaaagcagaaacaaagaggcagaggcacaaacacaaaagaaccgctggctagtgagccaaatgatgtgtctcaggcagacatttgtgtgtagggctcaattttttgttggtttgttttgttttactttgctctgtttatctccaaaatgatctgctctgggaaagagaaaagacaaatgacccagagacaaaaccaatatatgggcaggagaagacttaaaggccaggagttctcatagcagaagggagaaatgtgcctgaattttttgtatcctaacagaaaacagagccctctaattagaataatgcaagagcagtttaacacaatgttcatttttcaacagggggtagtctctatgtataaagaaaccacaaggatagtgcagaactctcaggcttttaccatgctaggcccaaagagatgaagggagagatagtgtgactcattggtcaagggactcagtcaactgggggtgatccagccaggtaaggagctggagaataaatatcctgaaggca

SEQ ID NO: 93128 - DNA, 1999 bp, Homo sapiens
gcattatactttctggagaatggagttgggagaatctgggtagggaaacttttgcctattgttttatgctttcctttatatattatctgtctattgctgcataacaaggcaacccaaggcttggtgacatcaactaaaatccatttacttgcttacagttgtgtaattggcaatttgggcaaggttcaatttggatggcttatctttattctgtgtgatgtctaggttcactcttgtgtctaaaaaaagttggtgggttagttagggactagctagtcctgaataatctcwctcacatgtctggggcctgtgctgtgctgtaatgacttgagatagctaggcctctttctccatggtttctatctaagtttgttcacagggcagcagtgctccaagagggcaacatcattacaaaacagaacaaaaaaccacaatctatcttgaagcccaggcttggttgtcacccagggtcacttctgctgtattttattcttcaaagcaagtaacaaagctaggctagattaaaagaatggggaaatagacttcatctcttaacgggaggagttgcaacaaattgtggccctatttagtccaacacactctactatatgaatgttttataataagcattaattattttaataagaataataaaaataaaaagagaggtatttatcttttttctgtcgtaaagtactggtttgcccaactaccatctgtgtctttgagttacacaagagcctgtttctgttttcataatgtaatgtggttactggttagttaggaatgattctgtaacttatatacaaaaacaagttttgagtaagtttagtctcagccaagagatccattccagatgtgaaattctaacatccatgtgaaatgcatatatacttcactttactagtagccactaatgacttaggcacaatgagtaaatagcctgacatgaaattgtattatcttcctgtgtgtatgtctgtgtgtagctgtaatagaatttaaaatctctctgtcttataaacatttatcattcagcactttaatattataatgttctctactttaagcaataaggtcttattgaaggggaatttaaatagaaatgttatgaattattgtaaatgggtgttgtaagtattctttagttctctcccaaaataaattcaatggttaattgtcttattaaatgtaagtatgccctaatctttttatttctaataatgcaacaggggaggatagtgtggagagggacaatcctaccctgttgcattcttggaatttacctgtcccctcatagtctgttttctttctctcctccccttgcttgattttgagttttctcagtatagaaatccacagcagtgaaatatgaatttttatggcagaattacatgtctagtacttactttgtttactctgtatttacctttttttcttccctctcactggtcctctggttccctctcctagtcctcattaaagcagaaacaaagaggcagaggcacaaacacaaaagaaccgctggctagtgagccaaatgatgtgtctcaggcagacatttgtgtgtagggctcaattttttgttggtttgttttgttttactttgctctgtttatctccaaaatgatctgctctgggaaagagaaaagacaaatgacccagagacaaaaccaatatatgggcaggagaagacttaaaggccaggagttctcatagcagaagggagaaatgtgcctgaattttttgtatcctaacagaaaacagagccctctaattagaataatgcaagagcagtttaacacaatgttcatttttcaacagggggtagtctctatgtataaagaaaccacaaggatagtgcagaactctcaggcttttaccatgctaggcccaaagagatgaagggagagatagtgtgactcattggtcaagggactcagtcaactgggggtgatccagccaggtaaggagctggagaataaatatcctgaaggca

SEQ ID NO: 93129 - DNA, 1999 bp, Homo sapiens
gcattatactttctggagaatggagttgggagaatctgggtagggaaacttttgcctattgttttatgctttcctttatatattatctgtctattgctgcataacaaggcaacccaaggcttggtgacatcaactaaaatccatttacttgcttacagttgtgtaattggcaatttgggcaaggttcaatttggatggcttatctttattctgtgtgatgtctaggttcactcttgtgtctaaaaaaagttggtgggttagttagggactagctagtcctgaataatctctctcacatgtctggggcctgtgctgtgctgtaatgacttgagatagctaggcctctttctccatggtttctatctaagtttgttcacagggcagcagtgctccaagagggcaacatcattacaaaacagaacaaaaaaccacaatctatcttgaagcccaggcttggttgtcacccagggtcacttctgctgtattttattcttcaaagcaagtaacaaagctaggctagattaaaagaatggggaaatagacttcatctcttaacgggaggagttgcaacaaattgtggccctatttagtccaacacactctactatatgaatgttttataataagcattaattattttaataagaataataaaaataaaaagagaggtatttatcttttttctgtcgtaaagtactggtttgcccaactaccatctgtgtctttgagttacacaagagcctgtttctgttttcataatgwaatgtggttactggttagttaggaatgattctgtaacttatatacaaaaacaagttttgagtaagtttagtctcagccaagagatccattccagatgtgaaattctaacatccatgtgaaatgcatatatacttcactttactagtagccactaatgacttaggcacaatgagtaaatagcctgacatgaaattgtattatcttcctgtgtgtatgtctgtgtgtagctgtaatagaatttaaaatctctctgtcttataaacatttatcattcagcactttaatattataatgttctctactttaagcaataaggtcttattgaaggggaatttaaatagaaatgttatgaattattgtaaatgggtgttgtaagtattctttagttctctcccaaaataaattcaatggttaattgtcttattaaatgtaagtatgccctaatctttttatttctaataatgcaacaggggaggatagtgtggagagggacaatcctaccctgttgcattcttggaatttacctgtcccctcatagtctgttttctttctctcctccccttgcttgattttgagttttctcagtatagaaatccacagcagtgaaatatgaatttttatggcagaattacatgtctagtacttactttgtttactctgtatttacctttttttcttccctctcactggtcctctggttccctctcctagtcctcattaaagcagaaacaaagaggcagaggcacaaacacaaaagaaccgctggctagtgagccaaatgatgtgtctcaggcagacatttgtgtgtagggctcaattttttgttggtttgttttgttttactttgctctgtttatctccaaaatgatctgctctgggaaagagaaaagacaaatgacccagagacaaaaccaatatatgggcaggagaagacttaaaggccaggagttctcatagcagaagggagaaatgtgcctgaattttttgtatcctaacagaaaacagagccctctaattagaataatgcaagagcagtttaacacaatgttcatttttcaacagggggtagtctctatgtataaagaaaccacaaggatagtgcagaactctcaggcttttaccatgctaggcccaaagagatgaagggagagatagtgtgactcattggtcaagggactcagtcaactgggggtgatccagccaggtaaggagctggagaataaatatcctgaaggca

SEQ ID NO: 93130 - DNA, 1999 bp, Homo sapiens
gcattatactttctggagaatggagttgggagaatctgggtagggaaacttttgcctattgttttatgctttcctttatatattatctgtctattgctgcataacaaggcaacccaaggcttggtgacatcaactaaaatccatttacttgcttacagttgtgtaattggcaatttgggcaaggttcaatttggatggcttatctttattctgtgtgatgtctaggttcactcttgtgtctaaaaaaagttggtgggttagttagggactagctagtcctgaataatctctctcacatgtctggggcctgtgctgtgctgtaatgacttgagatagctaggcctctttctccatggtttctatctaagtttgttcacagggcagcagtgctccaagagggcaacatcattacaaaacagaacaaaaaaccacaatctatcttgaagcccaggcttggttgtcacccagggtcacttctgctgtattttattcttcaaagcaagtaacaaagctaggctagattaaaagaatggggaaatagacttcatctcttaacgggaggagttgcaacaaattgtggccctatttagtccaacacactctactatatgaatgttttataataagcattaattattttaataagaataataaaaataaaaagagaggtatttatcttttttctgtcgtaaagtactggtttgcccaactaccatctgtgtctttgagttacacaagagcctgtttctgttttcataatgtaatgtgrttactggttagttaggaatgattctgtaacttatatacaaaaacaagttttgagtaagtttagtctcagccaagagatccattccagatgtgaaattctaacatccatgtgaaatgcatatatacttcactttactagtagccactaatgacttaggcacaatgagtaaatagcctgacatgaaattgtattatcttcctgtgtgtatgtctgtgtgtagctgtaatagaatttaaaatctctctgtcttataaacatttatcattcagcactttaatattataatgttctctactttaagcaataaggtcttattgaaggggaatttaaatagaaatgttatgaattattgtaaatgggtgttgtaagtattctttagttctctcccaaaataaattcaatggttaattgtcttattaaatgtaagtatgccctaatctttttatttctaataatgcaacaggggaggatagtgtggagagggacaatcctaccctgttgcattcttggaatttacctgtcccctcatagtctgttttctttctctcctccccttgcttgattttgagttttctcagtatagaaatccacagcagtgaaatatgaatttttatggcagaattacatgtctagtacttactttgtttactctgtatttacctttttttcttccctctcactggtcctctggttccctctcctagtcctcattaaagcagaaacaaagaggcagaggcacaaacacaaaagaaccgctggctagtgagccaaatgatgtgtctcaggcagacatttgtgtgtagggctcaattttttgttggtttgttttgttttactttgctctgtttatctccaaaatgatctgctctgggaaagagaaaagacaaatgacccagagacaaaaccaatatatgggcaggagaagacttaaaggccaggagttctcatagcagaagggagaaatgtgcctgaattttttgtatcctaacagaaaacagagccctctaattagaataatgcaagagcagtttaacacaatgttcatttttcaacagggggtagtctctatgtataaagaaaccacaaggatagtgcagaactctcaggcttttaccatgctaggcccaaagagatgaagggagagatagtgtgactcattggtcaagggactcagtcaactgggggtgatccagccaggtaaggagctggagaataaatatcctgaaggca

SEQ ID NO: 93131 - DNA, 1242 bp, Homo sapiens
  misc_feature (1)...(1242): n = A,T,C or G
ttttnnnnnnnnnnnnnnnnnnnnnnnnnnnnnnnnnnnnnnnnnnnnnnnnnnnnnnnnnnnnnnnnnnnnnnnnnnnnnnnnnnnnnnnnnnnnnnnnnnnnagtagttgaaggcagtttggatctgataaacctgcctatcacctgatgcagtctgtacaaccaactgattgctggatgcaagtatttgctgtccatcagggacctgcatatgctggagaatagttgtaccttgctgagtattgcctgaatttgtcatggttaattatgtctgaagtctctgtactccagctgtgcctgaactggccaatggtgagtctccacttgagacaatggcaatgtactatttgctgcccttctgatagataggagtgggaacagacagaagtgacagcaaaaactccagggttttctccatctccttttctgccccatatatcttcagaagataggtcttttaaaatttttctgtaagatgaatgccgtgctaggatcctgtaggctttctgtaaagagcctaagctgtcagatgggtcctgagactcctcaccttctgataaagatcatactattggcacatgtggtgggtgaattacagaagactgagctgtctggatgacaccctgaacctgtacttgctctccaggaagaggtaccattgtcattagtacagatcatcttagtgccatctgtttagtaatatgagaaatatgagctccctgaactgctgaaccaggttgagatgctgtctctgatgtgttacacttgtgagaatcttccataatcaactcttgggggtcaagtggggtgaagagaattagtgtcacttaccagccagctgtcctagactaccttttccttaccagttaggtctgccactggcatccctcaaccacattttatatttttgatgtcacaatgtgcattttttgcattgtgtagtttttaaaacttattacaactattattgtttttaatcattttgtattttaacygtcatactaaatatatgaatgatttatataccaccattagagtattagagtatgtggtatttgactgcatatttacttttaccagtgagatttatgtattcgtattttcctgctactagttagcatccgttactttcagcttgacgtgcttcctttagcatttttttgtgagacaggcctggtggtaataaactcccttagcttttatttatctgaaaaagtctttgtctctcctctatttctaa

SEQ ID NO: 93132 - DNA, 797 bp, Homo sapiens
atcccacaaggcacagatgtgcagtggcccacgaagtgagtttgtgggtctccagttacctgcagccctttctgctcctgtaggttaaagggcaattgcctttttttttctgtccaggaaggaccccagaatgttctgagtcagaaagacagtgaatcctctcctctgggtcagtggggagggagagagagagatttcagagggaagaaagcagaaaaagatgtcacaaaattgcctaatcaaaagttaccatgatgcctgcctcatctggaactgggctcccagtctctagtgagggagacatagtccagtccagtcccagtctccagtctgagccaaagcagaacaaagctggacactgcagcctggcatccaacgaacattttgtcactttccccagggtgggagcatttgaactttggatgtgaaggaaacatggtaaccactgcagtaagaaragcaactgctggagaaaatggcactttcttccccaaatttgtttttacactcatgtctaaggaacaccttagaaaccacattaacatctttcagcaaaaggaaattctgcctgttgatcttttgctgtgagacaaacttgaaaagttcacagacactgcctttctctgaaaactgcccttacctctttgttataattcacttcaagatctgttgagtaggaacatcaaaaatgcaaataaaaagtttcaagtattatgaaagaatgcaataaaactgcctttaaaaaaaatctcaagatggaggtggagatcctgtgatcatgaaatctgaataggctg

SEQ ID NO: 93133 - DNA, 1250 bp, Homo sapiens
taaggcacctccaaagttcccaatgatctagtgcaggtgtgtttttgatggccctgactgtatcatgctggcaattcagtggtaagccttgttctctagtcacaaataagggttgcagccattgtaaggaacagtaaaaaccagttatgaccacaccactgcattagtggaagctaccaacatggcggtttgaaaggtgacattttaccctttgggatattttctgctcaatggtgagacatagggcatgtcctgggccctaggtatgtgcaatgtggggtctcctttttgcctgactgcactgcattgcaggagtcagtggtaaaccctrctaaaggactcagtcagtgcacggattgaaaacaaaccaaaagacagctcagtttctccccaaaaagatgccacacactgccattttggattggaatcaaggttctgcattcacaacacaaagtgccaatcactataccaccgtggcacgccataaacttgctggcagatgctgagttttctttaacactttcgatgtaaacatattcacaatattttgttcttgcatcacttgctttctgacaggttgagtggtaagaagcacaaattcctatattctgttctttccaaaaatgtttagtttgatcagaatgcaggatgttgaacaagataactagcctatccacttcaaaaacttagcaacaaggacaaagaaatggagggacagctctaggtaagtaaagtgcaattgaggaactttacttggaacctagggaagcaacatcagtaccacaagtcacttctctctctctcttaaataaatattatatatacacatacatatatatattacatgtgtatataatatataatacacacacacacacacacacacacacacacacacagagtttaattaagcaaagaagaattcctgaatcagaaatttccagaaccagaataggttcagagaggttccagtgctaccatgtggtagaagaagatttatggatggaaaagggaaagtgacttacagaaaacagaagtgaggtacaaaaataatcggattggctacagctctgagtttgtcttatttgaacccagtttgaacagttggccacctttgattggctaaaactcagtcattggctcaagagtaggttacaggttgtttacacatccagttaggttacagttcactacatatggagaaacctttaatatatggatagaggcagcttccagctaatgatacgtat

SEQ ID NO: 93134 - DNA, 1095 bp, Homo sapiens
tgtagacagagaaaaaaggtaaaggaatgttaactgttgaacttgggtgaatggtgtagaggagttctttttttttcaatttttctataggtttgaagtctttcaaagtaaatgattgtggaggaaaatgtaaaacataggagactgtgaagagctggctgaattctaggctaaaatttggctctctctgggtcttggccttgcaggagggggtgacggatctcagtacctctcactgctagaagaaagtgtaggttaccagcctggtgtacaaacctatctaaaggatcccctcctgttacccaggatatgggtgaagtgtcttcttagtccttcttacatgaatcagccttctagcctggaagtctggtaggtaagtttgaggctaatttgtatgtttcaaagcttctgaagaagatgtcccacttttacattggattgcaaaagacaagtcagtgtgtgtgaagaatttattttcagaaaaagaaatccaaaggagagtaagttagttgaaatctaacagtcccattggagtatactgtttttacttgttggtccttcagaaatctcaagggtgggaatttggcctatacaggaagatttttccagatgatgagtaaacagcaaactttcaagatcattctttggcagagattctactgaggtaggaaagtggcaggacttatttgcggttgtggcccagttgatcagagcaggatctggtccaaacagggtgcagtaaagaagctgaccaaaaccagcagatggagacaaaagctacctctagttgctctcactgctcattagcataaagacactcctttccagtgccatgacagtttataaatgccatgtcaacatgccatggcaatggccaggaagttaccttatatgcttctggaaactcctcatcccttttccaaaaagttctgaatarcccacttcctaattagcatctaattaaaagcatctaaataaatacagctagctagcaacccacacactgcccatgggttagccttcctccacgagaagcagtaccagtttaacaaaagttgctttctttcaccgctgggttgcccttgaattcttacc

SEQ ID NO: 93135 - DNA, 628 bp, Homo sapiens
gcaattcaagactgtcttctctacgcttttcagtgcctctttcagtgatatgaagttaaaacttggtactgcaatggcccacttgatctttggttcttattaaggtgttttttgttgatagttgttcattttgttgttcttgaagrgaggacaattggtggaagcttctatttggcatcttgccccacctcccttagattttgataaattttaagttttcatactgccaaattgcttacccaactaaacattgtgtgtgagtgctatcacatagcacccatgccaggctgtaatgttatttattaattttttgccaacttaatgtgtgaaaattgtgtgttccttgtttttttttttttttttttttttttgagacggggtcttgctcagtcacccaggctggagtgcagtggcacgatctcggctcactgcaacctctgcctcccgggttcacgccattctcctgcctcagcctcccgagtagctgggactacagacacccgccacgatgcctggctaattttgtttttgtatttttagtagagacggggtttcaccacgttagccaggatggtcttgatctcctgacttcgtgatccacccaccttggcctcccaaagtgctggga

SEQ ID NO: 93136 - DNA, 1123 bp, Homo sapiens
ttgcttcaggccatctggatgtacatgtgcaggtcacaggggatatgatggcttagcttgggctcagaggcctgacagccatgtgagatatgtcccagcagaacagttagccaaactgttgcttggagtaatgaggtaaagaaagatcttgaggatcttgctaaacagattttcaggcagaatgctgaaagtgctacttggctttttctaataattttattatttatacagtaaaatatgagaagtgaggaaaaaattaaagatggaactgttcactttttgagaatttatagggtatattaagaaggaagaacttgttcatttgaaaataaaagtcaccagccccatctctttcagaaaaatactatcaaagtaggaaatggcttcagagcaaaggaactattgatataggtctggttgggtttcataaatattacagactagtggctgctatgaacctttgattctgtcctccccttttttgaatggctgtgttgattgcagttaccctatccccgtgtcactactggctattgggtttatagacaaggaagataacttgcgtcttcatttcatggtcttcagatcaagaggaattctcctcccaaagtgctgggattacaggcatgagccactgagctcggccaacataacagtttttagacctccagggccacacattcattcaaagcctgaagatgtttgagagttagattctgcaccttaaatttctacgtgacatcagtatttggccacaagcataggctatttcagaagaaacatgtagagtggcattttcagagggaggaaccaggaaggctatttctgcaatgttgagaaaaactgatacatatatccagtcttgagttactcagtgggccataggggtaaatctaattggtatttggggtgccttagaatgcatstgtgaggataaggcctgaaaaatatgtatttgtactatgcttccctccccagataattcctaaacatttcaaagtttgagaaccaccaatatgagaacagggaagcatgagtccttttcctttctctccattcaccccctaacctcccaaatgctatttgcgacatttcactctgtttctgtcaacaacaaaatcaa

SEQ ID NO: 93137 - DNA, 656 bp, Homo sapiens
ggcaggaccccccgccccctgccccacttagctgcacccttgcctcacacccctgacctcttctagacacatgcctgttggggccagaagaaaccaagaccggaaactcgacgaataatggcaatggatacacccaccctgctggggtatrggaacacatggcgatcctgacacttgtcccagctcttcccaaattgtttagacttccttttagatattttattgattattccttgattctgaaagccgtacacacttacaaaaacattcaagcatttcacaattgcataatgcataatcggacagttccctaatacctcccttcaaaggtaactgtaattaccagttcagtggaatgctctgagtcaacactaacctattttcagttgtacgctaaatgagaagataaggaagaggaaaaaatggaatgcaaaggatggtgggattttaggaaattgtgaagttaaggcttcttgactccacttgctctgctctttccccacaccgtgtttaggcaccaagcgatggagccctggggatgtcccagccaaatgtccactgcagggctatctgttcgtcccaaatgtgcgctccggggctgagcactcaccccaaatgtgcgctccggggctgagcactcaccccaaatgtgcgct

SEQ ID NO: 93138 - DNA, 694 bp, Homo sapiens
gatcctgaaacgttttcccctgtggctgcacgactcacctcccacagcacctgcagccatgtccacctggcacctgctccattccagggtgggagcagggcagcaggaggtcaagtctgagaatcactttacccagcaacacatctttagccaggggagaaatgcagagaaaacagccggtcaggtccatgaccattcgcaggtgaatgtctgtagctttgagtgctccctggcacggaggcaccctcaacaccagccagcgacctstttcacagcaccacactcatgtggattcaggggaaacagaaggtgctgttattttgctgcttgagaagggctgacgttttccttccaatcattagcccttcctggatagcacaagggaaatgtgcccacacatccctcagcagcagtgtgcgatgtgtgtaaatataatagcattaactggaatttgatctcaaatgaatgacgccatcaaggttgacataaggcgctcctgcctcatgtcagtcactgccccctgcaggtgtggggcacctgccaacaatgacctcagtcctgccgggccctgcggctgccaccacccactgtgtctgatgggaatgtcctagacggagcctccctcatggcacatcatccattgcctcgccccacatgtgccacagactgcattcggccccaaagaccacagagc

SEQ ID NO: 93139 - DNA, 694 bp, Homo sapiens
gatcctgaaacgttttcccctgtggctgcacgactcacctcccacagcacctgcagccatgtccacctggcacctgctccattccagggtgggagcagggcagcaggaggtcaagtctgagaatcactttacccagcaacacatctttagccaggggagaaatgcagagaaaacagccggtcaggtccatgaccattcgcaggtgaatgtctgtagctttgagtgctccctggcacggaggcaccctcaacaccagccagcgacctctttcacagcaccacactcatgtggattcaggggaaacagaaggtgctgttattttgctgcttgagaagggctgacrttttccttccaatcattagcccttcctggatagcacaagggaaatgtgcccacacatccctcagcagcagtgtgcgatgtgtgtaaatataatagcattaactggaatttgatctcaaatgaatgacgccatcaaggttgacataaggcgctcctgcctcatgtcagtcactgccccctgcaggtgtggggcacctgccaacaatgacctcagtcctgccgggccctgcggctgccaccacccactgtgtctgatgggaatgtcctagacggagcctccctcatggcacatcatccattgcctcgccccacatgtgccacagactgcattcggccccaaagaccacagagc

SEQ ID NO: 93140 - DNA, 694 bp, Homo sapiens
gatcctgaaacgttttcccctgtggctgcacgactcacctcccacagcacctgcagccatgtccacctggcacctgctccattccagggtgggagcagggcagcaggaggtcaagtctgagaatcactttacccagcaacacatctttagccaggggagaaatgcagagaaaacagccggtcaggtccatgaccattcgcaggtgaatgtctgtagctttgagtgctccctggcacggaggcaccctcaacaccagccagcgacctctttcacagcaccacactcatgtggattcaggggaaacagaaggtgctgttattttgctgcttgagaagggctgacgttttccttccaatcattagcccttcctggatagcacaagggaaatgtgcccacacatmcctcagcagcagtgtgcgatgtgtgtaaatataatagcattaactggaatttgatctcaaatgaatgacgccatcaaggttgacataaggcgctcctgcctcatgtcagtcactgccccctgcaggtgtggggcacctgccaacaatgacctcagtcctgccgggccctgcggctgccaccacccactgtgtctgatgggaatgtcctagacggagcctccctcatggcacatcatccattgcctcgccccacatgtgccacagactgcattcggccccaaagaccacagagc

SEQ ID NO: 93141 - DNA, 720 bp, Homo sapiens
ctgatgaacggcttggcaccattcccttggtgatgactgagttcacgtgagatctggctgtttaaagtgtgtggcacctcccccttccctctcttgctcccactcctgccatatgaagcacctgctcctactttgctttctgctatgattggtagctccctgaggccttcccagaaaccaaatagatgcaggcatcatrcgtgcacagcctgcccaacagtgagccaattaaatctcttttctttatcaattactcagtctcaggtcctccttcatagccatgcaagagtggcctaacaaacacatcccttttccattcgcctccatggccacattcactgtgggcatcagatgcactccctcccagaccccttcttgtttacagatggtggatgccaagggtcactttcattccctaaaatcttagtctctcttagccacagtgtgtggttctttggcagtaaagtcttcaagagcttagtgagctgcttctctgtttggttccacacagcacacacatcaagagctgcatgctcagcgactttgtaggtcttcctagtagacttgccacgttccctggcttccttactcctgtggccctcagcagataggactgacctgtctattggtatcatgggctctgctgggaggctgaaacccttgccctcttccgggagccacttagtccttgctaaaggagtctctaaccaaggcagcctt

SEQ ID NO: 93142 - DNA, 692 bp, Homo sapiens
cttgagctgggaggtcgaggctgcactgagctgagatcgtgcctctgtacgccagcatgggtggcagagtgagactgcatctcaaataataataataaataaaactttagcatattcattttaatttctttcatatgaaaaaataaattctgattatccaaagatagtaggattgttgggtctactttctggacttactaacctaggtcatactctctcctttctctgtttcctttcttcmtcctttaagccagcactctccattagcactttctacagtgatctgtgtctgtaccgttcagagcagtagccacaaaccacatgtggctattacgtacatgaactgtagtgcaacttaggaaacgaatttttccttttaattaatttacatttaattggccacgtgttgctagtggctgccatattggatagatcagctaaaccatgatctccttttaggaaaaaaagccacttacactgtcttcctctatggttaatgtgcaaaatcttgcaaaaatctttctctattagttatcttagcatttgcctccagcctcactttctgtggccttgtttcctgtatttgcccagtgtgtttataaaataaggatttaagaaactaagttttctctgtagagtatcagtcccgtgttaagatgtttcttattgccttgcctgattctgcctagttg

SEQ ID NO: 93143 - DNA, 719 bp, Homo sapiens
ttattatccccattctacctgtgaaatggctctgagaggtaaaataactcactcaaaggtacactgtaaataagcgtgcaatggcttgaactcacacccagctgagccgaaaacctgttctcttaccatgaggtttaaacggggaagctgggtaatataccctgaactgtatattatcaggacttatcatttatatttgaacctctttgttaaaattattagttccagtaagtaatcctatacatgtagttctctcagtgaagcactttcacacacacgatccatttgatccttattcttgcatgaaatagtaaagaccagggagaatttcttctgctttgattggcacgtggcctgtctgggcccaatcaaagaccaccaggtgcaaaactgtagttggataaagtcagatttattggctcattgcaaggagagaagactgaggccagaggaatcctgggatgcctcagcaaaggtaaagtttgaagacttaggggaggggtggcgtgtaggtgaaatttaaaggaaagagtgttttgacaggttcaaggcagacagagctgtgagtacagatcaacatcaggtctggagtctgggggtctacrtccttggagactagagttaatatagatgcagactggcacacccagaaaccctttaagggaagttctgcacccaggttggaaatagaggctgcttgtttgtttcaaggagactcg

SEQ ID NO: 93144 - DNA, 1086 bp, Homo sapiens
tcacatgcaccccatcaatatgtacagttatgtgtcagtaaaaatatgttaatgatggtgttaatttgatcatggtgtagagcagagatatatggttgtttctagggaaaatatagaatgtatacttcaatgtgataaattctcagttatgaaagtgttactgtcatcctcttattttgcagatttgtttgggtataactggtatctgggaaaaaattaaaactaggttttagatggttttacagaagttaatcaaaagctgtttatgtgttgtgtcagaaatgtgctgaattgcagtggctttgccactgataacgtcgtgtgtgtgtgtgtgtgtgtgtgtgtgtgtgtgtgtgtgtattacatgatctacacagattttcttaagtagtttattcataattgtcatgtgctgtgcacataaaccctgttagttatagagagaagctaaaatgcgagtacaacattaacatgtcttttatttttccatttttcactcccaggtaatttagcccaagctgaagcagttggaagagaggcactggaattaatacctaatgatcactctctcatgttctcgttggcaaacgtgctggggaaatcccagaaatacaaggtgcgtaaaccgcaggctrtgagttcttgcagttagtgccagcatctgacagaagacgtaagtgttacttctgcccagttaaattaggaatcaggccaaaacagtggcagtggtgcaccaatgtggcttggccagtttgtttcctggaaaagttgcttcaaagacagcggtgtggggccaaacccagtgtcctttctcatcagaattaaccactgtggttcacacgtggagagaggaagagaagcccaaggaaggggtgggagcaggcagggagttgtggaatgtttggcctcagaggccgggcaggctggtgcaggaggaggactcagggcagccacagtgcatccccggaggtgcccctgccccagccccaccctagcacaacagggtttgactctgtcacttgcacatgggctggagctctaggttttatctgcaggttccatcttctgcacaaaagaataaccagc

SEQ ID NO: 93145 - DNA, 823 bp, Homo sapiens
aaacgagtcaggctaaatatacaagaccaattctgcatatttagaccacctaattgctagattgccagttaatgtttagatctcacacttactcattttaaagagaaagcaggctcaagagatagactagaaaaaggctcagcatttttagaagaaactyaaggttgaaggaaaatgaggagcctcctgaggtcatggtttaccaggagacattaaggggctggttcctgtgaagctgtgcaaggaaaagtttcaaacagttatgacccagaaaagtctcagggcgaaaaaaagtagtagtgcttctcactatataaagaaaagcaaatgttaagcaagcagaatttattaaagggataggttcttgatttgtagttagaatttgatatttcatttggctcttgatctaaattacatgtcttataattagaaatatgtgtgtcactttcttaaggaattatatctttgtaggaaaaactcagctacatgaattataaattttatccccactttcctctgtacgtgcctgaagaaactctacacaccaagtctaagcttttgtggacagatgtaattcactgagtgacaattactgaaattgcaggcataggtagaattctttttccaattaggcaggagaccttagacgttttggttttgtgaacagccataattgtaaaagaaagattttctaatcttgctgtcttaattgtcaatattctttttggctttaatcccattaggaaaagattattttgttggacttcagttagaatatggtttttttttttatggttcaggctcttatttgtatgaggcaatg

SEQ ID NO: 93146 - DNA, 1342 bp, Homo sapiens
gcttcccactctctgtgctactcacagttccctaattgcacagtagttgctgaaaaccctatgcctttgcccatactagtctctctgcctgtgccatcctgcatccccctttctttacctggctacttcttacttggcaactgtgttgtggaaccaaactgggatccacttgcccagtgcggcaaagccagatactgacatcagggttgcaatgagagaaaatgaggcatttactgcagggcaccaagcaaggagaatcaggcagctaatgctttaagacctcaattccccaatggcattcaagtaagsgtttttaaaggcagagaggtggaagtgacgagcaaagtcataaatcaatatatgaaggctatactttggtttgacctaaaatggcaggttaccttgaagtggggcagcacacaggtcataacgtggattcaaaggttttcagatttgcagttggttcaggagacgaaggtttgtcagaaaatctgggatcagtaggaaggaatattagttctggctgggaggcatgatctcctccaggtacctcaagaagaaatttagaacaaagaactaacagcagtcagggttgagtcctcagtcctcccttatctgaggtctccatgccagtggatccattgggtggggatctgggtttctgaaaaacaactcagggacatatgttaagatgttatcttcagtttctataagggacaaaacaactgtgattctaactttcttgtctattgttttaagctaccattaccttcttggttatcaagttgctcatttacttcttaggactagctaagtgcctgaaattttccttgaaggaactcaagattttcccctatttccatgcttaggggcccacaggcccctaagaggggtccctgttctgtctcaactgcttcaggcatcacttccttcaggaagttttctctgactacctctgaatcaaggcaatgagcctcctctgagccccgtacaccctgggcatacctacaccatggcatttatcacactctattgcaattctcaggttattggaaggcaagttctgttttttgagatatgtgttgttatagcacctgtcaaagtgccatgccctgaaaaaatgtcaagacaataaattgatcaatgcctgggtagtaggagtattgtaccgcaggatgccaacagcacagggcttggcatcagaaaccctgcctccaaggcatgacttcataatttatttgccaaattatttaaagtctcagactcagtgcctcatctgtaaaatgaggattataattccatagcatggttgcagattaaataaaataatataaataaaagt

SEQ ID NO: 93147 - DNA, 1120 bp, Homo sapiens
atgttaaggctacactccactctatcagtctttttattgccacctaaaaatttcatttttgtttaatcttgctttggattttggttagtaaacttctagggatgtagtttcacattgataacctgttaacttgggagctatggagtatggaggtgtagtgaggaagtctggaaggggagtggaaacccctaggcagggattttctggaggggccagatggtaattattttgagttagaaatctttctgaaatgaatcatagtggcctaaaggatgtgccagatataattttactcatttgtgtgattgtggttcaagataattgcactgtggtatagtggttcttatttattgaggacctgtcatgtaccaatcactttacatggtctccccctcaccctaccctccagccccaagattcagaatgctgtagtattcttaggttttattgagcttaaaataattggccatggccatttaatgtatgatgactttttaagttcccatctactttgtcattttgttgacctattatcacttcagactgttgtgtgcttgaatatacataatctcccaagccccttcttatttatgggcttggaaaaggcataaaggcagtaaaggcagttggaaaagcctgttagtgtaatagttctatgtgatgaataaatgagctttaagtttggaactcttaagaatctgagtaaaataggtgttttggttcacagactccttgaccattattttgaytgaaaaactttatttttgctagtcagtgctcagcaagaatattgttgaacagctgaattccagttggtgtgtatgtgctaagtgaatgtccccatttatgctgaaatgagttcctaccaaaatgtcagttttctggatattatttgaaaggagtattttgggtagattggtctactaaataatgttggaaagccaacctcttttttaatgtgaaagtttttatcttgccaaattttaacttttttattttagaacaaattctgtacaacataaaacaagagtataaacgaatgcagaagagaagacatttagaaacgagtttccaacagacagatccgtgttgtacttctgatgcacagccacatgcattt

SEQ ID NO: 93148 - DNA, 1120 bp, Homo sapiens
atgttaaggctacactccactctatcagtctttttattgccacctaaaaatttcatttttgtttaatcttgctttggattttggttagtaaacttctagggatgtagtttcacattgataacctgttaacttgggagctatggagtatggaggtgtagtgaggaagtctggaaggggagtggaaacccctaggcagggattttctggaggggccagatggtaattattttgagttagaaatctttctgaaatgaatcatagtggcctaaaggatgtgccagatataattttactcatttgtgtgattgtggttcaagataattgcactgtggtatagtggttcttatttattgaggacctgtcatgtaccaatcactttacatggtctccccctcaccctaccctccagccccaagattcagaatgctgtagtattcttaggttttattgagcttaaaataattggccatggccatttaatgtatgatgactttttaagttcccatctactttgtcattttgttgacctattatcacttcagactgttgtgtgcttgaatatacataatctcccaagccccttcttatttatgggcttggaaaaggcataaaggcagtaaaggcagttggaaaagcctgttagtgtaatagttctatgtgatgaataaatgagctttaagtttggaactcttaagaatctgagtaaaataggtgttttggttcacagactccttgaccattattttgattgaaaaactttatttttgctagtcagtgctcagcaagaataytgttgaacagctgaattccagttggtgtgtatgtgctaagtgaatgtccccatttatgctgaaatgagttcctaccaaaatgtcagttttctggatattatttgaaaggagtattttgggtagattggtctactaaataatgttggaaagccaacctcttttttaatgtgaaagtttttatcttgccaaattttaacttttttattttagaacaaattctgtacaacataaaacaagagtataaacgaatgcagaagagaagacatttagaaacgagtttccaacagacagatccgtgttgtacttctgatgcacagccacatgcattt

SEQ ID NO: 93149 - DNA, 695 bp, Homo sapiens
ataaaaatgtcaaggtcagtgaaaattagttcttttcattcataaacattgattacttttgatattccacacatattcttcaaattttcttcttaccattttgaaaaaaggaaaatgcagcccacgaatggagtattctgccttaaaatgatagctctattcataggccgcatttttctgttttcaaaatggcagggcctggtgtggtggctcatgcctggtgcggtggctcatgcctggtgcggtggctcacacctataatcccagcactttgggaggctgaggcgggcagatcacctgaggttgggagttcaagaccaccctggccaacatggtaaaaccctgtctccacaaaaaatacaaaaattagctgggcatggtgacagttgcctgtaatctcagctactcaggagactgaggcagaagaattgcttgaacctgggagtcagaggttgcagtgagcgagatcaagccactgcattccagtctggatgacggagtgagaatctgcctcmaaaaaaaaaaaaaaaaaaaaagaagaaaatttgagtggatgggaatatgaaacaaaatcatttaaaattaatttagaaaaagattgaatgaaataaaaacttctttcctttttttgggggtggtttttttttttttttttttttttttttttttttgtcctccaggctcctagagtagga

SEQ ID NO: 93150 - DNA, 592 bp, Homo sapiens
caccctcttgagttcatgaagacagtgaccatattttaatttctatatctattgtttttgtattatctgtgccagttaccttttaggcattcaaaaagtttaaataaatcttactcatccttttagactagagcaagttcaaatattatcccctctgagacgcagccctttacctctctcagagttcattgttttmttacctgtttctttagttagttgtggacatatctatttgtcttgctaagttccttgagtgcagggaccatttcttatcaatctggagacccccagggtcttgcattgtgcttggcacctgttggcactcaagaacaatttatgtatatatgggagagatggagggaaggactggttgtagattttcattaaaagcatatttataaaaatagtagctttatagattcacatcataaatgttgtattttctgttccttttaaatagatcaaagcattctcaagaatagattgctgtatttagtaattcctcctcccttgccctcctttgtaaggtcttggctcaccacaacccttatctcctctcaggccctgtcttcttccaagtcttttgtcttca

SEQ ID NO: 93151 - DNA, 1943 bp, Homo sapiens
ttgttttatttttcttttctggtggtsttttggaaagacaacagccaatattttacaaatgaagaaatctgcccaaacatacagttattatgaactactttcttgaagagccaacagttaaacccagctgtaactaattctgaaggtcctattctatccacagatgtatacgtttaagcataagtgttagattagataaaggaaacacaagcttttactgtatattcttagaagttcacaagtaaacaactttaaaagagatggcagattaaaaatggcagtctataaatgcaagggaaattcaagtccttaagtcaagtcaaaatttattcactgccatctgttcttcacagtgacacagcaataaagtgcataaataaatgagtcacaggctttaaaagagttgcccaaatgagtcttcaaacagatacaaacaaaaaagaactgaaatctaagtattgattgttaaccataagcggagcttagaattttccacatgatcctaagaaaaatctcctaagccctcttgagtcagtgttcaatgtgctctataatcatagacttctgaggcctgagcattgaatggttattgaaaatacaaaacatcaaataaaaatgcaaaagtatttctgtttcaaatgcattgaagatactttgttgacttcgaaataaagcaaaacagaaagactgcgagacacagagaaaggtgaagtttgatcaatagtcccagtttgattcattctgaaaggaggtagagaagaggtaaatgcaaaagcagagtcaaatgaaggaaaacaacaaaccatttgccagaaaatataagacacattctgtactgaccaagggctctcagctcagcaagaggggttccagggtcaggatgaaaagctggggtcagggtgtggtgagtattgacactccaccattaaagagagtccagatggacacagactagagggtacaagcaatttccacagcagggaaagtttctctcaactcctggtagggagaggaaccatcaccttaccattaaaaatatttgagaatgcaaattgtaccgttgatgaatgagttaataacaataacaggtggctcatgcctgtaagcccagcactttgggaagtcaaggagggcagactgcccaggaactcaagaccagcccgagcaacatggcgaaaccccatctctacaaaaaaaacacaaaaattttctgggcatggtggcgcatgcctgtagtcccagctactcaggaggttgaggtgggaggatcacttgaacctggaaggtcaaggctgcagtgagccataaccacaccactgcactccagcccgggtgacagagtaagaccctgtctcaaaaaacaacaacaaaaaagtaaaaaaccaaaaataaataaataacaaaacaaaaataatagctaacattttcatgtagtgcttgttctgtagcaggcaatgttctaagcactttacatatattaacttatctaagttcaccctatgagtacctatgaggtaggcactgttatcgttattctatatatgagataattgaggcatagggagattaagtgacttgcctgggtctcacaggaatggcagagccaagatgaatcaatcaattaatgcagccacttgtgatgctctgccttagcagatagaaacacatgctattttttgcccttataatgtagaaatagactttacactcagcagtccacttcagacctcagtactgagtgctcgtcagtattcatacagaatagagccttctcacccttgctgtatcgcattttgtgcttatttatcacttacaacacacacaatttgtcacattttatctcccatttctttcttattgtatatatttatggggtacaatgtgatgttttaatatatatatatatatatatatatatatagtggaatcattaatttaagcta

SEQ ID NO: 93152 - DNA, 1943 bp, Homo sapiens
ttgttttatttttcttttctggtggtgttttggaaagacaayagccaatattttacaaatgaagaaatctgcccaaacatacagttattatgaactactttcttgaagagccaacagttaaacccagctgtaactaattctgaaggtcctattctatccacagatgtatacgtttaagcataagtgttagattagataaaggaaacacaagcttttactgtatattcttagaagttcacaagtaaacaactttaaaagagatggcagattaaaaatggcagtctataaatgcaagggaaattcaagtccttaagtcaagtcaaaatttattcactgccatctgttcttcacagtgacacagcaataaagtgcataaataaatgagtcacaggctttaaaagagttgcccaaatgagtcttcaaacagatacaaacaaaaaagaactgaaatctaagtattgattgttaaccataagcggagcttagaattttccacatgatcctaagaaaaatctcctaagccctcttgagtcagtgttcaatgtgctctataatcatagacttctgaggcctgagcattgaatggttattgaaaatacaaaacatcaaataaaaatgcaaaagtatttctgtttcaaatgcattgaagatactttgttgacttcgaaataaagcaaaacagaaagactgcgagacacagagaaaggtgaagtttgatcaatagtcccagtttgattcattctgaaaggaggtagagaagaggtaaatgcaaaagcagagtcaaatgaaggaaaacaacaaaccatttgccagaaaatataagacacattctgtactgaccaagggctctcagctcagcaagaggggttccagggtcaggatgaaaagctggggtcagggtgtggtgagtattgacactccaccattaaagagagtccagatggacacagactagagggtacaagcaatttccacagcagggaaagtttctctcaactcctggtagggagaggaaccatcaccttaccattaaaaatatttgagaatgcaaattgtaccgttgatgaatgagttaataacaataacaggtggctcatgcctgtaagcccagcactttgggaagtcaaggagggcagactgcccaggaactcaagaccagcccgagcaacatggcgaaaccccatctctacaaaaaaaacacaaaaattttctgggcatggtggcgcatgcctgtagtcccagctactcaggaggttgaggtgggaggatcacttgaacctggaaggtcaaggctgcagtgagccataaccacaccactgcactccagcccgggtgacagagtaagaccctgtctcaaaaaacaacaacaaaaaagtaaaaaaccaaaaataaataaataacaaaacaaaaataatagctaacattttcatgtagtgcttgttctgtagcaggcaatgttctaagcactttacatatattaacttatctaagttcaccctatgagtacctatgaggtaggcactgttatcgttattctatatatgagataattgaggcatagggagattaagtgacttgcctgggtctcacaggaatggcagagccaagatgaatcaatcaattaatgcagccacttgtgatgctctgccttagcagatagaaacacatgctattttttgcccttataatgtagaaatagactttacactcagcagtccacttcagacctcagtactgagtgctcgtcagtattcatacagaatagagccttctcacccttgctgtatcgcattttgtgcttatttatcacttacaacacacacaatttgtcacattttatctcccatttctttcttattgtatatatttatggggtacaatgtgatgttttaatatatatatatatatatatatatatatagtggaatcattaatttaagcta

SEQ ID NO: 93153 - DNA, 1365 bp, Homo sapiens
gtatatatgtataggtatctgaccatacttctctcccatgacatcataattataatattattccgttttcataaaacaaactaggacgaccttccttcatgtagatatttctatgtttgtgtatagctatatggataaaggtatggaaagatataatctagattggtaacattggctacatgggtattggaggggaggttatggtaaggaggatgggaaagatgtagcaaggaaacaaaaatcaaccacaaaaacttacaaaaatacggtatcatgcaacatgaccatgtatgcrtggataatataatgtaatttattattttaaaaaagtttttcagctgggcatggtggctcacgcctgtaatcccagcactttgggaggctgaggcagatggatcacctgaggttaggagtttgagaccagcctggccaatatggcaaaaccccctctttactaaaaatacaaaaagttagccagacgtagtggtgcgtgtctgtaatcccagctacttgggaggctgaggcaggagaattgcttgaactggggaggcggagactgcagtgagctgagatcatgcccctgtactccagcctgggtgacagagtgagacccgtctcaaaaaaaaaaaaaaaaaaggtttttcattgcctagctattatgtcacaaagatttgcaaactctcagtgccatagagcaacatatatttatttagcttccacatcagtggaagtggggctgggcctacagggaaggcttcgctggatgtggctctcatcctcttcctggtattagcaggctgtcttgtgggctcttctcatggaatggcagaaactcaagatgtcaagtgagggacatctatgaaactagcacattgtcaacttcctccttcattggccaaagcaagtgacaaagtcaagggatagggaagtacattctactcatggatgtgggggtaggggagggggttaatatttctgattaataatctattctacaacagttaccataaatatatatatttaggccaggcacggtggctcacgcttgtaatctcagcactttgagaggccgaggagggcagatcacttgagtccaggagctcgagaccagcctggccaacatggtgaaaccccatctctactaaaaatataaaaattagccagttgtggtggtgggcgcctgtaatcccagctactcgggaggctgaaacaggagaactgcttgaacccagaaggcggaggttgcagtgagctgaaatcgtgccactgcactacagcctcggtgacagagagagactctgttaaaaaaatatatatatatgtaaaaaatatatatatatatttagagctatacatttatacata

SEQ ID NO: 93154 - DNA, 1324 bp, Homo sapiens
aatattagttcataattatagttatgtgtcacttcacaacagggatatgttctgagaaatgcagccttaggagatatcattcttgtacaaacaccatagagtgtacttacacaaacctatacggtatagcctactacactcctaggctgtatggcatagcctattactcctaggctacaaacatgcacagcatgttactgtactgaatactataggcaactgtaacacaatgataagtatttgtttatctaaatatatctaaatgcagaaaaggtacggtaaaaatacagtaccataatcttatgggactacagtcatatatgtggtccgtagttgactgaaatgtcattacacagttcatgactgtaccacatctgaaaacacaaagcaatagattctcttttgtttttgttaaaactgtgttggttctaccttctctagcagagctgtacctaaacaacttyatgcactcacaaaaacgtgattgtctcttttgagaacattctgtctctacatagattaatatctgtagaattcataaggaaacacaaaacaatatgtatctttcatttatatacacacagatacagataaatagaccattccagaaaaagaaattaactttggtgaactatttgtaattcatcccccaaaaaattaaaggttatttgaaatctggaattcatattagactgtgaagttagactctgggtaaacttttttgatgaagggaatttaacataccagaaagaacaactttcaaatctcaaggtcaaacatggggctatgaacttatggccactggggtgatcaaatggctgaaattcattgcagtataattcaggtagtaaaacctgggaaaaggtgggaaaagatgtcatagggaaagtgcccaaatgttggaataaccccaaaagctaaaagaagagcctcagacacattagatagtaaagaagtacctacaggaaagcaagactattacttatcagtcataccacatgtaagacctacaacttgaatgctcttatgacactgagtgctaaacaactccttgcaggagaagtgctgtgtctaggtttcagttctatagttctgtctattcatttgatcagcagataatgagaatcttcaaatgctgcgcaccatccaaaggccagagttatagagatgaaagatactcaagggctttggagctgaaatgggaacaaggaaaggaaaaaaaaaatagatggtgtatttgagcagggatctgtggagtgctaaggactggaagatagtatagaaacaataatacacatacatgctggcactgttatgaaccctt

SEQ ID NO: 93155 - DNA, 1324 bp, Homo sapiens
aatattagttcataattatagttatgtgtcacttcacaacagggatatgttctgagaaatgcagccttaggagatatcattcttgtacaaacaccatagagtgtacttacacaaacctatacggtatagcctactacactcctaggctgtatggcatagcctattactcctaggctacaaacatgcacagcatgttactgtactgaatactataggcaactgtaacacaatgataagtatttgtttatctaaatatatctaaatgcagaaaaggtacggtaaaaatacagtaccataatcttatgggactacagtcatatatgtggtccgtagttgactgaaatgtcattacacagttcatgactgtaccacatctgaaaacacaaagcaatagattctcttttgtttttgttaaaactgtgttggttctaccttctctagcagagctgtacctaaacaacttcatgcactcacaaaaacgtgattgtctcttttgagaacattctgtctctacatagattaatatctgtagaattcataaggaaacacaaaacaataygtatctttcatttatatacacacagatacagataaatagaccattccagaaaaagaaattaactttggtgaactatttgtaattcatcccccaaaaaattaaaggttatttgaaatctggaattcatattagactgtgaagttagactctgggtaaacttttttgatgaagggaatttaacataccagaaagaacaactttcaaatctcaaggtcaaacatggggctatgaacttatggccactggggtgatcaaatggctgaaattcattgcagtataattcaggtagtaaaacctgggaaaaggtgggaaaagatgtcatagggaaagtgcccaaatgttggaataaccccaaaagctaaaagaagagcctcagacacattagatagtaaagaagtacctacaggaaagcaagactattacttatcagtcataccacatgtaagacctacaacttgaatgctcttatgacactgagtgctaaacaactccttgcaggagaagtgctgtgtctaggtttcagttctatagttctgtctattcatttgatcagcagataatgagaatcttcaaatgctgcgcaccatccaaaggccagagttatagagatgaaagatactcaagggctttggagctgaaatgggaacaaggaaaggaaaaaaaaaatagatggtgtatttgagcagggatctgtggagtgctaaggactggaagatagtatagaaacaataatacacatacatgctggcactgttatgaaccctt

SEQ ID NO: 93156 - DNA, 1334 bp, Homo sapiens
catgagcccaggaggtcaaggctatagtttactatgattgagtgtgtgaatagccactgtactccagcctgagcaacacagtgagaccttgtctaaagaaagaagaaagacaaattcagattttcaagcctgtgttctttccactatacamaactattaggatgctttcgtgaggcggtggggaagttgactttctggaagttttttgctatccagatccgggaaacccgattcgtgcttcctgaattagctctgttatatacattgcagagtaaattctgtgtccctagtcttctgtgaagtgggaacatggtgcctgtgtccaagtgttttatctctttccattaaagtcagcagttttccaaaggtcttgtttatgaaggttattagttatgcaaaatgggcctttatggatagttctatgaaatgattccaattaaaaagaagtgggtagattgccagttggtgtcagctaattaaattatgatatgctcctgtcattaacaaggactctgactggaggaaaaataaaaagataaaagcaagtttctgaaatttgttgacagggagggtatattactttgcccattctcatataattagaagaataaaacaggagcttcccattttgtatttgaaatagggaaatctgttattactttcttctagggtataattaatcaagttcagctgcagtattttagatgttatggtgaaatggagttttattaaaaactgtagtttaataataatggatcagttgtactgacattattgcaaacataaaaatgagcttcgaataccaaaaacacattcaataaatttaattgagaaggggctgtgttagaatttttaggctggttccacgtcagtgtttgccatgagtaagagaagacattggtacccaggcttgccctgaagagtgccagggacatggcggtagcagcatcccgatctttagtagtcctctggcgggtgtatccgtcagctcttgtcagctcgacagggaggctgtccgtccaggtgaggagagccttgccgggctgcagtaagtagcttataagtacagtcagggaatggagaagaaaatctccagcttttcctccagctaaagttatcaatctttacaggtacttctggaagctgttggttagccatgctgctgttgtgtgaggaaacgagtgcctggctggaaagcacaaggctttgggaaagttactttttctgcattaaatcaaatgttcaatatcttgatcctgtgcccttctgtgaggtgatgtagtggagcattcttctagacatataggtaaatggtgttgacctaacagatggga

SEQ ID NO: 93157 - DNA, 1314 bp, Homo sapiens
tttagctctgatcccttttttgttagcaatttatgtgtataaccaacagatttctccttaagaaaacctcattattaagctaacttagggaaatttagtaaagaaatgatttggaggaaagcaaataaagtaatccaaatatacaataattatrccaaaattttaacatcgatttataagaatatcttaccacttttaaatttcttccaaaattgacagatactgatttttttcattaactgtcagtggaaatcctatgggagacagctcaaattttgacagcttcaagaaaatggatggcttctccttctgtgtggtaattgatcttaccttttgaagaattagctcataagtatagatttggagagagttacaatatgcaatacagccttcctcttttgaaaataagtcagtcattctgtgaactgaagacttcagcatgaagaaggttgctctgaagggcagagtatataatattatttggttgcgacttttgctagcttggtggctcttgagaaatctttagtgaacttgccagtttcatgtttgtagggggtatgcatctatccaggataatcatcccccattgaaaaactaaccttttcaaggttaagtataatgtgaaacaaataatattgctccagaatgaatttctgtgcagtttgtatgaattaacagctggctaataagaagctcttgaagtctatcataagcaaggtcttgtattagccatagactgagcagacctattgctgcctctaccgtttacctcacatggtgaagtagtctgggaaaaagcagtgtcactgttccactccagatagctgtcattatggtattacataaactagcagactgctgtgggacgcaaaggggatgtgcaccgttttggttatttgaggggactttggcatgcccttgtaggagcccagaagaaaggatcatacagtttagtcttaagctgtgcaaaaacatgaccacatgaatgaaaccagtcttcctgaggccagagggcttataagaggaaagatacacaccttgagtagacttctttttgagcaaggatatccagaagtagagtgttaaggcaaagcaaaagattctttagactgcactcaagtctgtctttataggcatttcttgcttgtgtagcatggaaaggaccactgcttgctcagtgtggcttttttttctgctatgctggaccatgtaagtagccattgagataatttattcctgagtcaaaataagagggcattaaatttagtagaactgaagttggcactggctagactgattactatgatgggatcc

SEQ ID NO: 93158 - DNA, 742 bp, Homo sapiens
cactcccctagggaggagcagttgtccccgatgtcttctacctgggctcacccttggagctacagcctcattatcattcagacttatcatgagctcatcacccttcctccaaccagccctccctggggcctcattgtatgcattatccatattcattacacatttttcttccattaagtcgaattaagccactttgccaacactgcaggaaccaaaatctccctcaataagtatgggccctattggggcccagaggaggccctaagttaggacaaatctacccatccccwcctccctcccatccttcttctcaagcaccatccccccccacttccctgtaccccagatcacatggaagctgcagaagcactcctttctgcaagttctggtacatggtgttccctccctgatggcctcacaggcagctgctgactcaccccaggttgctaatgcatcaggtagccatgtattccgatggagctgcttcataaaatgtagcagcgtgtgcatgtgtgagctcacatgtgtgaacatgaccagagcaccggccctgggctgtggacttgagacctggattctaggccaccactatttacagggttaccttgagctaatgccttcctctctgtctcaagagaatatcccagcccttctggcctcactaggttgtttggatacttacgaagaaatgtgttaataatacattgttctacaatgtgttatgaagtaaagtgatatctaa

SEQ ID NO: 93159 - DNA, 686 bp, Homo sapiens
cacactttaagatgcagttatcctctcctggttggaattgattgcaacatacttcaatttgtgggttattggaatagctggggaaagtctgaaggtaattagacctggatagaccaaacatgtgtggcccaaagaactgaacagtctgtgattagcaccttgatctgaggcccacaggtaggtactgggaaatttccgtgcactttggcttttgaggcagccttcccatttgaaaatgccccccacccctccctgactccttccagcgtcagcttagagagtattcctctaggaaattgtttttgactcccaagctgagttgggatctcctctggtctcccacagcttctctgtgtcatagccccgaccacactggattgtcattttctatgtgtccatctcgccattatggactgttaattccagggcatggacagatcttcctcagaggaggcctcagcaagtgtcagccacacgaatgagtgtatggagcaaaggaggagtgaacgtctaggagaccagccgttaccccaactcctccccatccgctcctactctggactccaatctatgccctrccccagctcttggatttggcctttggatcaggttcttctggtaatgaagcctcacctttcccccaactaactctgatctggcctaccctgctcctgactaacctcaag

SEQ ID NO: 93160 - DNA, 555 bp, Homo sapiens
atcagcctgggatccatcttgacaagagaccccagacagaatgctattggcctttcgtgtaagtgcccgaatttcagttattatttggcttagaaacctttcatctggatatattgccaaatttacaagtgtgctcaattttagctgcatatgctttaggtaagaatttatattattataatgtgaggattttttttctgacacggatacttactccttagtgttgtaactcaagcaatgccattaagtttttaaaaggagggagggtttaaaagtgatcttagggagtctctctgggcctactctggctcaagaggctgataaaaaataaataaatgaataaacttgatctttagagtcaacgatttagaattttcaagcatgaaggtgcagcagataagaaatttaatttatrgaagtccaggtttcttaatatgtgtgccaatttttaaaattgtaggaaagtatatgtttgttagctaccaaagaacatagatttttcctattagtctaaaagtcgtcccaacaagttgaatcaacttttcacaaaaagca

SEQ ID NO: 93161 - DNA, 553 bp, Homo sapiens
acttctgacttctgggactgtaagagaatacatatgtgttatcctaagccaccaagtttgcagaactaggaaactagttcacctctgtcatctctcatttggattgctctggtctccctgttatttgcttgccttttttagtctattcccaatagccrgactgattatgttaaaatataagccaaattatgttgctccttggctcaaaatctttcacttaaatgtcaccttcttggtgagatcctgtctggccaccctaattaaacctgcatcccttgtgcgctcccaccccttaagcctaaattctcaccagagttgcactttcacccttttggttctctaagcagcactaaggtggttggcaagaatagtcgctttacaaaaggtggcaaaaagggagccaagaagtgagtgcttgattcgttttataagactggtatgatgtaaaaacaccagctatatgttccatataagaaataacggaaaaacaccagtcccaaggatgcaagaaaccaaaattgcatggggttgtgatagccttaagggttgtgca

SEQ ID NO: 93162 - DNA, 766 bp, Homo sapiens
atgggcagtttcatttccacccctttctccaaacagaggtccctaacagttaaagtagatgatgacatttgtaatagcttaccaacagcataattaaccataaactctcagaggagaagtgcaagaaagctttcactatgaactactaatactgacgaaaaatcagaaggaaagcttccttatcttggcagggtcaggttaaggactgacaacatgaggctagatcctggggaagccacatccccttctctcttctgagggataacttttcaggtccttagaaatgagagaattatttgtacatcaagggaagtaccataagtcatttttctactccccatctctcctcaggtatcatctcccatttgtcagggaagacagtcttacgacctttttttttttttttttgagacggagtcttgctctgtcaccctggctggrgagcagtggcatgagcttggctcactgcaagctccgcctcccaggttcacgccattctcctgcctcagcctctcaagtagctgggattacaagcgcccgccatcacgcccggctaatttttttgtatttttagtagagacggggtttcaccatgttagtaaggatggtctcaatctcttgacctcgtgatccgcccatttcggccttccaaagtgctgggattaccggcatgagccaccgcgcccagcctcttacgacttttaaaacaatctattccattgaagaatccttatatgattacacataccgtggttattaactaatg

SEQ ID NO: 93163 - DNA, 506 bp, Homo sapiens
gcgggaatccagcgtcttgccccgcttcggacgaaaacacagaggctgcggtggaggggtggagtgcggggctggccgccagggcttggtgccccacggcagtggactgtgtgtcacccacaggccccctccctcagcccctggctgcgcaggtgtgccatggctcggaagctggcaggaggggcttgccaagctggcttgtggagcaactgctgggtgggckccttggggacaggcaccggccatgcctggctcgccaaccaccagacgcccactcggggggtcctccttgtcctgtgagcggctcttccagagcaggtgccagcccgacatcctggcccctcctggccccgaggcttcctcggctcccaagtcctcctgtaggcagtgcgcagggcaggggaccaggtctgccatttctgccgggaggctgggtgaaggggacccagcagccaggggctccccccaccgggcccctcaggggaggtgaggctggtggcagctcg

SEQ ID NO: 93164 - DNA, 569 bp, Homo sapiens
atttctgaagccaatcggggagagaaattccaatgcctgrgaagctggcctgtcctggcccatgggtttgaaacagaggggcctctttcttccctagctccggctggcggccgctatgacatcatccccgcggtgtgtaactcgagaagcatgttgggaagtgttgggactgattgatcacgcgtgctggtgtcctctccccggaggctgaggggccgggctaaggcggcagctggctgtgtctctcaccagcactcagggtggggggccgcatcttcattccaccgggcggcattgggggaagatcctggcagggcctcattttcagatgagcacaccggggcccgctaccagggcactgcaataactcacagggtcggggtcccttccagggtctccctcagccccacctcaaccctcaaccctcactgcctgcccctgcctggctccctgggtggcctgctgtcacaggcccttctccacaaaggagaagacacaggaggaaagggctgggggatgctgtgcaaggcatctgtgggtgatgggtccacactggtgggtctggagga

SEQ ID NO: 93165 - DNA, 614 bp, Homo sapiens
attgccacaaaatgtaatcacctcctggatattatatgtttttcttacatatttattgtctgtctctttctcttctaccctcactagaagtcaacttctaagaaggcagaaacataatctgtttatgtgataattctgtagttcctgtgcctcaaatgacatctagcccaacgtaggtactcactatatatatatatttatttttttttgagacagagtcttgctctgtcgcccaggccggagtgcagcggcgcaatcccggctcactgcaacctccacctcccgggcccaagcaattttcatgcctcagcctcctgagcagctggagctacaggcgcatgctaccatgcccagctaattttttttgtattttagtagagatagggtttcaccgtgttgcccagtccggtcgtgaactcctgagctcaggcaatccgcctgcctcagactcccaaagtgctgggattacaggcatgagcctaaataattgttagatgaatgaatataatatctttttataaatttataaatgtaaggaatgtttatgtgaaaataattagcaaatacaaatcacctacaattattcagagataatcattrttaaacatttatta

SEQ ID NO: 93166 - DNA, 741 bp, Homo sapiens
aaaagacttaaaaaaaataaatttagaaatgtatttttacatgtgtgaatttgatattatcttaaactacaggagcggcttctgtaaacaggaataattatagctccaaatgtgcttttccaattctatcttgtagataaaactaaactgtcaactaccattatggctcatcccctattaatactgtctggcagacttgttaaacacatttcaaccttagaaacacagtatacatatgtgatcgtgtgctagaaataaaactaatactttatctttgtgtctataatctttcactacaaattcctttttttttttttttttagacaaggtctcactctctcgcccaagtaggaatgcaatggtgcaatctcagctcaccggcagccttgacctcctgggctcaagtgatcctcccgcctcagcctcccaagcaactgggaccacaggtgcacrccaccacacctggctaatttttgtattctttgtagagacggggtttcaccatgttgcccaggctgaacttgaattctagactcaagccatccacctgcctcagcctcccaaaatgctagggttacaggcattggtcaccacacccggcccacaaatctctaaattaatacaagcactgtcacttcagggagaccatcacctagaggcagagaccaactctcaatacaccagagcccaagaacaaggtagacttgtgactgcaaggttcctacaacttgattccttgag

SEQ ID NO: 93167 - DNA, 810 bp, Homo sapiens
ggggatcccactggatgttggtaagcatagctaccccatgggctactctaaattcctttttgttttgttttgtttgagactgtgtctcactctgtcgcccaggctggagtgcagtgggatgatcttggctcactgcaatctacgcctcccaggttcaagcaactctcctgcctcagcctcccgagtagctgggattacaggcatgtgccaccaagcccagctaaattttgtattaaattagtttttatttaactgttttctctcaagtgacacataaaatagcaatctgaatagaaagagagaaggaatagattaaaaamaaaacaaaacaaaaattgacagttaacatcccttctgaagtcaactaacagctttcataccaatcaaatcctcaaccattaatgtttaatctcagtaaaacacaacctttagcacagtttcactcttctctaagctgaggttaatttgttcctgctattaaccttttaagttaactggcaaaggaatcctaaaatctaccactgatcgaggactccttaagagccggtaaaaatgatatgaaaagaacaatggttccttttcctaagacaaagtacagcttccatgcagcttggactctatctactcttgcagggcagtaaaaggcacatctccaacttaccggtccagccacgccagcagggccttggcggcgccgatgagctccaccaccgaggtcaggaactcattgggggccttgcgggaggtgttgccatcgtaagcgggacttttccgtcggctacttatgtaattctgtaaattgtgggaaga

SEQ ID NO: 93168 - DNA, 810 bp, Homo sapiens
ggggatcccactggatgttggtaagcatagctaccccatgggctactctaaattcctttttgttttgttttgtttgagactgtgtctcactctgtcgcccaggctggagtgcagtgggatgatcttggctcactgcaatctacgcctcccaggttcaagcaactctcctgcctcagcctcccgagtagctgggattacaggcatgtgccaccaagcccagctaaattttgtattaaattagtttttatttaactgttttctctcaagtgacacataaaatagcaatctgaatagaaagagagaaggaatagattaaaaacaaaacaaaacaaaaattgacagttaacatcccttctgaagtcaactaacagctttcataccaatcaaatcctcaaccattaatgtttaatctcagtaaaacacaacctttagcacagtttcactcttctctaagctgaggttaatttgttcctgctattaaccttttaagttaactggcaaaggaatcctaaaatctaccactgatcgaggactccttaagagccggtaaaaatgatatgaaaagaacaatggttccttttcctaagacaaagtacagcttccatgcagcttggactctatctactcttgcagggcagtaaaaggcacatctycaacttaccggtccagccacgccagcagggccttggcggcgccgatgagctccaccaccgaggtcaggaactcattgggggccttgcgggaggtgttgccatcgtaagcgggacttttccgtcggctacttatgtaattctgtaaattgtgggaaga

SEQ ID NO: 93169 - DNA, 1390 bp, Homo sapiens
aaaatttctaattttttaaatattattttttgtttcactaggaggtaacataaatttaaacttcaagtaaaatctatttaaaattagaattgttttgttaaagttaaagccttttgttgttgtttttaacttaccattgttcatcttgcaaaaaaaaaaaagtttcttacctacttccgagtatatttatgctttatgtatcttgattttgacacgtgacttgcctctctctggcccacatagccaaagccagctgaaagaagtttctccacagccgggtgcagtggttcatgcctgtaatcccagcactttgggaggccaaggtgggcggatcatgaggtcaggagattgagaccaccctggccaacatggtgaaaccccgtctctactaaaaaattcaaaaattaactgagcatggtggcacttgcctgtaatcccagctacttgggaggctgaggcaggagaattgcttgaaccagggagtcagaggttgcagtgagccgagatcacaccactgcactccagcctggtgacagagtgaaactccgtttcaaaaaaaaaaaaaaaaaaagtttctccacttcagaggggatgtgtagaattttgagaagctgaatagctattcagcttgtgctggatccaggatcactggacagttttccttattcttgtctaatgtccatcttgtcatctgtcttatcatgtggcgcttttttgggcaggttgtatggaaggggacatacacagcagagtaatcaaaagcttgtgccctagatgcagattgccttggtcaaaagctcagcactaccgctgatgagctttgtaactttggagaatttatttactgttatcatgccagtttccttaccggyaaattagagataaaaacatttctaccttcacgggctgttttcctgagataatacatgtcaaacactgagtccagttcctggcataaagtgttcaataatgttaagtattctgttagtttcagtttttaaatggtaccagattcttgccttgggatgctattgagatggcataatgtatctcaagaaatatcgtcatgtttttttaaaaatgatgaaacaatttaggacatacagaggcaactgaatacagaaatttatacccccacctctaatgttgcagatttacatgttgtttcctgggattggctcttttctctgaaaaggagtctaggacagtattatctcatgaaattgatttttttgaagcacccacataagctgaacattgttcaaaaagaacacaggttagaagcacaagagcaagaaattaattttattgattgattgagacagggtctctctctgtcactcaggctggagtacagtggcacgatcatagctcactgcagccttgacct

SEQ ID NO: 93170 - DNA, 2320 bp, Homo sapiens
  misc_feature (1)...(2320): n = A,T,C or G
tatgcatgtctgtgttttgttctttttaaaggagacctgatgaccaggttctggtcatcttcagagcactgaaaaaaatgagtgacagcaggtggctgtcacattatcaggccaagaaggcatcttcctctttttctaaataacgtgagccaaggtaataatgacagcattccaagaacatcttctactcccgggacaactgccactgtacttcagggagtaaccaaaacaccaagtcccatcagtgggtttgctggggtggcaagctctaatgcacagtacagttctaccaatctgtcatcaagtgccttccaatgacatcatcagcccatgaatgtaacagaacaattatctgccccgtgaccccttccaaagagttcccccttattaattctgtgtcctacttctcggcactaaaattcaaagaagttaccttgccctttgggtcaaccttaccaacttctctcaaataggctttgtaaaattatgaaacaaacttcggagaaagatacaagtcccacattctccctatgcctaagggatctcagagattgtttatcaggccacctcgcactttaatataagcctggccttaaaagaagactaaatgtttgttttaagcagaactggtgccacagtaataaactttcagggcaggagatcagttctcccttgttagactgacccaagatattttgccaggtgcaagccagcctgccacaaaacatcctaaatccaccatccagtcccaaagtgggtgggccatgacacctttctgttcctaagaggcacttagatttttagattawtttttagattaataaagttaattaagtttgattgcataagccctacttctaaaaatttgaggtttatctaaatatagtgatgcagagaaatcgttaagacagtattcaatgtaaaaaggaacagattcaaactgtgcagaaatccatttacaaaaagacaatgattatgtgcaaataagaataaacatgtatgcaaatgtctaggaagggttccagaaggtgctgacccccaactctgggaaaggagaagggtatagcataaaggggactatcttttccaacctatctagagttctgttgtttaaatattcttttacaagaaagtatttctgtattatttgacaaataaaaatgaaatctacaggcaacggaaagataatggggggaagggtgaatatatgaaagtaaatcacattccatagctcttgaatgtttaatcagagatgattttccactaatattcctgtgatgaccgatttgctccatgaggatgcatttctgcctgccacgttagaagcagctgtttcctagcattcattatctgtttcctccaaggccaggaaaactgaaaggcagttctgtctggttccagaagctaaacatgcaaagctgcatccacaccttaccccagtnnnnnnnnnnnnnnnnnnnnnnnnnnnnnnnnnnnnnnnnnnnnnnnnnnnnnnnnnnnnnnnnnnnnnnnnnnnnnnnnnnnnnnnnnnnnnnnnnnnncacacaatctccctctctccctctctctgtcattcatttgtgctcctctcaacagttcctagacctgtaagtacatctgaatgcatcagatcttgttgtgtaataaataatgctgacatttctcctgctagactgaatgctcctcaccagtggatcctccaaacccaacactgagtctagtccctcacacagaaggttaataaggcttcttgattgggactgtactacagaacaggaaaaatgctaggatgtgccacattattgctggtggatgggacctacaaagccataggttttatgggatctggggaaagggggccaatcagagcaagatggaaaaatagtataatcacaaaccttctgaactgggagtctagagaatttggttctagtctaggtcctgccacttaaatctctgggccacaatgtcattaacgacaaaataacttattcacacaaaagaataaaatatttggactgaatgatcgaaggtcattatcaaccctcaaaattagacttaacgatggaagaaaaaacatggaatccatagtgctgaaaccacagtcctaggaaaaatgcctgctcttgttatataaccaacagaagtcaagaaacatcttaatatacctaatacgcaggctgtcatccagttcaccaacgtgaacaggatttgcatctgagcactgcctcatacccagtatttgttcactataaggatactcctggccgggcacagtggctcacgcctgtaatcccaacgctttggcaggccaaggcgg

SEQ ID NO: 93171 - DNA, 576 bp, Homo sapiens
ccctgtcagcccaaactcccatctcttttttttagctcaggtcaatgtgttagtagtttcttctttctttaatgaagagtttttaatgttttcttatgcttaaagtcagctcagttttacatttcacagatcaaaggaaataaatacccagtaagtcaagttcctttttgcacagagcctttcagtgacatttcccctggagatccaggagcttcccctacagtagggtgactgggccactgcaggtctaaaacccagttagtgctacatcccattaaagagaggacagtgcctgcctgatagaattctgaatcaaataatgagccctaaaaaataaatacacatgtatgcatatttatatgtatgtatctaagtatatatatcatatgtattatgcatgtatatatgatatataatatgcatatgtatccrtgtattgtgtgtgtatatacgtatacaatatatctaatatgtataatgtatctattatatgtgtgcacacacaatacatagatacaaatacacacacagttcctccacaaaggaaggccacgaaaagatcttcattctttcctt

SEQ ID NO: 93172 - DNA, 525 bp, Homo sapiens
gtgtcctaatataacaaaggtttatttcatatgtatggtggacataaatgcagtttgagtttggtgagaaagctctactacacaagatattcagggaaccaagctgctgaaggaagaacctaggctgatgaagactctatcatcttttaactgcactatttggaacacatgccagagtaggagaagtgactagataatcacaaaagattgttttagggtagaagcgatacacacaacttcgtttcatgtttcattggtcagaactagttatatatccctatctaattgcagagtggctaggtcccttttatggaaaggacaacagaaactgttgacagctaataatatctacacaggatggacttaawgtttgggaggctttttctgaaatttcagttttactgaaatttgcaagtagtggttttgttgtagcaggagttggttatagatgaggattggcaggagagttggtaaccttagcagctgccacccccaacacacacacacacacacacacacacacac

SEQ ID NO: 93173 - DNA, 835 bp, Homo sapiens
cctgcttagcttgttataatagtacatctggagaaaaatggggggaaaaaggaagcaaaaactctctggctgggctgcagaaatcttttctgaaactgactakcctgctgagtgatagcagtggggccatggaagcccacgctctaaaatggcccattggacctctgtgttctcaggaaggagaaaagtagaaaaaggcagcctgattgcctcttggctcttagccaaagttgctgcgagtggtgggagtggaatttttccatggcagaggaagaggaaaaatcagatcacatttcccactgccagggcctatttattcaggaagatcttggggcccttgctgttcataacagaagtgtatttactgggtcgtgccttaattttcaccattagaaatctctttttcttttcgtttcttttcttttttttttgagacagagtcctcgctctgttgcccaggctggagtatagtggtgtgatctcagctcactgcaacctccacttgctgggctcaagcaatccttcccacctcagcctcctgtgtagctgggactgcaggtgtgtgccaccacacttggcgaatttttttttctttttgagatggagcctagctctgttgccctggctggagtgcagtggcatgatcttggctcactgcaacctccgcctcccgggttcaagtgattctcctgcctcagcctcctgagtagctgggattacaggtgcgccccaccacgcccagctaatttttgtatttttagtagagacggggtttcaccatgttggtcaggctggtcttaaactcctgacctcgtgacccacccaccttggcctc

SEQ ID NO: 93174 - DNA, 914 bp, Homo sapiens
aaatctatattcatatttgcatttgacctaagcctcaactttaaaaatagatttaacagaaattatacagaaattcaaaaattgttttgctaggaagcaaacaagttatgcaatacaatttaaaaaaagaatgttccctctgcaagaaagagatcacattagtgatgaaatactatatgtcagtctgagcttaagcccaaattcaagaacatactgtacacaaaacttctgaaatctatttatctgatgtgtgactgatagctattgatgcagcttggagaccttagggcgatactgactccccatcatttgtcattataaagtattctttgaatggaaagttgtttgcctttcatggtcaggggaaaatagtcctggtggctgggtgctagttagaggataagaacgtgggctaagaaggcaaggagctggtttcaaatcctagtttggctgcttagttgattacatatatctacaaattataactgcattagtttactcatctgtaaaacgtgacatgactaataatgatacgtgctccacaggaccaagctaaggtgtgactcatctgacataatcttctaaacaatttagcatacgggtacrtacttacctaggccgtaatacctgtattttcttctctttcgttctttctttcttttctttgttttgagacaggctctcactcttatcatctaggagtggtgcgatctcagctcactgcagcctcaacatcaagtcaagtgattctcccacctcagcctcctgagtagccaggactacaggcatgcaccagcacgctcagcaaatttttgtattttttgcagagactgggtttcattgtggtgtgcaggctggtctccaactcctcagctcaagtgatctgccagtcttggcctcccaaagtgctggga

SEQ ID NO: 93175 - DNA, 914 bp, Homo sapiens
aaatctatattcatatttgcatttgacctaagcctcaactttaaaaatagatttaacagaaattatacagaaattcaaaaattgttttgctaggaagcaaacaagttatgcaatacaatttaaaaaaagaatgttccctctgcaagaaagagatcacattagtgatgaaatactatatgtcagtctgagcttaagcccaaattcaagaacatactgtacacaaaacttctgaaatctatttatctgatgtgtgactgatagctattgatgcagcttggagaccttagggcgatactgactccccatcatttgtcattataaagtattctttgaatggaaagttgtttgcctttcatggtcaggggaaaatagtcctggtggctgggtgctagttagaggataagaacgtgggctaagaaggcaaggagctggtttcaaatcctagtttggctgcttagttgattacatatatctacaaattataactgcattagtttactcatctgtaaaacgtgacatgactaataatgatacgtgctccacaggaccaagctaaggtgtgactcatctgacataatcttctaaacaatttagcatacgggtacatacttacctaggccgtaatacctgtattttcttctctttcgttctttctttcttttctttgttttgagacaggctctcactcttatcatctaggagtggtgcgatctcagctcactgcagcctcracatcaagtcaagtgattctcccacctcagcctcctgagtagccaggactacaggcatgcaccagcacgctcagcaaatttttgtattttttgcagagactgggtttcattgtggtgtgcaggctggtctccaactcctcagctcaagtgatctgccagtcttggcctcccaaagtgctggga

SEQ ID NO: 93176 - DNA, 927 bp, Homo sapiens
cattggagcaataatgtggtgggagggaatggaatatagaatgaaagattatgataccagctgatgtgaatgctatatacattatgtcttgataaattgagtttgaatcaaaaggcaattaaatatttttggtacctttagaaatttttgaaaaggggattctgcaataaattggctgcatttactccaaacaaaaagtatgactacaacaacaagaaaaatagcaaaaatgagagataacttcctctttagcttgcagaactggagcatgagcagttttagtgatattagtgttaggcaagcctaggtacgctggtatgtttctctccatgaattaaatccagaaaataaaatcagtcccttttctctatgttaaaatttggttttactttacaatagtgattcattcaagcatttstgagttggatcatccaaaaatgatcacgcatctcagaaaagcaaagcaaaggggagggtgggaggtttccctgtgccagagcccctgctatccatcactaccagggacagagaggagatggccctttaatagaaactggctaatttcttgagaaatatctcattaagcccgcccttcctgagtggcttctccattaaaatttgataaatgaattctgccattgccaattccagcctgtccttctttcccttaatgaaatgaagacgcgtcatgctggcaagcactccagacacagataattattcatggaatgctagaagtgctgtagtcacccagcccatcactgctccacagacactggagatgggaccttcagaagcctgaatgatttttgaatagagatttatttatattttactcagggggaaacaaatcacatgggtttacatactcttccttttagcttttcgcccatattgtttttccacctcagatcacagtgtatgtgt

SEQ ID NO: 93177 - DNA, 1729 bp, Homo sapiens
ctgggcacagcacttgcctaaaaatgaaactgccaagtgttgtcggggtgcatggatccagagcctttaggtgtgcagcaacctcctggctctgtagtccagtggatggtgagaagcctggggagcaggaggccataaagaggtttggaaggggcagggagggaaagggagaaggactatggccaaggaactgtttactggcggattagagagagtggggccaaagggtagaatttcaaggaactaggggggtgaagtcaagaggtctccacaaacactttctcaacatctcttatgtgccaaatgatagccagggctctgggcacataagatgagtataacccagtccctgccttcaagaagctcttggtgtaatgcggcagggaagcaaacagttaggatgctataggaggaggcttagtgttacggatgcctgggaggagctattctgcttgaggtgagggttacaggatgaggggacaagagagaggaggaaggattttccctgttttttccaggaggggtaatcccttgtgcagagtgcaggggtgacagaatatggacccacagttccatgaggtcagaacttaaagtctggggtggaggtgacactgtagaggcaggcaggtgctgggtcctgaagacccccaacgtggaggctgatcctagtggaaaatgagaatgagcttagaccacacagcggcagcagggaggagaggagggaactgatttgagagataggtaggagacagggtcatggagccttgtgactattggattctagaagataagggagccaacagtgtcaagattagaagcactgatgtgataggctgagtgggaccttggagcttcttaagtgagccttgattcccagcacctccttagattgctctgtgaacttgggcaagcgaactaagctttctgaggccatctgtagaacaaagttgctaaaatcaatcttgtatggttgttgtacatattagggtaatgtatgctaagggcctggcataggacttggctcataatggagaactcaatagatagtaaatataattaccatcattcatgcattcaacaaacatttattgaacacctgctatgtgacaaggactatactggattcctgcattggataggatgatttaagtctcagttcctattctcatgtagttcactgttcaggtggagaaagaatgcagaggcagtcacctaccaaggcaatatgggctgagcagaggaagaagcccttaactctgcccaagagaatttgggacagctccacagaggagagatgacagctgaaatgatgtagggccagccacctgctcagagcctgtcacatcaccccctgccccaccaccaccacatgggattgcttcagaatctctgaaagcttcagttttgaagcatcgtcttggttctcagggttgaaggaagaggatgaactgcaggtgggcatctatatggagcccagagaatggcacaacaagctttggccaccccaggaaagggcaagtgcagatgggaggtgggaggggggaaccagataagagtgaccctgggcagggcttactagctggatagggagtccatgatacscagtcatacacatcagtggcctgtgtatgtgtgctctttgggtcagcctaatttttctgcttctcatctgtaccatttcaaaaattccctctgaaccccttggtgtcccctgccctccgatgccaac

SEQ ID NO: 93178 - DNA, 646 bp, Homo sapiens
ctttgttttgggtgtttttggtttttttttttagatgcagtctcgctcttgtcacccaggccgaaatgcgatggtgtgatcttggcactgcaacttctgcctcctgggctcaggcgattctcctgcctcagcctcccaattagctgggamtacaggtgcctgccaccatacctgactaatttttgtatttttagtagagaatggatttcaccgtgttggccaggctggtctcgaactcctgacctcaagtgattcgcccacctaggcctcccaaagtgttgggattgcagacgtgagtcaccacaccaggcctacttgagtctttagatgggttggctagatttctgttgttcttgcttattcccagtgtttataagttttaattgctgtgcctttttttttttctaaagtggacgaatttttattgtctattaaagtatttattatgaatgaaaattaataatctacccaccacccactaaaagtagatctttggtcagatttgattggcctgaatcatcctctctaacagctctatgacttattaaaattgtctggaactaaagtgcaaatcatttctctaccttcttggcaatcatattcataaaaatgaccatgacctctcttcagtttttcaattcacagt

SEQ ID NO: 93179 - DNA, 646 bp, Homo sapiens
ctttgttttgggtgtttttggtttttttttttagatgcagtctcgctcttgtcacccaggccgaaatgcgatggtgtgatcttggcactgcaacttctgcctcctgggctcaggcgattctcctgcctcagcctcccaattagctgggaatacaggtgcctgccaccatacctgactaatttttgtatttttagtagagaatggatttcaccgtrttggccaggctggtctcgaactcctgacctcaagtgattcgcccacctaggcctcccaaagtgttgggattgcagacgtgagtcaccacaccaggcctacttgagtctttagatgggttggctagatttctgttgttcttgcttattcccagtgtttataagttttaattgctgtgcctttttttttttctaaagtggacgaatttttattgtctattaaagtatttattatgaatgaaaattaataatctacccaccacccactaaaagtagatctttggtcagatttgattggcctgaatcatcctctctaacagctctatgacttattaaaattgtctggaactaaagtgcaaatcatttctctaccttcttggcaatcatattcataaaaatgaccatgacctctcttcagtttttcaattcacagt

SEQ ID NO: 93180 - DNA, 646 bp, Homo sapiens
ctttgttttgggtgtttttggtttttttttttagatgcagtctcgctcttgtcacccaggccgaaatgcgatggtgtgatcttggcactgcaacttctgcctcctgggctcaggcgattctcctgcctcagcctcccaattagctgggaatacaggtgcctgccaccatacctgactaatttttgtatttttagtagagaatggatttcaccgtgttggccaggctggtctcgaactcctgacctcaagtgattcrcccacctaggcctcccaaagtgttgggattgcagacgtgagtcaccacaccaggcctacttgagtctttagatgggttggctagatttctgttgttcttgcttattcccagtgtttataagttttaattgctgtgcctttttttttttctaaagtggacgaatttttattgtctattaaagtatttattatgaatgaaaattaataatctacccaccacccactaaaagtagatctttggtcagatttgattggcctgaatcatcctctctaacagctctatgacttattaaaattgtctggaactaaagtgcaaatcatttctctaccttcttggcaatcatattcataaaaatgaccatgacctctcttcagtttttcaattcacagt

SEQ ID NO: 93181 - DNA, 1387 bp, Homo sapiens
aacatgaactggttgctcaggaggatcatggcctttttttggtgctgatgcccaataggcatctctctggtgtgtcttcataaagaggatccattgacaacaacatctccccatatctccggtgacaagagtcgcacagttatatcccaggttcagtcaaattggacacaaagcccaagtataattcaataaaggcactttagtgcagggcctaaatggtacaggatatgcaggcagttcttcagtggtaaaatgtggattttctggagcagtggtttccaaccctagctgcacattaggaagtcctgggaacttttgcaaaataccaacacaggactccaccaaccagagattctgattttttctatgtttccaggggattttaatatatagccaaatctgagaactgatgagatcgataaattgtacatttttcatgaaatcctctataaatactatttcttgcctcagagtttcatcaactcaaggttataatacttaaacacatttttgcgtagctaatattttctgaatgccagctatgtaccaggcaggtgctgtgctctaagatataaggataattgtgtgacccaatctctatcttcaaggagctgatccagtattgattcgggttacagacacctcagctgcttgtcacaaaggaaggtggtgaggggatgcagagaacacaaggcaggcactcggggcagctctgggtgggtggagcactcccagcagaatgaacaacttagctgagtcccaaaggaaagattaattaggaaaaagtggagtgggagagtggtacattgtggtcaatatttttctcaataacttggatgactattagtaaccattctatatgaatgtgaggtgccatgcttactcaagaacagctggaggaatagccccttgctacatgactgaatgggggaccaaagtgcactggtgggcaagaggaactcaaaccaagattaattgacactccagatcaggggaaggcaactaagaagcatgagcagtgctgccctgagtgttctaccagaggctttgcatgtgttatcatgtaatcctacatcgacattttacagttgaagaaaatcagccttataatgtcaaggtagcygccttgagttggcacagccaagtgtgtagccagaactcaagtctaagcctgtctcactccacggtccaggttctttctgttattccacatgtatcaagtcctgtatcaattctttagattcaaagaatcagctgctcatagacaagataggcaggcttggttcagctgcattttctgtgggggaaaatgttaacagctatcagcttatgcactagtcttagatgtgtgtattggagttgaatgtgagaggcagacattctcatg

SEQ ID NO: 93182 - DNA, 423 bp, Homo sapiens
  misc_feature (1)...(423): n = A,T,C or G
tggattatttgttaacaacccagtttctagaccattggaaagggactagacctacaaataaaaagatcatatagcaaagtcattgaagtttaaacctaaaaaggagtgtttacttgtagaattatattcctgtcccatctataaaaatagtaaatgtataaaataaaaatgtaaaaattgaacatactgaaaaatacaggatacatcaaataaagaatatttacaaaatatctttcttaagagtgtttcagtatgtacatgtcctatcttatatttgatcatgcagggcaaacgatgccacattaaaattaaggctgagataaaaaagtagygcacttgggaaattaaggagactgcagaatatgataaaaccatatttttaaagacttctcattttactgagaattagtttggaatnttcat

SEQ ID NO: 93183 - DNA, 582 bp, Homo sapiens
tgtgaaaattgaatgatgtggtgtctgttctccctatttaacaagcyctttccctcatttaactctcatacagttcttatttggctttcaaaactcatcttagggagcctatgattatcaacagtttcttccatctgatattacttcgctgcaatttcacagcaaatcatgaatattgatattttttctagtaaccccctcatcatcttatattaagtagtatgtttcttatttataattatttgttgtttccttttatgagaatatgagctccctggccaggcgcagtggctcacacctgtaatcccagctatttgagcagccaaggcaggaggatagcttgagcccaagagttggagaccagcttgggcaacatagcaagtccctatctccacaaaaaaaaaaaaaaaaaaagaatagctgggcatgatggcatggtggcacatgcctgtagacccagctactcaggaagctgaggtaggaagatcacttgagcccgggaggtcgaggctgcagtgagcagaaatcccacatctgtactcctgcctgggagatagagcgagaccctgtccctaataaata

SEQ ID NO: 93184 - DNA, 794 bp, Homo sapiens
gaagagcatcaggagcaagataagggcaacaaacgctttccgagcattaatctgaggttaaaattatcgtccccattttacacatgatgaaactgatgcttagagaagttacataatttgattaggatcaaacagctaatatttggcaaggctgggacctgaacctggttttccagatgccggtacccagtcactttccataatgccaaatggcttctcagaaactcaacacctcttccctaagtgctttccctgttttcctcaaatccaggaactgttggtcttttgggcaattctgagcacagccactaagtggcgacattgcccgactatggctcagccctgtttctccggggaagaataggggaggggaggggagggagtcggagttgccctgttgtgtgttgtgctgtgtgtggggctttcttctatctatttagtcctcccagcaaccctgcagaggaggtattatctcattttccagatgaggccattgaggatctgctggatgacagagcttagcggtagaagcaggaatggaatcaacgtccagttggattccaagtcctgtctccaagcatgctgggctcccaaaggaaaagcctttctgtgccctcagactacacagtcttgtggggaagtggacagtggggaccccacgtgagttttaggctgggacagcccagcagtgaaggaggaggctgggtgaggagtaaccaagccttagctttggtgattgatgggaagaattgggttctgaggtggraatcaattacagttacaatctgctgtgt

SEQ ID NO: 93185 - DNA, 1433 bp, Homo sapiens
tgcctggatactgtttctcctcaaggctgctcagctctgtgtctgtcaccttgggcttcctataagagggaaaaaaaatgctggctgctccagcattgagtctgtcaccatgggtcaaggcaagtaggtccagaggatttggtggaaagtggagagatgggatgggaaggaaactaatgatagttctcagcccagaccacataattgggagctggagtagctatatcgtcatcctcttcccatgactggtttgcttgggattattactaagattagtctattactatttgccttagatactgtgtcctctgagccaagtgaactggagataagggtctggcagtggacaggtagagaggaacatctggattggggcatttcgttcccatctccagttctggtgcatacccatattcttttttttaatgaaatgttttattgagataattatagatgctcacgcagttgtaagaaataacacagagcaatctcttgtaaagtttgtctaccagtttcccctagtggtaacattttacaaaacaatagtactatatatcaccaccaggatatggacattgtacaacctaccaatcttattcagatatctccagttttacttggactggtgtgtgtgtgtgtgtgtgtgtgtgtgtgtgtgtgtgtgtgataagttaatgcatccactgccacggtcaagagactgaacagtttcaacatcacaaggatcccgtgggttgccctttcataaccccaccttctgccctagccctgccctgtccctaacccctggcaaccatttatttttccatcatttataaatgttttaatttcaaaaatgttatataaatgaattcatgcaataggtaacctttgggtattggctttttccattctatatgattcctggattttcatccaagttgctgtataagtaatccattctgctgagtagtatccatggtacagatgtaccagtttgtttatttgcctgatgagaaacaccagggatgatttcagttttggrctattacaaataaagctactgtgcacaatcatgtagaggtttttatgtgagcataagttttaatttctctgaaataaatgtcccagaatgcaatttcccatgttttggcctttccatttctttctctttctcttccttctgcctctccaacagcaaaagatagaaatactcatggttaaaaggcacccatcagccagacaggaagaaagtgcttaattgtgagaggcctcccaaggattgatagaagtattggcttgaacatagatggtacctgcaactgtacctagggtagcagcattctccttccagatcccctctcctccaaccctggagtctccacatttgttgaaaatgcaatctcctgggctttgctcaaattttgaaacttgtctgatggtggaaattcagg

SEQ ID NO: 93186 - DNA, 602 bp, Homo sapiens
aagttcgagaccagcctggccaacatagtgaaaccctgtctctactagaaatacaaaacttagccgggcatggtggcatgcacctgtagccccagctacttggtaggctgagggaggagaatcgcttgaacccaggaggcagagattgtggtgagtcgagatcgtgccactgcactccagcctgggcaacagagcgagactctgtctcaaaaaataaataaataaataaataaataaataaataaataaayaaacccagtctgtactaaaaatacaaaaaaattagccgggcgtggtagtgggcacctgtaatcctagctagtcaggaggctgaggcaggagaatcacttgaacccgggaggcggatgttgcaatgagctgagatcgcgccattgcatttcagcctgggcaacaagagggaaactccgtctcaaagacaaacacctcatcaagcttcatttgttattaattactgcattatagtgtactgattacatggattctagaaccaaactgcctgagttcaaattctggcttatgcagaatttcatagctgtgtaatcttagaaaatgatctaaagtccatgtctcagttttttgta

SEQ ID NO: 93187 - DNA, 602 bp, Homo sapiens
aagttcgagaccagcctggccaacatagtgaaaccctgtctctactagaaatacaaaacttagccgggcatggtggcatgcacctgtagccccagctacttggtaggctgagggaggagaatcgcttgaacccaggaggcagagattgtggtgagtcgagatcgtgccactgcactccagcctgggcaacagagcgagactctgtctcaaaaaataaataaataaataaataaataaataaataaataaacaaacccagtctgtactaaaaatacaaaaaaattagccgggcgtggtagtgggcacctgtaatcctagctagtcaggaggctgaggcaggagaatcacttgaacccgggaggcggatgttgcaatgagctgagatcgcgccattgcatttcagcctgggcaacaagagggaaactccrtctcaaagacaaacacctcatcaagcttcatttgttattaattactgcattatagtgtactgattacatggattctagaaccaaactgcctgagttcaaattctggcttatgcagaatttcatagctgtgtaatcttagaaaatgatctaaagtccatgtctcagttttttgta

SEQ ID NO: 93188 - DNA, 743 bp, Homo sapiens
tttcttatgtagagttatttctttattccgataattctcatggaagatagtgtaagcaggtgtgtaattcatgaatttgctaatggttttctatgatgtggacagattaagtgatagcaatatataactatcaattttgtttcaactttatatatggcggtaattaatttattggcctttgtagctaagtgggcataaagtgtttatattcagactatgatattagtgccccaaactctatttctrtttcttccacttaattttatttatttatttcttcttccacaaattttaatcttgttttacttttgtttattagagaatttagcttaaagtggtggggttggggggagggcattaggactttaatttttaccaagagatttgagaatttgagtaaatgctaatatcagtatatagttttcaatagcctgtgcaagcctactgtcttcatgttcatcttagctaatcagtttacagaatgtaggatttagcatttgataggtattgatataattttaacacattaatagtatatagagtggtaacactataaagtcaggtatgtaaccatattatttccagaatctaaaatataaaggataggcatgtactataagttattatacagtttcacattaatgctcaagggatcttataacatggccactgacatctaggttttttttttctcttgcctttttttttttttgggagctctttgggtccacgtcacccatata

SEQ ID NO: 93189 - DNA, 782 bp, Homo sapiens
ttttactcttagatcagagacgtggatgataatggtagaatagttttaaattttcagagtggttttgtgtcagatgtaacataagcagggtgaagtgatggagagcaagggctttggagacagattagttttcaaatcctggttccaccatgacatgatgtggccgagagaaagccagctttgaagtcaattaaccctacagggagggttgctatgagagagttcaaggagggaacgtggggaatcacccaaccctgtttctggcacaccacggttgttgaatagcagtcagttccttgcctctcccaccctcccactctcacaacatccatgtggaggagacaggaagaattatcagcctccttttataagaggacaaaccgagtcccaaagatgttaacttatttacaatcactgacgctaataagcagtggaccaagatcatctgactttcagctcagtgacagtgrctctccataatgactaaatctctacatgaacaccaagagaatcattatgtgggattttagttttagttgaggtcagttgtttcattctcacagggcttcatacaatgtgatatgttattttctttgatggatttatcatgatccaaagtctgttcttcaactttgtaggttcatgaacatgattttcagggcacacagagtatattagcctttctggaataaactcacattaattaatttcacaaaggaatttccttgagaagactctttcttaaatatctctgcaaacctagataggatctagaatgaaac

SEQ ID NO: 93190 - DNA, 1194 bp, Homo sapiens
taaagatggcagagcagcaagttagaagagtcctgggttcctggaggttgtcagatctccttctttgtctcagactgtaatgttcaaacttttcatgagggagaaataaacttctaacttacctaatgcactgttacagtgggtctctctgttataacagtggaactttgatgttgccaaaacttataaacagcaaaatgggagcttctcaaaatttaatggacacaagaatcacctagggatcatgttaaaatgctgattctgattcagtagaggtgatagatacattttatttatcagcttggctaagctattgtgcccagtgtttttgtcaaacattagtctggatgttgctatgaaggattgtagaagtgactaatataatcagttgactttaagtaagggagtttgccaccagagatgtggatggaccgttaatggaccatgatgcactgtcaattgaatgcctaaaaagtaaaaagcaaagtttcccagagaagatagagtcctttgttaatactgctacatagaaatcctgcctgagtttccagcctgctggccttttctgtaaatttcaggtttgccagctcccacaactgcatgtgcctgttctttaaaataagtctyttcacacacacacacacacacacacacacacacacacacacacacacacactctctctctctctctctctctctctctatatatatatatatatatatatatataaaaatagatctatatacatgtatatatacacacataggcatatatacatatattttattgattttgtttctttgtttttatacctactgtttaatacagtaggtataaagcaaatcctgagagtttgcatttctagttagttcccaatgctgctgctctgagcactatgctttgcatagtaagattctagaaaactgtttttcaggaatcatatgcttcagtccagactttgacagaaattttctgtgaaacctcaggaatgccatgcagtacgtagctctcacttcctcatctatgagatgagaatgttggattatatgatccctgtgaccctctcaggatctaatacatggtaactttgtgaccctcttgccaagaggtccaggtgggaaggcaacatggggatagagcttgtggcacggcagaccccagagctgtatcaaagtgtgtggtcatcatgca

SEQ ID NO: 93191 - DNA, 969 bp, Homo sapiens
tgcatttcaattgaaggcccttgtagcatattttttttccatatttagagcattcctgtggaaaacaacacaagtaggaaaacaacatacagtaaaagagaaatatttttaaaagcaagaattatcagaaatgggattattgagaatttttattgcacacaataaaggtataagtgggatcataaagcaccatgcagaaataaaacccattgactatttgggctttatcttgaatccagagagccaatgaacttgaactcatatgtgacttccaaggcaactagctgtaaccacagttactactgtctccaaggcccaagaggagattttcagcctggataagtatttcatagagacatttgagccaggtgctttatgtagtaggatcggtgattcagtgtgtggcatttaacaatgtgagtcagaattaaatgaatgtcttagtattatagttggggagttaatggaagggccatctcttggatgagtcattgaacatagatcctgctctgaaccacttgctaaaaattgtgcaatcattttcacaagcagataagatgataaccttgatgttctgccctttctaagttcacatgatcaagctgctcatctctctgtttccccaaaatagatttgagctataaaaccacctttcatctttattcattatttttttccacatgtgttctgtgccttattcattacatgtaaataatgcaattatgatattttaactcttacagtattctattagaggtaaactgcatttgttatttatagtctttcttttctccaaaatacttgaggcagcttataaaagaacagatatgctaaaactattcaaascagggcaaatgaatgtgattacgggctatgctaggtcaagagagaatttataggctaaagatagcttctgaaactgagcatcaaatttagctttgagcttcctgaaaattattttcaacatgc

SEQ ID NO: 93192 - DNA, 969 bp, Homo sapiens
tgcatttcaattgaaggcccttgtagcatattttttttccatatttagagcattcctgtggaaaacaacacaagtaggaaaacaacatacagtaaaagagaaatatttttaaaagcaagaattatcagaaatgggattattgagaatttttattgcacacaataaaggtataagtgggatcataaagcaccatgcagaaataaaacccattgactatttgggctttatcttgaatccagagagccaatgaacttgaactcatatgtgacttccaaggcaactagctgtaaccacagttactactgtctccaaggcccaagaggagattttcagcctggataagtatttcatagagacatttgagccaggtgctttatgtagtaggatcggtgattcagtgtgtggcatttaacaatgtgagtcagaattaaatgaatgtcttagtattatagttggggagttaatggaagggccatctcttggatgagtcattgaacatagatcctgctctgaaccacttgctaaaaattgtgcaatcattttcacaagcagataagatgataaccttgatgttctgccctttctaagttcacatgatcaagctgctcatctctctgtttccccaaaatagatttgagctataaaaccacctttcatctttattcattatttttttccacatgtgttctgtgccttattcattacatgtaaataatgcaattatgatattttaactcttacagtattctattagaggtaaactgcatttgttatttatagtctttcttttctccaaaatacttgaggcagcttataaaagaacagatatgctaaaactattcaaagmagggcaaatgaatgtgattacgggctatgctaggtcaagagagaatttataggctaaagatagcttctgaaactgagcatcaaatttagctttgagcttcctgaaaattattttcaacatgc

SEQ ID NO: 93193 - DNA, 791 bp, Homo sapiens
atgaagtactgcttgagtgacttttacataagggcaggcaggttctgcctacatgttgaaaaaaagctttactggtttccatattktttctcctggaccctaaagtgagccacggataaaatgacagtaattaggatattcagtaggcattacctgagctgacaactcccacagggaaggtggcaaatgccagggcaaaagctaggaagtgacagtggcctttgcacagtaaattgaaacctttgtgccaggcctctgctgatctcgcggggggaaaaatcactacaaaaactcagaaaactcctttacccattgaagcccatatttgtctcggcaaacactcatcttcctgtctgtgaaccattatccctctctgtctatctttcctcacactttgtccccttcacatgcttgctaattttactttggcctttctctctacttccctgagtgaatttcttctcaccgttttatgtatctcatcatcttaggcttttcatcgtccctctgtcctttgtgctctataaatgtttcaatgcttacaagtcatatgaggaaaaggagagtcctcggacctatcaagtaatctaattcggtatctctcatctcctctgcccaaatgacttgagctctgttcccctaacatcagcagaatgtcttcaaagaattaacttgcctcccaaatcagcaagggtgagcccaaacagctgtgtctgaggattccacttatgcaagaattctgaaaataaaggctgaaagggttttgtttaaaatgtacgtcaaaaagacca

SEQ ID NO: 93194 - DNA, 791 bp, Homo sapiens
atgaagtactgcttgagtgacttttacataagggcaggcaggttctgcctacatgttgaaaaaaagctttactggtttccatattgtttctcctggaccctaaagtgagccacggataaaatgacagtaattaggatattcagtaggcattacctgagctgacaactcccacagggaaggtggcaaatgccagggcaaaagctaggaagtgacagtggcctttgcacagtaaattgaaacctttgtgccaggcctctgctgatctcgcggggggaaaaatcactacaaaaactcagaaaactcctttacccattgaagcccatatttgtctcggcaaacactcatcttcctgtctgtgaaccattatccctctctgtctatctttcctcacactttgtccccttcacatgcttgctaattttactttggcctttctctctacttccctgagtgaatttcttctcaccgttttatgtatctcatcatcttaggyttttcatcgtccctctgtcctttgtgctctataaatgtttcaatgcttacaagtcatatgaggaaaaggagagtcctcggacctatcaagtaatctaattcggtatctctcatctcctctgcccaaatgacttgagctctgttcccctaacatcagcagaatgtcttcaaagaattaacttgcctcccaaatcagcaagggtgagcccaaacagctgtgtctgaggattccacttatgcaagaattctgaaaataaaggctgaaagggttttgtttaaaatgtacgtcaaaaagacca

SEQ ID NO: 93195 - DNA, 656 bp, Homo sapiens
ttttatttttaacttgaaaccatattgagatatcccattagtttgctttcctactgacccacrtaactgttaggcacagtgcaggctattgaccagtgtcagctacaaaggatcagtatctgtgccctgcaggttgttgtatacggtagggccccgccaccctgctctgcagtggaacacagaaggtcaggcattctctcagatgcaaataacctgatgtgggtatcatggactaggagtagttttagtagacaatgaatactgctatctaatgacctccagaaacaagggctaccaaatctggatctgaaataatcattttaatggaaatcccccaaatttagggagatttataggaaataatgataaacaataaatcatttagttactttgggtgcacacttcacaaccagttttaacagggcttattgctcaaaattagatggaccgcaggtatgtgtgtgtgtgcacatgcctatgtgtatgtgtagccaaacaagatatatagttacatgcctgctttacatttttcctgggctatttttattgccattgcattttatgatgtggaattgtagggaatcagttacccattcattgccctgttagggaactctcaaatttcctcctgaagagaatcttggctctgcctgcag

SEQ ID NO: 93196 - DNA, 1867 bp, Homo sapiens
atttttttaatgtttgcaatttagaatattttgccacttttcttgcatcagtctccattttttcttaagttataattggagcctttgcttttacaactgcacgttctttaccctctctgcctactccttttctagtgaaatgggctgacaaaacaaataattcaatgcactaaaatggtgtctagagtaaaggtaagtagattttgagtgaaaatatgtattgctctttaagaactaggtttttgttgttggtggtgttgttgttgttgttttccctgagatggagtttccctcttgttgcccaggcaggagcgaagtgcaacagtgtgatctcggctcactgcaacctctgcctccgggttcaagcgattctcctgcctcagcctcccaagtagttgggattacaggcatgcaccaccacacccagtgaattttgtattttctttttctttttatttttttagtagagacagggtttcaccatgttggtcaggctggtctcaaactcctgacctcaagtgatccaccctcgttgttctcccaaagtgctgggattaggattacaggcatgagccaccatccccagctgaactaggtctttgacatatattcctgatcttgaccttttaattataaaaaggatacaattttttcttccatttttaaaaatttttaattatcatggatacataatagttgtacattttcatgaagtacatgtgatagtttgattcaagaactcaatgcataatgatcaaacagggtaattgggctattcataacctcaagcatttactatttctttgtgttagggatgttccagaaattataaaaatattttcataataggagagttggaaaaaaagtagaaagtttaaataattgtaatgccatttgattgaagacaatttgatttctgtgtctcaaagaagctgaggttgtcaaactggtggacttcggtagtatggtcatctggatcggtcactgctcacttaagacagactttaagaaggaactctcttactcacaggaaatccgactccctattcctgcagtctgcaacttgacctcttcctcacagattctatgctattcataagtcagcttctcctagccccagaaagtccaagtttataaggacagtcataggtagagaggtacacccttttcctttgctgatcccacactaatttgctgttcttcaaattttggtacttttcaaaagcaaacagtcaccctcagtttacataaacatatgtaaagaaatgtcgttactttcaaccttaagaaatcagttggattacaaccattttctggtcagtggttccagtggaaatcaaatgatttagaaaaaaattattcagccttggttaaagttgagaaaaaatgtagcatccggtagtatctaataagccttgaaaggaagcatcctgctgacataaatctgttataactgggttctagaaagataaagaataaaagatgagaaaataggaacattccttgaaaaccagatcacagtgaacaaagggcaatgataaaagattatcccggtgaataaaaggtctctcaatttacacctgtatggttatgtcttattatctttactgagagcgagcagtgtgctttctgagattttttaactgttaaccacaaagcttctrtttaaagtctcaggaatataaccctcaaccacaaagcatataaaaatcagaacactcataaaaattttgatttatgaaataaaattcattcccataatttgtaaaagaacactctaagccttctctccaataaccttttttatttggccatcaatcaccaccacctgttaattggataaacttacacctttctgtccagtttt

SEQ ID NO: 93197 - DNA, 890 bp, Homo sapiens
taggatttgcatttctaactgtttcccaggtgatgctgacactgcaggtctggggmcagcactctgacaaccggtgctctagaatctttctttttcttaacattaaggaagggagggcactaaaaaatatgtcaggcttctccattgactccaaaatcaaatccaaactcttcatccaaaagcccccataatccaaccccgtcatttcccactacttctcattaggctataaaatcaaaccactatgccctaaacacacctgagatttcaaacatcaggacttccgctggatttcctcactccggctatgccacttccttctacttcttcatgccaaatcctacccagccttcaaggtcctcaaatgctatttcctccataaagcctcctgatctaccactactcaaaaagctacctctccctccccccctcagggctgcacagcacttttcgttcctccccaatgacaggcaccatctgtacctggtccagcgactctaccggtgggtggtgtatcttcgcctgtagactgggagtttcttgaggtcaggggagtgacttgcctatctttgcctcttagccttagcagatccccagtagacagctgacactcagaaccgaccaaaagaaggaaggaatgggacctcctgaggaagggcacagaactgtcctgtaaatggaaactagaccggacgcacgccaagccgatgacccacagtaacaggtgttctccatctctgatgtctgtgattcatcctgcacagctgcgcgcacacagcacacgcatacacaggctcccagaatacggcgccccacacgctgtaccgcccgtcgcgttctggacgccccggcgaccacacacaccgagacacacctcagcgacaacctgg

SEQ ID NO: 93198 - DNA, 890 bp, Homo sapiens
taggatttgcatttctaactgtttcccaggtgatgctgacactgcaggtctggggccagcactctgacaaccggtgctctagaatctttctttttcttaacattaaggaagggagggcactaaaaaatatgtcaggcttctccattgactccaaaatcaaatccaaactcttcatccaaaagcccccataatccaacccmgtcatttcccactacttctcattaggctataaaatcaaaccactatgccctaaacacacctgagatttcaaacatcaggacttccgctggatttcctcactccggctatgccacttccttctacttcttcatgccaaatcctacccagccttcaaggtcctcaaatgctatttcctccataaagcctcctgatctaccactactcaaaaagctacctctccctccccccctcagggctgcacagcacttttcgttcctccccaatgacaggcaccatctgtacctggtccagcgactctaccggtgggtggtgtatcttcgcctgtagactgggagtttcttgaggtcaggggagtgacttgcctatctttgcctcttagccttagcagatccccagtagacagctgacactcagaaccgaccaaaagaaggaaggaatgggacctcctgaggaagggcacagaactgtcctgtaaatggaaactagaccggacgcacgccaagccgatgacccacagtaacaggtgttctccatctctgatgtctgtgattcatcctgcacagctgcgcgcacacagcacacgcatacacaggctcccagaatacggcgccccacacgctgtaccgcccgtcgcgttctggacgccccggcgaccacacacaccgagacacacctcagcgacaacctgg

SEQ ID NO: 93199 - DNA, 890 bp, Homo sapiens
taggatttgcatttctaactgtttcccaggtgatgctgacactgcaggtctggggccagcactctgacaaccggtgctctagaatctttctttttcttaacattaaggaagggagggcactaaaaaatatgtcaggcttctccattgactccaaaatcaaatccaaactcttcatccaaaagcccccataatccaaccccgtcatttcccactacttctcattaggctataaaatcaaaccactatgccctaaacacacctgagatttcaaacatcaggacttccgctggatttcctcactccggctatgccacttccttctacttcttcatgccaaatcctacccagccttcaaggtcctcaaatgctatttcctccataaagcctcctgatctaccactactcaaaaagctacctctccctccccccctcagggctgcacagcacttttcgttcctccccaatgacaggcaccatctgtacctggtccagcgactctaccggtgggtggtgtatcttcgcctgtagactgggagtttcttgaggtcaggggagtgacttgcctatctttgcctcttagccttagcagatccccagtagacagctgacactcagaaccgaccaaaagaaggaaggaatgggacctcctgaggaagggcacagaactgtcctgtaaatggaaactagaccggacgcacgcyaagccgatgacccacagtaacaggtgttctccatctctgatgtctgtgattcatcctgcacagctgcgcgcacacagcacacgcatacacaggctcccagaatacggcgccccacacgctgtaccgcccgtcgcgttctggacgccccggcgaccacacacaccgagacacacctcagcgacaacctgg

SEQ ID NO: 93200 - DNA, 733 bp, Homo sapiens
tccctattcatacacccctccccttttgaaacccttaataaaaacttgctggttttgtggttcaaggggcgtcatggaacctgctgatatgtgatgtcacccccggagtcccagctgtaaaatttctctcttttgtactctactctttatttctcagactgaccgacacttagggaaaatagaaaagaaactacattgaaatattgggggctgattcccccgatacagaaggacagaagaagatcagagagaacttactcatgatgctgcttctgaagctgcttctgaggccttccaatctcttttagttcaaagaactaagcatgccaaattamcatactttgggatataattttctgggccccaatggtacacaaggagaaaggtcccaaggtaaggatatatatgagcttatgggcaaagttgaatgaattgtctggctggttgggggccttggagggaaaagattggaagaccagagacatgaaggcatggggaagaggtgtggcaagtctacaaagtggtttttgaggtggatgaacattgaaaatgaatacggagtgtgaatatctttgtatcatatgtaagcacacatcagaaatcatccatctgcaaagaattacacaagctagtagaggaaattacttggccaatagatattagacaattttgttgttggctatcccagcactggcatgatgggtccatgaacagaggagcctccatggcagag

SEQ ID NO: 93201 - DNA, 721 bp, Homo sapiens
ctcccgacctccctcaccaacatctcccctacatctgcatttcaagaaaaccatgatgacaagcattgcagaggtacaccatccacctctctcagtcaacaattttcctcaggaagattgcatgacttcacttaacacatgttgaatatttgaaatcacaaaccacaggtttaaaagttagagccctctgtattgctgtcagattctcagtatgtttcctcacttaccctctctccccctcttttacacacacataatttttttttgcatgatattgattggaatctataacccagaaagactcatagacagtgcctggtaaaccagagcatatgacagtgtgagtcatccagcaggctgcaaaagaaggaaagctgggtcacaaacttgcttttcagcactatcttgctacagaggaattgctctgcctaatttgattaaaatkgcatgtgacataattgtcttttgaaaagaaaacgtgcttttagtcactacattaggatgcaattttgtgattaacatgagcaatttcagaacagatttctctcatatgcaatggtctaatcaaattaaggtaaatgaatacaacattcgttaaagtgatttattcaaatccattaaaatgaaacatgaaatttaatcaaagtcatagggatgcatgtatgccatacatgtaaatcagaagtggctatctctgtatttatgtaatccagtcacatct

SEQ ID NO: 93202 - DNA, 721 bp, Homo sapiens
ctcccgacctccctcaccaacatctcccctacatctgcatttcaagaaaaccatgatgacaagcattgcagaggtacaccatccacctctctcagtcaacaattttcctcaggaagattgcatgacttcacttaacacatgttgaatatttgaaatcacaaaccacaggtttaaaagttagagccctctgtattgctgtcagattctcagtatgtttcctcacttaccctctctccccctcttttacacacacataatttttttttgcatgatattgattggaatctataacccagaaagactcatagacagtgcctggtaaaccagagcatatgacagtgtgagtcatccagcaggctgcaaaagaaggaaagctgggtcacaaacttgcttttcagcactatcttgctacagaggaattgctctgcctaatttgattaaaatggcatgtgacatrattgtcttttgaaaagaaaacgtgcttttagtcactacattaggatgcaattttgtgattaacatgagcaatttcagaacagatttctctcatatgcaatggtctaatcaaattaaggtaaatgaatacaacattcgttaaagtgatttattcaaatccattaaaatgaaacatgaaatttaatcaaagtcatagggatgcatgtatgccatacatgtaaatcagaagtggctatctctgtatttatgtaatccagtcacatct

SEQ ID NO: 93203 - DNA, 1180 bp, Homo sapiens
ggtgggtggatggtgtttctcagcagtacaaaaatgtgaagtggagtcaacacggaacggactcaactgttcaggcagctagtgagaacttagatgaggcctcctcggtttcattcaaagagaagaaatatttatgctaaatttgcaaattaattttgaactagtgaaataaccataataagcagggtgttatatttgacaatatctgcttaagggaaacattttaacgtttgcactttagctgaggtattaatgtttttgcgagtaccaatacttaattttagatatgtatgaaataactgcaaatcaatataaacagctcagtgttgatgctctggggtaaactttcataagagggctattttagacaaaagcaattattacaaaacaaccatttggaaaattattctcaaaataactggggcttttctggtgcatttttgctatcattttatatgcaggctgtctaaacgctgaaggcgagtaattaaggcaattattccattaattcagcacacagaattcagaataaggaagaaaacatagtttgatatttctgactttttctttttccattcttttttatctcttttctttcctttttcttttttcttataattccctctaatctttcctttatcatgactggtcagagcctttggtcacaagattgattttattcctatttgtccgtaagtgttgtaatcctgcctgacagttcttgcttaatgtagaaaccaagcaaaggttctgcttgtgctgggcctcatttccagtcatctgatgcagcactgctctcaggctattgctgtggttctcagagagccctttacccatgcacatatagaccctgtctcatcacaggtcctgaaagttctggcaaagaatgagaacggaatcaatgtcatgactttctgaattccttaaaatcgaagataactcactgaccctcttgtccactacttgaagagaccctgcatctggtacacccacatgaacctccggaaggatagtcataatcaagtaaagctatgggcagaacctgtakggagaaataggtttccaaggagaaagcctcttcttctgttttatcagttggtaaaaagccaattcctccccagaatggcctagacacatattaaaagaaatgtctcatacgatttctctgaacacagtcttt

SEQ ID NO: 93204 - DNA, 545 bp, Homo sapiens
agttaatgcttcagtgtgaggagagtcaccacccaaagcctagtagtygctgcagtacttaactgaaattctgatgaaagggtcactttctgcctggattcaagcagattccagtgattaaaatgtgcaaatgcatgtcccatgtctatatgagggaaattatgagacccttattaggaaatatctgcttcctaggggaagaacaaagtaggatttaatgtttcaagcataggctctgaattgcaggccatgtatcaatcagagaaaacttattgacagcgataacagggctttaaggagacttcttttctccagatgaagagtgattaagccagctagccactcagcttctttgagttggaaaaatgagtttaagtaagtagagttctgggaataaccctaggacaatgattaatgtacttacttcagaaaacccgcagacctttatagccccttcgctttctttctctttacctccttcctcttgtcctccctgcctttcctcctaacttctttccttttctttagtctttccttcattcctt

SEQ ID NO: 93205 - DNA, 545 bp, Homo sapiens
agttaatgcttcagtgtgaggagagtcaccacccaaagcctagtagtcgctgcagtacktaactgaaattctgatgaaagggtcactttctgcctggattcaagcagattccagtgattaaaatgtgcaaatgcatgtcccatgtctatatgagggaaattatgagacccttattaggaaatatctgcttcctaggggaagaacaaagtaggatttaatgtttcaagcataggctctgaattgcaggccatgtatcaatcagagaaaacttattgacagcgataacagggctttaaggagacttcttttctccagatgaagagtgattaagccagctagccactcagcttctttgagttggaaaaatgagtttaagtaagtagagttctgggaataaccctaggacaatgattaatgtacttacttcagaaaacccgcagacctttatagccccttcgctttctttctctttacctccttcctcttgtcctccctgcctttcctcctaacttctttccttttctttagtctttccttcattcctt

SEQ ID NO: 93206 - DNA, 545 bp, Homo sapiens
agttaatgcttcagtgtgaggagagtcaccacccaaagcctagtagtcgctgcagtacttaactgaaattctgatgaaagggtcactttctgcctggattcaagcagattccagtgattaaaatgtgcaaatgcatgtcccatgtctatatgagggaaattatgagacccttattaggaaatatctgcttcctaggggaagaacaaagtaggatttaatgtttcaagcataggctctgaattgcaggccatgtatcaatcagagaaaacttaytgacagcgataacagggctttaaggagacttcttttctccagatgaagagtgattaagccagctagccactcagcttctttgagttggaaaaatgagtttaagtaagtagagttctgggaataaccctaggacaatgattaatgtacttacttcagaaaacccgcagacctttatagccccttcgctttctttctctttacctccttcctcttgtcctccctgcctttcctcctaacttctttccttttctttagtctttccttcattcctt

SEQ ID NO: 93207 - DNA, 545 bp, Homo sapiens
agttaatgcttcagtgtgaggagagtcaccacccaaagcctagtagtcgctgcagtacttaactgaaattctgatgaaagggtcactttctgcctggattcaagcagattccagtgattaaaatgtgcaaatgcatgtcccatgtctatatgagggaaattatgagacccttattaggaaatatctgcttcctaggggaagaacaaagtaggatttaatgtttcaagcataggctctgaattgcaggccatgtatcaatcagagaaaacttattgacagcrataacagggctttaaggagacttcttttctccagatgaagagtgattaagccagctagccactcagcttctttgagttggaaaaatgagtttaagtaagtagagttctgggaataaccctaggacaatgattaatgtacttacttcagaaaacccgcagacctttatagccccttcgctttctttctctttacctccttcctcttgtcctccctgcctttcctcctaacttctttccttttctttagtctttccttcattcctt

SEQ ID NO: 93208 - DNA, 902 bp, Homo sapiens
taggagctttgagatccccatataagagtcttttgtcaagttaaaagttagaagaatagtaataaacactgcttttggggaaagttgtggcaatttgaagagctgctgataaaatagttgtcatctttccgttctctgagccctatgtattaactggctacttcaggaaaatttgcaccaagtatggaagacagcaatctgaacatcaacttctacaatttaaaactttctggaactttcttttcctatccatttgttgtttagctaacattgttggttagttccttatacatatttaccagaaataaaagggatccagaaacttctgagagggattataaagcaggtctgctatctctcctctctcctgtaagttgagaatcagctgagatttcccagaggaaaattaattccatttttgatgcttctgagcagccataatgctggaagtgtgagtgtgttcatctgagacgaggtcaagccttgccccttctcatttgccctcctttaattcttcagcggagcccaggatttcaggttctggctgacaacaagtacycctactctcccatgccttgcctctgctttgagcaaataaacctaagccgagctctgccccgaccaagcttccccatcggtggccactttttctcaccaatttcatttgtataacccctggctctccggagcatggtattgtgcatggggctagtgatgcttgtagaccaaggctgagctgcttttgttatttacattcaactgaacaaccacttaacaataattcatctctgggtttagtgaaacgattaaaatggggtcattgtcctcatggagctcatgacctgacccctgttgatagcatctgtggctctggccacaggaaggtgcataatggtgctatc

SEQ ID NO: 93209 - DNA, 723 bp, Homo sapiens
ttcccagcacagagtagggactgctgtccattgtgaagtctcttattggtgcagcaaaaaccaaaacatgtgtgtgagaacattctgttgatcctgtagagaaagcaatggaacttaaatctactaatatttcatttgcaaatatggtttcagtagatgagagacatataaaaaccacatcctcaggacccagaaggaaccattttgactcaacaagccgtaatcaccatgaaaggagttagccttagtggttaccctgaaggactgatggtaagtacaatatcctcaagtgctagtaaaggtgaagaagcagtggaatgggtaatacacaaattaaatgctgagagtgggctgggcgcggtgactcaatgcctgtaatcccagcactttgggaggccaaggcaggcagatcacctgaggtcaggagtttgagaccagcctggccaacatggtgaaaccccgtctctactaaaaaatacaaaaattagccgagcatggtggtgggtgcctgtaatcccagctactcaggaggctgaggcaggagaattgcttgaatccgagaggyggagcttgcagtgagctgagatcctgccatcgcactccagcctgggcgacaagagtgaaactccgtctcaaaaaaaaaaaaaaaaaaaaaagtagagattgaagaattgacagcctcggcaagaggaagcaatggcagcagcagcatttgcagaaagg

SEQ ID NO: 93210 - DNA, 569 bp, Homo sapiens
gggttgccagcaggatgagggtgagaagcaggatctggttggatgagagaacctggctgaggaagaagattcagaaagtaatgccatgcccccaacggtgtgctgaatgcccccgcttttgaggcgcttagtgtgtggtgagggaaagggagtgagtgacataaagcagctctgcagggcgggacccagtgagcctggcatcatttttagggtgttcctctccttcatagagcctaaaggatgcaccaagctgtgcatcagtaattattgctctgctgtctccattgttagacgccattttgggttactatccttttggcatttctttaatgatatcgggaatcaagttctgggataccattgtattactttgaatactagttcagcagctgaaacaaaggacagaaaaaaaaagtagttaaaataagagagaggtttctctctctctcaggaacagtctgagagtaagcagccagtytggacatggaggtcccgtggtggcaaggacccaggctatttccatctttgttgctcttcctcctcaacatacagcttctatctcatggtca

SEQ ID NO: 93211 - DNA, 1206 bp, Homo sapiens
  misc_feature (1)...(1206): n = A,T,C or G
tgtknnnnnnnnnnnnnnnnnnnnnnnnnnnnnnnnnnnnnnnnnnnnnnnnnnnnnnnnnnnnnnnnnnnnnnnnnnnnnnnnnnnnnnnnnnnnnnnnnnnnaagaaaatcttgtttatttgtgctttccaatatggtagccacaagccacatgaagctattgagtacttaaaattgactatttctactgagatataattttttgttttagagatgggggtctcaaattcttgcctcaatctcctgagttgctgagactcaggattccttcatgccagctcaggaattaaatttacctattaatcaatataaagtaaaagtggataaccacatcgggctcaagaatatcttattgggcagtgcagtttgaggtaaatgttgcttctttagccagtgtattagttcattctcacattgctataaaaaaatgcctgagactgggtaatttattaaaaaaaagagatttaattggcttatggttgtgaaggttgtatgtaggaagtatgacagcatctgcttggtttctagggagtccttaggaaatttacaaccatggtgggtggcaaacaaggagtcagcacttcacatggctgaagcagaaggaagagagagaggggagtggtgccacacacttttaaaacaaccagaaaaaaatgataactgactcactatcagagaacggcactgaggcagtggtgcctaaccatttttgagaactctaccctcatgatccagtcacttcccaatggacacccctctctaagactggggattacaatttgacatgagatttggtaaaccttggtgactaattagagtctggctgatatggtttgacacagagctaaatcatatgaaccaaactctaattagtcaataatttctgttaaaaattatccctcaaatatcttccaaatcagccttctctttcttatactgatgaatgcttcttttaattaaatttttatttttttcacctgtattactgtaccatctttctaaatgaactcttgtcatttaaaaccaaccctaaattcatctcctgagatgtctgtaaaatgtagatcttcgtcacttctatatttgcaaactttcagctcccccaagttgttaatattttggccccagattctccctttagcctcacatggctgccaaatcttcaaaactcatttaccttccagacataaagcttcttctaaaa

SEQ ID NO: 93212 - DNA, 1206 bp, Homo sapiens
  misc_feature (1)...(1206): n = A,T,C or G
tgtgnnnnnnnnnnnnnnnnnnnnnnnnnnnnnnnnnnnnnnnnnnnnnnnnnnnnnnnnnnnnnnnnnnnnnnnnnnnnnnnnnnnnnnnnnnnnnnnnnnnnaagaaaatcttgtttatttgtgctttccaatatggtagccacaagccacatgaagctattgagtacttaaaattgactatttctactgagatataattttttgttttagagatgggggtctcaaattcttgcctcaatctcctgagttgctgagactcaggattccttcatgccagctcaggaattaaatttacctattaatcaatataaagtaaaagtggataaccacatcgggctcaagaatatcttattgggcagtgcagtttgaggtaaatgttgcttctttagccagtgtattagttcattctcacattgctataaaaaaatgcctgagactgggtaatttattaaaaaaaagagatttaattggcttatggttgtgaaggttgtatgtaggaagtatgacagcatctgcttggtttctagggagtccttaggaaatttacaaccatggtgggtggcaaacaaggagtcagcacttcacatggctgaagcagaaggaagagagagaggggagtggtgccacacacttttaaaacaaccagaaaaaaatgataactgactcactatcagagaacggcactgaggcagtggtgcctaaccatttttgagaactctaccctcatgatccagtcacttcccaatggacacccctctctaagactggggattacaatttgacatgagatttggtaaaccttggtgactaattagagtctggctgatatggtttgacacagagctaaatcatatgaaccaaactctaattagtcaayaatttctgttaaaaattatccctcaaatatcttccaaatcagccttctctttcttatactgatgaatgcttcttttaattaaatttttatttttttcacctgtattactgtaccatctttctaaatgaactcttgtcatttaaaaccaaccctaaattcatctcctgagatgtctgtaaaatgtagatcttcgtcacttctatatttgcaaactttcagctcccccaagttgttaatattttggccccagattctccctttagcctcacatggctgccaaatcttcaaaactcatttaccttccagacataaagcttcttctaaaa

SEQ ID NO: 93213 - DNA, 1825 bp, Homo sapiens
tttgtctaagttgaaaatagaaacaaatatccatagatgtgttttctaaaagcttaaattatccagagagagagagagagaacttgttgtcttaagcaaagtacttatgatatatataagaagcacttctccccaagaatggagagaatgatgttaagcctagagtaaggagaataaggaaaaatgagtaattattacaccaggagagaggagccctccaccatgcttcctcatggagcaactggggtagtagagcagccctagagatatttgtagcacctgagagtgaaagcaacctgtgtcctgcttctcagaaatagctcyagtgagagaatggttccatgagatgtccagagagctcaactttcaaccctgggtgaagctgattagtgatttcagagggtttgtgaggccaatggtgctcaggaaatttggcaaaacacctaaactatatctaatattttgaactatatgaaaatgaaattgtatttttgcacacataattgtctcctaatattcttaccttttatagtaatagcaataaaaaagtattattatagtgtatgccatgtattagtacatttgcaactttagataatatttctcccccttcacaatgtaattttaggctaacgactaaagcaaattctattcctgacttaaaaatctgggccaatgtgaaacttaacatgatctaaagataaaacctttagaaaacaataacagtaagcttcacaatgttatagtaaattttcctaagagaaaaaggaggaatacaaaaatgttcaatatcataatgcaatatgaaacatcagcagagatcttacagccattaaaatgagcaaagaaaatattgtgcaaatgcatgcctataaattatgtaaaattgacaagtttcatgaaagatgcatattatcaatatgacacaaaagaaataaaaaatgtgtctattcctatatctattaaagtaattgaaattgaggttaaaagctttcctgcaaagaagtctccatggaactcagatgacttcagtggtgaacttcaccaaattatacataaagaaataatagcaattttggaaaaatctttaataacatgatgagaaacgacaatttttcatgtcattttatggatcctgtgtttcctatgtaccaaattaaccaaatcggggctcccctcttccccagcctgctgttgtcctcactgcctcttcctatcaggaagatggtgaagccagcatggttttccccaggccagtcttaaggtatctaataaagtctgaactcttccctacaaaaatataaataaaataaaatctaacattaatattcccgtaagcataaactcaaaatcccttaagatgttttagccaaaggaaatccagcaattcatgaaaaaaggtatacaccatgaccaagttgtatttatctcagaaattaaagaaaaatctatagataattataataatacaattctaagttattcctctctatgattaaaatcttcctgaaaaggtccatcctctccattctattcatcattgtgctgggatcttaactattgctataaggcaagaaaaggaactaaaaggctaacaaattggaaaaataaacgaaataactttattgagatatgacatactcatgtagttagaaaagcctaggaaatttacaaaaatgctgctagaactcacatatgaggtaaagatgttttaagatatactatcaacaaacatttgccatttctatatgctctcaatgaacaatattaaattgaattttaaagttttaatgtaaatgccatttaaagtagcttcaaaaacatt

SEQ ID NO: 93214 - DNA, 1825 bp, Homo sapiens
tttgtctaagttgaaaatagaaacaaatatccatagatgtgttttctaaaagcttaaattatccagagagagagagagagaacttgttgtcttaagcaaagtacttatgatatatataagaagcacttctccccaagaatggagagaatgatgttaagcctagagtaaggagaataaggaaaaatgagtaattattacaccaggagagaggagccctccaccatgcttcctcatggagcaactggggtagtagagcagccctagagatatttgtagcacctgagagtgaaagcaacctgtgtcctgcttctcagaaatagctccagtgagagaatggttccaygagatgtccagagagctcaactttcaaccctgggtgaagctgattagtgatttcagagggtttgtgaggccaatggtgctcaggaaatttggcaaaacacctaaactatatctaatattttgaactatatgaaaatgaaattgtatttttgcacacataattgtctcctaatattcttaccttttatagtaatagcaataaaaaagtattattatagtgtatgccatgtattagtacatttgcaactttagataatatttctcccccttcacaatgtaattttaggctaacgactaaagcaaattctattcctgacttaaaaatctgggccaatgtgaaacttaacatgatctaaagataaaacctttagaaaacaataacagtaagcttcacaatgttatagtaaattttcctaagagaaaaaggaggaatacaaaaatgttcaatatcataatgcaatatgaaacatcagcagagatcttacagccattaaaatgagcaaagaaaatattgtgcaaatgcatgcctataaattatgtaaaattgacaagtttcatgaaagatgcatattatcaatatgacacaaaagaaataaaaaatgtgtctattcctatatctattaaagtaattgaaattgaggttaaaagctttcctgcaaagaagtctccatggaactcagatgacttcagtggtgaacttcaccaaattatacataaagaaataatagcaattttggaaaaatctttaataacatgatgagaaacgacaatttttcatgtcattttatggatcctgtgtttcctatgtaccaaattaaccaaatcggggctcccctcttccccagcctgctgttgtcctcactgcctcttcctatcaggaagatggtgaagccagcatggttttccccaggccagtcttaaggtatctaataaagtctgaactcttccctacaaaaatataaataaaataaaatctaacattaatattcccgtaagcataaactcaaaatcccttaagatgttttagccaaaggaaatccagcaattcatgaaaaaaggtatacaccatgaccaagttgtatttatctcagaaattaaagaaaaatctatagataattataataatacaattctaagttattcctctctatgattaaaatcttcctgaaaaggtccatcctctccattctattcatcattgtgctgggatcttaactattgctataaggcaagaaaaggaactaaaaggctaacaaattggaaaaataaacgaaataactttattgagatatgacatactcatgtagttagaaaagcctaggaaatttacaaaaatgctgctagaactcacatatgaggtaaagatgttttaagatatactatcaacaaacatttgccatttctatatgctctcaatgaacaatattaaattgaattttaaagttttaatgtaaatgccatttaaagtagcttcaaaaacatt

SEQ ID NO: 93215 - DNA, 1825 bp, Homo sapiens
tttgtctaagttgaaaatagaaacaaatatccatagatgtgttttctaaaagcttaaattatccagagagagagagagagaacttgttgtcttaagcaaagtacttatgatatatataagaagcacttctccccaagaatggagagaatgatgttaagcctagagtaaggagaataaggaaaaatgagtaattattacaccaggagagaggagccctccaccatgcttcctcatggagcaactggggtagtagagcagccctagagatatttgtagcacctgagagtgaaagcaacctgtgtcctgcttctcagaaatagctccagtgagagaatggttccatgagatgtccagagagctcaactttcaaccctgggtgaagctgattagtgatttcagagggtttgtgaggccaatggtgctcaggaaatttggcaaaacacctaaactatatctaatattttgaactatatgaaaatgaaattgtatttttgcacacataattgtctcctaatattcttaccttttatagtaatagcaataaaaaagtattattatagtgtatgccatgtattagtacatttgcaactttagataatatttctcccccttcacaatgtaattttaggctaacgactaaagcaaattctattcctgacttaaaaatctgggccaatgtgaaacttaacatgatctaaagataaaacctttagaaaacaataacagtaagcttcacaatgttatagtaaattttcctaagagaaaaaggaggaatacaaaaatgttcaatatcataatgcaatatgaaacatcagcagagatcttacagccattaaaatgagcaaagaaaatattgtgcaaatgcatgcctataaattatgtaaaattgacaagtttcatgaaagatgcatattatcaatatgacacaaaagaaataaaaaatgtgtctattcctatatctattaaagtaattgaaattgaggttaaaagctttcctgcaaagaagtctccatggaactcagatgacttcagtggtgaacttcaccaaattatacataaagaaataatagcaattttggaaaaatctttaataacatgatgagaaacgacaatttttcatgtcattttatggatcctgtgtttcctatgtaccaaattaaccaaatcggggctcccctcttccccagcctgctgttgtcctcactgcctcttcctatcaggaagatggtgaagccagcatggttttccccaggccagtcttaaggtatctaataaagtctgaactcttccctacaaaaatataaataaaataaaatctaacattaatattcccgtaagcataaactcaaaatcccttaagatgttttagccaaaggaaatccagcaattcatgaaaaaaggtatacaccatgaccaagttgtatttatctcagaaattaaagaaaaatctatagataattataataatacaattctaagttattcctctctatgattaaaatcttcctgaaaaggtccatcctctccattctattcawcattgtgctgggatcttaactattgctataaggcaagaaaaggaactaaaaggctaacaaattggaaaaataaacgaaataactttattgagatatgacatactcatgtagttagaaaagcctaggaaatttacaaaaatgctgctagaactcacatatgaggtaaagatgttttaagatatactatcaacaaacatttgccatttctatatgctctcaatgaacaatattaaattgaattttaaagttttaatgtaaatgccatttaaagtagcttcaaaaacatt

SEQ ID NO: 93216 - DNA, 822 bp, Homo sapiens
agacaccaaagctgtcaaagtctaccaacaaaacttaactayacacaatacacaatactacctattttagacttcagaataaccttggaaagttagaccaatcatgcctggtaggcagtttcatggtaaaggtgttaggctctctggactgaggattggggtcaagactcaaagcaaggcacagaattctagaatagaggtctctggtccaccttgagctcatccatatgctctgtcacccaaagttccctccctcacctgacacagagccaagagcactctctagtcttgtttttttctgaggctgagatagaacaagtggttcccagtatctggggacatgcccaattaaattaagaggtaggcaggaagtcacatgttaatgagtgagtcagaacttattactagggacacagaaacaggattcatctaagaagaaagaaaaagaaaaagatcaaggcatgtcaatgactccatatggcgtgagtgaccaagtagaaaactgagataagatctcagacagggaggagagaggtgtaagacaaggacccaggtgaacaggaaaaaatggggtacatgtctgaaaacagtggtttaggcacagactcagatacaggcaacatccaggctgacttgatagtgaaacccttcaacctgttactattccacttgatgaagtttttaggttgtggttagatgagagatagggcctgtggctcccagcttgcctgttttagatgtcagttttgggcaggcagactaaaggacaggagccaagaaaaaaaaatgcctcgctcattatcttgctttgtgccggtcctg

SEQ ID NO: 93217 - DNA, 588 bp, Homo sapiens
aagcttttgtcttaatttattttacttaaaaaatcatatctaacattttatttattactaaaagattttatttgttgtaaaacaatttatttgttactaatagtttcttttttttctctaacttcttcattgattaaatgacacaatgaaagagttgatagaagatgggaatcggtataagaatttaccatgcctttagrcaaactgaacacaactgtttccttctagtgatagctgttacaccatggctatattcctgcaatttgtgacaataaatgctttgatcatactgtgaggcaaaactttactccaaaattaaaaatttttttctagaaaagcgcatgtcatggattgaatcaagtactggagcattagtatatttcccaaaaatttcatatgtctacatctgtatctatcctccattattcctccctttagttgtgagagccatgaagaactggctaagcctgagatcatcctgcaaaggacatacagagtgaagatagccagattttaagatcactgtcatagaaaaaagcaaaaccctgttagatatagactgtctgcttagaatatcatatagctcta

SEQ ID NO: 93218 - DNA, 588 bp, Homo sapiens
aagcttttgtcttaatttattttacttaaaaaatcatatctaacattttatttattactaaaagattttatttgttgtaaaacaatttatttgttactaatagtttcttttttttctctaacttcttcattgattaaatgacacaatgaaagagttgatagaagatgggaatcggtataagaatttaccatgcctttaggmaaactgaacacaactgtttccttctagtgatagctgttacaccatggctatattcctgcaatttgtgacaataaatgctttgatcatactgtgaggcaaaactttactccaaaattaaaaatttttttctagaaaagcgcatgtcatggattgaatcaagtactggagcattagtatatttcccaaaaatttcatatgtctacatctgtatctatcctccattattcctccctttagttgtgagagccatgaagaactggctaagcctgagatcatcctgcaaaggacatacagagtgaagatagccagattttaagatcactgtcatagaaaaaagcaaaaccctgttagatatagactgtctgcttagaatatcatatagctcta

SEQ ID NO: 93219 - DNA, 649 bp, Homo sapiens
aaatgtattcttatcattgtaggtgaactctgatgcctctttattgtattgacaggtccttgatagagtataaagataagaaactagattttgatgcaggatgtgcagaattagtttaggtggtggcaagagtaaaagtagatgcagagaagtgaggaggaaaaatggcccagattgggatggaattagttcccttgcttagggatggtgaagtgaatgtactttcaaggtcagtgcaaggctggttttgaggtgggtggctgcacctccctaggatggagagaagtaatgctgtcatttctgggggcgtctaggctactggagtagagtgaccgtgggtggaggatcatgatgaagaccattactgacaaggtacctcaggaaggacagcaaggagtctggacagaggtggctgccctaggaagatgaaggcagcagctgcaggggtgaaaggaatagrgagggcatttgcaaagagaacagcagcacctatgagaagagagggcaaggcttgctctactgcttctgctgaaggttatatcaaagagcaatcaccaagcctgcagctttgtgttaagtgttctgttggggtctggtgtaacataagtgggcaggaggggtctctgtggaggaaaaaggggaggtgcca

SEQ ID NO: 93220 - DNA, 528 bp, Homo sapiens
gcatattcagaatttgcttgaggcaggaacaaaattcagagccaagtcagctagcagtaagaaacactgaactaaataaaagaaccaaatgaaagacattaaaacttagcatttgattcaatctggttccaggcttaggttggatgcagctgacaaaagtgaatcagcctggagctggtgaactcaggttctggaccctgaacacactacatgacttgctttgatagaacttctgtagaatttgtcatgattttacatgtctcaaaaagttattagtaattttaaaaatcaatgagaatgtaaaagcaaagtgttacaggttccaacaaagaaaagcactcaagttttttttttkttgttttttttttgagacggagtctcactctgtcgcccaggctggagtgcagtggtgcgatctctgctcaccgcaagcaccgcctcccgggttcaagttttttttgtttgtttgtttgttttttgagacagagtcttgctttgtcacccaggctagagtgcagtggtgtgatc

SEQ ID NO: 93221 - DNA, 1564 bp, Homo sapiens
aatactagctacggctcttctttggggaagggggactaaagaaggtggcctccaactgctatctctttccctttgctgctgcctccttccaacctacaaaaaaggaaagagtctgacattcagaattaaccttgcaaagaaattctgtttgccagcccacaggcattttgtttgtttgattggtttttctgctgttgccactgctgtcaccttcctgaccaagaggcccacagactagcacttttttagattcatttctggcagtgagtgggtttgtaaagattgcatttgtagtatctgctgggtcccaaaagtgtggaaggacaaaagaccatagccttctcttaaattcagctcagaaccaacctcrcacctcagctagaaaaatcacttccatcaacactgctcccaaatggagcccttccaccctctgcccagcttccaagcccaggccctgagacccacactgctgtttgtttcggcacctgcaagcagcttgttcacaagcatccagactacagagcaagaggagtttcagaagggccctccaacaagtgagtggcctgggaagaaaagtgacaggcagggtctaatgtcccacagtagcttgttttcactgccactttggcattacctaccatggccagcagctattcaaacactctgcccaatgcccagccacaggatcctattaattctcttcaattaagagaggacctaccctggttcccagaaagccaaaagtaagtgtcagtttctccctctaggcagtctctagatttaagggttcctttcacctcgcctagaagggccctcaaccttgaaaataagaagcagcactatgaaaacaaactacccatttctcaactgttcaaagattagaccttgtaccacctccttgctggctcccaaagagacctcatctataaatggaaataataacacaacatgccttgttgtgtcttctttcagggctgtagatatgaactaagataacatacacacttagcatactgcctggcacacagtaagcagttgataaatattacttagtactgatatgatttttattattctaagaatgagttgtagttattattaagagagtaatctttctaaaatacatattgttccaacccaagcctaaaagctccacagtcaattttcagtttttcatgcaaacacaaggaaccagtatggcaaaaatcctaaaaaatagatactctataggttctcatttggattttgagtacattatgtgcagtaatacatacatatatccatctattcaataaagagctgtttggcaccaacaaatatatagcactgaactaagacatatatatgtctagttagtacttctgagcacctactataggccagacactatatcaggagacactggagatacacacataagtaagaaaagggccctgccatccaaaagcttatagtttaatagaggaattatgataacaggtgctaagataaaaatcccatagcaatcagtagaggcaaaaaggagagaaacatacgggtgatactttcttaactgacttgccag

SEQ ID NO: 93222 - DNA, 1564 bp, Homo sapiens
aatactagctacggctcttctttggggaagggggactaaagaaggtggcctccaactgctatctctttccctttgctgctgcctccttccaacctacaaaaaaggaaagagtctgacattcagaattaaccttgcaaagaaattctgtttgccagcccacaggcattttgtttgtttgattggtttttctgctgttgccactgctgtcaccttcctgaccaagaggcccacagactagcacttttttagattcatttctggcagtgagtgggtttgtaaagattgcatttgtagtatctgctgggtcccaaaagtgtggaaggacaaaagaccatagccttctcttaaattcagctcagaaccaacctcgcacctcagctagaaaaatyacttccatcaacactgctcccaaatggagcccttccaccctctgcccagcttccaagcccaggccctgagacccacactgctgtttgtttcggcacctgcaagcagcttgttcacaagcatccagactacagagcaagaggagtttcagaagggccctccaacaagtgagtggcctgggaagaaaagtgacaggcagggtctaatgtcccacagtagcttgttttcactgccactttggcattacctaccatggccagcagctattcaaacactctgcccaatgcccagccacaggatcctattaattctcttcaattaagagaggacctaccctggttcccagaaagccaaaagtaagtgtcagtttctccctctaggcagtctctagatttaagggttcctttcacctcgcctagaagggccctcaaccttgaaaataagaagcagcactatgaaaacaaactacccatttctcaactgttcaaagattagaccttgtaccacctccttgctggctcccaaagagacctcatctataaatggaaataataacacaacatgccttgttgtgtcttctttcagggctgtagatatgaactaagataacatacacacttagcatactgcctggcacacagtaagcagttgataaatattacttagtactgatatgatttttattattctaagaatgagttgtagttattattaagagagtaatctttctaaaatacatattgttccaacccaagcctaaaagctccacagtcaattttcagtttttcatgcaaacacaaggaaccagtatggcaaaaatcctaaaaaatagatactctataggttctcatttggattttgagtacattatgtgcagtaatacatacatatatccatctattcaataaagagctgtttggcaccaacaaatatatagcactgaactaagacatatatatgtctagttagtacttctgagcacctactataggccagacactatatcaggagacactggagatacacacataagtaagaaaagggccctgccatccaaaagcttatagtttaatagaggaattatgataacaggtgctaagataaaaatcccatagcaatcagtagaggcaaaaaggagagaaacatacgggtgatactttcttaactgacttgccag

SEQ ID NO: 93223 - DNA, 1564 bp, Homo sapiens
aatactagctacggctcttctttggggaagggggactaaagaaggtggcctccaactgctatctctttccctttgctgctgcctccttccaacctacaaaaaaggaaagagtctgacattcagaattaaccttgcaaagaaattctgtttgccagcccacaggcattttgtttgtttgattggtttttctgctgttgccactgctgtcaccttcctgaccaagaggcccacagactagcacttttttagattcatttctggcagtgagtgggtttgtaaagattgcatttgtagtatctgctgggtcccaaaagtgtggaaggacaaaagaccatagccttctcttaaattcagctcagaaccaacctcgcacctcagctagaaaaatcacttccatcaacactgctcccaaatggagcccttccaccctctgcccagcttccaagcccaggccctgagacccacactgctgtttgtttcggcacctgcaagcagcttgttcacaagcatccagactacagagcaagaggagtttcagaagggccctccaacaagtgagtggcctgggaagaaaagtgacaggcagggtctaatgtcccacagtagcttgttttcactgccactttggcattacctaccawggccagcagctattcaaacactctgcccaatgcccagccacaggatcctattaattctcttcaattaagagaggacctaccctggttcccagaaagccaaaagtaagtgtcagtttctccctctaggcagtctctagatttaagggttcctttcacctcgcctagaagggccctcaaccttgaaaataagaagcagcactatgaaaacaaactacccatttctcaactgttcaaagattagaccttgtaccacctccttgctggctcccaaagagacctcatctataaatggaaataataacacaacatgccttgttgtgtcttctttcagggctgtagatatgaactaagataacatacacacttagcatactgcctggcacacagtaagcagttgataaatattacttagtactgatatgatttttattattctaagaatgagttgtagttattattaagagagtaatctttctaaaatacatattgttccaacccaagcctaaaagctccacagtcaattttcagtttttcatgcaaacacaaggaaccagtatggcaaaaatcctaaaaaatagatactctataggttctcatttggattttgagtacattatgtgcagtaatacatacatatatccatctattcaataaagagctgtttggcaccaacaaatatatagcactgaactaagacatatatatgtctagttagtacttctgagcacctactataggccagacactatatcaggagacactggagatacacacataagtaagaaaagggccctgccatccaaaagcttatagtttaatagaggaattatgataacaggtgctaagataaaaatcccatagcaatcagtagaggcaaaaaggagagaaacatacgggtgatactttcttaactgacttgccag

SEQ ID NO: 93224 - DNA, 1564 bp, Homo sapiens
aatactagctacggctcttctttggggaagggggactaaagaaggtggcctccaactgctatctctttccctttgctgctgcctccttccaacctacaaaaaaggaaagagtctgacattcagaattaaccttgcaaagaaattctgtttgccagcccacaggcattttgtttgtttgattggtttttctgctgttgccactgctgtcaccttcctgaccaagaggcccacagactagcacttttttagattcatttctggcagtgagtgggtttgtaaagattgcatttgtagtatctgctgggtcccaaaagtgtggaaggacaaaagaccatagccttctcttaaattcagctcagaaccaacctcgcacctcagctagaaaaatcacttccatcaacactgctcccaaatggagcccttccaccctctgcccagcttccaagcccaggccctgagacccacactgctgtttgtttcggcacctgcaagcagcttgttcacaagcatccagactacagagcaagaggagtttcagaagggccctccaacaagtgagtggcctgggaagaaaagtgacaggcagggtctaatgtcccacagtagcttgttttcactgccactttggcattacctaccatggycagcagctattcaaacactctgcccaatgcccagccacaggatcctattaattctcttcaattaagagaggacctaccctggttcccagaaagccaaaagtaagtgtcagtttctccctctaggcagtctctagatttaagggttcctttcacctcgcctagaagggccctcaaccttgaaaataagaagcagcactatgaaaacaaactacccatttctcaactgttcaaagattagaccttgtaccacctccttgctggctcccaaagagacctcatctataaatggaaataataacacaacatgccttgttgtgtcttctttcagggctgtagatatgaactaagataacatacacacttagcatactgcctggcacacagtaagcagttgataaatattacttagtactgatatgatttttattattctaagaatgagttgtagttattattaagagagtaatctttctaaaatacatattgttccaacccaagcctaaaagctccacagtcaattttcagtttttcatgcaaacacaaggaaccagtatggcaaaaatcctaaaaaatagatactctataggttctcatttggattttgagtacattatgtgcagtaatacatacatatatccatctattcaataaagagctgtttggcaccaacaaatatatagcactgaactaagacatatatatgtctagttagtacttctgagcacctactataggccagacactatatcaggagacactggagatacacacataagtaagaaaagggccctgccatccaaaagcttatagtttaatagaggaattatgataacaggtgctaagataaaaatcccatagcaatcagtagaggcaaaaaggagagaaacatacgggtgatactttcttaactgacttgccag

SEQ ID NO: 93225 - DNA, 869 bp, Homo sapiens
tttagccatatttcaaaagactgagatgctaatgcctgtgaacatgtgctatacactaactactcatggcctgaagcacagaccaaaaggtgaatgatatcccaaatgccacctcagttttggtcacaggtctggatacaactcattggttgatccaagcatctgatgttccaccttgacatgtgatgctatctctggaaaaagaaaatgtcgcaggtgttgagaaaaggtacaagtaccaactatcaaagaggagtaagatcccttcccaagacccctttatagtcagtctaatacctttcggtttattcgcctagaatgctggacttctataccacataacaagattccacacactgaaacggaaccaacatcattagcttcttaccagtgttctgccatcgagatgcagtctgtcaagagaagcagcacagagtctcatgtcaagagaagtctgcagcggcagaaagacaactaaaaagagagacttcagtggaatttgagtcacctgacattagtcttaaaaaagatatttaaaatacagagaatcccactgatggaggagagaaaaataaccctctttttttctttaaagacaggcattgatatgagcgaaaggaaaagaactggggaagtctttgtatattgagagctcagtttatttttactctctgccaatagaggcaaggtaattctataagcaccatttaactttctcactacaaacaaaatagagtaagtcgtattaacgacttacttgcgytctaaacttccagctccagaacacttttttccccctgaaaattaaattgattcttacagaatggtacccaaatgtgtgatttcaaaggcagatcccaaaactgatg

SEQ ID NO: 93226 - DNA, 869 bp, Homo sapiens
tttagccatatttcaaaagactgagatgctaatgcctgtgaacatgtgctatacactaactactcatggcctgaagcacagaccaaaaggtgaatgatatcccaaatgccacctcagttttggtcacaggtctggatacaactcattggttgatccaagcatctgatgttccaccttgacatgtgatgctatctctggaaaaagaaaatgtcgcaggtgttgagaaaaggtacaagtaccaactatcaaagaggagtaagatcccttcccaagacccctttatagtcagtctaatacctttcggtttattcgcctagaatgctggacttctataccacataacaagattccacacactgaaacggaaccaacatcattagcttcttaccagtgttctgccatcgagatgcagtctgtcaagagaagcagcacagagtctcatgtcaagagaagtctgcagcggcagaaagacaactaaaaagagagacttcagtggaatttgagtcacctgacattagtcttaaaaaagatatttaaaatacagagaatcccactgatggaggagagaaaaataaccctctttttttctttaaagacaggcattgatatgagcgaaaggaaaagaactggggaagtctttgtatattgagagctcagtttatttttactctctgccaatagaggcaaggtaattctataagcaccatttaactttctcactacaaacaaaatagagtaagtcgtattaacgacttacttgcgttctaaacttccagctccagaacacttttttycccctgaaaattaaattgattcttacagaatggtacccaaatgtgtgatttcaaaggcagatcccaaaactgatg

SEQ ID NO: 93227 - DNA, 884 bp, Homo sapiens
agcaattcaggatacccaccccatatacactgagatagcagccacatggcggaatggaatgagccaggatttggagatttggtttgaatccagtgttcaccactgctagtacaccatgcatggttttactacaaatgcatgcaacatagacaatatatattactgtttagtggatttaaattttgtatagaatgttattacactacatattgttttctaatttgctttttcactcgtcatgtttttgaggttaatccatgttaacttgtgtagatttcgytcatttatttttacttctggagagtattccattttgtgaatttttaaaaatgttgcaaatacagcccattgctcatcccttcctcagctgcccatcttgcataggtggttcaaggcgacatgcacagggatgtgtagtgtgacattgttgaaacagtagaaataattaactgtttaccttgactgagggagatactggaatctaatctggcaagaatttagcatgtatctgatgctggtagggatacagatgtgtatcttattattttctataatcttttcgtgtttgaattgtttataatagaaaacgctaccccatccccacccccaccctaagaatgaatggtgttctgctccaggtaaatgtcatggaagagctgacaggaagagctgtaaggaattgcgaggcaaaaatcaaagtgaaaattagaacccataaatgtaaatggagggctgaagccattttgactctgagggcatttgccaatttcaggaaatttgagctgaggtttcccaaggctcctccagaaagttctgggaaatcaggtctctaaatgaagactagcctagaaaacagacctccaggagtccttttcagtttaaac

SEQ ID NO: 93228 - DNA, 997 bp, Homo sapiens
tgcattagactatcaaatctaaaatcttcaaaaattctctggagtcagaataygtatcaaggcagcagttaagagcaattataatattcattttaaaagaccaagaaattcagccaagtttgaggccttaagtacaaggatgaacatagaaatgacaatgaattttgcctaatagttttcataagtgaatgtctgggaaaaaagaattgaagtttcactctagctaatccagctaagaagatctaaaaggaatcctgaaatgatctattgggaattttactcaggtattgatagagaaatgttacaggaatgtccaagtcaattgtttcttacctgtggagtctagtctgttaatatcataaactgcctggctgtgaaacatccagaagtgtccgttgttgcaggaaggaagacaggaactacatggaacaatcacatgataacctacaatgttcccactagaaaagaaagtaaatgttactagataccatgtaataactagccagataagtcttttcatattgcttatataaatagaccatataatttagatctcatttcctaacaactttcattgctgagatctttgggatgggatgggggtgcagttctaccatcaagtgggaaagcagtctttaagtgaataatagtaaaatattctcacatttctttgctattattattattattattattattattattattattattgagactgagttttgctcttgtcacccaggctggagtgcctgcaacctccgcctcccaggttcaagtgattctcctgcctcagcctccagaatagctgggattacaggcgtgtgccaccatgcccagctaacttttgtgttattagtagagatgcggttttaccatgttggccaggctggtctcgaactcctgacctcaggtgatccacctgccttggcctcccaaagtgctgggattacaggcatgagccaccatgcttgtcctgctagtattattttatgca

SEQ ID NO: 93229 - DNA, 997 bp, Homo sapiens
tgcattagactatcaaatctaaaatcttcaaaaattctctggagtcagaatacgtatcaaggcagcagttaagagcaattataatattcattttaaaagaccaagaaattcagccaagtttgaggccttaagtacaaggatgaacatagaaatgacaatgaattttgcctaatagttttcataagtgaatgtctgggaaaaaagaattgaagtttcactctagctaatccagctaagaagatctaaaaggaatcctgaaatgatctattgggaattttactcaggtattgatagagaaatgttacaggaatgtccaagtcaattgtttcttacctgtggagtctagtctgttaatatcataaactgcctggctgtgaaacatccagaagtgtcygttgttgcaggaaggaagacaggaactacatggaacaatcacatgataacctacaatgttcccactagaaaagaaagtaaatgttactagataccatgtaataactagccagataagtcttttcatattgcttatataaatagaccatataatttagatctcatttcctaacaactttcattgctgagatctttgggatgggatgggggtgcagttctaccatcaagtgggaaagcagtctttaagtgaataatagtaaaatattctcacatttctttgctattattattattattattattattattattattattattgagactgagttttgctcttgtcacccaggctggagtgcctgcaacctccgcctcccaggttcaagtgattctcctgcctcagcctccagaatagctgggattacaggcgtgtgccaccatgcccagctaacttttgtgttattagtagagatgcggttttaccatgttggccaggctggtctcgaactcctgacctcaggtgatccacctgccttggcctcccaaagtgctgggattacaggcatgagccaccatgcttgtcctgctagtattattttatgca

SEQ ID NO: 93230 - DNA, 997 bp, Homo sapiens
tgcattagactatcaaatctaaaatcttcaaaaattctctggagtcagaatacgtatcaaggcagcagttaagagcaattataatattcattttaaaagaccaagaaattcagccaagtttgaggccttaagtacaaggatgaacatagaaatgacaatgaattttgcctaatagttttcataagtgaatgtctgggaaaaaagaattgaagtttcactctagctaatccagctaagaagatctaaaaggaatcctgaaatgatctattgggaattttactcaggtattgatagagaaatgttacaggaatgtccaagtcaattgtttcttacctgtggagtctagtctgttaatatcataaactgcctggctgtgaaacatccagaagtgtccgttgttgcaggaargaagacaggaactacatggaacaatcacatgataacctacaatgttcccactagaaaagaaagtaaatgttactagataccatgtaataactagccagataagtcttttcatattgcttatataaatagaccatataatttagatctcatttcctaacaactttcattgctgagatctttgggatgggatgggggtgcagttctaccatcaagtgggaaagcagtctttaagtgaataatagtaaaatattctcacatttctttgctattattattattattattattattattattattattattgagactgagttttgctcttgtcacccaggctggagtgcctgcaacctccgcctcccaggttcaagtgattctcctgcctcagcctccagaatagctgggattacaggcgtgtgccaccatgcccagctaacttttgtgttattagtagagatgcggttttaccatgttggccaggctggtctcgaactcctgacctcaggtgatccacctgccttggcctcccaaagtgctgggattacaggcatgagccaccatgcttgtcctgctagtattattttatgca

SEQ ID NO: 93231 - DNA, 566 bp, Homo sapiens
acagcctgggactccgtcctggctcacggaccgcagcgcagccrgcacccagccgcctctccctttcctccgcacacgggcagccgcggtccaccgtagggcagtcgtcgttggcatcgcgcgtaatcatcggccggcctcctccagtgtctcccagccctggcggacagcccgggtcccagcctaggacccaggaggatgggtgttccgcgcagcttccggggctctccccgagtcccaccccccggcccgccccgatggacttctcttcgcccactcccatccctagaccacatctcggcccccacagttcctgacatccttgcgcttcacgcaacatcgcggcccatgatcatgccccaattcccctcacctctaaggcagccttctccttgccgcctcccgccttccgagcgtgtgcaactccagttgtccccgggctcccttccagcctcaggaccccatctcacacccgcctctcgcttcccgcttcccgctcgcctgaaccccgccgcctctgctccctgtcttgttccctcagcgtggccccttcctccagccgcggg

SEQ ID NO: 93232 - DNA, 566 bp, Homo sapiens
acagcctgggactccgtcctggctcacggaccgcagcgcagccagcacccagccgcctctccctttcctccgcacacgggcagccgcggtccaccgtagggcagtcgtcgttggcatcgcgcgtaatcatcggccggcctcctccagtgtctcccagccctggcggacagcccgggtcccagcctaggacccaggaggatgggtgttccgcgcagcttccggggctctccccgagtcccaccccccggcccgccccgatggacttctcttcgcccactcccatccctagaccacatctcggcccccacagttcctgacatccttgcgcttcacgcaacatcgcggcccatgatcatgccccaattcccctcacctctaaggcagccttctccttgccgcctcccgccttccgagcgtgtgcaactccarttgtccccgggctcccttccagcctcaggaccccatctcacacccgcctctcgcttcccgcttcccgctcgcctgaaccccgccgcctctgctccctgtcttgttccctcagcgtggccccttcctccagccgcggg

SEQ ID NO: 93233 - DNA, 566 bp, Homo sapiens
acagcctgggactccgtcctggctcacggaccgcagcgcagccagcacccagccgcctctccctttcctccgcacacgggcagccgcggtccaccgtagggcagtcgtcgttggcatcgcgcgtaatcatcggccggcctcctccagtgtctcccagccctggcggacagcccgggtcccagcctaggacccaggaggatgggtgttccgcgcagcttccggggctctccccgagtcccaccccccggcccgccccgatggacttctcttcgcccactcccatccctagaccacatctcggcccccacagttcctgacatccttgcgcttcacgcaacatcgcggcccatgatcatgccccaattcccctcacctctaaggcagccttctccttgccgcctcccgccttccgagcgtgtgcaactccagttgtccccgggctcccttccagyctcaggaccccatctcacacccgcctctcgcttcccgcttcccgctcgcctgaaccccgccgcctctgctccctgtcttgttccctcagcgtggccccttcctccagccgcggg

SEQ ID NO: 93234 - DNA, 725 bp, Homo sapiens
tgatccaagcatctgatgttccaccttgacatgtgatgctatctctggaaaaaraaaatgtcgcaggtgttgagaaaaggtacaagtaccaactatcaaagaggagtaagatcccttcccaagacccctttatagtcagtctaatacctttcggtttatttgcctagaatgctggacttctataccacataacaagattccacacactgaaacagaaccaacatcattagcttcttaccagtgttctgccatcgagatgcagtctgtcaagagaagcagcacagagtctcatgtcaagagaagtctgcagcagcagaaagacaactaaaaagagagacttcagtggaatttgagtcacctgacattagtcttaaaaaagatatttaaaatacagagaatcccactgatggaggagagaaaaataaccctctttttttctttaaagacaggcattgatatgagcgaaaggaaaagaactggggaagtctttgtatattgagagctcagtttatttttactctctgccaatagaggcaaggtaattctataagcaccatttaactttctcactacaaacaaaatagagtaagtcgtattaacgacttacttgcgctctaaacttccagctccagaacactttttttcccctgaaaattaaattgattcttacagaatggtacccaaatgtgtgatttcaaaggcagaccccaaaactgatgggatcc

SEQ ID NO: 93235 - DNA, 725 bp, Homo sapiens
tgatccaagcatctgatgttccaccttgacatgtgatgctatctctggaaaaagaaaatgtcgcaggtgttgagaaaaggtacaagtaccaactatcaaagaggagtaagatcccttcccaagacccctttatagtcagtctaatacctttcggtttatttgcctagaatgctggacttctataccacataacaagattccacacactgaaacagaaccaacatcattagcttcttaccagtgttctgccatcgagatgcagtctgtcaagagaagcagcacagagtctcatgtcaagagaagtctgcagcagcagaaagacaactaaaaagagagacttcagtggaatttgagtcacctgacattagtcttaaaaaagatatttaaaatacagagaatcccactgatggaggagagaaaaataaccctctttttttctttaaagacaggcattgatatgagcgaaaggaaaagaactggggaagtctttgtatattgagagctcagtttatttttactctctgccaatagaggcaaggtaattctataagcaccatttaactttctcactacaaacaaaatagagtaagtcgtattaacgacttacttgcgctctaaacttccagctccagaacactttttttcccctgaaaattaaattgattcytacagaatggtacccaaatgtgtgatttcaaaggcagaccccaaaactgatgggatcc

SEQ ID NO: 93236 - DNA, 1056 bp, Homo sapiens
tgacaacatggcaaaaccctgtctctacaaaaaatataaaaattagctgggcgtggtggtgcgcacctgtagtctgagctacttgggaggctgaggtgggaggatcgcttgagcctgggagattgaggctgcagtctgcagtgagttatgatcacaccactgcactccagcctgggcaacagagaccctgtcttaaaaacaaaacaaaaccacctccgacaacgtaggaatgctgaaatgagttatgttaattctaagtaaaaactcaacctatcccaattagcccaagaccactacttagtctacctaagccaagtctgttgacttgttacaatgagggagaacacacaacagagaaactggtggcagggtggtgggaggagggtgctcaccaaacaagaggaaaattagagttatcattgattttgggggaygagtggagtgtagttttcataggctcaaagcaaagcagggctgtgtgaaagggtaggcataggatgggactttgaagtggatccagggtcttgtttcctcagaaactacaaagttgagatagaggtggaatgctgtgttcagaaaccccttacttgaagtttttgcacctgggttgaaaattactgctggttttttgtgtcaaggtggcttaggtcctccagacaggagggggatactgcattgttactgattgataggatttcaagcagccaaagttctgatagtctgtgattttgagtacaagttcctcagtgaataagaaaggagtggtcactcaaagaggggagttatgagcctttatagctgtagcatgcccttgggagaagaatgttttctgtcatttctagtctagctttatctctgttagtgcagcctaatgaatggcagaacaggttttgattttctcagtcctagcgaatttctgcttctcgaagtgcatgttagtggtaatgtgttttatatcttactttatttcttattttccccccctttaatctatattttattttatttattttttatttttttgagacggactctcgctctgtccccagggtggag

SEQ ID NO: 93237 - DNA, 1056 bp, Homo sapiens
tgacaacatggcaaaaccctgtctctacaaaaaatataaaaattagctgggcgtggtggtgcgcacctgtagtctgagctacttgggaggctgaggtgggaggatcgcttgagcctgggagattgaggctgcagtctgcagtgagttatgatcacaccactgcactccagcctgggcaacagagaccctgtcttaaaaacaaaacaaaaccacctccgacaacgtaggaatgctgaaatgagttatgttaattctaagtaaaaactcaacctatcccaattagcccaagaccactacttagtctacctaagccaagtctgttgacttgttacaatgagggagaacacacaacagagaaactggtggcagggtggtgggaggagggtgctcaccaaacaagaggaaaattagagttatcattgattttgggggatgagtggagtgtagttttcataggctcaaagcaaagcagggctgtgtgaaagggtaggcataggatgggactttgmagtggatccagggtcttgtttcctcagaaactacaaagttgagatagaggtggaatgctgtgttcagaaaccccttacttgaagtttttgcacctgggttgaaaattactgctggttttttgtgtcaaggtggcttaggtcctccagacaggagggggatactgcattgttactgattgataggatttcaagcagccaaagttctgatagtctgtgattttgagtacaagttcctcagtgaataagaaaggagtggtcactcaaagaggggagttatgagcctttatagctgtagcatgcccttgggagaagaatgttttctgtcatttctagtctagctttatctctgttagtgcagcctaatgaatggcagaacaggttttgattttctcagtcctagcgaatttctgcttctcgaagtgcatgttagtggtaatgtgttttatatcttactttatttcttattttccccccctttaatctatattttattttatttattttttatttttttgagacggactctcgctctgtccccagggtggag

SEQ ID NO: 93238 - DNA, 1056 bp, Homo sapiens
tgacaacatggcaaaaccctgtctctacaaaaaatataaaaattagctgggcgtggtggtgcgcacctgtagtctgagctacttgggaggctgaggtgggaggatcgcttgagcctgggagattgaggctgcagtctgcagtgagttatgatcacaccactgcactccagcctgggcaacagagaccctgtcttaaaaacaaaacaaaaccacctccgacaacgtaggaatgctgaaatgagttatgttaattctaagtaaaaactcaacctatcccaattagcccaagaccactacttagtctacctaagccaagtctgttgacttgttacaatgagggagaacacacaacagagaaactggtggcagggtggtgggaggagggtgctcaccaaacaagaggaaaattagagttatcattgattttgggggatgagtggagtgtagttttcataggctcaaagcaaagcagggctgtgtgaaagggtaggcataggatgggactttgaagtggatccagggtcttgtttcctcagaaactacaaagttgagatagaggtggaatgctgtgttcagaaaccccttacttgaagtttttgcacctgggttgaaaattactgctggttttttgtgtcaaggtggcttaggtcctccagacaggagggggatactgcattgttactgattgataggatttcaagcagccaaagttctgatagtctgtrattttgagtacaagttcctcagtgaataagaaaggagtggtcactcaaagaggggagttatgagcctttatagctgtagcatgcccttgggagaagaatgttttctgtcatttctagtctagctttatctctgttagtgcagcctaatgaatggcagaacaggttttgattttctcagtcctagcgaatttctgcttctcgaagtgcatgttagtggtaatgtgttttatatcttactttatttcttattttccccccctttaatctatattttattttatttattttttatttttttgagacggactctcgctctgtccccagggtggag

SEQ ID NO: 93239 - DNA, 549 bp, Homo sapiens
ctgagggccggccccgccccctcgcggcgaaagcccctcccgcgaccccgccggacgagcccccggcgcggaaacccccgcgggcggtcccgcccccgacgcccaggccccgcccctgcgcgggcgggggacctttcccgcgggattcggcaagcgcggccgcggagacccgggggtggagaacgtctttcgccctcagggcagcccggatgacagctaatgcgcctgggcaaggcgttctcaactgcgattcccggccttaaatgtcctctcaacttttaaaagttatttattcaaagtkcatttgctgactaaaccttcactgagcgccttcctagaggtaaacactggagcagagcctggagatgcagaataaggaaaactgggtctccctcagtctagagtggaaaaagtgctttcacaggaagggcattgaaaaggaaccatttattcttcctgtgggagggacaggaggggttggggaaaccccgtggaggaaaggcctccccagagtaagtaggatttctctgggcagaggcctgggaatct

SEQ ID NO: 93240 - DNA, 624 bp, Homo sapiens
ttgttaatactattgctttaaaaaaaaaaaaagtgaaaatgagatgcgagatcaggtattttgtcagaataggaaggatatgccaaaaactagatcaagccagaatcccaggtattggtattttaaaataacagcactttttccacttgaattatttttaaaagttttatctttccaagtgagcaactaatgcagaatactttgccagccccacaatatacaaatcgtgacctctaatagtcattgaaatacatgcatttgttttggtctttatttttaatctttaaccagaagtttaaaaatgatactataaacatgaaatctaggcagaaataaagaaagatgttctttgaaaccaataagaacaaagatacaacataccagaatctttgggacacattcaaagcagtgtgtagagggaaatttatagtactaaatgcccacaagagaaagcaggaaagatccaaaattgacaccctaacatcacaatgaaaagaactagaagagsaagagcaaacacattcaaaagctagcagaaggcaagaaataactaaaatcagagcagaactgaaggaaatagagacacaaaaaacccttcaaaaaatcaatgaatccaggagctgg

SEQ ID NO: 93241 - DNA, 1307 bp, Homo sapiens
agaaataaaaaattattggggtgtggtggcctgcacctgtagtcccagctacttgggagggtgaggtgggaggatcacttgagccccagagtttgaggctgcagtgagtcatgatcgtgccactccactccagcctgggtgacagcgtgatcctgtctcaaaaaaaagtatttgacatttgaattatgataccatggattcaaagatgcacttaaatatttaaacattttggaaattggagccatcttgatatgtcatttttctatgttacatgtttttagttttcttctgaaaggctgtcattaattgacactacattctgcaatggatggtatctggtagttgaggaaattcagtaccagaagcttaagcatgccctgtgcttggttgactttaaaacttggttgacttggttggtcctcataattcaagtcagtggttccaaacattttcaagtcaaagttttatgatcatcacaatgacagttgctgtctttaaaactggttgataaaatgcacagtggtaaactactttgatttttgtaacattttaaaataaacttgctttgtattaatcccaacaatatgtatatactgcatatttgaaaaacagcgcagatgtgagctatatattcactctacggtcattgcttggtgcatttatggattcacataatgctataatgactttcattgcccctggtagaggaaacactgttctagatgactgtgttagtccaattaggctgccatgacaaaatgccatcaattgggaggctaagccaacagacatttatctctggaggctgggattaagagattagggtaccagcatggttggattctggtgatggcctctttctggcttcttgctgtatgcctacatggtgggcagagacctggcttcttgctgtgtggctacaaagtggacagagagccagagccagagctctttctttttcttttmttttctttttttttttttgagacagagtctcacactgttggctcagacgagtgcagtggcacgttctcagctcactgcaacctttgcctcccgggttcaagcaattctcctgcctcagcctcctgggtagctagcattacaagcgtgtgccaccacgcctggctaatttttgtattttaagaagagatggggtttcactattttggccaggctggttttgaactcctgaccccaggtgatccacccaccttggcctcccaaagtgctgggattacaggcatgagccatcgcgcctagacggagccagagctcttataagggcactcatcccatcatgagga

SEQ ID NO: 93242 - DNA, 531 bp, Homo sapiens
taaatgtcccctaagagaacacagaaaggagatttgattctattctgcttgccctcaccatgcttcaaatcacagtagtccgaaccaatgaaactcccagaagacatctagcccaacaccgccccatgtccccatttcttctattttgatgtttttaatcagcaattgtctgagaagtccacttgacaggtttgttggaattgtgtcaattaaaaataaacagcttggaagtggaaactacccaaaatatctatgaacagtccaatggatatataaattgtggtgtcatcagatgttggaatactatacagcaatgraaaatgagcaaactgcaatcagacataatggtaggaaagaaggtaaaagtaatccatgatacagaagttaggagagtggttctctgggggaaatagggctaggaggtagtatggtggagtttctgggtgcatgtaatgctctatttcttgatttaggcagtagttacttggatgtgttctgtttacagaaatttgtccaactgtagtgttggtg

SEQ ID NO: 93243 - DNA, 537 bp, Homo sapiens
aaaggatgctttaaaattatttaattgaaggttttcattatgggatcattttgcaaaaaatagaaaaaaaactttttattgcaactaatgaattagtgaaaagcacttaaagacatagataatattttagctgaatctgctttaatcttttgtgttctcatttccttagaggtgattatgcatagatttataggagagattatattaaacttcaccagagggtattcttcttaatcatcttttttcaatattcttaattactatcatacttaatctagttttcattacatttttctatttttcaggatcttaatgttaaactttatcaagtagagtggaactcctacatatctttttttttttttttgagaggcagtcttgctctgtcaccaggcagagtgcagtggcgtgacctcgrctcactgcaacctctgcctcccgggttcacgccattctcctgcctcagcctccggagtagctgggactacaggcacacaccaccatgtccggctaatttttgtactttagtagagaggg

SEQ ID NO: 93244 - DNA, 1154 bp, Homo sapiens
ttttgcaaagttctcagcacagaatggaaacgtgtgggcttacttaacaactccatctctaaaatgaggaccctcaaagggcattagtgtcagcaactatcattatttagtaagttttagtaaacgaaaggttgcatttaaagggagtaaaacacttgcatatcagtagtttcttatgcagagatgacggcaagtcacagtagtccatgtctgcgagctcatagacagacctctttgtgtgatgagatatgacaagtctttagattttttcctattagtaccctgcagcaccaattcctgctgttgtgcaaggagtacctgaagtgttgatcagcaagagacttggcaaatcttgctgacatgtctcttctgacaagaggataaatgctttccatggatcctttctgtcctgcactggccccttggctgaccatctgtttgaaagtgcagggcatgatggtgacaataaataaggtgcccttctgtaaatttcagtaatccaactacagtacattccaaagcatgactgaacagcgtacctggtaatctttgttacaaatagaacctgcagatcctggagcagcagaggttagagatggaaataaaagggcattaatttaatttggccagcgtgggctcagaggttcatgcctgtaatccagcactttgggaggccaaggcagggggatcacctgagtttaggagtttgataccagccctgccaacatggtgaaaccccgtctctactaaaaatacataagttagctgggcatggtggcacatgcctgtagtcccagctactcggtaggctgaggcatgagaatygcttgaacctgggaggcggaagttgcagtgagccgagatcacaccactgtactccagcctgggcaacagagtgagagttggtctaaaaacagcaacaacaacaaaaaagaatttaggatagagacagtctaaataaaatatttttttccagaataacccccgaaaacaatgtggatattcttctcattcaggcttaaaggagccatctatacctgttagatcctctgtttcctcccatttccttcataatccacagatgtttttatttagtacttaatggagtggttctgaaatggttgcctttcaagaaaaaaaattagatttaaaaa

SEQ ID NO: 93245 - DNA, 523 bp, Homo sapiens
tcatgcctgtaatcccagcactttgggaggccaagacagggggctcacctgaggtcaggagttcgaaaccagcccagccaacatggtgaaatcccgtctctactaaaaatacaaaaattagctgggcatggtagtgcatacctataatcccagctacttggaaggctagggcagaagaatcacttgaacccaggaggcagaggttgcagtgaactgagatcgtgccactgcacttcatcctgggcaacagagtgagactccatctaaaaaaaaaaaaagaaagaaatggttttatgatgaagaaaaaataaagagagcaataagaaatgaaagcaataggggccaagggaaaacttgccctttgaacattcactgaaaatcaattgataaaaggtagattaataggagaaaaagaatacaaatgtattactatgcacaagagtcttccaaaatacaagatatcacagaaaggcaagatgattggtgcttttataccatcttyaggtcacacaaagaatagggg

SEQ ID NO: 93246 - DNA, 2109 bp, Homo sapiens
tgcattgttgaagattcaaaccttggtgagaaattggtatttcttttcctgaaacaaattaacttaaaatgtttggcttcaaacatcaccaactccagtattttcccttctaaaagcaaacctaaaatgtggcatgttggttaaatgaaggcaggttgatactgttgatgagttttcctgtgggaccccaatctgtcatttttttcaacagtgtctgaagtgaactttaaaacgaaaatatagatttatttactctcattcccatccatctttatggatttctttgccaaaaggctgcctgagaagttcagggtaagtcctcctgctcaaaaaatatctccccaattctgtatctttccattataaaactttgttatttttcttaaacaatgctggcccatcttttctcctgctaaagggggcccatggaatatgggctttgttcatactatgatagaattttaaagagcaacagagaagagagcagcaacttacacagtcacttaaatgaygacattcaattattttgcctttgttttgaaagaaccttgcaaaaaatgcaattcttccaggaaggcaaatcatttctactaattctactaaataacttctctaggatccttgttagctaggaaagaataagatatatagaaatggaacccagaaaaaacaaatcttgaaacttcagaggctcccaagtgtccagaggagaaataaagtactaactcagaaactatgacagcatccaaacaactttctttagagttgtgcctaaagaaaactttagcctttacctgcagcaccatctggaatggtgattcagtaacatttaaagcacaactttcaacagacagtagacaaatagtcatcaatttttaaatattatctcccagcattttttaaaccagtggctaaaaatgaaattagtgacattaaaagaatgagatggcaactgttaacacctagtctttaggaaaaaaaatgtgaaattaaataaaatgacctcattctgaacaataatttaattctggaacacttaacagcatcatttcttttatttcccacttaggccattattcaggcatgaatcttggcagaatgggcaaatagaaaagaggtggttaaggataaatttagaattattcccatttaattttagtaaatgattttttcatatcttacaaagggatatttaaacgggctggaaatacttgatttttaaatgctaaaaggtattacttaaagtctctgttatccaatatattttacttcattttataatatttcaggttcaattttagtgaattagtatctctgataaagtacagtcacgtgccgcataatgatgtttcggtcagcaatgggccacatatatggctgtgatcacataagattataataccgtatttttactgcaccttttctatgtttagatatgtttctatgtttagatactcaaatacttaccattgtgttacagctggctgtagtattcagtacagtcacgtgctgcataggtttatagcctaggagcaattggccataccatagagccaaggtgtgcagtaggctacatgatctacctttgtggaagttcactctggaatggtcccatgataacaaaactgcctaatgatgcatttcccagaacataaccctgtcgttaagcaagacctgagtgtacattctgtttatagagtcaaaggtgggtcacgtgatctacattccctttaggccttttgtctcatttgcattcagaattgggaaattcttctctgtctctatgttcttttcttaatccttccttccttatcctcacaattaccagagatgcacccctgtgcagggaaatgaactagacaaatagtttggagtcttcaatcagtggaggcaccaaaacagccaggccacgtgctgaagaagtcaaaactcttcctaccactttttttcagatggaaaagactacatttccccatatgaggtggatttattttcagctgtattaatgtatttactcaaaagaactgcattcctccctcactcattaaataactagttatgaatttttactgtgtggcaaaaacataaggcagtgaaaaaatcagatag

SEQ ID NO: 93247 - DNA, 2109 bp, Homo sapiens
tgcattgttgaagattcaaaccttggtgagaaattggtatttcttttcctgaaacaaattaacttaaaatgtttggcttcaaacatcaccaactccagtattttcccttctaaaagcaaacctaaaatgtggcatgttggttaaatgaaggcaggttgatactgttgatgagttttcctgtgggaccccaatctgtcatttttttcaacagtgtctgaagtgaactttaaaacgaaaatatagatttatttactctcattcccatccatctttatggatttctttgccaaaaggctgcctgagaagttcagggtaagtcctcctgctcaaaaaatatctccccaattctgtatctttccattataaaactttgttatttttcttaaacaatgctggcccatcttttctcctgctaaagggggcccatggaatatgggctttgttcatactatgatagaattttaaagagcaacagagaagagagcagcaacttacacagtcacttaaatgacgacattcaattattttgcctttgttttgaaagaaccttgcaaaaaatgcaattcttccaggaaggcaaatcatttctactaattctactaaataacttctctaggatccttgttagctaggaaagaataagatatatagaaatggaacccagaaaaaacaratcttgaaacttcagaggctcccaagtgtccagaggagaaataaagtactaactcagaaactatgacagcatccaaacaactttctttagagttgtgcctaaagaaaactttagcctttacctgcagcaccatctggaatggtgattcagtaacatttaaagcacaactttcaacagacagtagacaaatagtcatcaatttttaaatattatctcccagcattttttaaaccagtggctaaaaatgaaattagtgacattaaaagaatgagatggcaactgttaacacctagtctttaggaaaaaaaatgtgaaattaaataaaatgacctcattctgaacaataatttaattctggaacacttaacagcatcatttcttttatttcccacttaggccattattcaggcatgaatcttggcagaatgggcaaatagaaaagaggtggttaaggataaatttagaattattcccatttaattttagtaaatgattttttcatatcttacaaagggatatttaaacgggctggaaatacttgatttttaaatgctaaaaggtattacttaaagtctctgttatccaatatattttacttcattttataatatttcaggttcaattttagtgaattagtatctctgataaagtacagtcacgtgccgcataatgatgtttcggtcagcaatgggccacatatatggctgtgatcacataagattataataccgtatttttactgcaccttttctatgtttagatatgtttctatgtttagatactcaaatacttaccattgtgttacagctggctgtagtattcagtacagtcacgtgctgcataggtttatagcctaggagcaattggccataccatagagccaaggtgtgcagtaggctacatgatctacctttgtggaagttcactctggaatggtcccatgataacaaaactgcctaatgatgcatttcccagaacataaccctgtcgttaagcaagacctgagtgtacattctgtttatagagtcaaaggtgggtcacgtgatctacattccctttaggccttttgtctcatttgcattcagaattgggaaattcttctctgtctctatgttcttttcttaatccttccttccttatcctcacaattaccagagatgcacccctgtgcagggaaatgaactagacaaatagtttggagtcttcaatcagtggaggcaccaaaacagccaggccacgtgctgaagaagtcaaaactcttcctaccactttttttcagatggaaaagactacatttccccatatgaggtggatttattttcagctgtattaatgtatttactcaaaagaactgcattcctccctcactcattaaataactagttatgaatttttactgtgtggcaaaaacataaggcagtgaaaaaatcagatag

SEQ ID NO: 93248 - DNA, 2109 bp, Homo sapiens
tgcattgttgaagattcaaaccttggtgagaaattggtatttcttttcctgaaacaaattaacttaaaatgtttggcttcaaacatcaccaactccagtattttcccttctaaaagcaaacctaaaatgtggcatgttggttaaatgaaggcaggttgatactgttgatgagttttcctgtgggaccccaatctgtcatttttttcaacagtgtctgaagtgaactttaaaacgaaaatatagatttatttactctcattcccatccatctttatggatttctttgccaaaaggctgcctgagaagttcagggtaagtcctcctgctcaaaaaatatctccccaattctgtatctttccattataaaactttgttatttttcttaaacaatgctggcccatcttttctcctgctaaagggggcccatggaatatgggctttgttcatactatgatagaattttaaagagcaacagagaagagagcagcaacttacacagtcacttaaatgacgacattcaattattttgcctttgttttgaaagaaccttgcaaaaaatgcaattcttccaggaaggcaaatcatttctactaattctactaaataacttctctaggatccttgttagctaggaaagaataagatatatagaaatggaacccagaaaaaacaaatcttgaaacttcagaggctcccaagtgtccagaggagaaataaagtactaactcagaaactatgacagcatccaaacaactttctttagagttgtgcctaaagaaaactttagcctttacctgcagcaccatctggaatggtgattcagtaacatttaaagcacaactttcaacagacagtagacaaatagtcatcaatttttaaatattatctcccagcattttttaaaccagkggctaaaaatgaaattagtgacattaaaagaatgagatggcaactgttaacacctagtctttaggaaaaaaaatgtgaaattaaataaaatgacctcattctgaacaataatttaattctggaacacttaacagcatcatttcttttatttcccacttaggccattattcaggcatgaatcttggcagaatgggcaaatagaaaagaggtggttaaggataaatttagaattattcccatttaattttagtaaatgattttttcatatcttacaaagggatatttaaacgggctggaaatacttgatttttaaatgctaaaaggtattacttaaagtctctgttatccaatatattttacttcattttataatatttcaggttcaattttagtgaattagtatctctgataaagtacagtcacgtgccgcataatgatgtttcggtcagcaatgggccacatatatggctgtgatcacataagattataataccgtatttttactgcaccttttctatgtttagatatgtttctatgtttagatactcaaatacttaccattgtgttacagctggctgtagtattcagtacagtcacgtgctgcataggtttatagcctaggagcaattggccataccatagagccaaggtgtgcagtaggctacatgatctacctttgtggaagttcactctggaatggtcccatgataacaaaactgcctaatgatgcatttcccagaacataaccctgtcgttaagcaagacctgagtgtacattctgtttatagagtcaaaggtgggtcacgtgatctacattccctttaggccttttgtctcatttgcattcagaattgggaaattcttctctgtctctatgttcttttcttaatccttccttccttatcctcacaattaccagagatgcacccctgtgcagggaaatgaactagacaaatagtttggagtcttcaatcagtggaggcaccaaaacagccaggccacgtgctgaagaagtcaaaactcttcctaccactttttttcagatggaaaagactacatttccccatatgaggtggatttattttcagctgtattaatgtatttactcaaaagaactgcattcctccctcactcattaaataactagttatgaatttttactgtgtggcaaaaacataaggcagtgaaaaaatcagatag

SEQ ID NO: 93249 - DNA, 935 bp, Homo sapiens
atataaactgcagttttagtttttatatttctttctttcttataaagaacttccagaaacattaatgacagaaaagagggatctattttttcccaaaattatatccaagtatcacaattgaatccaagtatcatttttgaacataacgaaatttcccatgtattggaaaggctacacacaccatatacgaaggtattacttacagtacttgtgtgtktgctaaaattgcattctgtgtgctctgtttccttgaaagtcatttccatttgttgagtcagtgcctgccttttctggtgctgatttgctcctctctgtgcttaagaatccttgtcatccctgttgagtttatcttagcctacagcaggggttgtgatggaggtgctggaggtggttgagatgaagaaggtaccttcctctcactcccagctgccgggatttctggtgctctacccagcctggctggcctcactgctgtactgccctgttgaccgtatgatcctcttccttcgcttctctctgctcagcagaaggtggtgggaagtaaagagctctcagcctggggtgttagatccacctacccagatcagcttcttgaggctactcaggagtttcctcgctttctatatccatggcctctggcttcagaattcccaatggcttctatgtgtgaggcttttacctccagcagtgtctgagctgtgcggtcctctaccctgcttctttatggatcatatcctttccactttctctctctctcagaaattcatcagaacttctacccaatgcagtttcccacattgaggatttatacttatctgacattttactggatttgggatgagccgatcttctcattatccttctggagcatacagttctgcattgtcattgcacccagctgtggagaatcccacgcatacatatcctaaaatgca

SEQ ID NO: 93250 - DNA, 935 bp, Homo sapiens
atataaactgcagttttagtttttatatttctttctttcttataaagaacttccagaaacattaatgacagaaaagagggatctattttttcccaaaattatatccaagtatcacaattgaatccaagtatcatttttgaacataacgaaatttcccatgtattggaaaggctacacacaccatatacgaaggtattacttacagtacttgtgtgtgtgctaaaattgcattctgtgtgctctgtttccttgaaagtcatttccatttgttgagtcagtgcctgccttttctggtgctgatttgctcctctctstgcttaagaatccttgtcatccctgttgagtttatcttagcctacagcaggggttgtgatggaggtgctggaggtggttgagatgaagaaggtaccttcctctcactcccagctgccgggatttctggtgctctacccagcctggctggcctcactgctgtactgccctgttgaccgtatgatcctcttccttcgcttctctctgctcagcagaaggtggtgggaagtaaagagctctcagcctggggtgttagatccacctacccagatcagcttcttgaggctactcaggagtttcctcgctttctatatccatggcctctggcttcagaattcccaatggcttctatgtgtgaggcttttacctccagcagtgtctgagctgtgcggtcctctaccctgcttctttatggatcatatcctttccactttctctctctctcagaaattcatcagaacttctacccaatgcagtttcccacattgaggatttatacttatctgacattttactggatttgggatgagccgatcttctcattatccttctggagcatacagttctgcattgtcattgcacccagctgtggagaatcccacgcatacatatcctaaaatgca

SEQ ID NO: 93251 - DNA, 935 bp, Homo sapiens
atataaactgcagttttagtttttatatttctttctttcttataaagaacttccagaaacattaatgacagaaaagagggatctattttttcccaaaattatatccaagtatcacaattgaatccaagtatcatttttgaacataacgaaatttcccatgtattggaaaggctacacacaccatatacgaaggtattacttacagtacttgtgtgtgtgctaaaattgcattctgtgtgctctgtttccttgaaagtcatttccatttgttgagtcagtgcctgccttttctggtgctgatttgctcctctctgtgcttaagaatccttgtcatccctgttgagtttatcttagcctacagcaggggttgtgatggaggtgctggaggtggttgagatgaagaaggtaccttcctctcactcccagctgccgggatttctggtgctctacccagcctggctggcctcactgctgtactgccctgttgaccgtatgatcctcttccttcgcttctctctgctcagcagaaggtggtgggaagtaaagagctctcagcctggggtgttagatccacctacccagatcagcttcttgaggctactcaggagtttcctcgctttctatatccatggcctctggcttcagaattcccaatggctyctatgtgtgaggcttttacctccagcagtgtctgagctgtgcggtcctctaccctgcttctttatggatcatatcctttccactttctctctctctcagaaattcatcagaacttctacccaatgcagtttcccacattgaggatttatacttatctgacattttactggatttgggatgagccgatcttctcattatccttctggagcatacagttctgcattgtcattgcacccagctgtggagaatcccacgcatacatatcctaaaatgca

SEQ ID NO: 93252 - DNA, 1034 bp, Homo sapiens
aatagacatgactcaaaccttaagagatgtcgagatatcaggggaggtgtgcagaggaccctgtaactgatgcatccctcaaacccccttcaggaatgaagagcatagccccagctccagagccctcagctgcacggtcagttcctccatgattgcctggcctggagagagcccccatccaaagttacgccttcttctggggatggcatccacagactgctcaatgtggcccatgagggtctgggccccttgtccctccaagacaactctgaagggttgtctcagccttcaaagtccccatagaatgggaaggggtctcagcagagtcagcatcacagcctgccactccctctacattgctctgtgtctttctcgtcccttcctagcagtgatcccaggagcacccttaatgatgctgaagaagaaagagttaaaagatgagacaaaaagtgagtgtcctttcagctccccaagctgtaagcagctctttccttagcaacctaacatatcggttcacagtttctgtgtttattttttctcccagccagagcaaatctagactgcttgctttgggctgaatgttgaagaaggcagcactgttggcaggcagaggggctgtgggctgtccgtcttcctcttcctccgctaagggaaacaayggcaggatccagttgcttatctgcctgcttatctagcaagctgctgggtgtctggatcctgcaggggcagtgggggagagcccttagctcagcactgccctcctgtgctggggcaggcatggcaaagcccatgaagttgcttccctcagataaccttgtgtttccacctggagaggggaaataaagacacatcacatcattggattatgaggagtaaattatagaaggcacacacacagtgatggcattcaaaaaatatcagctgtggccaccactgtctcagctctttgaacttggacttgcaggactggcctcacttgcaggtactgtggcaaatttctccccatttacagcgaccttctgttgacactaaaa

SEQ ID NO: 93253 - DNA, 1284 bp, Homo sapiens
tgcttctggggcccagagcaagataaataaatccagggaaatggatcatccaggcgaggagcttctagttcccagttcttgggagagacagagagggatgatccatttgaagaggagagtggaagacatccctgaacagccaattaaaccacttttaatggttttgaagaatatatgttcaagttccaaaccaatctcaagacttagtgaagcagagataactggggctttggccgtgcaagataaactagcaaaatctgaaatgcaggcaatcctgttttacattaaggcaagtgaaaatcagcatgaattcaggtccttctctcattgctgtttgatgcatggttacccacgagaaaatgctccagcattcaggagacagcctggtgcagagaagataccgaatgaatgaatgaatgaatgaatgaatgaatgggtgaatgaatgaactgtttgctctgaggctctgatcattacagccagaggacagagcataagctgcttaggggatccaataaggaaagtggatatttgggattaaagagggagatgtggacagtacttcgatttattcatcgatttgtaaaatgcaatattaagcaattaatttcacaagtgcttatttaacttgtgtaaactgggattatgccagaagggaaagttttgcatatcaggaagatatctggcccaaggtacaggttaccaggcacagaaaggtgtcactcttatttcagaaacagccaagcatggaayccatctgtgggtggagtcacctcccttaggaggagcttgtggtcaatgcaggtgcacctgccacacctttttcctgtatctgcagctctaatgatttcctatcttccctatgttcattctgtgtggtttcatggctcagccccaggtgtcaagagttcagctgccttggttcaaattctgacactaccacttccttggacagactatttaacctttctgagcatctgccttctcatctacaaaatgggcacaagcatagtaaacacttcctacggttaatggaagaattagacgaggcgaggcgtataaagtgatactcgccaccttggctgtatattagagttacctggagagcatgaaaaaaaatgccagggtccggttttcaccctaaaccaattaaagcaaaacatttggggagcaggactcaggtgtcaggatcttttctatcttctgatgtagctgcatttgcagctgaggtgtgtaccacccttgtaaagttcttaagcagagtgtatggtatctagtaagcac

SEQ ID NO: 93254 - DNA, 2296 bp, Homo sapiens
ttgcagacatttaaaggtgttaaagctaattgctcccactggaatttatccagaacagtcatggaaaatgcattgtgaagattttattgactataagtggcaaagaccttggttttatatrtcctctaaatgacaacacctctcttttctccgttgtctgccagaaatagaagacaaggttaggctccacatggagttacgtccagcatcaattggacctaaaatgtcataaaactaattcttttcaggcatagcagtaacattataaagtatgtgggaagccatctggcagagacacaaaatctgagtttctctgacctgcaattctcaacctgttattcactagctatgaggcttggaaaagtgacttactgcttcttcacctgaaaaaaatgagaattaaaacatctgtataacaattttgctgtgaggatgaaaggagataaacagtaccagtgttccttgcacaaggcccagatcagactaagtaatccgtaaatgttactcttattcacatgatttgaaaacattcctttgttgttttcagacttcactttggctgaaatctaggtgaataagtcacctattttatgtgtaagtactcaaaaacatagaaagagtaaacgatatcctcaaatctaagctaaagtttaaaaggatcccttttctatagacgctattgcttctgagacactcttgtgaccagtcaataatgaggatgctgagttttttattattcgtttatttcatgcattaaatgaaggatttttgacactttttataggttggccactattctaagtgctgaataagacaaacaagtttcctgttctcaaaaggcttaattttcagtgacgaagagttagaacaaataagcaaacaagcaagataattacagaatatcaagagcgctatgaataaactaaaacaggaaaatgtgagagacaacgtctgggtgggggttatgattttacttatagatccttctgacaaacatttgaactatttctcaatataatgagaagaatccagcttgtgacaacctctgagaagagtcttccaaccagaggagagaaaatcttcaaaggtctagaggtaagaatgaacttagaagattaaaagaatacaaagaaggcccatgcagctggagcaaggagactttagaagaaatagtagagagaccagagagggaaaaaagggctagggcagaagcaccctgagaccatgagccaggctcaggtctcattccctatgcaacggggactgactgaacaggtgtaagcatggaaacaccttgatctgaatgcttctaatattttcaagaatctctttagcttagaagtgaaaaaaggtttagattactagatctgaaagaagctaataggtctttagccccaaattcttaattttaaaatgaaaaaacaactgcagccacaaaaaaaggaactaatttattcaaaagcttacattccattactagtcaaagcaggacccaaactcagaactttagtatcttggcctatgctctttctacataagggccccaaactttgcttaatgttacttaagtcctcaatgatgcttaattccaggagaataaagtagacaaaatacctcatcagaaccctcccaagaatctgtaagagtctccagggattgccccatctatcagccagttagtctattctgatctgtctctccttctctgtctcattcctttccatttactgttcttgtgagaacactaatgcctgtatctggggaaccaggctccatgctccaaaatccatcagtcccaaagttcctgcagcactgggaaatggttctttccaagctccacacagcattgtgtcttctgagctgctactcacaatttatgctactttgaccacggactcacagaactccaattaaaatagcttcttcacagtctcccctaaccactccctcttcaggaaccaaaactgagccaagcagctgggcagagatatgctcccctcatttctctctgctccatcccctctttccccatccctcctgcatcaatcaacaattaaatatcctcctgcccacataaaaacacaagagaaaacctatgcatttcaatgtatgcagttgggtacccaaagagtaatttctccatatttggcttttcaaacagctaaactttggatcccattccaagaactcaaagattccatgctaagtgagaaccaaggaagatatggctactgattggagttgcagacactgccttaaatcctttctgctgtggccttagcaagtaaacttttga

SEQ ID NO: 93255 - DNA, 2977 bp, Homo sapiens
tgcatagcacatggagagcaaatttaaggccttaggttcaaagtcatggcatgctggtaatgataataatgtttcatggtggagacagatctgtgaaaagaaagaataggaaacaacccagcaaactccgtggtctgacatgtcagcagcgttgcacccttgcacgctccaatggtcctttgcattacaaatttctcaatataagaaacatcctgaatatcctgagtattctttcctactgtcctctctggatttattaacagagtgtaaatgtcaaacatgggggaaggtgtgaagaatggagggctcatctcttttctgaacaaccctaaatactctggtcaaatttcaaacaattcctggttagacatttggatgcctttgattttgagtcctacatacattctcgttatcataagagatatgccacaggaaaaaaagacatgttctgaggcagagttacaagaccagatagggcagaacgggattttgatatttgatattgtttttggatcttcagactaatggtaggtaatacctatttgtgaatttaagctcaattataaggggaaattttttttttcagataattggggtcatccagggtgaatgagcttatctagaagggagtgaattaagaagaggagattcctgcgttgagtgggtgattgaactacatgcaaagcaaggcttcctccagttctaaggaactaactggaaaactgatttgaacttttatttaacagctttattaaggtttaattcacatagaataatctttatatatatatgtaatatacaatttaaatgttgtttgtttttaacatcttagtcattttatgtgtacagttgagtagtgttaagtacattcacattgtcgtacaccaattcaccagaacatttccatcttgtaaaactggaactctatacccactaaacaaccattccccatttccacttcctcccagtccctgcaacaaccactctactttccgtttttatggatttgactacttttgatacctcatatgtggaagcatacaatatttgtctttttgttactgacttcgcttagcctcgtgtcctcaagtttcatccatgttatagcatatggcaagattttctttcttgttaaggccaaataatattccactgtttgtataaacattttgttaatctattcatctgtagatgaacatttgtgtcgcttccacttcttggctattgtgaataatgctgctatgaatataggtatgcaaatagtaatttgagatcctgtttttcattatttgaaatatgcacccagaatggggattgctggatcttacggcaattctatttttaattcttttaaagaattgtcatactatttttttaaagtgcctgcataatttttcattctcaccaatagtgtacaaggtttccctttctccacatcctctttaacgtttgttcatttctatttgtagtagccatcttaatgggtgtgaggtataggttaaacttttataactagaaatttaagaactgagaaccatacagtttttctggctcagattattattattctgttcctaatgataagtttgaccttgtagaagcaacttcacctctccttgcaagttttctaaaatattaaataagaataataatgcatatcttaaaaccaaacaggcacttgaacctgttccacacatcatacacgtatgatacgtgatcatctgtgatacaatttatataagtatatataatatagttaaccatataaatatatataactataastatagttatatatagagagatagaaatacagctgattacatgtgataattacatgtgattcaatttgcatatataataagctatactaagcaggtatatggtaactttcttgataagcatccctctacagagaaagactcttcctttctctgttttacttacccacttcactgggatcacttctcacattaactccttgcctggaatccctgtctcagggtctgctatgggaaaaccaaaataagacaaatatctattcactcttactcattcagatataatacctaaagtgtaaattagggagtgaatatttgatggacctagtatagttcttggcagttatctttattatattatactcatcatggagtgtgaggaatgcttcataatccattatcagtaccctatcttttcttctagaggaataatgatagacatgtatacagcactacacagaggttgagaataacaggcctgagcaaaaccaatcacagctcaaggggcattttttttcatatctattagcaaatataagggctgtatttgacagtctctttttttcctcagctttttctcttctgatcatcataagatgaggtggggtgaaacagcaatagaataacagcgatggaattaatgctgtgcaggtttgaagagcatttgtcctactaaggccaattcctgggaagaatgatgtggagggtggatttttctgcgactgaggtctgcttggaataccgtggtctactgcgagtggattggaaacaaataattttaccagccaaaatgtactataggtatgagggtgcaccctccagttttcttatgaaacccttcttcttattgatttatgcctgctctagtctatctcaataatcacctagatactattcctgaaggattaaaaatgaaagaaatcaatatgttcaacctgtgtctgacagcaatctctgcacaactcaaggtacaaatcaaagccttctccattaagtcctccctacaattcacccatttccaggccatattcattctactctccgatgtatttccattgcattctatacttacttctgccacagtaactaaattttgtcttagattccacttactgtcaccctggtttgaatgtaagctcctaaaggataggaactaagctcttttcttcttgccttctctgggaaccattataatg

SEQ ID NO: 93256 - DNA, 1364 bp, Homo sapiens
tgcatgtgggccatgcctgaaagggcatgacattgggtgaagagactccctgcagctaaggcaaattcataaaggggttggcatttggaagctttcaaccactaggccttccagcagctgagataacaaatccttcattgaaggtaatcaaagtgatacatgacsacatccagttctaacctagttccaaagatttgggagcttcaagactctctagaatttggactttatataagcattgaactaattcacgaacttacctttgaagattctatccctctgtattggcctcagtatattaaagggcttgggagtaatatgcaagtaattcttgtgtacatcttagaagtggcaagacttctcacacaagtgtactctgtacactagccagggagaactctatttccctttgccaactccaacctgagttttcattccaaattcactgttgatacagacctatgttttactttaggattcaaagtttcaataaacctcatgtagctcaaccccatattcaagatctatcttttccatcaattgaatccattgccacaattataacaaattattggagggaaaaacagaatcaaatgcaggtcttcaaatatgacctggatattgagcccaaatattaagcattttaatagaaatagagttagtttcatagtttaggtttgaggaaaaataaaagaaatagatatactctctctaaatttattattctttctgagtgatttacatttaatatgtaagttagataaaattttctttttattaataatatgacaataatttcagagaagatgtctcattttttctcaacatattcttttaatctacctacacattcactaaatgaaagttgtgtcttagcctgccaaatacagtcattgtctttcggattccttgagcacaactttgtataagctgtaatgttggcatcatctggttaacctccagtgtggaatctaaggttccaaagagttcacttagcaactttaaggcaaaacaaagactggaaaccaggcatttggattgcagtttctgtagactttttgttcacttgcctcaaaaagtctaaaattctcactttcatctttaatcataattgtagttccttttcaaacttgtgtataatatcccagactcctgtgtgaagcagttttattatttgtttcttggaaaaatatataaaaactaaaataactatctatcaaaaaataaaatccttactatttcccttgaagctattattctattataaaatagtagttaagtatttactctaaatgaggttctgttcaagagatgggaacaaaatatcccttaccgtctaattgctgaagcaaatgagtgaatgc

SEQ ID NO: 93257 - DNA, 1364 bp, Homo sapiens
tgcatgtgggccatgcctgaaagggcatgacattgggtgaagagactccctgcagctaaggcaaattcataaaggggttggcatttggaagctttcaaccactaggccttccagcagctgagataacaaatccttcattgaaggtaatcaaagtgatacatgaccacatccagttctaacctagttccaaagatttgggagcttcaagactctctagaatttggactttatataagcattgaactaattcacgaacttacctttgaagattctatccctctgtattggcctcagtatattaaagggcttgggagtaatatgcaagtaattcttgtgtacatcttagaagtggcaagacttctcacacaagtgtactctgtacactagccagggagaactctatttccctttgccaactccaacctgagttttcattccaaattcactgttgatacagacctatgttttactttaggattcaaagtttcaataaacctcatgtagctcaaccccatattcaagatctatcttttccatcaattgaatccattgccacaattataacaaattattggagggaaaaacagaatcaaaygcaggtcttcaaatatgacctggatattgagcccaaatattaagcattttaatagaaatagagttagtttcatagtttaggtttgaggaaaaataaaagaaatagatatactctctctaaatttattattctttctgagtgatttacatttaatatgtaagttagataaaattttctttttattaataatatgacaataatttcagagaagatgtctcattttttctcaacatattcttttaatctacctacacattcactaaatgaaagttgtgtcttagcctgccaaatacagtcattgtctttcggattccttgagcacaactttgtataagctgtaatgttggcatcatctggttaacctccagtgtggaatctaaggttccaaagagttcacttagcaactttaaggcaaaacaaagactggaaaccaggcatttggattgcagtttctgtagactttttgttcacttgcctcaaaaagtctaaaattctcactttcatctttaatcataattgtagttccttttcaaacttgtgtataatatcccagactcctgtgtgaagcagttttattatttgtttcttggaaaaatatataaaaactaaaataactatctatcaaaaaataaaatccttactatttcccttgaagctattattctattataaaatagtagttaagtatttactctaaatgaggttctgttcaagagatgggaacaaaatatcccttaccgtctaattgctgaagcaaatgagtgaatgc

SEQ ID NO: 93258 - DNA, 1364 bp, Homo sapiens
tgcatgtgggccatgcctgaaagggcatgacattgggtgaagagactccctgcagctaaggcaaattcataaaggggttggcatttggaagctttcaaccactaggccttccagcagctgagataacaaatccttcattgaaggtaatcaaagtgatacatgaccacatccagttctaacctagttccaaagatttgggagcttcaagactctctagaatttggactttatataagcattgaactaattcacgaacttacctttgaagattctatccctctgtattggcctcagtatattaaagggcttgggagtaatatgcaagtaattcttgtgtacatcttagaagtggcaagacttctcacacaagtgtactctgtacactagccagggagaactctatttccctttgccaactccaacctgagttttcattccaaattcactgttgatacagacctatgttttactttaggattcaaagtttcaataaacctcatgtagctcaaccccatattcaagatctatcttttccatcaattgaatccattgccacaattataacaaattattggagggaaaaacagaatcaaatgcaggtcwtcaaatatgacctggatattgagcccaaatattaagcattttaatagaaatagagttagtttcatagtttaggtttgaggaaaaataaaagaaatagatatactctctctaaatttattattctttctgagtgatttacatttaatatgtaagttagataaaattttctttttattaataatatgacaataatttcagagaagatgtctcattttttctcaacatattcttttaatctacctacacattcactaaatgaaagttgtgtcttagcctgccaaatacagtcattgtctttcggattccttgagcacaactttgtataagctgtaatgttggcatcatctggttaacctccagtgtggaatctaaggttccaaagagttcacttagcaactttaaggcaaaacaaagactggaaaccaggcatttggattgcagtttctgtagactttttgttcacttgcctcaaaaagtctaaaattctcactttcatctttaatcataattgtagttccttttcaaacttgtgtataatatcccagactcctgtgtgaagcagttttattatttgtttcttggaaaaatatataaaaactaaaataactatctatcaaaaaataaaatccttactatttcccttgaagctattattctattataaaatagtagttaagtatttactctaaatgaggttctgttcaagagatgggaacaaaatatcccttaccgtctaattgctgaagcaaatgagtgaatgc

SEQ ID NO: 93259 - DNA, 1364 bp, Homo sapiens
tgcatgtgggccatgcctgaaagggcatgacattgggtgaagagactccctgcagctaaggcaaattcataaaggggttggcatttggaagctttcaaccactaggccttccagcagctgagataacaaatccttcattgaaggtaatcaaagtgatacatgaccacatccagttctaacctagttccaaagatttgggagcttcaagactctctagaatttggactttatataagcattgaactaattcacgaacttacctttgaagattctatccctctgtattggcctcagtatattaaagggcttgggagtaatatgcaagtaattcttgtgtacatcttagaagtggcaagacttctcacacaagtgtactctgtacactagccagggagaactctatttccctttgccaactccaacctgagttttcattccaaattcactgttgatacagacctatgttttactttaggattcaaagtttcaataaacctcatgtagctcaaccccatattcaagatctatcttttccatcaattgaatccattgccacaattataacaaattattggagggaaaaacagaatcaaatgcaggtcttcaaatatgacctggatattgagcccaaatattaagcattttaatagaaatagagttagtttcatagtttaggtttgaggaaaaataaaagaaatagatatactctctctaaatttattattctttctgagtgatttacatttaatatgtaagttagataaaattttctttttattaataatatgacaataatttcagagaagatgtctcattttttctcaacatattcttttaatctacctacacattcactaaatgaaagttgtgtcttagcctgccaaatacagtcattgtctttcggattccttgagcacaactttgtataagctgtaatgttggcatcatctggttaacctccagtgtggaatctaaggttccaaagagttcacttagcaactttaaggcaaaacaaagactggaaaccaggcatttggattgcagtttctgtagactttttgttcacttgcctcaaaaagtctaaaattctcactttcatctttaatcataattgtagttccttttcaaacttgtgtataatatcccagactcctgtgtgaagcagttttattatttgtttcttggaaaaatatataaaaactaaaataactatctatcaaaaaataaaatccttactatttcccttgaagctattattctattataaaatagtagttaagtatttactctaaatgaggttctgttcaagagatgggaacaaaatatcccttacmgtctaattgctgaagcaaatgagtgaatgc

SEQ ID NO: 93260 - DNA, 1242 bp, Homo sapiens
tctttcagaagacatgttagaacatgtaaggagagagaagtttccaaggagagtatgtcagacaaattaacatgcaaccaagtgagaaatacaggctgatggaataggctttttatgaaagtgcttcagaatctaaaattttgaagaggctgggtgcggtggttcacacttgtaatcccagcactttgggaggtcacggtggaaggatcacttgagaccagaagtttgagaccagtctgggtaacatggtgtaaccctgtctttacaaaaaatacagaaaattagcctagcatggtggcatgcacctgcggtcccagctactcaagaagctgaggtgagaggatcgcttgagccagatagcggaggttgcagtgagccaagattgtgccactgcactgtagcctgggtgacagagaaagaccctgtctcaaaaaaaattttttttgaagacaaaaataggagttttgtaacatatttgaggacttattcatttgattctttttcaaaataacatttattaggcacatattatatgctaggcaatgtactggttttaataatttaaatattaatattaaaatcaaatagctactttaaaaaatgcttacactgttactagcagtatgttatatactatggggcatagtacagcaatgggaggagagagaattataggatatacttccagagcaaagaagcaaccaaaaattccgaaattagaacatagtgggaaaaaatcattatcactttagtatagaattcacctatattttaatatagataatggcacactgataggttttgactgttatgtaatgagattaatatataaacccaaacatgaatatcagcattgggctctataaagcaggaattttttttagaatgatcaraatattatgttacttttggcctatttatagaagctgaagctctttgaaatcctgctattctcaataatgtcaaatttgtttagaagatagaccattagttttgaactaacactgaatataatctagtgaataagtaattaatatatttgagtaaagtcacagttatttgatatcaagatgtgactacattgtggttggctgcaccaggcttgcacatgtgctaggaggcctgtgtgatgaatcagagcattgagggacatagaaatcagaggcagggtaatccagcaagataatataatgccctgggatacttccgtttgtaaggcaaagttggagtaaggtgtaatca

SEQ ID NO: 93261 - DNA, 2424 bp, Homo sapiens
atcagagttatcaaaagaacaaaataaaaaacacatgaatgagataataattaaacacacaatgaaggtaattttccctaagccaaatatagttctaagcctgcagtttgaaagtaactgtacatagattgtgatattccttaaatatcaccatcgtcatcgttgtcattatcttcttcctcttttagcaggatgtgaaggatataaaatatttctagaaattatttggcatttctctcattaacaggtggggcctaattttcttcttcatgaatgtaggaatgcaggctgaccttagaaacttgtttctaattattagagtgaattgagagtggcattgtgtggttttgcagtctagatcataaaaggccatctaactcctgcttggcctctctctctctcagaacttgtgcttttgaaattaagaagtctagctatcctgactccatatgagccatgctagggtaaccatatggagaatgcccataaggaggaaaaagatgcctgaggaggggctctgctggactcctgtttgagtttttgacttatgaacttcccagcatcaacagttcagtgagtaagccttcagatgattccagcccccagccttccataagccccagacaccacccaatggagacaaattgggctatacctgcggagtcttgtgcaaaatggagaacagcacaagaagacatgctgttgttttgttttggagtggtttgttatgccaccatagtgaatagaacatgaattcataagctaatttaacaaattagctacataagataaacatcaggcatgttataaatttgtgatctacatcactggatgctgagacacagataaatagaatgtattaaccactgagagaaaatgaccatccctacaaattctgcaaggtattattcacttgcaggacaaaatactaggatgtacaagaattctgtatataatcacttaagaaaataaatgacatagcaagaattgaaaaggaacagaaacagttgtgagaaagaaaatatatattctacaaaagtacaattacctatacatacctaagcgtactctttctaggaatgtgtaatatcggtgctaaataggacttgaaacaaaaatggtgtggtgagggatgcatttggataatgaaccattttaggcaaaactaagagctggaggatgaaggaaggtacagagatataacaggctttctaaatagattggaggatgaaaagaaaaagagaaggaaagaaaagggtcaatgaaagtatcccagaggccttaaattagtcatttggaagaataaaggatacttcatttttaattatagtaaagaaatatttgtctgattttgagagaagataaagggaaggtgactactaatgaaatcgattacagaaaacctttcaaagcagcaatgggaaaaatgcaccaaccagtgaaaataaggggaagccaggccgggcgcgggggctcacgcctgtaatcccagcactttgggaggccgaggcgggcggatcacgaggtcaggagatcgcgaccatcgtggctaacatggtgaaaccccgtctctactaaaaacacaaaaacaatttttagccgggtgtggtggtgggctcctgtagtcccagctactccggaggctgaggcaggagaatggcgtgagcccgcgaggcggagcttgcagtgagccgaaatcacaccactgcactccttgcctgggagacagagccagactctgtttcaaaaaaaaaaaataaaaaaaataaggggaagccaaagataaataccatctaaaatgaaataattaacttaaggtaaggctatttctttaaacttgatcagtcaaaatattatataattagagctaactaattaaaactttctcatatgctgtttacaaaactacacacacagcgaagttataaagaatgatttaaaagaaaaactagtcaaataagagagagagaaaggatgtgagtaaataggactggtagtataaatatcacattggatgtattcagaataaacatttctaaataggagacaatggaactttttaaaaaataagtacaattttgaaactctaacaatcaatatgtgaaataataaggcagttaattatacaaaktaaaaaaattagaaataaaaaaactgcttaaaatacagttaaaaattcatttcctcctgaagttttggaaaagctcaaacttttcagtgcctccccgcttcctcttcttatccacagtcagtggttgtgtaaggccaacttaaattctttagatattcaaagccagttcttttctgggatggagctggaggggttggtaccatcagtttgtttattccttaataactcaccttagtatatgtgattaggaacaatgaatctaatttgttcagaaggatgcttttggggatcct

SEQ ID NO: 93262 - DNA, 2424 bp, Homo sapiens
atcagagttatcaaaagaacaaaataaaaaacacatgaatgagataataattaaacacacaatgaaggtaattttccctaagccaaatatagttctaagcctgcagtttgaaagtaactgtacatagattgtgatattccttaaatatcaccatcgtcatcgttgtcattatcttcttcctcttttagcaggatgtgaaggatataaaatatttctagaaattatttggcatttctctcattaacaggtggggcctaattttcttcttcatgaatgtaggaatgcaggctgaccttagaaacttgtttctaattattagagtgaattgagagtggcattgtgtggttttgcagtctagatcataaaaggccatctaactcctgcttggcctctctctctctcagaacttgtgcttttgaaattaagaagtctagctatcctgactccatatgagccatgctagggtaaccatatggagaatgcccataaggaggaaaaagatgcctgaggaggggctctgctggactcctgtttgagtttttgacttatgaacttcccagcatcaacagttcagtgagtaagccttcagatgattccagcccccagccttccataagccccagacaccacccaatggagacaaattgggctatacctgcggagtcttgtgcaaaatggagaacagcacaagaagacatgctgttgttttgttttggagtggtttgttatgccaccatagtgaatagaacatgaattcataagctaatttaacaaattagctacataagataaacatcaggcatgttataaatttgtgatctacatcactggatgctgagacacagataaatagaatgtattaaccactgagagaaaatgaccatccctacaaattctgcaaggtattattcacttgcaggacaaaatactaggatgtacaagaattctgtatataatcacttaagaaaataaatgacatagcaagaattgaaaaggaacagaaacagttgtgagaaagaaaatatatattctacaaaagtacaattacctatacatacctaagcgtactctttctaggaatgtgtaatatcggtgctaaataggacttgaaacaaaaatggtgtggtgagggatgcatttggataatgaaccattttaggcaaaactaagagctggaggatgaaggaaggtacagagatataacaggctttctaaatagattggaggatgaaaagaaaaagagaaggaaagaaaagggtcaatgaaagtatcccagaggccttaaattagtcatttggaagaataaaggatacttcatttttaattatagtaaagaaatatttgtctgattttgagagaagataaagggaaggtgactactaatgaaatcgattacagaaaacctttcaaagcagcaatgggaaaaatgcaccaaccagtgaaaataaggggaagccaggccgggcgcgggggctcacgcctgtaatcccagcactttgggaggccgaggcgggcggatcacgaggtcaggagatcgcgaccatcgtggctaacatggtgaaaccccgtctctactaaaaacacaaaaacaatttttagccgggtgtggtggtgggctcctgtagtcccagctactccggaggctgaggcaggagaatggcgtgagcccgcgaggcggagcttgcagtgagccgaaatcacaccactgcactccttgcctgggagacagagccagactctgtttcaaaaaaaaaaaataaaaaaaataaggggaagccaaagataaataccatctaaaatgaaataattaacttaaggtaaggctatttctttaaacttgatcagtcaaaatattatataattagagctaactaattaaaactttctcatatgctgtttacaaaactacacacacagcgaagttataaagaatgatttaaaagaaaaactagtcaaataagagagagagaaaggatgtgagtaaataggactggtagtataaatatcacattggatgtattcagaataaacatttctaaataggagacaatggaactttttaaaaaataagtacaattttgaaactctaacaatcaatatgtgaaataataaggcagttaattatacaaagtaaaaaawttagaaataaaaaaactgcttaaaatacagttaaaaattcatttcctcctgaagttttggaaaagctcaaacttttcagtgcctccccgcttcctcttcttatccacagtcagtggttgtgtaaggccaacttaaattctttagatattcaaagccagttcttttctgggatggagctggaggggttggtaccatcagtttgtttattccttaataactcaccttagtatatgtgattaggaacaatgaatctaatttgttcagaaggatgcttttggggatcct

SEQ ID NO: 93263 - DNA, 1276 bp, Homo sapiens
tgcattgggcaggtgtctcctactcaacaacatacagtaagtggcagaacaggacaagaacccagaaggcagatgcagcctattctccgactgccagttaagtagagatttcttctttttctgctgcattatgatgtcacaagaaacacagcaaaagctgtaatcggggttagggtatattagctaggacatttgggtggaactagacatcaagaaacctgggtacatgaccttgttctgaccctgaagtgccatattctttttgggcatgttcttccaatcctctgtcattaggtttctcatctgtgctaaaaataaaagatgtaataatctttacaatactaatggttcagaattttggaatgatactagttaaacttaactactcacaagactcttagctttcagagctcaaagtcaggtatgtgtctgtcattcatgattttcccactcttttctgacatacctcaagtaatcacagagaaccatgtgttattggcactgaattgcagcttgccttcagtctttttattcctttacaactgggtcaggtttagctcagtgtgattgcatctagtgtcatagcagataccatgttttctctgatagtgttttctgaagtaagatgtatccccaacatacaagatcttcaatgaaaacacagtgaattgtgctaccctttgacagctttagtagaatcatgaaattaaaaacaaatcattcaaccaaggatttctagggggtttgcagagtattccagggctattcttatgtttgggctattaatgccataggaacagggaaataatggaggactcttgaaggaaagtagttctatattcctcaaggaagcacacagatttcataggctgggcttgagcagctactaattaaccatggccccagcaaatatacacacatatcattagaaaaagtatcagtggatatagtatataccatatccatatctatatacatrcatgctatatatatattttgtatataaaccaaatatgtagaactgttcattgataaccatgttttaaatctattcaatcaccagcctgaaggtctcccttttttcaataggaacagttgtttgtaagatgtataatttggttatggaagttgcaattatttttcatgtgtgttttttcttggagttcaggtcacctgtcttctttataatataggccaattcctgtgaggatttgtttggtgcctgaggggaaagaaccctttatgcttttctttctgggcacttcacaccaggctt

SEQ ID NO: 93264 - DNA, 598 bp, Homo sapiens
tttggaattaggcccacaaatgggcttgtgaggacagaacgttttaaaataatggcttaaaaataatagtcgatacaggccaggcgcggtggctcacgcctgtaaccccagcactttgggaggctaaggtgggtggatcacgaggtcaggagatcaagaccatcctggctaacacggtgaaaccccgtctctactaaaaataaaaaaaattagccgggtgtggtggtgggcgcctgtagtyccagctactcgggaggctgaggcaggagaatcgcgtgaacccaggaggcggagcttgcagtgagccgagatcgcgccactgcactccagcctgagtgacaaagcgagactctgtctccaaaaaaaaaaaaaaaaaatagtagtaataataatagtcaatatagaaaatagttataatgactaagttataaatgggtttaataaaggtatttttaaaatgattaccttttaaaaggatattttacctcagtttttgtttattaagagtggttttaaaaagtctaagttatttctaaattctcaaggttcagctacctcttatactgtactaggagatcaatattatttatccaattca

SEQ ID NO: 93265 - DNA, 611 bp, Homo sapiens
ctctcagaaagtttacccctcttatatacttcttaaaattctctttagaattttatttcaaaaaactctttttgtttccatacatttctagtacctttaaaagtatgattttggtaatttacttatctttttttctagttgttgtttcaagagcattggcctgctatgaaatagtacattatacttagaaattaaagtttgaatggattatttttattattttatatttttcctacctattggctttttatttatatagtcattcttctattcctttagttgttactttaaatattatagcacacattcttatgtctggaaaatgcaagatgtttctactatctatttttgtataacacaaactgccaggaaacttattgccttaagacaacaattatttctcttgtttctgtggcgactgggcttacctggacaattcttatttgggttttttatatggttctaattagatgatgactaggaccagtgcctactaaaaacttaactgggctgggtttttttttctttaaagragaacagctatatcctcttaatattttaatgtgttttctatttttttaatgtgcatgttgacatgatcttgtatattc

SEQ ID NO: 93266 - DNA, 611 bp, Homo sapiens
ctctcagaaagtttacccctcttatatacttcttaaaattctctttagaattttatttcaaaaaactctttttgtttccatacatttctagtacctttaaaagtatgattttggtaatttacttatctttttttctagttgttgtttcaagagcattggcctgctatgaaatagtacattatacttagaaattaaagtttgaatggattatttttattattttatatttttcctacctattggctttttatttatatagtcattcttctattcctttagttgttactttaaatattatagcacacattcttatgtctggaaaatgcaagatgtttctactatctatttttgtataacacaaactgccaggaaacttattgccttaagacaacaattatttctcttgtttctgtggcgactgggcttacctggacaattcttatttgggttttttatatggttctaattagatgatgactaggaccagtgcctactaaaaacttaactgggctgggtttttttttctttaaaggagaacagctatatcctcttaatattttaatgtgttttctatttttttaatgtgcatgttgacatgatcttktatattc

SEQ ID NO: 93267 - DNA, 507 bp, Homo sapiens
catttgcctcatgttggtatcctttaatggactttagtaagatttaataatctgcaaactgaatctgaacacatttttggacttaatatccaagaaccttgtatttttgtagtttgaataaatggattcaattaaagacattctgcttgctggtaataaaccaggttttaatgataaaaatggaaattctttaaaaagtaggatgcaaatgagaagttggaattgggtaagtaatagtgaactttataataattgtgaatattatagtcataggaaataaatttatgaaataaatatatgaattataaacaaatattacatattatataataatacacaattatattattcagatatayataatataaagcaaatttatataaataatataaaataaatttacaataatagtaaacaaatactagtaacattataatagtaaaatggggaattttaatcatagttcggctttgcatatgtttcctagaatatcacaagtttattttt

SEQ ID NO: 93268 - DNA, 550 bp, Homo sapiens
agactgaggcacagagagttgattagcccaaggaagtaaggggaggagggtccccttctaacaggctctgcaggactctgacacctttgccctaagaagcctgaagggcagcaagaatctcctcttcttaccccatctggacaattgcagcccccatccccctcccccgttcttcataaaccccagattctcaggtccaggggagactgtggttcaagccattgccacacccaccccaccccgctatcacccacactcccagcacccataagcacctactgggatctcaagccctgctagatgccacaaacttggsctgctgaagggttagtctgtccaccatccggggaactgtcctttcaacagcaagggaaaataaagcccagagggaaaagaatcacagattgtggttagggttggaattcagatcctcatgtaaatggccccatgcagaggccctagcctgagcactaactgctgtgtcattctggaagagccgcttcatgtctctggcccctggtccttttgtctgaacaatggcaaggcagga

SEQ ID NO: 93269 - DNA, 750 bp, Homo sapiens
ggttgtgaaattcaaaatggttagtggagaaaagcagcaaacccccatagataggtcataccaagagcaatacttytgttgttcatagctgtgtgaaatttaacttggattcctgaaagaaagcttgccaatttctttaaatctttgtggaccttcacatgaatgtagttttacactcagtgaatgttgattggaatacatataaaataacaaaatgcaactacgaattctggaatacttttaaattataaagcacagaagaatctatggacatctgaaaaaaaggtagtatgtgtgtttactctgccatatacatattccttcaaaaatgcagagcttacttgaaggtgatattaaccccattcattcatttattcattcatcattgattcattccttcagggaaaactgatctcattgtagttacaagacaaagtattaataacgcatgtgtttaaagttatttttatttaaaatatgtgtttaaagttatttttctaccatacaaatagattcatttctctttccatattttttcttttggactgccttgtgactagtggaatagagaggctgtggaattttatttttttcggagcaaagatagaaaacatacttgttttgttggagagcgtcacctttcttgtattgttgcacataagcggggtgggggatcacctatcaccaagtatcgtttccagtgagaggcagtgaataccaggcccacaaggtctggtggctgctgacctc

SEQ ID NO: 93270 - DNA, 648 bp, Homo sapiens
ccgggcgttgcctgctccgtgcgctgggaggcggtccagccggctgggttggggccaccctgcgcctcctggaaggccttatttaggagtagccgcacgtgatctctagcattttaagcttctctcagagaattggcatgtcactttggaagaggtgaaaatggtacaggcgaccaacgacttttacaaggtgtcaccttagaggaacagcctcgtccttccgaatcagttaacattggtgatgacagagaaataacgttaaataggtggagagcacttaaagtaactgtttgttcttttgagacagtcttgctctgtcgcccaggctggactgcagtggcgcggatctctgatctcggcttactgcaacctccgcctcctgggttcaagcgattctgctgcctcagcctcccgagtagctgggattacaggcgcgtgccaccacgctcggctaatttttgtatttttagtagagacagggtttctccatgttggccaggctgctctcgaactcctgayctcagatgatccacccgcctcggcctcccaaactgctgggattacaggcgtgagccaccgcgcccggcctaaagtaactatttttacttggtgtttactaccaaatggggactgttctaagttgtgggt

SEQ ID NO: 93271 - DNA, 648 bp, Homo sapiens
ccgggcgttgcctgctccgtgcgctgggaggcggtccagccggctgggttggggccaccctgcgcctcctggaaggccttatttaggagtagccgcacgtgatctctagcattttaagcttctctcagagaattggcatgtcactttggaagaggtgaaaatggtacaggcgaccaacgacttttacaaggtgtcaccttagaggaacagcctcgtccttccgaatcagttaacattggtgatgacagagaaataacgttaaataggtggagagcacttaaagtaactgtttgttcttttgagacagtcttgctctgtcgcccaggctggactgcagtggcgcggatctctgatctcggcttactgcaacctccgcctcctgggttcaagcgattctgctgcctcagcctcccgagtagctgggattacaggcgcgtgccaccacgctcggctaatttttgtatttttagtagagacagggtttctccatgttggccaggctgctctcgaactcctgatctcagrtgatccacccgcctcggcctcccaaactgctgggattacaggcgtgagccaccgcgcccggcctaaagtaactatttttacttggtgtttactaccaaatggggactgttctaagttgtgggt

SEQ ID NO: 93272 - DNA, 1410 bp, Homo sapiens
ggatccagtttctaggtcttcacggaagatcatggtatcaagaaagacattattagaaacgttcagagactagacaggatcatcaaaaatactgacttgaggctgggcgcagaggttcacacctgtaatcccagcactttgggaggccgagatgggtgaatcacctgaggtcaggagttcgagaccagcctgaccaataaggtgaaaccccatctctattgaaaaaaaaaatacaaaattagccgggcttggtggcacatgcctataatcccagctactctggaggctgaggcaggagaatcgcttgaacccgggcggtggaggttgcagagctgagatcacgccattgcactccaacctgggtaacagagcgagactcktctcaaaacaaacaaacaaaaacacctgacttgacacagagactgttaattactgaccttagaccttatacctaatgatctcattggtcatgtctgtgggcacagcatacaggtaggaatggaaaaaaaaaattgttactggagattaagtaggatcaagcatgtgaaggaattcatgagttacctacagatgttagattaataatgagaatggcttcctagtgtcttcaatcctcattcctgctattacactctctggttttacttcccattgatggctgcccccttcttctcaccaagccattctcactgttagcctgatctgcagggtgatgtagtagtacccttaagctgagccccagctggaaagagcctcagactgattatggggccttgtgagtttctggatttagataatccctatacagtctagttcatggagccaagatttggcctagtactttaatttcttgtaggagtggagttctgcagtcattttattcgtccctcttcttagggactagagctctgaatctgagcacaggtttttgggtagtgctgtgtctctggccagacctcttagcttactaaaacataaattccccatgcctggtctgacccgtatgttgatcctgccatcacatcatctaaactggccggcacagtggctcacacctgtaatcccagcacttggaggccgaggtgggaagatcacttgaggtcaggagtttgagaccagcctggcccacatggtgaaatcccgtctctactaaaaatacaaaaattagctgggcctggtggcggccgcctgtaatcccagttactcaggagggtgaggcggaagaatcgcttgaacccgggagatggaggttgcagtgagctgagattgcaccagcctgagcgacagagtgagactccgtctcaattaaaaaaaaaaaatcatctaaactgctttgacttttctcaccaactttgggctcggagattatttctcttttgcttttcaacactactgggcatgtttagatct

SEQ ID NO: 93273 - DNA, 517 bp, Homo sapiens
gttctgcattttgctgtgaaagtgctttaaaattgatgagccttcttgggaaaggtccactgtcaggttgtggcagatgttacagcagctgctcccatgttttaaagtgcctttgatgtgatccagccaatgcgatggaaagcagccttcaaagtggaaagagtagcagctgtggctgcagcagaccttccattgatggagcctgttgaggagtctaaatggctccaaaagatcatgaagctgggctgatggacattcaatcaccatacccactccactgttgtgccaaatagggagaatagagagagaagcagttgtgccagctgctactattggggttatgatgcatttcattctgtaatgaatattcttagtgttttctttctccgaaatctcatgagmttatagtacatgttcctccataggcaaaattcttaaatcaatattcattcactcgactaatatttattgagcttctgatgtggcagtcaccatgaggccctagggattcaataat

SEQ ID NO: 93274 - DNA, 500 bp, Homo sapiens
atataccatgaagtaaatacagagagctgagactcactgtgactttattctttgattaaggtaggtaagagttaataaggttaaaattgcatgtatatatactcaaaaatagttcattctattttatcctcataagggaatatatagaaactgttatttggaaaaactgaaacatctacaaagaatttgttgaccattcatctttcaaatgattgcttaattaactaatggccattatttttattacaatatttatttagtataccacctgatgcaataatgcagtatttgctaactatgtgagttaggataaagttcagttactaaggaatcaattaagagaccttaataatatagcacttttctgtgctatagcactaawgacattagtcaccctttttttacctttctgcttcactatcctcaaggtcatctgtgatttaggttggataccagaactccagggtttctaaaagaaaaagggcacaaaagaaagtaca

SEQ ID NO: 93275 - DNA, 1046 bp, Homo sapiens
caattaaaaagacataattaatatacagaaaaatcattttaactatgagttgtatatctgtacccattttacttttcttgctgaagttaaaacatgtttttaatagaataaatatttggaaatttacttttttactgaaaggaattttgacagtaaggatatttttattttaatatatttcatctttaaaatatgaaaaagtaacactgtcataaaaattgcatgaacatatattttggaaattgagattatatgctgactttgttccacacaagaagacagtaattcagtgatgtggttcccagggttaacccaaagcaattcacaccacgaaacatgttacacaccaaagcacccaaacttagtgacataaaacaatgttctttttatttccttataatttttttggtcagtcgaatgtttttttgtgtgtgtcttgaccaacacattttgatctatactgggctcttttatgcatctatagactcatctggcagtttgactggcagatctagtttagggtgatattctataattgccatactcatatctgacatatgtcaccactggctgtcagctgggtacatcacttcctctccataacggcacttcatcttccagaatgctagtttatactcatttatatggatatagggttccaagtccaacaagagagtaaaccctagtatgcaaatactttttgcaagtgtctgtctgcattatatttgataaagttccattggcyaagcaagtcacattggagagcataacaagcaggtagtgaaagattttagtttttaaagatgttttatacctaacaattcattctttattatttgccgttaagatacatggacactaaggaaaaacatggacaatcttctatttttttcttaatagtcacataaaaaagaaaaacaaataatatactgaaaattcaaattttgattactttttcagagttaaatggttagcaatcaaacaattgattagaagcttgtatcaggtaaaaataggatatttagtgtaaatatgattttctttac

SEQ ID NO: 93276 - DNA, 676 bp, Homo sapiens
taatatatttgtctgactttaggataatgacaatgctctcattataaaataagttgtaaaatattacctccatttctgttttctggaagagtttatatagaattggtaactgtttctaatcaaatgtgtagtagaattttctaatgaagctgtcttgttctgccatttattgaaagaattttgcctataaattcaatttatttaataaccatcattaaagactattctaattattaatatcttctttcataaggccaggtgctgtggtgcatgtattcaccacactttgggaggccaaggtgggtgaattgcttgaatccaggagtttgagcctagactgggcgacatggtgaaaccctgtctccatacacagaaaaaaatacaaaaattagccaggcatggtggtcacatgcctatagtcccagctactctggaggctgaggtgggaggaycatatgagcccagaagcttgaggctgaaatgagctgtgatcatgccactgcacttcagcctgcatgacaaagtgagaccctatctcaaaaaaaaacaaaaaaaaacaaaaaaaaaacaaaaaaaaacttcaaaaaacaaaccaaaaaaacccttctttcatagactttggtagtttgtgtccttcaaggaatttgctcattttttttttctatttaccaatgca

SEQ ID NO: 93277 - DNA, 1221 bp, Homo sapiens
ggtctcactaatcctttytttttgtaattattattatcaaaaattttgatattaaataatttcattgagcacatggtaactatacaatgttatttaagtacctgacattgattttctcctttaattcttctgataacccaatgcagcagatactattatgatcactatttcacagataagaaacctgagaccaaaaagattacatagcttgttcaaagtcctgataatacacactatatagtggctgagcttgatttcaaacccagttttatactgatacaagagttttgactcttgtgttattctacctggaatcagcaccctcaaaacacttttgtttcatattataactaattaaagatagtaaatggttctctggtgcaggttttttgctccttagttcagttaaatatgggttcttgtctcatggccaggaaaaattaggcatgtagcagattgaaaagtgaggagggtggaatttactaagcaaaaggaaaactgtcaacaaaaagaggggtcctgcacacaagttttcacctcacaagttgagtaccaggccaccatacacgagttgaagaggccagccttcttccctgtatgaggcgcaaattcctggtagctccaccccattcttccggtgaatatgcgggcccttagtctgagccactccaaattgatttatttcctttactgcgcatgtgttaagggatggaattttttgccgtgggcatgtttagacaaaccccttacacacaatgacccgggtgggttggagattctccagggatacttccctatttgcctaggcatttggctgtctctgcttctatcattttcacaaataaatatgatcaactgttgaaaaagaatttgtctcaaaatattatcagtgtaaaagcatgaccttctctttgtgtcttaaccacaaccatggagcctagttgttccaaataaaaggctagtcttgaaacactgtcaatatggtgagaactgatcctagttgggggccaaaaacttaggcataaatagtgttttccattacttcaaaataccatcaatcacaataaaatgatcagttattttgaaaacaaacaacttattgcccttgtttcattgaaatagataactgattttaagtcaatccatttatgtaaatataacctttgagtaatggcagtcgttaattttgggaatgacttacatttcattaacttggacaca

SEQ ID NO: 93278 - DNA, 1121 bp, Homo sapiens
tggctggagctttaggaactttgacttgactcttgtccactaaccagagtggttttgttagctgataagtatatccatcttaattgtgtgctctgaatacagggaagcaaacacagcatgggtccacagactcatatgaaccctcacccagtggacagcagccagagaactatttctcagtggcctcctcaacagaagaactatgctgatatttgcttcagctctgtccaatacctctcaaaatactaaataattcccttttcccattgttctgttactctggtagatagccaaggttgggatacattcactatatacacttgtaaatttaaaattaatgctctctgccttagatttccataaagtgaagactattatctcttacaggggttcacaatggtatctccattctaattaagttggtctttctaaatttttgtcatagcccttagtcagacaaatatttcccccactggcaatatttttttacatttatttttctaaatctcacatattcgctaaaatccaaataaagaactgtttgtttgtttatttatttatttttgtttttgttgttgttttggaagcctttgctttggaaatgctccctctgacatcaactaggtgactgccttgagttgttcttcaactcttgaattatttaagtcttcatacctcagttaaacaatgcaacaagcaagcaggtaaaccttagtatgagctagtagtttcatatatatctatatttaatcttcacaaaatcaccatgagatatgtgtarttatttttgtcgttattataagggaataaacattctctcatagattaaattaatttcccaatgtcacacaactgattaaatgttacagaatatatgtaattcccagaattctgaatctaattatagtgtgctctttttgtattatatgtaccattttttcccaatagattttgagttactaaaaaatgggcttgtatctagtatatttttgattccccgcaattttgtgagaaccttgcacacaatagaaacgcaatatatatttactggttgataaattaaacatacaaatcttcttccttgaatatccacatttctgaccaactcttaactaaattct

SEQ ID NO: 93279 - DNA, 1121 bp, Homo sapiens
tggctggagctttaggaactttgacttgactcttgtccactaaccagagtggttttgttagctgataagtatatccatcttaattgtgtgctctgaatacagggaagcaaacacagcatgggtccacagactcatatgaaccctcacccagtggacagcagccagagaactatttctcagtggcctcctcaacagaagaactatgctgatatttgcttcagctctgtccaatacctctcaaaatactaaataattcccttttcccattgttctgttactctggtagatagccaaggttgggatacattcactatatacacttgtaaatttaaaattaatgctctctgccttagatttccataaagtgaagactattatctcttacaggggttcacaatggtatctccattctaattaagttggtctttctaaatttttgtcatagcccttagtcagacaaatatttcccccactggcaatatttttttacatttatttttctaaatctcacatattcgctaaaatccaaataaagaactgtttgtttgtttatttatttatttttgtttttgttgttgttttggaagcctttgctttggaaatgctccctctgacatcaactaggtgactgccttgagttgttcttcaactcttgaattatttaagtcttcatacctcagttaaacaatgcaacaagcaagcaggtaaaccttagtatgagctagtagtttcatatatatctatatttaatcttcacaaaatcaccatgagatatgtgtaattatttttgtcgttattataagggaataaacattctctcatagattaaattaatttcccaatgtcacacaactgattaaatgttacagaatatatgtaattcccagaattctgaatctaattatagtgtgctctttttgtattatatgtaccattttttcccaatagattttgagttactaaaaaatgggcttgtatctagtatatttttgattccccgcaattttrtgagaaccttgcacacaatagaaacgcaatatatatttactggttgataaattaaacatacaaatcttcttccttgaatatccacatttctgaccaactcttaactaaattct

SEQ ID NO: 93280 - DNA, 581 bp, Homo sapiens
ggatccacacagtgaagtattttatagcaattagaagcaaaggtcacacagcaatacagatagatctttttaaaaccgcaataccagatgaaagacattaagaaatagaagggtaacaacacacactggggctttcagagaatcgagggtgggaggaggaagagggtcaggaaaaatagctaatgggtactaggcttaatatctgggtgaaataatctgttcaacaaacccccatgacataagttcaactatctaacatacctgcacttgtacccctgaacttaaaagttaaaaagaagcaaaatgaaatatatcacacaatgacatttgtttaaattaaaatatttgcataaaaattgcaacacacattttgcaagaatacatgcacacagatgttcaacatcacaaatgtggcatgggaggttgagaatcagagcacctcatacagtagaaactcaataaatgctaatcctctagcacagaccatgtaaaatgtaaaggaaygtgtatgtgtatgtgtatgtgtatatgtatgtgtatgtgtatgtgtatgtgtatgtgtatgtgtatgtgtgaggatg

SEQ ID NO: 93281 - DNA, 1096 bp, Homo sapiens
gtaagtatacatcttgggtttctctagtcctagtgaatcaggtcaattctggtataattattctggtagagtagagtgcgaatcactctaaaaattgtgctggttttgaagatctatgattacttttattaggtgatgcccacaaaagcatttcaaaatatggactaggcaycttccattctaggtcttatctataagagaataaaacacaaagcaggcagaaaaatctatggaaggcaccaatggaatgtctggtattcaagcgaagatacccagttaacaaatctccactggggaatgggggctaggtagagatttcttaggtgtttctgcttgctggcatagtttactctggttgcttttcaatactcaactggtgcacgccctatggtgtactggagaatgctcatcttgatggtcaggggctgggcaacatctgttgttaaatattttgaatgttacctgttactgaacctctctaacctgcgttagcatatcaatagatttcttgatttggtgatgattcaatgacatatcactgtgccacctggggtagttaggattttaaagccagcaaataaatgtaataacaataattgtaaaaaacaataatgctgccaactcaaagtttactatgtttgagaagctgctgtaagcactttaaatatattaactctttcagttttagcaaccctgtgatataaatactattacaattccattttttacacatcagaaaacggaggcacaagctaaaaacattacctaaggccacacagcaatggtgatgtgaatttgaaataaattgagactcataaagacttcatggcttggcccaaggaattcaaaaacaaggccactaaatttgaaaattatcacaaggatgctcatataaatttggacctatttggatgtaaattcaggtccaaaacactatgttggacaaaggaattgtaaacccattcaaataatctccatgtcctagtctaggatgattttgtttacaagtcttattcacaagatctttagaaatatgtcccaagagagcatgtaatggaattgactgttacaaatatattattatagccatacttaa

SEQ ID NO: 93282 - DNA, 572 bp, Homo sapiens
ctctggaatgagtgtcttaatttctttatggccagctgttacatagaaaggtgggggaaatttaagagcaatatatttaggttttatggctggctttcaggaaacgggattctggcttctatggccggtcttggagaagaggaattctagtttctatggctcacctggggaagaatcagggtcaacagacaggagggcagagaaactttgcttctgcggccttcatttggggtatcattttttgggctccagcgttaccttcacagcaataacaaataactaggttttgccaggaacttggcaactctgagaggattaaagcaagactgctgccaacttctgttgcttccttatcacctcaagtcgtctcagatwaaagtctctgatagttgatctcaaggagttacacgtagcaattgggaagcacatttttatttgcttaagcttctaaagtctaatgtaatgtcatttgcacaaataaaaattaacagttggtcaactaagagagcaaagtatagagtgtttttcaagggatgactgtggctttcaactttaaaacacaaacctgattg

SEQ ID NO: 93283 - DNA, 572 bp, Homo sapiens
ctctggaatgagtgtcttaatttctttatggccagctgttacatagaaaggtgggggaaatttaagagcaatatatttaggttttatggctggctttcaggaaacgggattctggcttctatggccggtcttggagaagaggaattctagtttctatggctcacctggggaagaatcagggtcaacagacaggagggcagagaaactttgcttctgcggccttcatttggggtatcattttttgggctccagcgttaccttcacagcaataacaaataactaggttttgccaggaacttggcaactctgagaggattaaagcaagactgctgccaacttctgttgcttccttatcacctcaagtcgtctcagataaaagtctctgatagttgatctcaaggagttacacgtagcaattgggaagcacatttttatttgcttaagcttctaaagtctaatgtaatgtcatttgcacaaataaaaattaacrgttggtcaactaagagagcaaagtatagagtgtttttcaagggatgactgtggctttcaactttaaaacacaaacctgattg

SEQ ID NO: 93284 - DNA, 816 bp, Homo sapiens
gaacaccccagcctgggtcctggctcgtgacgggtgctggggaagggtgtcccaaaggaggcatggggaattgctcggtctatagaccaaagttactcaggaggaaggtggcagagatagactggaatccagagctcagctcactgtgtcaaactgacattttccaacagtgtgtctggttctaatagatcaagagcctttctacatggtaggctctgtcccaggagaagacatcaatgacagaaaaggatattcgcttgcccctcttggtccagtgggtgcccttgttctgaagccaaggacacagggggccgcttccacwgtggttccaagagaagcagccagtgccatcttggtgccttaaataacttcccagcctgtctttctaacattgccccaatacacctcccagcaccccctacagccctcttcctggctcccagccatgacaggctctttcatgcctctttgcatttgcacatgctgttccctatgcctgggatgccattccccctcctccctgtgcctgagggatgagtctcctggcggtgtgagtcctcccttatacaaattgagtcattcatcttaaccctgtcttgttctcaaaagtctttgacacaaaagcactttgtctatttctctgcaagtctccatgtgcgcctctggatctacccgttcctcttcaccctgctctgtgccctggggaggccaacccacactgactgcatgcactgccttggaggcaggaggagaaggaagccaggtcctgtggttggctgtgcccctccgtggaagcacacatctcttcccctcacc

SEQ ID NO: 93285 - DNA, 692 bp, Homo sapiens
ttcctgctttctgcttccttggccttagggtgtgaatcttttcctcatgctctcaagacagctgtctgagcaccagccatcacatccacattccaggcaggaagaaggcaaaggtgaagggtactgcacatgtcagctgagctccctttacaggttctttcctgcaagtctctcccgacatcatccacttgcatgctacaactgcccaccctgggttgtgagggagggtaggacatggcttttgcctgcccgcttgtcagaattgggcagaagcactgggattctgttagtagggaggaaggagaatagatgctggsttaacgatttgcagtccccgccacagccaggacttaggcaggggtgattcccactaaaagccaaaggtttcatgcctggctgcaggggagaggtgcttgggctggggtcctgccttgtcttaacaaatacgaggctcttgttaaatatttaaccctgtgagggtggcttgtggcccacgtgcacccgaatcagctgcctggcatgcctcagcccactccagggcttccaattcaccctggggcaggggaggcctggggcacgcggttttcacacacacactcctagctgatttctttttcttctgtaatttataaaattaacactgcacttattggaagacatgaaaatccaaagatgggtagagaaaaagttca

SEQ ID NO: 93286 - DNA, 692 bp, Homo sapiens
ttcctgctttctgcttccttggccttagggtgtgaatcttttcctcatgctctcaagacagctgtctgagcaccagccatcacatccacattccaggcaggaagaaggcaaaggtgaagggtactgcacatgtcagctgagctccctttacaggttctttcctgcaagtctctcccgacatcatccacttgcatgctacaactgcccaccctgggttgtgagggagggtaggacatggcttttgcctgcccgcttgtcagaattgggcagaagcactgggattctgttagtagggaggaaggagaatagatgctgggttaacratttgcagtccccgccacagccaggacttaggcaggggtgattcccactaaaagccaaaggtttcatgcctggctgcaggggagaggtgcttgggctggggtcctgccttgtcttaacaaatacgaggctcttgttaaatatttaaccctgtgagggtggcttgtggcccacgtgcacccgaatcagctgcctggcatgcctcagcccactccagggcttccaattcaccctggggcaggggaggcctggggcacgcggttttcacacacacactcctagctgatttctttttcttctgtaatttataaaattaacactgcacttattggaagacatgaaaatccaaagatgggtagagaaaaagttca

SEQ ID NO: 93287 - DNA, 574 bp, Homo sapiens
agcacagaaactcttcacttcaaagtcaatcccacagggctgtaaagggacaagggcaaagagagctcatttccagtgctgtcctcccttcctcatgggcctataagaaaatgcctgacctctttccttagctgtccatttctccagtcttgactgtcccactgttcctcttccctggcactacctatccctctttcttagaacccagtcctcacctttcctgcatcttcaggacctggctgcagtgtcacagaacagggcaggttggtcaccatctaggggacaaaaaggagatcagaaaagaagtagaaaagaatacaaacaaatacraaagaaatggggaaccctctcccttgttgtccttcttgagcttcctctcttaatcttccctggagaccttgcctgcccagggcttggggtcagtacctgcagggtaaaggggtaggcattgtcccctagcttgtgcagtagtcgctcctgtaggactgtgaggggcccctgagggctgctggattcagctgggaccacttgcagggtctgcacatacagatcttttcggaacgtcagaccaatc

SEQ ID NO: 93288 - DNA, 1830 bp, Homo sapiens
taaatataataaaactttacaatgattatacatttatccataaacattggaatgcaaatgtcaacattttgtttaataacttctctagcaccttctactaaaatcaattcagtgactgtgatgactatggcttagggatgccaaactcttctggggcagatatatttctgcctgctttgtgacatccatgggcaatgatgtccattaccttaaagttaaattgaaaatgtttgggtaactaggcaattgaaaacgccctgtgctatgtaggatgtcatgttctaatgttttaattaaccttgatctctggaaatatgtacatttaaaattgatgttgtacagatgctacatttgtaggatcagtgtgtcaaattaatatactgtggtcttctatatgtcacattttgtaaacaggaagtggcttcttaatgcaggtagcttcattatataaaatgaagttattctttggaaaaaatattgtaaaacaaagtactttgtatttatatacatttcattgtaatgcatattataattttggtggatattcttagaattgatacaaaatgtattttttctcatagatttttttaaaaaggtgcatttaaaataatatcagttacacaataactatatttatgatgttctatatttaggagtaaaaacattgatcataatgataaagttagaatgataatagctcactttgctatcgttttaaaatctgcactgctatttagaacacagaccttattacacaaggcacttaggtaggaagcttatctattatatttttatgcgaccttaagataattgcaactcaaacacttttctatcttcaaaatgagaataaaggtattttatcaggcagctttaatatttatttgtgttaataaaggtataaacttatttttgtygacaaaagacattgaatatcaaattttatttgaacagattttatcctcaaagcaactgtgagattactaagaatctcacctggaaaaggaaagattgtagccacagatatatcatcacatttcaattagttctgtggtaatcaattagttctgtgatgtttgcgaagcactggtgatacgtacgttgctggaatagaggtgattcatggggataatgaacaaaggcatttatggagacagaggatgcgagtcatgctcatttttctgaaagacaaatgtttccacaatgtagaataaacattgtataggatttggtggtgggaaactgaaagcttgagactgacggcttagaccttccaaaaggccagaagagaatagaaattttatgatgaaagatataaataaggtaccatctcacggctttttgtagacaacttttttcttcttcttgttttaaccttgctcttctgaggtgcccccacctttttttcaacttttaaatatgtctcatttttcagtgtgttttaagaataaagtctcatgaattcacaatcattttattcaatgattttattttgccactgtccattattttatctcagttgtgctaactctctgaacccataactacaaccactgccttaatttttttacagtctctcaacatttatccctgtgtgctccagctcctttttcaacactcaactgaaaactaccctaataaattatccaggacgtctttccgacaaaagtcactggcttgtctcacttttgatctaaatttaatgctgtgacttttattcaactgaccactggtttaattaatacttcatgaatagatatattcatttaaatatcaaaatgttcagaatgaacatcaaatccagttgaatgtgattcattaattaaacacgtc

SEQ ID NO: 93289 - DNA, 598 bp, Homo sapiens
agctaagtaccctgttcatgtgccatggttgttgaatgataaaagccacttgaaaatggctaacgagtgattttattatgttgaaaagtattgcttaggaaaagcaagtgagggaatactagagcatagtaatcattgcctggacatgtaagatgaagattaaaaagtgtgtaagcaaggattccatagctttgtctccaggggccataaattgcctcatagasaaaataaaattatccaatccactagcattttatttttatatttgtgaattcatattctattataggataactgaaaataaaaaatgaagggagtttttattttttccattggggtctataaaaacctaaaagctccatcgaaaatcatttagcactgaaaaaacattcagtaaaattgcaggatatgaaatcaacatataaaaatcagtagcatttcaatacaccaccaacaaagtaacagaaaaagaaatcaagaaagcaatcctatttacaacagattatctgaaaaagacaaaatgactaggaatacatttaaccaagaaggcaaaagaactctatcaggaaaagtataaaacatggaaaagcaattcatg

SEQ ID NO: 93290 - DNA, 598 bp, Homo sapiens
agctaagtaccctgttcatgtgccatggttgttgaatgataaaagccacttgaaaatggctaacgagtgattttattatgttgaaaagtattgcttaggaaaagcaagtgagggaatactagagcatagtaatcattgcctggacatgtaagatgaagattaaaaagtgtgtaagcaaggattccatagctttgtctccaggggccataaattgcctcatagagaaaataaaattatccaatccactagcattttatttttatatttgtgaattcatattctattataggataactgaaaataaaaaatgaagggagtttttattttttccattggggtctataaaaacctaaaagctccatcgaaaatcatttagcactgaaaaaacattcagtaaaattgcaggatatgaaatcaacatataaaaatcagtagcatttcartacaccaccaacaaagtaacagaaaaagaaatcaagaaagcaatcctatttacaacagattatctgaaaaagacaaaatgactaggaatacatttaaccaagaaggcaaaagaactctatcaggaaaagtataaaacatggaaaagcaattcatg

SEQ ID NO: 93291 - DNA, 839 bp, Homo sapiens
caattttaaaaaaaagaatttcaagcagaaggtttttgtgaatatctcaccttgatccttcctgcttctccttcctattccatttgtctgttgtggttttcctggggggagacttaaaatacaaaataatataagctcggccaggtgcgctggctcacgcctgtaatcccagcactttgggaggccaaggcgggcagatcacgaggtcaggagaccaagaccatcctggctaacacggtgaaaccccgtctctaataaaaatacaaaaaaagcaaaattagccgggcayggtggcgggcacctgtagtcccagctactcgggaggctgaggcaggagaatggtgtgaacctgggagccggagcttgcagtgagccaagaatgcaccactgcactccagcctgggcaacagcgagactctgtctcaaaaaaaaaaaatagacagaaatttcatttttcactttatatatttttgttttgttttcacaatgagcttatattttatatatatatatacacatatatatattccatcatactcctttgagaaagctataataatattttggtatatttccactgcacttagtattcttcaatctacctcttcatttagcaagttattttgatcatctttgcaaaagtgtgtaaagagcctctcattcattttaactgcaatgagtatgacatttaaaaatgtaccctaacatatttaatcaatctcctgatcaagggacattttcctgctcttctttgatgaagttctactgaatcatttatttcatgggtttctgtgtcagaggaaaagttggaatatctttgccaaaggtacatctttgga

SEQ ID NO: 93292 - DNA, 765 bp, Homo sapiens
cccaccccacaacagtccccggtgtgtgatgttccccttcctgtgtccatgtgttctcattgttcaattcccacctatgagtgagaacatgtggtgtttggttttttgtctttgtgatagtttgctgagaatgatggtttccagcttcatccatgtccctacaaaggacatgaactcatcattttttgtggctgcatagtattccatggtgtatatgcaccacattttcttaatccagtctatcattgttggacatttgggttgacccagccatcccattactgggtatatacccaaaggaaaacttctaatgtaaacagaacaagccaaacaaacaaagagaaaaaaaatgaaaacggagactatgcagggagaaaaaaaatgtagaaaagacacaaaacaaatgaatcaattactaataatcttaaaaagagaaaataataccaacatctgaaaaagaataagttgcaataaaaataccacacccaaaaatatgaaaagaagttcttggaaattaaaaatacaatacataaatgaaaattaaaatagaaaagttagaagttaaaataagaaaattcycccagaaactaaattttaactagaattaaaagacaagagatggacaattggaaaaactctagatcaaacttctgtattaagaaattacaggaagaaagaacagaaaagaagaagggtaataaataaaataaataatttaagaaaatttaatttaaaaaaggaataattttccatattggcaattaa

SEQ ID NO: 93293 - DNA, 539 bp, Homo sapiens
gcggctgtcgggggtcactatttattgcctggagctgagggataagccattccatctgggctraccccatggtggaggaccagatccaggatccctggtccagggctcaccagcatttcccatcaccactgccctgccctgcacccttaagacacagaagctgccagtggggacagaggtctttccagcccagggacctcctcagacacagcagcctgaagctcctctctctggcctgtccttagtacagggagcccccaagcacggggctttatttcctctgcacctgtgatgggctgagggagtcagggccgagccagcgaaacactggggttgctttgaagctggcttcaggtgaacacgctgaccccctgggtggtctccaggtggtcttcctgtggcagcaggtcaggcggaggcagcagcctctggggcaggaggcagagatgggaggggccatgggcaagaggtctggcagctctgtgtctgcccagtggcttcaaccagcttgtaggaggcagtggggagtggctgcccaa

SEQ ID NO: 93294 - DNA, 782 bp, Homo sapiens
gatctgttcatatccttcgcccactttttgatgggattgttttttcttttcttttaatttgtttaagttccttgtagattctggatattagacctttgtgagatggatagattgcaaaaattttctaccactctgtaggttgcctgttcactctgatattagtttcttttgctgtgcagaagctctttagtttaattagatcccatttgtcaattttgtcttttgttgccattgctttgttgttttagtcatgaagtctttgcccatgcctatgtcctgaatggtattgcctaggttttcttctagggtttttatggttttaggttttccatttaagtcgttaatccatcttgagttaatttttgtataaggtgcaargaaagggtccagggtcaattttctgcatatggctagccagttttcccaacaccatttattaaatagggaatcctttccccattgcgtgtttttgtcaggtttgtcgaagatcagatgtttgtagacatgtggtgttgtttctgaggcctctgttctgttccattggtctgtatatctgttttggtaccagtactatgctgttttggttactgtagctttgtagtacacaagccttgtagtcctcttctgccaggtatttccctgtctcctgtctttaccacctgtaccatgtggacaggtggtgaactatgttgccacaagggtacctcctttgcgtcttctgtgatctgctttgttgttttgtttccaggagaagccaatcactggggaaggaggagggaagt

SEQ ID NO: 93295 - DNA, 782 bp, Homo sapiens
gatctgttcatatccttcgcccactttttgatgggattgttttttcttttcttttaatttgtttaagttccttgtagattctggatattagacctttgtgagatggatagattgcaaaaattttctaccactctgtaggttgcctgttcactctgatattagtttcttttgctgtgcagaagctctttagtttaattagatcccatttgtcaattttgtcttttgttgccattgctttgttgttttagtcatgaagtctttgcccatgcctatgtcctgaatggtattgcctaggttttcttctagggtttttatggttttaggttttccatttaagtcgttaatccatcttgagttaatttttgtataaggtgcaaggaaagggtccagggtcaattttctgcatatggctagccagttttcccaacaccatttattaaatagggaatcctttccccattgcgtgtttttgtcaggtttgtcgaagatcagatgtttgtagacatgtggtgttgtttctgaggcctctgttctgttccattggtctgtatatctgttttggtaccagtactatgctgttttggttactgtagctttgtagtacacaagccttgtagycctcttctgccaggtatttccctgtctcctgtctttaccacctgtaccatgtggacaggtggtgaactatgttgccacaagggtacctcctttgcgtcttctgtgatctgctttgttgttttgtttccaggagaagccaatcactggggaaggaggagggaagt

SEQ ID NO: 93296 - DNA, 757 bp, Homo sapiens
aatatttttccaggtcttatgatgtttcataagacagctttaaaaaattataatatattgtggcttcttttctcattctaaattaatgttttcacttttgtagtcatctttatgttaaaaccttaccactcctaaactgtgtatgcttcaggccctacaaaagcagattcactcctgtctctggttgaaagaagagaataatattcaagagaaatgtgaaacaattattttcctgctggcaaaggagaaaaaaaattaagtaaaaaaaattctaacaacaaaataacttgaggtgggaaactccaaacacaggtagaatttagcaaagaaacacaaatgctctgggtcatacgtttgcagcctcccccctcagctcatgtccttctagcaccaacagctttcccagatgcagctgggatgacagacactgaccaggctcctaggaaatgtcaacaaggttcctcattcagaacctggcttctctccctgtaagactcaatctggagctcaaggatggagaatgaaatctcatctctgccttgcagtcctcaaagatggcccatctcctacaggcagatgctgtctgctatggtttgaatatgtcccccaaatcctatatattgaaattttaattcaaaaatttatatgttgatggaggtgggacctttgggaggtaattaggatttgatatggtcaacaaggtggrgcacccatgatgggactggtggctttataagaagaagaagagtcctgagct

SEQ ID NO: 93297 - DNA, 878 bp, Homo sapiens
ggaatcatgtgttctcagggccaccttctttctggggacctagaggaaaatcaatttcctcacttctccgttttctagaagccacctgcactccatggtccctaggcctttcctccctcttcaaggtccattgctccaacctctgcttccctcctcaagtctcctctctgaccctgatcctcccacctccctcttacataataggaaacgttgtgattaaattgggcagatcagataacccagaatgatctccacacctcaagaacttaaatcatatctgggaaggccattgtattatgtgaggcaatacatttgcaggttctgggattaggacatgggcatctttgaggggctattcttgcttttattttttatttattttcatcttttatgatttttttatttcaatagattttttgggaacaggtggtgtttagttacatgaataagttcattagtggtgatttgtgagattttggtgtacccaatgtgtagtctcttatccctcaccaccccccacccttccccccgagtcctcaaagtccattgtaccattcttacgcctttgcattctcatagcttagctcccacttataagaatatacaatgtttggtttcccattcctgagttacatcacttagaataatggtctcaattccatccaggttgctccaaatgccattatttcattcttttttatggctgagtagtattccatggtgtgtgtgtgtgtgtgtgtgtgtgtgtgtgtgtgtgtgtgwgagagagagagtgtgagagtgtgtgtgtaccacattttctttatccactcattaaaggatgggcatttgggctggttccatatttttgcaattgcaaattgtgctgctataaacat

SEQ ID NO: 93298 - DNA, 878 bp, Homo sapiens
ggaatcatgtgttctcagggccaccttctttctggggacctagaggaaaatcaatttcctcacttctccgttttctagaagccacctgcactccatggtccctaggcctttcctccctcttcaaggtccattgctccaacctctgcttccctcctcaagtctcctctctgaccctgatcctcccacctccctcttacataataggaaacgttgtgattaaattgggcagatcagataacccagaatgatctccacacctcaagaacttaaatcatatctgggaaggccattgtattatgtgaggcaatacatttgcaggttctgggattaggacatgggcatctttgaggggctattcttgcttttattttttatttattttcatcttttatgatttttttatttcaatagattttttgggaacaggtggtgtttagttacatgaataagttcattagtggtgatttgtgagattttggtgtacccaatgtgtagtctcttatccctcaccaccccccacccttccccccgagtcctcaaagtccattgtaccattcttacgcctttgcattctcatagcttagctcccacttataagaatatacaatgtttggtttcccattcctgagttacatcacttagaataatggtctcaattccatccaggttgctccaaatgccattatttcattcttttttatggctgagtagtattccatggtgtgtgtgtgtgtgtgtgtgtgtgtgtgtgtgtgtgtgtgagwgagagagagtgtgagagtgtgtgtgtaccacattttctttatccactcattaaaggatgggcatttgggctggttccatatttttgcaattgcaaattgtgctgctataaacat

SEQ ID NO: 93299 - DNA, 878 bp, Homo sapiens
ggaatcatgtgttctcagggccaccttctttctggggacctagaggaaaatcaatttcctcacttctccgttttctagaagccacctgcactccatggtccctaggcctttcctccctcttcaaggtccattgctccaacctctgcttccctcctcaagtctcctctctgaccctgatcctcccacctccctcttacataataggaaacgttgtgattaaattgggcagatcagataacccagaatgatctccacacctcaagaacttaaatcatatctgggaaggccattgtattatgtgaggcaatacatttgcaggttctgggattaggacatgggcatctttgaggggctattcttgcttttattttttatttattttcatcttttatgatttttttatttcaatagattttttgggaacaggtggtgtttagttacatgaataagttcattagtggtgatttgtgagattttggtgtacccaatgtgtagtctcttatccctcaccaccccccacccttccccccgagtcctcaaagtccattgtaccattcttacgcctttgcattctcatagcttagctcccacttataagaatatacaatgtttggtttcccattcctgagttacatcacttagaataatggtctcaattccatccaggttgctccaaatgccattatttcattcttttttatggctgagtagtattccatggtgtgtgtgtgtgtgtgtgtgtgtgtgtgtgtgtgtgtgtgagagwgagagagtgtgagagtgtgtgtgtaccacattttctttatccactcattaaaggatgggcatttgggctggttccatatttttgcaattgcaaattgtgctgctataaacat

SEQ ID NO: 93300 - DNA, 609 bp, Homo sapiens
ttctgtctcatctccagtatgtttatcagatgttagtaatgagcttcatttcttagtatttcctcctttcggaacaatgaagttagatacttcttccacataggttgaatcccaactggatggctctcaaaagtagaggaaggcttactatttctaatcaagtagtacaattttgcagtgggtgtacaatacatttcagccaaaagtatggctcctcctgcgtgtctatagtctgttggggcctgttgactacttcctggtcaggaagtacttcagggtcacagggagcccacttctgacctctgcgatgggccaagaaaggtaattagagaytgctgcttgactgccaagtgacccagggatctatagaccctgactgtcagggcccgacacaacacttctgtagtggatactgtggtgtgctgttcaaaccttcttccaggaccaagaaattcattccctctgctaccaaaagtgatggttcacagttgagtccctccccaggaattatccatgcctctcccaaggctctaatgactgatctaagtagaggtacaaaggaccagctctcttgtctcaagtaaggacaactctgaagaggcatttgaa

SEQ ID NO: 93301 - DNA, 684 bp, Homo sapiens
tggagttgaaatagaaaaggaacgtttgagagtgaaatccacaaatcattgagaaagttcatgtgattcattactttcaaagtttcccaccaaatcttttacgcaacacgcaactagattaaaatgtggcaaaaaaaaaaaaaaaaaaagttctttctcttttgcctggttgtactgacttagatactaaggaataaaatctgaarttagtgactgaaataaatatataaatagagcccggcggctgaatgattatctgtgaatcatcacagcagtagcttaggccaaactcattgtttcttatatagagttcctaggcagatattttttaacagttgctggtaaatctgaactaagggtacagaaggaaagatgctcccaaaaggatgttgaatgataaaagttgactgtcacctttgcagtgtgatagagaggggaaaacacaatttaaatgttttaggaaatactgaaaaagatacgggactctagagtgaaagttcgagatacttctgttcttttgtaaaagttaatcctgagacagcactatatcatgtgagtatgtgtgtaagtgttctggagggaaggcctgggattccccagggtttagaccccttggtgaaatgtataggctgggtcaaggtcacattcattttgggtcttatatttcagaatatttggaaggaa

SEQ ID NO: 93302 - DNA, 857 bp, Homo sapiens
ctggaaatttggtttctcagcattgtgtcactacaaaagctggagtccacagatggtcttcactttaccctaagccccttcctcagcagttaacttcacctttttccttctttttaatgttggctgcagtttgaaaccccagtagatcttatcccaaaaataccactgtatggaccccaccctcagagattttcactgggtgagacccaggcagctgtacttttaaaaagtctccaggtgattccaawgtggaaccagattatctcatcctatgatcactgttgagctttggggtattagcatgaccaaaaaaaaaaaaaaaaaaaaagtgatgtctcatctgcagaactagtgaaggtctggaagtcacttgcatttagtgattggcatctaacacaagccactgatagtttttgtgggctgtatgtaaggacgaatattttcttatacttgcatcattcacagtgagcttggatttatgttatcttatttgttttcataacaatcttactgagtaagcagataagtttattgttttttttttttaatcccttcttgctaattgttgttcttaacagatgataaaaccaataattcaggtacttgcccaaggtcacacagccaacagtctgtacagccaggattaagacgaggccatctgatatcaaagtttatgcttttacatacacttcctttacacggttcaataatggtaaaataatgattccaggacctgggctaagtaatttagcagtgggtctcagttgctactttggcagcatattgaattcacctgggagccttcaaaactcctgatgccaaagattttaaattaattggctggggtgaggcctgag

SEQ ID NO: 93303 - DNA, 857 bp, Homo sapiens
ctggaaatttggtttctcagcattgtgtcactacaaaagctggagtccacagatggtcttcactttaccctaagccccttcctcagcagttaacttcacctttttccttctttttaatgttggctgcagtttgaaaccccagtagatcttatcccaaaaataccactgtatggaccccaccctcagagattttcactgggtgagacccaggcagctgtacttttaaaaagtctccaggtgattccaaagtggaaccagattatctcatcctatgatcactgttgrgctttggggtattagcatgaccaaaaaaaaaaaaaaaaaaaaagtgatgtctcatctgcagaactagtgaaggtctggaagtcacttgcatttagtgattggcatctaacacaagccactgatagtttttgtgggctgtatgtaaggacgaatattttcttatacttgcatcattcacagtgagcttggatttatgttatcttatttgttttcataacaatcttactgagtaagcagataagtttattgttttttttttttaatcccttcttgctaattgttgttcttaacagatgataaaaccaataattcaggtacttgcccaaggtcacacagccaacagtctgtacagccaggattaagacgaggccatctgatatcaaagtttatgcttttacatacacttcctttacacggttcaataatggtaaaataatgattccaggacctgggctaagtaatttagcagtgggtctcagttgctactttggcagcatattgaattcacctgggagccttcaaaactcctgatgccaaagattttaaattaattggctggggtgaggcctgag

SEQ ID NO: 93304 - DNA, 857 bp, Homo sapiens
ctggaaatttggtttctcagcattgtgtcactacaaaagctggagtccacagatggtcttcactttaccctaagccccttcctcagcagttaacttcacctttttccttctttttaatgttggctgcagtttgaaaccccagtagatcttatcccaaaaataccactgtatggaccccaccctcagagattttcactgggtgagacccaggcagctgtacttttaaaaagtctccaggtgattccaaagtggaaccagattatctcatcctatgatcactgttgagctttggggtattagcatgaccaaaaaaaaaaaaaaaaaaaaagtgatgtctcatctgcagaactagtgaaggtctggaagtcacttgcatttagtgattggcatctaacacaagccactgatagtttttgtgggctgtatgtaaggacgaatattttcttatacttgcatcattcacagtgagcttggatttatgttatcttatttgttttcayaacaatcttactgagtaagcagataagtttattgttttttttttttaatcccttcttgctaattgttgttcttaacagatgataaaaccaataattcaggtacttgcccaaggtcacacagccaacagtctgtacagccaggattaagacgaggccatctgatatcaaagtttatgcttttacatacacttcctttacacggttcaataatggtaaaataatgattccaggacctgggctaagtaatttagcagtgggtctcagttgctactttggcagcatattgaattcacctgggagccttcaaaactcctgatgccaaagattttaaattaattggctggggtgaggcctgag

SEQ ID NO: 93305 - DNA, 857 bp, Homo sapiens
ctggaaatttggtttctcagcattgtgtcactacaaaagctggagtccacagatggtcttcactttaccctaagccccttcctcagcagttaacttcacctttttccttctttttaatgttggctgcagtttgaaaccccagtagatcttatcccaaaaataccactgtatggaccccaccctcagagattttcactgggtgagacccaggcagctgtacttttaaaaagtctccaggtgattccaaagtggaaccagattatctcatcctatgatcactgttgagctttggggtattagcatgaccaaaaaaaaaaaaaaaaaaaaagtgatgtctcatctgcagaactagtgaaggtctggaagtcacttgcatttagtgattggcatctaacacaagccactgatagtttttgtgggctgtatgtaaggacgaatattttcttatacttgcatcattcacagtgagcttggatttatgttatcttatttgttttcataacaatcttackgagtaagcagataagtttattgttttttttttttaatcccttcttgctaattgttgttcttaacagatgataaaaccaataattcaggtacttgcccaaggtcacacagccaacagtctgtacagccaggattaagacgaggccatctgatatcaaagtttatgcttttacatacacttcctttacacggttcaataatggtaaaataatgattccaggacctgggctaagtaatttagcagtgggtctcagttgctactttggcagcatattgaattcacctgggagccttcaaaactcctgatgccaaagattttaaattaattggctggggtgaggcctgag

SEQ ID NO: 93306 - DNA, 532 bp, Homo sapiens
tttgagatggggagtattgctctgtcgcctaggctggagtgcagtggtgtgatctcagctccctgcaacctctgcttcctaggttcaagcaattctcggcctcagcctcccgagtagttgggattacaggggtgcaccaccatgcctggctaatttttgtatttttagtagagacggggtttcaccatcttggccaggctgatcttgaactcctgacctcatgatccacccaccttggtctcccaaagtgctgggattacaggcatgaaccaccactcccagcctgaaatttttaagtaagttaattaattgagaccagtcagggtcacataagtatgtagatttatttataaatgtaatgttaaagattgaaaactagtgaataattgttctagaggttctctcatgggtgacagaggtggaggcagggcagggatttgccattgctgcacamccttgtcttaagaaaaagatgggccaggtgtggtggctcacgcctgtaatcccagcaatttgggaggctgaggctgga

SEQ ID NO: 93307 - DNA, 2500 bp, Homo sapiens
gtatgtgggaagaggtaatgtatacgtagattataggtatgctgctaaaagtattcatgtacatttatataataaagtagatctcaagtattattctaatcagttagttgccagttaaatttgccaggcatgattttaacctggaattggtatttcaggtatttacagatctgattttaatctgagtttacttaactactgtgtgttagacaggtaacaggtaacctagtaagtcaatttgtttctgattttagaattttcacattattgttattcatgtattcagtatctggaaatcataaataatttgtaaaataggaaagaaactactgatattaaatgtataatttaatggtttgggcccatatccaagaaacaattttgaattagctcttggctacattcttttcttacacaattgggcctgacaaatacatcttaatgtaaagcatgatagctttcaaacaaatgcaaaatatgaatttcctttatctgtactacataaacatatcatttgctctttttctaaaagcaaatatataaaactataagtattatatttctataaagtacattatagatttcagaattatttaattttattctaagaggtaagtttagaagtctgtgaatttacttagtaaatgactgttgagagaaagcacttatgcaattgctttttctattctaattcttgttctaattcatgttctttttaaaattcctagattcattgcctacctttatttatttgcataacattttaacaaatttactgctattgtgtttttaaaaaaattctgctaaccgcttctttatgccaatctatcagatcaaagttagctcctttattatctgagggtgggaaatgacagccttttgaaggatttacctggccttttattcttgtttcaagttcatttttagtcttgtactttgtaaggtctaggaaacctaagctaataaaataatttccattcagagttttagcacacacatctctccactctactttttctttccagaagtgacacatgtttcttgtcctatgatttggacaatatttctcagtattttccaaatgtgttttctaatcaattatccaggattttccaaaagtatcttccactcaattatccaaaactattgaattgagagagtttagatttattgagtgttgtatatatgtgtgtatatacacaaatttccccttataatgtttaaaaataattttaaatgtttgagggaaacttgcttttgatgttttgatttcttcaaatgatatgtcattttaatttatgacaatgcatgtatacttggaaggtaacttactgaggcaaaacaatgaaagaaaaggtacagttttaaagaaattggcttcyttctggtcagttaaagtccatttcagtatactggcaaagatctatatgtgcatttgaatgtagctataaaccacgcaacactaacaattagaaatacaacctatggctatatggaattctttcaaacaatatagaaaaggaaaacacttggttttggcatttaaaaaattttaaatacctattaaattgccaaaacttacagggagcctacttcagattagattaaattctaaaagaagaactgaaaagtacatttatattttaattataaaaaacagtctttgtcatatatattcctctgtgacttctcatttttctttgagtgaaacaaaatttcatatatacttttcatcattttggttggaagtacacattatgtgtaatatgctttggcaggacttacctagccaaagaaaacaaattaatattgggcatactgagggctgtcaggcatatcacagacatgtcaatttaactttgcttcattatacaccttttctgcaaacagttggctaagatggtactaaataaaagggaagctaccaataaattctcatatcagattgatggctagtataaatgtaatgaaaaaacagcttgcttgcttacttatctttaaaaatgaactgtaggaatacagatagcatagatagcaataagtttccaagaaaaaaataaattaggttcattcaaatttttctactaccttgaaagtaaaataggtttagaaagacaaaagtctctgaagtggtgaacctcagtggctcttatttatgaagtaaataaaaacttgaagaagtggagaatccaaaggaacacggacaatccacctttatcaggggacacctctttttgttgcactttgcatatgttttctggaaaacaaaaaaatcttacgctttctttttgtatggcatattcaatatgcaaaaacaaaagaaaattaaaatataaattaagaacttatgtacagaaaataggcagaagcacactaaattctttttttccatgatcacaacaatacctttgtaaatgataattcctttttcatctactctagaaagattttactcatttttcatggcttttgagaatttgaacaaaggattcattaaaga

SEQ ID NO: 93308 - DNA, 2409 bp, Homo sapiens
  misc_feature (1)...(2409): n = A,T,C or G
tgtattttaagatatatataattgttttccatttctatttctcctaggtttttccaccaacccttctccactctttctgaatatatacaccactctctcgagtttccttaccaaaaatacaatttcagcttttctctgtatgaaagcgatgacaaagtgattttatagccagttctgaaagtgactaaacttgacaaaaattgtattttatgacaacctctgctttcatgtccccggcctacttttatatcatcttttttttttaccccaaatatgaacaatttcatatctctgcattggctgaaaacaaatccccttaccaggaatacattttaatggaagagagcctgcttcacataagtcaccagagccttaacatcttaactctgtaatattcaatttctcactcactgagaaccaaagccttgttttttgttgttttatttttgttttgtttttgtatggtttgtgttcataaaggttggggaagaattagtattatggaactaaaccagattaagggggaatgtgaattagatttggtaacagatggtgctgtggaaattaaaggttctttgcgaatggaagcgacagcagcttgcctctgttctctctgtctctcgttcgtgcacttgatagacgggtataaatcacaacaatcctgtcttgacagccaatttcgagaatttgatctggttaaagacatggctttcccgctccactcactgaaacctgcttctattttatttttacacagcaccttgtcatatttagaaaagcaggctcgcctgctttctcttaatgaaatttttttcttaattacagttttagctgtttagtgttaattactttttcattcagcctgaattttcataatatctctcagggattcttttttctttttttctcacccttttcacccatgcatattcttttgttttttttcccaaagatccttttcattgtcagaagttgttgtcagaggcactatttgagacacctaattaccaaagttattatttttaaggagaaggactttgatgtgatgtagtaaagttaccaaatcagaaaatttttttannnnnnnnnnnnnnnnnnnnnnnnnnnnnnnnnnnnnnnnnnnnnnnnnnnnnnnnnnnnnnnnnnnnnnnnnnnnnnnnnnnnnnnnnnnnnnnnnnnngagcaagtgctaaatattctccggccacacacacacaaacataatcttcccaccacacacacacacacagacacacacacacacacacaggggccttgccatgtcctgaaatggtgactcagtgcagtggcagcaaaggaaatggaagtttgggagtttgaagagtgctcctcggtgcaatagtccttgctctcaaggtctaaccagacttacaagccagtgtgttttttatctgagtagaatatatggtttttaaacagggctgaagttgtttacgaaacacgtaggcaaatgctctcattttataaatgagaaaactgagagtcagggtggtacaatgacttgcctcaggttacacagtgcctggatccagagctagaacccatgtctcctactctgtcgaatactacaagaagtcagggctccctgggaaaggagaagagaagaaaagcaagcggcagaaaccctggtatagtctttttttttagttgattttttagaatggcattttatatttagaaatttttctctgcatgtttgcatttggacttttgaatgtgacaaacgacaagcaggtcctgatttgaactcttggcttttcagtggcttctactggcttcactggatgctatgtttctgctgaataatcctttctttttttttttttttttttttttggttaacaatacctgtcatgctacaaaataaatccttagtcatttccatggcttgaattaaatatatrtgcagatttatgttattttcccttgcctgcaaatagtggcttgtgtattttagctttacgttctcttcaagtaactagcttgatgaaatgtttatttaaaaagaggatagaggaggaatttttaggattaataattagctgagttcccctcctccctgtctccccactactctcctacttcagctggacaacacctgataccaacaatataatgtcacctctgctatagatcacccaagaccagctgcatttacatccagatgttaactactgcagactaagcnnnnnnnnnnnnnnnnnnnnnnnnnnnnnnnnnnnnnnnnnnnnnnnnnnnnnnnnnnnnnnnnnnnnnnnnnnnnnnnnnnnnnnnnnnnnnnnnnnnnaattttcatatgtgcttgaagcaacctttatttcaacaatgatttcctagcatttagattttctcaacactgtgattcactcagttgcagagtacctttta

SEQ ID NO: 93309 - DNA, 684 bp, Homo sapiens
tgttggtgtttgtcctcctacctttttctttatatagataaatttgcacatgtaagatcagaatgcacatggttctttttaacttgttttcacttatgtcattaaatctcctacaatataatttttatgatactttgttgatacatacatatagtaggatactataattcatttaactaattcagtattgttgaatgtttcttttttwaaaaaaaaagccattagagagagtaaattattctgagaaggtacatccttatttctaaatctttgtgcatatctatgattatttgtttaggatacatttccgaagtaatatttctaagtcggagacatagacagttttaacacttctaataggtagtgacaaatttctgtccccaaaagtttaccagttgactacccaactagcaatccttttgatttcccagattgaagaccgagtctttgataaggttaggttcgaggaaattgactacctgagcagtcagtgtgtgtgtatgtgtgtgtgtggtaagatgtatgtatgtataatacctgaatgtacaactcagtgatatttttaaaataatcttcaacacatcacgccaaagaaaaggcgtttcttgcaacttaaggttagttgtaggtgttatgtaagtcataattctgacattggacattggtgtcttgtttaatgtttta

SEQ ID NO: 93310 - DNA, 684 bp, Homo sapiens
tgttggtgtttgtcctcctacctttttctttatatagataaatttgcacatgtaagatcagaatgcacatggttctttttaacttgttttcacttatgtcattaaatctcctacaatataatttttatgatactttgttgatacatacatatagtaggatactataattcatttaactaattcagtattgttgaatgtttctttttttaaaaaaaaagccattagagagagtaaattattctgagaaggtacatccttatttctaaatctttgtgcatatctatgattatttgtttaggatacatttccgaagtaatatttctaagtcggagacatagacagttttaacacttctaataggtagtgacaaatttctgtccccaaaagttyaccagttgactacccaactagcaatccttttgatttcccagattgaagaccgagtctttgataaggttaggttcgaggaaattgactacctgagcagtcagtgtgtgtgtatgtgtgtgtgtggtaagatgtatgtatgtataatacctgaatgtacaactcagtgatatttttaaaataatcttcaacacatcacgccaaagaaaaggcgtttcttgcaacttaaggttagttgtaggtgttatgtaagtcataattctgacattggacattggtgtcttgtttaatgtttta

SEQ ID NO: 93311 - DNA, 684 bp, Homo sapiens
tgttggtgtttgtcctcctacctttttctttatatagataaatttgcacatgtaagatcagaatgcacatggttctttttaacttgttttcacttatgtcattaaatctcctacaatataatttttatgatactttgttgatacatacatatagtaggatactataattcatttaactaattcagtattgttgaatgtttctttttttaaaaaaaaagccattagagagagtaaattattctgagaaggtacatccttatttctaaatctttgtgcatatctatgattatttgtttaggatacatttccgaagtaatatttctaagtcggagacatagacagttttaacacttctaataggtagtgacaaatttctgtccccaaaagtttaccagttgactacccaactagcaatccttttgatttcccarattgaagaccgagtctttgataaggttaggttcgaggaaattgactacctgagcagtcagtgtgtgtgtatgtgtgtgtgtggtaagatgtatgtatgtataatacctgaatgtacaactcagtgatatttttaaaataatcttcaacacatcacgccaaagaaaaggcgtttcttgcaacttaaggttagttgtaggtgttatgtaagtcataattctgacattggacattggtgtcttgtttaatgtttta

SEQ ID NO: 93312 - DNA, 756 bp, Homo sapiens
gaggttctattcaattttggacataacttagtttcagattatagtgctttcaaaacgtcatggggtaaaaaaaattactaaagaggaaaaaaaagagttttcattatttgttccacgaaagagagcacttccatctttctacatgaacgtattagaagacaagatgatataaatgggagtaaaaatttctactttgtggctaaggaacaacttaggacataaaaattaggagacatgtaagtcacagaaacacctctttctcagtttcaaataaatagtcacagaaacaaccttaagtaaytccaacaatgatagtctattatttcaccaggaaaaacctgaaacaagactaccacaaaagccacggcttggataaatgttcatatggtggagaccatatggagaggtgtctggctcatctttggagaaacaaaggcacaagaagaatgaaggtacactgacaatatctcagggcaacaaaaacaattatttctttcccgagaatgtgcaaagctgttagagagaaaaagagttgcagaagcaaccaggtgaatttttttaagagatgtaaactcatcaactctgaggggatagacaagagccgccccaggatcaatcataaacacacacacacacacacacacacacacacacacacacacacacacagcatgcatgaaatcaaatccacgaccaaaacatatcaaactctgaaaaaattttagaaaaataaagaaaaggacaagccatctaagg

SEQ ID NO: 93313 - DNA, 846 bp, Homo sapiens
gagttacatgtccacctcttagttggtcactggcaaagagaatgaggttaatgattggctttgatgagtcaatagttatccttgaaatggggaataaagacgtgagtctagatacagatayatgaataaaatctgggtgctgttaacaagggaggcagaagtgggtggatggcccttggggaggtgagcaacaatgtccaacacacaatgcacaacttgccatttgctttcatttggttcattgtcagtttgcagagagtaagtaatgtcaggagaagaaactcgaggcaaagattatgtttaacatatattattgagatattgataacacacagactcagtcgattcatgcttgaattctattaagtgatatctgaaaacatatttaaaatacctaacaatggattacaatatcatctaaaataccagtttaaaagaacttccatatcttcatcaatttgcaaagatttttctgcctacctttctcacttacttctgattaacaaccaggtgacatgtaaagaataggcattatcgccatgttgcagatgatgaaattgagacccttaaaaatctagttagaagcttgagtatagagtaaaaagcagcagagttcaagctcaaattcaggctacccatttcctagtaaaaagtcttttttctctatcacagtgccattcctataaaataaagacattctgaaatcttttcttcagccatcattagcagtggctcactccaatcctgcagccaagaatatgatgtgccaagtatatgccagtatacgtgagcacacagctgaccatagcactctcagcagcattcattctcagagaagtgaacaca

SEQ ID NO: 93314 - DNA, 846 bp, Homo sapiens
gagttacatgtccacctcttagttggtcactggcaaagagaatgaggttaatgattggctttgatgagtcaatagttatccttgaaatggggaataaagacgtgagtctagatacagatacatgaataaaatctgggtgctgttaacaagggaggcagaagtgggtggatggcccttggggaggtgagcaacaatgtccaacacacaatgcacaacttgccatttgctttcatttggttcattgtcagtttgcagagagtaagtaatgtcaggagaagaaactcgaggcaaagattatgtttaacatatattattgagatattgataacacacagactcagtcgattcatgcttgaattctattaagtgawatctgaaaacatatttaaaatacctaacaatggattacaatatcatctaaaataccagtttaaaagaacttccatatcttcatcaatttgcaaagatttttctgcctacctttctcacttacttctgattaacaaccaggtgacatgtaaagaataggcattatcgccatgttgcagatgatgaaattgagacccttaaaaatctagttagaagcttgagtatagagtaaaaagcagcagagttcaagctcaaattcaggctacccatttcctagtaaaaagtcttttttctctatcacagtgccattcctataaaataaagacattctgaaatcttttcttcagccatcattagcagtggctcactccaatcctgcagccaagaatatgatgtgccaagtatatgccagtatacgtgagcacacagctgaccatagcactctcagcagcattcattctcagagaagtgaacaca

SEQ ID NO: 93315 - DNA, 846 bp, Homo sapiens
gagttacatgtccacctcttagttggtcactggcaaagagaatgaggttaatgattggctttgatgagtcaatagttatccttgaaatggggaataaagacgtgagtctagatacagatacatgaataaaatctgggtgctgttaacaagggaggcagaagtgggtggatggcccttggggaggtgagcaacaatgtccaacacacaatgcacaacttgccatttgctttcatttggttcattgtcagtttgcagagagtaagtaatgtcaggagaagaaactcgaggcaaagattatgtttaacatatattattgagatattgataacacacagactcagtcgattcatgcttgaattctattaagtgatatctgaaaacatatttaaaatacctaacaatggattacaatatcatctaaaataccagtttaaaagaacttccatatcttcatcaatttgcaaagatttttctgcctacctttctcacttacttctgattaacaaccaggtgacatgtaaagaataggcattatcgccatgttgcagatgatgaaattgagacccttaaaaatctagttagaagcttgagtatagagtaaaaagcagcagagttcaagctcaaattcaggctacccatttcctagtaaaaagtcttttttctctatcacagtgccattcctataaaataaagacattctgaaatcttttcttcagccatcattagcagtggctcactccaatcctgcagccaagaatatgatgtgccaagtatatgccagtatacgtgagcacacagctgaccatarcactctcagcagcattcattctcagagaagtgaacaca

SEQ ID NO: 93316 - DNA, 1563 bp, Homo sapiens
  misc_feature (1)...(1563): n = A,T,C or G
tgcatgcctcctgctttccaaactccttcacctccagcccttagcagtggctgactcataggaaggtgcttgagtgttctttcctgaattctggatctgccttccccaaatgcacaagcatcagccatgccttccacattcaggaaggtttgatcaagccagcagggaggtgcaggtgaaggtgaacctcaggcagagctaggaagcctgaaaatctcctcagtcgtcctaacgtggagcttaaaagagtggattctatttcaaatcctaactgtgccattcartagctatatctttgggtctgtagctaaacctctgtggtgctcagattcctaatctataaaatgagaaggctaaatgtggctatcccagtacagctcttttgtgtgttaaatgagagaaggctcagaaagcactttgcacagggctttttctgtggaaagagcccagtaatattagtccttgatgtcattttaccattatacttgttaaagtctaaagttgttcagcgtttttctttacccttatcaaatgtcactgtgagttaacagctcttgaaaaagtagaagcctggggtaatcatttcacaatgtttatgtatatcaaaatctcacagacgtaccttaaatatacacaatatgtatttgtatatattatacctttactaaaatattataccttgatacaattatacctcaatacagctgaaaaaattagaatttttnnnnnnnnnnnnnnnnnnnnnnnnnnnnnnnnnnnnnnnnnnnnnnnnnnnnnnnnnnnnnnnnnnnnnnnnnnnnnnnnnnnnnnnnnnnnnnnnnnnngtggttgggcccccattcatccttgcccatccgcactgtaagtttcaaggtctttgtaactcggccgggccccgctgcacctgggactctttctgcagagggcgcctctctggaggtctctagcactctgacctcttacaaaagcccctctggcctcggattgataatgtggggtcaagtgtgtgcgttctgggcagagcctggaggtaggctggagctcgtgtcccgggtctggatgcttctctcagtctctgtgccccttctggctccgggatctgggcccactttgcacaaagtggggaggcagagcggggtctggcccccggaggcggccgcagcatttctgcgctggagcaagcaggtgccgcctggctgcagccttgcagggtgttggcgctccctgtgtcctctgtctgtctctgcggctctgctcccggcctttgctggccttttgccctcccgccgctgcctcactgtgaagacacatccccgaaagcccagagcttgtcctcactgtgaagacgcgtccctggatgcccagagcttggatgggcttctaccactccacggccgcctcagcccatggttattttccactcgccttttcgtttgaaagcacttatgtgcaaattgccacgtgcacaacagtcccttcgtggggagctctcagtgagctccagctgagccctctggcgtccctgggaaccccatctgtcatcctctgcactgtggggaggga

SEQ ID NO: 93317 - DNA, 2606 bp, Homo sapiens
  misc_feature (1)...(2606): n = A,T,C or G
aacaaatgttttaacaaagcaaaaatgttgtttatgatagtaactatttattatttacagcattttatgtttattttatttttacctttgtatccagcagcatgaactcaatagtttcaaatctttgtgtctcccaaagcctcataatccacaattgaatgtgaatttaattattactgttttaatactactcttagtaattggagtgtcagtattttccacaactgtgggtaaacaaatagacaggttagrctgctgatgtgaattattttttcaatagaggaagatggtcctgaggccttttcatactcactctgactcttaagaacttgggaaacacactatgaagacagtgggagggaagtacaaaatataacatgaagttattagctatagtctctattctctatacatgaagttattagctataattaaccctatgctctaatctacttaactgaatgttatgaataaatctaagtatagggctgacttctgggtaagcagtacccctcaccacatacacatagcctcaatacaccttcctacacataataccccaattgttttcttgtaagaccatagatagaagtcacaaatcattccagagaatgttaattccttaagctactttgatcatttgccctttaatgaatgacaattctaagtcatatttatgagagggcagtggtgaagtaaaaagagagtaagatagtagaaggataccatatttttatttatttacataagattatattttgctccttattattaggatcctgttgatctgggatgggaaccttatgttaagtcatggcttctgaaaacttctaaaattataagtcaatcaggagtggattgtcttgaattcatgattaaaaatagtgtcacagacggactacaatttataaggaatcgtcagaaatttcagccatatcctatggaggacataacagtcgtcataaccctctgcagaattcttgatgctttctttgacttcatgggtaaaaatggaggatttgaacaaagtgagtttttttctctaagtcatatcaatgatatatcttagctagtcaatgctaattcatcaccgtctattagattttagaaaatttttcaaagagcaggcatttttagtctatttggaccaacagcagatatgcacatggaacaaattaaaaaccatttatagaggaacatatcaaaagtaaattagtatcatacaagtgttgaaggatcacaggaaaaatgattgtaaagaaccactagagggtctctattaaagaagaatgttttcgcgtattttaaagattctctgagttagaaatagtgaaaaaagcctgttcagaattccaggtgtaagttgtaatcacacaaaggcgtaatcatgaaaagtagtaaaacatatgtaaggagggataaacagattcagaaaatcatgtagtattatagataagatattggtattgtctnnnnnnnnnnnnnnnnnnnnnnnnnnnnnnnnnnnnnnnnnnnnnnnnnnnnnnnnnnnnnnnnnnnnnnnnnnnnnnnnnnnnnnnnnnnnnnnnnnnnaagatattggtattgtctctgaagtcagaatccctacattcaaatactggttttatgcagtttttggtaagatggcagattagcacaggctcccaattctctctctgaaaccagttttggattcatcaaaccaatatagaaatcattataaatccctgaggtgacgtaagatggttagatcccaacaagaggaagcagcaacactgaacaaccctggacgccatgaataggagataaagtggaagaaaatatttaggtgtgtactttccccatcaactcaactctgaatgggctattgtccatcctttgccagttagtacaccacagcacagctaggggcaacaacaaaatgtcctattggcagggaagcctaactgggttagggagtaggtaaaaacatattttctcctactgccaccccccttcaaatcttaaaccaagatgattaaaaaagagagaccacacttagaacagtgccagagtggatacagattgttaacacacaagtgacctgctttgaagagtgaccacacacaagtgacctgctttgaagagtgaccactccctccccagattcacacttctgaattcatcagaagtgtaacccaggaaagttgcagtactggaaacaaagcaaaaagaatcagttaaaaaaaaacaacaactggaggttagaagtaaaaaaaaatgtattagttaaaataacataataaatgggttgaatgctggattggttagctgtataacagattagtgagagccataacaacagtcaaggaactctcagaatgcatcaggaagagctaaagaggttaaatattatgtattttaaatatacaacaaatatgtttctataatacagaaatatgtgtatatagttgaaagatgaataaaaattgaaaggttaacattcatataacagaacctccagaaagatatagtaaaaataaatagaggggaagaaatgtttcaggaaataattgcctaggagttcagagaattagagaaaatatgagacctaagattgaatagga

SEQ ID NO: 93318 - DNA, 1445 bp, Homo sapiens
agttgtccatatagttcactgagagtgacacactttggatttaaaacacaaatatctacttttccttttctttctgaaatctgggaaaaatccagtgtagtttttaaagacattaactatagaccaattatttagtttatttgcattcttattattaaaaggttataggagaaacctttcacaccaaaaaaagattttatataaaggtagcaagttgcaaggaacagtaaatattgacttcttaaaattatccataatatacaaatcattcttttaaaaaattgtaatactacaaacagtacccccagaaaaagtggaaaaaaatctgtgcctaatccaggaacacagtatataaactggcatgtaatgtgtctggggacagggttgagyatagaagtgagagacaacagaatacacttttaagcttaaggtcagaattgacactgaaattaacctgatttgcaatattttaacctgtcttgccagaatatctggtctcgttttatgtatctcagatgtcaggcagaaaaattggcaggcacttcttcagagagattacagacctgtggaagcctagggcaagagattacaggtagaaacatatgacagaccatataaggcctcagggagaagtttgggtaaaatctttgggaaattaagacattcatatgggggaattctgaaagccatatgcatcaagatgtatgcacaaagacctgagatgaattgaaactttcatcttaagcttgatcactagactcagagcaggcccagctaatcagtcaaaaactaccccagcaaagatcaagtctgaggaaactggaaaatggtgtaagaacaagtaggaactattattaaagatacagaaattataaaagggaacaaaatagagtttatagagctgaaaaataaaatagttgaaataaaaatcaacagtggcattcaatagcagatttaagcagataaaaaaagaatgagcaaacctgaagacagggaagccaaaattacccatttgaagagaagaaagaaaaaagaataaaataagtaaacagagtccaagagacctatggaataccataaagcatatcaatctatacattatggtaattccagaagaagaaaagagagaaaaagtagaaaaaaatgttggtagaaatactggccccaaattttccaattaatgaaagatataaaatacaaatccaagaactcatgaaacacaaagaaaaataaacacaaagagatccacacattataatcaaactattgatgtccaaaggcaaaatcttgaaagtagcaggagagaggcaatacaagggatcctcagcaaaattaaaagtcaattctcatcagaaagcacaaaggccagaaggcatgggatgatacaaagtgctgaaacaaactaaaaaccaaaactgtcaaccaagaattctatatgcagcaaa

SEQ ID NO: 93319 - DNA, 689 bp, Homo sapiens
ctgctgaggactggggcgacagccagtgtgacctgccagccgggcactatcagctcacccacagatgaagggaacaccttgctgagggcaggttagggagctgtcctcccccgatccctgcccactcttaaccctctggggctggccagtgtgctcacacctgctgggcctcgtcagctctcctggtcccctctgccactggaccacaagcactgcctgctccctcgtgtctccgggaaccctccaagccatggcccctggagagcaggctccaggaccctcctcacagggaaggggggagcgcctttcctgaagctacagagcacacagggaagcacctgcagggcttcccaggcaacgtgcctgagaatccagccctgggcctgtccccggctgcctggacagggaggggtgtgagctgtgctgacggccacctggcgggtgatgcaggggaccctcctagagatgagggagagatggacccgggcgcccaatgcctaggctcagggccgcgtggtaagatgcacctgtggggtcttctacaactccccaggccccasagcagacccagacccttccaagagtggaccccggacatggtatttgtaacaagctccccagtggctctagtgagcagccaagttcaggaagcattagcatagaccccttcgggctcctccaaaggatcc

SEQ ID NO: 93320 - DNA, 759 bp, Homo sapiens
aggccaggtcaggggcacttttcaaaggggccacaggggtgggctgggggccttagggtttggggtgcccctggacctcctgccttgcttctggtctggtgtcatcatcagataggaggcacagccaggaggcagagcagtgcagccctaggacagccccaggaactgggctttggggtcggtgactgttggtgtgattcccttctcagctacggggctctctgagcctcagtgtccccatgggtagaacggcgacagtcacggtcccagagcttccagcccaggtcctggcaccaagtgatgcccagtgtgtgtggcgtgtcttctgcgcatggctctgaccattctctcagggtggagaaaacaccgatccggagcggggcaggtgcaggcggcckccgggagtcagtgtcttgtccgctcactttcgggctgtccggtggtctcttaaatgtccctctgttccttctctcctctcctactctaccgggggcttctgaagcttttgttcatttttttttaaaaggggaaaaccctttttctcgattgcttccagagatgataggttttcaccaacttttatatgaaaatgatcagtgtaataacagactcatttaggtggtaaccagggggcaggttcccatttaaagtggctcccagtcaacacacagcccaagcaccaggcaggaggcaggccctttgcaatgatggtgatgcctccatgcagacctcccaggtctgtggacacgggatcccccc

SEQ ID NO: 93321 - DNA, 706 bp, Homo sapiens
agctgatgtctagaatacagggtaccaaagtgagtcatgttattcttcctgaggattacaaaagtcggttataagcaacagtttaaggtaagtagattgggaacaaattgtggcgtgctctgataaccacattgaagagtttggacaataacctatgcattaggagactgtgaaagtgaagtggtattttcctctgtgtgtcagtrggacatctccaatagcactgtgctatgtgcattgaagactaggagccttttgaccactaatttttgaacctatttcaatttctaaatttctggtattatctcctctgccataggagggaactaaggcagagtttaatgttttgcaatcataaaaccgttataggttacaattctgtgtactgtaggatggttagctgcatcttccatgttggaaggcatcttttgcaaatacaaaattataatcacctaaattataacagctatgaggatatatatagcgttataggattaggagtatgtatcattggtgtgaccattaaaataaataaaactctgaaattaattcttatgtgtccgttatgtaccatgctttcagtcattctcaaagcaatagtattatgggtaaaaggaagatctgctgtttcagtgaactcatttgtgctccttatttcaggagaaaataagccaatagcaacaaaagtgtaattacaaaggattgt

SEQ ID NO: 93322 - DNA, 1454 bp, Homo sapiens
attagcatctttctgcagtgcttgggctaatgcaattaaagatcagtatgacataatatgcataaaattactcaagttaaattttgtttgctacttttaggggcatgctstgtgtgtatcattgcacactgggcctccatgacaatagagtacataaaattcttgaaatatttgggtgtacctataatatcagtaatctattctgataatgattggagtaataaattattctgtaagctctgaggtaacataaatcctgatctttaatctgtcaaacagttgcaaaaccaagttatacaatactgaagagtatagaaacaagcacaacggggccaggggttctgttgtgcatctatatccaaaatactagggcagtttgtgaattgctaaataaaaattactgagttccataccccttccagaatttttggaggcaggctgagggaggcctacagatctgcatttaaaaaccattccaaataactctaaagcaaggaggtcaaaggagtacagtttgggtaacacttatttaaacaatagcacaacatatcattgtactgatcaaataaatccagttttcctaatgtagagttacccagttcttaccttttaaacacacaacacacatatctcctctgggtttggatgagattattgcatcctgggattatgagacagagatatatatctttagtggacattggtagccattgcagaaaacgagtaaagaaggtataattcagagtttgctttgggatcctgtttcactagttgcacttatttttaagattactgtgtcagcaaggattgatattgtagcttgagttggaagctgcaagaatggtaaggaggggagagatgccatctaagcaaggaggaatggaacaaacccccacatctgtcaagttgacaaatggtcagaatggctgatagaatggttaggtatgatgactggtgacatgggctctggactcaaggtactttaactctactggttaatagctgtggggcctgctaaacttctcttggccatagctgtttcttttcctttttaaaatgaagataagaacattgtatatcccatagggttatttctgaggtttaaatgagatggtttctataaaatgtatagcccagttcctggtatatagtaaacatttaatgtcagcaattattaagtggcagtggcctccagctcctccattatagtatttgccatcttgattcaatcctgtcagcattgcagatactgttattaaaaatgaaatgtgcctggcacagtggctcacacctgtaatcccaacactttggaaggccgaggcggcaggtggattgcttgaggtcaggagtttgagacaaacctggccaacatggtgaaacactgtctctactaaaaatacaaaaaaaagaaaaaagaaaaagaaaaatattagctgggcgaggtgacgcacctg

SEQ ID NO: 93323 - DNA, 1454 bp, Homo sapiens
attagcatctttctgcagtgcttgggctaatgcaattaaagatcagtatgacataatatgcataaaattactcaagttaaattttgtttgctacttttaggggcatgctctgtgtgtatcattgcacactgggcctccatgacaatagagtacataaaattcttgaaatatttgggtgtacctataatatcagtaatctattctgataatgattggagtaataaattattctgtaagctctgaggtaacataaatcctgatctttaatctgtcaaacagttgcaaaaccaagttatacaatactgaagagtatagaaacaagcacaacggggccaggggttctgttgtgcatctatatccaaaatactagggcagtttgtgaattgctaaataaaaattactgagttccataccccttccagaatttttggaggcaggctgagggaggcctacagatctgcatttaaaaaccattccaaataactctaaagcaaggaggtcaaaggagtacagtttgggtaacacttatttaaacaatagcacaacatatcattgtactgatcaaatawatccagttttcctaatgtagagttacccagttcttaccttttaaacacacaacacacatatctcctctgggtttggatgagattattgcatcctgggattatgagacagagatatatatctttagtggacattggtagccattgcagaaaacgagtaaagaaggtataattcagagtttgctttgggatcctgtttcactagttgcacttatttttaagattactgtgtcagcaaggattgatattgtagcttgagttggaagctgcaagaatggtaaggaggggagagatgccatctaagcaaggaggaatggaacaaacccccacatctgtcaagttgacaaatggtcagaatggctgatagaatggttaggtatgatgactggtgacatgggctctggactcaaggtactttaactctactggttaatagctgtggggcctgctaaacttctcttggccatagctgtttcttttcctttttaaaatgaagataagaacattgtatatcccatagggttatttctgaggtttaaatgagatggtttctataaaatgtatagcccagttcctggtatatagtaaacatttaatgtcagcaattattaagtggcagtggcctccagctcctccattatagtatttgccatcttgattcaatcctgtcagcattgcagatactgttattaaaaatgaaatgtgcctggcacagtggctcacacctgtaatcccaacactttggaaggccgaggcggcaggtggattgcttgaggtcaggagtttgagacaaacctggccaacatggtgaaacactgtctctactaaaaatacaaaaaaaagaaaaaagaaaaagaaaaatattagctgggcgaggtgacgcacctg

SEQ ID NO: 93324 - DNA, 1163 bp, Homo sapiens
aatctctaacatactgtgatgcctaacatgaagttcctttgaaaacaactgaaaataaacatctgcatcaaattcttatcgttttcgctcttagttattttgttttttgttttaacgtttggactcaactttccccaagttgctcaaagattcagataattgaccgaagacacctgaggctgagaaatgtgctagtagttgatgtctgacatgttatcaggggaagagaggatggattgacccttccgaaaaatacctttaaaatttaaactagcttcatttctcataggcttccctgtttactctggaatactcttgttatcacagagaaamtaagtattaaatattttctatgtcaattctggaatgaatgaataattagagattaacaggggtataagtcattcagatttaaccgcgtcaaagagtagttctcagttttcattctgaaatagtttcaaaaataagtataagcagggcttaatgtttataaaagctcttccacatcacatatcaatttattcattcaatgaacacgggaaataggtaagattgtatcatcattattctcatattatggaagagggacaagagattcagagatatgtgctttgctccaggtcacagagttataggcacaagagaaaggattaagatccagttcttctgaccccactgtacaacattgtttatctattagacacccaaatatccaaatgcaagttgtaattcattagtacttctcataaaacaaaaggaaatccttgactgtactaaattcctgggtatcaaatcacaaatcagtattttttaagaaaattaagtttaatttatgccaagtacttacattggtatcaatttatattttcgtgactcatatcacaaaccatgtcattcctttgaatatggaaagcccgagtagaatatttatgaaaagcatttaactctatggaatgaaaggaatgacccagtccctggataattgcaggatttaattctacagaattgttactggtagtagatgctgacctttaattcacagttcctaaatacactacctaagcaggagtataattatataaggtacgtttcaagccaacattaaaaaaaaactaagatttgtgggaaatataatacaagaatgtgagagagagtttcacaaa

SEQ ID NO: 93325 - DNA, 626 bp, Homo sapiens
agcctgggtgacagagtgagatcctgtctaaaaaacaaacaaaacccccccatacacaaaaaactatcaagagggttggttccccttcagaggacttgattttttgatttatgggactctgtgagtactttgagtttgtggtccctgtggaagcctgggaactgagtctttctcttaagccccgagctgtctggaaaggtacagtctcattcatctgccttccagcatcactagctccagggctcctccctggaatggaggcctctgtcaccctgcctgggtggtcctgctatcaggacactgtaccaggctccggtgagggtctcagccccataaccaccgagtcactgtctcaggctcttggttccttccaggctgtggtgaggtccctctgttttggtttggctgaggtggttgaaatgaacaggactgctctgaccagctcacagaaggggaagtggatggcacgagcacaggtagggcagccagggagcagagattctctcaacacccccaaatctccaaatcagggtgccttgggatgcaaatggcaaaaatcccaagctaacctcgagcaaaagaaggaagaggaggaggtattggcttakctggcttcaggtactgct

SEQ ID NO: 93326 - DNA, 696 bp, Homo sapiens
tttcaaaccctcccctccaccaggtaggctcactttgctgatccagccccctcctggctgatgcctcgggtatccctccccaccctcccaatccccgtctgagtggagagcctcacgggcagtgactgactgattcatctctgtgtctccagcacttggcatagtccctggtgaaagtttgctgaattgcataaactgctgtcattgccgggttggtgaaatgcttccaagcttcttgaggtttatcctgactggccacaaaacctgaaaactagccaagaagcatggggaagggtggctggggaggagggtcaggtggaatgcagagagctgagctcatgtggggagttctgatgacttcaggggcttccccggggcagaatcactccctgtgagcacagagaataaaactaggatgagagattagttactgagtacaatggatgttgttcgcctgatggataccccgtaagtatccctgacttgaccactacacaatctatgcatgtaacaaaattgcacatgtacctcatacatttgtacaaatggaaacaaaaaagaaaagctaaggggtgtggtggctcatgcctgtaatcaacactttgggarcctgaggcgggtggatcacttgagctcaggagttcgagaccagcttgggaaacatggggaaaccctgtctctacaaaaaaatacaaa

SEQ ID NO: 93327 - DNA, 696 bp, Homo sapiens
tttcaaaccctcccctccaccaggtaggctcactttgctgatccagccccctcctggctgatgcctcgggtatccctccccaccctcccaatccccgtctgagtggagagcctcacgggcagtgactgactgattcatctctgtgtctccagcacttggcatagtccctggtgaaagtttgctgaattgcataaactgctgtcattgccgggttggtgaaatgcttccaagcttcttgaggtttatcctgactggccacaaaacctgaaaactagccaagaagcatggggaagggtggctggggaggagggtcaggtggaatgcagagagctgagctcatgtggggagttctgatgacttcaggggcttccccggggcagaatcactccctgtgagcacagagaataaaactaggatgagagattagttactgagtacaatggatgttgttcgcctgatggataccccgtaagtatccctgacttgaccactacacaatctatgcatgtaacaaaattgcacatgtacctcatacatttgtacaaatggaaacaaaaaagaaaagctaaggggtgtggtggctcatgcctgtaatcaacactttgggagsctgaggcgggtggatcacttgagctcaggagttcgagaccagcttgggaaacatggggaaaccctgtctctacaaaaaaatacaaa

SEQ ID NO: 93328 - DNA, 696 bp, Homo sapiens
tttcaaaccctcccctccaccaggtaggctcactttgctgatccagccccctcctggctgatgcctcgggtatccctccccaccctcccaatccccgtctgagtggagagcctcacgggcagtgactgactgattcatctctgtgtctccagcacttggcatagtccctggtgaaagtttgctgaattgcataaactgctgtcattgccgggttggtgaaatgcttccaagcttcttgaggtttatcctgactggccacaaaacctgaaaactagccaagaagcatggggaagggtggctggggaggagggtcaggtggaatgcagagagctgagctcatgtggggagttctgatgacttcaggggcttccccggggcagaatcactccctgtgagcacagagaataaaactaggatgagagattagttactgagtacaatggatgttgttcgcctgatggataccccgtaagtatccctgacttgaccactacacaatctatgcatgtaacaaaattgcacatgtacctcatacatttgtacaaatggaaacaaaaaagaaaagctaaggggtgtggtggctcatgcctgtaatcaacactttgggagcctgaggcrggtggatcacttgagctcaggagttcgagaccagcttgggaaacatggggaaaccctgtctctacaaaaaaatacaaa

SEQ ID NO: 93329 - DNA, 696 bp, Homo sapiens
tttcaaaccctcccctccaccaggtaggctcactttgctgatccagccccctcctggctgatgcctcgggtatccctccccaccctcccaatccccgtctgagtggagagcctcacgggcagtgactgactgattcatctctgtgtctccagcacttggcatagtccctggtgaaagtttgctgaattgcataaactgctgtcattgccgggttggtgaaatgcttccaagcttcttgaggtttatcctgactggccacaaaacctgaaaactagccaagaagcatggggaagggtggctggggaggagggtcaggtggaatgcagagagctgagctcatgtggggagttctgatgacttcaggggcttccccggggcagaatcactccctgtgagcacagagaataaaactaggatgagagattagttactgagtacaatggatgttgttcgcctgatggataccccgtaagtatccctgacttgaccactacacaatctatgcatgtaacaaaattgcacatgtacctcatacatttgtacaaatggaaacaaaaaagaaaagctaaggggtgtggtggctcatgcctgtaatcaacactttgggagcctgaggcgggtggatcacttgakctcaggagttcgagaccagcttgggaaacatggggaaaccctgtctctacaaaaaaatacaaa

SEQ ID NO: 93330 - DNA, 696 bp, Homo sapiens
tttcaaaccctcccctccaccaggtaggctcactttgctgatccagccccctcctggctgatgcctcgggtatccctccccaccctcccaatccccgtctgagtggagagcctcacgggcagtgactgactgattcatctctgtgtctccagcacttggcatagtccctggtgaaagtttgctgaattgcataaactgctgtcattgccgggttggtgaaatgcttccaagcttcttgaggtttatcctgactggccacaaaacctgaaaactagccaagaagcatggggaagggtggctggggaggagggtcaggtggaatgcagagagctgagctcatgtggggagttctgatgacttcaggggcttccccggggcagaatcactccctgtgagcacagagaataaaactaggatgagagattagttactgagtacaatggatgttgttcgcctgatggataccccgtaagtatccctgacttgaccactacacaatctatgcatgtaacaaaattgcacatgtacctcatacatttgtacaaatggaaacaaaaaagaaaagctaaggggtgtggtggctcatgcctgtaatcaacactttgggagcctgaggcgggtggatcacttgagctcaggagttcgagaccagcytgggaaacatggggaaaccctgtctctacaaaaaaatacaaa

SEQ ID NO: 93331 - DNA, 276 bp, Homo sapiens
agagaagaagaaggaggttcctgctgtkccagaaacccttaagaaaaagcgaaggaatttcgcagagctgaagatcaagcgcctgagaaagaagtttgcccaaaagatgcttcgaaaggcaaggaggaagcttatctatgaaaaagcaaagcactatcacaaggaatataggcagatgtacagaactgaaattcgaatggcgaggatggcaagaaaagctggcaacttctatgtacctgcagaacccaaattggcgtttgtcatcagaatcagagg

SEQ ID NO: 93332 - DNA, 573 bp, Homo sapiens
gttaaaaataaacaatttcaattattcaagatctcagggactataagtatgaatgaggctttcttgggggaaaaaaatgataccaacaaaatctctccatccacgcaagttacttctgtgttgttcctgcatctcgctaacaaaaccctctggatctggcttcctgtaacagtttagtgccctcaggaatcaacatgtctttcccaagtcagactggaggcagaaaactccaggagctgctgtgctgtgccaagccagctccagcacagaaatatcatttcactgcaccgacaccatgctgggaagtgttttcaagtcttttgygttgcccagccatgcagccctttcagtgctgtctggatggcaaccttatgagaccctgagcagagagcccacctccactgtgtccaaacacctgccccacagaaactctgagatcatagatgtgtgttgttttaagctgctgaatttgtgacgatgcgctatgcaacagtaaaaactaacagggtattttctcttggaaatactgattgaagctccttagataccttctgtgttccctcgacttcccga

SEQ ID NO: 93333 - DNA, 573 bp, Homo sapiens
gttaaaaataaacaatttcaattattcaagatctcagggactataagtatgaatgaggctttcttgggggaaaaaaatgataccaacaaaatctctccatccacgcaagttacttctgtgttgttcctgcatctcgctaacaaaaccctctggatctggcttcctgtaacagtttagtgccctcaggaatcaacatgtctttcccaagtcagactggaggcagaaaactccaggagctgctgtgctgtgccaagccagctccagcacagaaatatcatttcactgcaccgacaccatgctgggaagtgttttcaagtcttttgcgttgcccagccatgcagccctttcagtgctgtctggatggcaaccttatgagacccygagcagagagcccacctccactgtgtccaaacacctgccccacagaaactctgagatcatagatgtgtgttgttttaagctgctgaatttgtgacgatgcgctatgcaacagtaaaaactaacagggtattttctcttggaaatactgattgaagctccttagataccttctgtgttccctcgacttcccga

SEQ ID NO: 93334 - DNA, 625 bp, Homo sapiens
ttaacacagccgcacagggttctatacatttaaattaatgaaaattaaacaaaatttgaaatacagttcttcagtcacacaagccacatttcaygtgctcaacagatggtcagtgactaccatattggaaagctcagcgatagaccatttccatcattgcagaaagatctattagacattgctgggttcaagttttatcataatcctaagaaaatcatgaagaagatgaggtctcattccaggccaaatttaattggaaccctgcaatgtgagagtggacctgtgagctgttgataaactttgatgaaagtggaaatttcccatgtgggacccgagactaaatctgacccagagtattttgaagatgaggttggctaacgatggttctgccaaaatacttgtgactgatcagaacagaatggaattctgaacaggtgcaatatcccaagtactcaagaactcaagtccctgatgttaatggcacaggaaaaatgtttctcattttctgcgacgttattttttatttggtaactcttagatgtttcttgctacatatgatgcatcttgcacctaggaaagcacccctctgccagttctgagccccctcgttccggggctgggtgat

SEQ ID NO: 93335 - DNA, 625 bp, Homo sapiens
ttaacacagccgcacagggttctatacatttaaattaatgaaaattaaacaaaatttgaaatacagttcttcagtcacacaagccacatttcatgtgctcaacagatggtcagtgactaccatattggaaagctcagcgatagaccatttccatcattgcagaaagatctattagacattgctgggttcaagttttatcataatcctaagaaaatcatgaagaagatgaggtctcattccaggccaaatttaattggaaccctgcaatgtgagagtggacctgtgagctgttgayaaactttgatgaaagtggaaatttcccatgtgggacccgagactaaatctgacccagagtattttgaagatgaggttggctaacgatggttctgccaaaatacttgtgactgatcagaacagaatggaattctgaacaggtgcaatatcccaagtactcaagaactcaagtccctgatgttaatggcacaggaaaaatgtttctcattttctgcgacgttattttttatttggtaactcttagatgtttcttgctacatatgatgcatcttgcacctaggaaagcacccctctgccagttctgagccccctcgttccggggctgggtgat

SEQ ID NO: 93336 - DNA, 922 bp, Homo sapiens
gggattaagcagagcaacgggccaaggttagggagttggtagaccttggccaactggcagcttcaattgtattctcctggctgtgtcccccctggggagggacttcactcttctaggctttggtttcttcacctgtaaatggcaatgcagatatttccctcataagagcattgtgaagatttaacaagttcatggaacaaagggtattgtggatgctcaatacacagcagctttgttccttgattcctgtaaaggtgatctgccttggtccaccaggcgtgttcttaggaaagaatgtggtctcggtcatttctactgttgtgtaaatttaagcagagatattatatacttagtggaaatttgaattttgggattgttttagctgagtaatatgagactgttctctctgtggccttgtaggtatcagtttccagggtaaaggggagaaggttactgggcacagggctttccagaggtcacagtctgcccctggggctcaggtttgaatggatttcaagagaatgcccaatgcttacagaaaaacgtgaagtctggggaagttggtggacggcatggcaggaaggggcctctgaggcgagtagccttgtacacagcaggttcctgcaaccttcctaatcgtccagtggctctagggttcttctgagtgccttatggacagctccccatgttattcctcccatctgtttctattgtcatyggcccagtgagctccagaatccattgcccatttgctggttcactctaagagtaaaactccctgcaagcgtttgaaacccagccgcgcgtgtttggatggagacagccggagcactctcactgactgcccagtgctgcgagtgggtgtgcccctgccgggcgtgtgtgcatgtgtgtctatgcaggtgtgcatgagtgtgtatgc

SEQ ID NO: 93337 - DNA, 592 bp, Homo sapiens
tcctctgctctttgaaagccaaaatccttgagcttagcaaattgcctcgtacacagatcagacctcccaagaaaaagggcagcagggtggtggctggagctgtggcagcacctcggttggtgccctgtcgcctgcagcaccagcccgcaagccccgggggtgtcctggaaatctgccttcctggccaccactcctgacascctggtttcttaagatgacagaatgtaaggtggaaaagaaggcagcatagggagctcgaaactactgctccggactcccctaagcctttccacagggcggtgttggcaggctgtccagccaccctggcccgcgccgcagacaggacttcctgggaatccaacatgggggcgagacaggagtggttggtataaacagtgacttgctcagacctgtttctaaggaaggaaggagaagctagctgggctccaaccccctgcggtgtcgtctgaccccacctcaacacacacatttcttctccctgcctgtacagaggccaggcacccagaactccctgagagacccaccacgcctcagcctgccaccccattcccctgagaaagaaaagccagcc

SEQ ID NO: 93338 - DNA, 873 bp, Homo sapiens
ggagagagagggagagaaagaaagctgttgaagtggtgcaaatccaaactgctttcttttttgctcataagtagtgcttttcaaagcgtttggcatccctgccatatggatgtgtcactgtgtgagatgacaacaggatttgctggaaatgtgggccactattgtatccgccttacgtaaccacrtggagtgatggaaatgggtgagcagcccggaatgtaggcggtggcctggcccatgcatctccagagaccatgaagactgctcaagccctacataggatgtggatccaggctgttaaaaagttgaggagatggaaaggccgtgtgagtccctctgcaagctctccccttgttttccccaacctttcttcatgggaaggggagggaagcaaaaccattctcacagtgagtcctttatcctcagattgatttgtgcttctggcatctttcagcaacaaattgtgagattgtaggttgtagtcactggtgggtttttaaaaatacttgtattaattttagcagatctatgtgaaactgatagcctcttactggatctgtggatcaaaggctgctgttttccatgtgctaggaatctgtaatggttttgcttcctgggtagagcttaacatactggcttttgtgtttgttcatgtttgagaatttcttgttttgggataaaactttttgctttcttacactgcagaaatctatattcttattatgtctaggcttctaacttagaagaaaaagtgtttttcacatgttcttttttcctcttacagtttgaacatgtgtgagtgtttactttgatggcttgagacttttatgaagcatgtcccttacgtggacagcttgcgattatctttgtttt

SEQ ID NO: 93339 - DNA, 873 bp, Homo sapiens
ggagagagagggagagaaagaaagctgttgaagtggtgcaaatccaaactgctttcttttttgctcataagtagtgcttttcaaagcgtttggcatccctgccatatggatgtgtcactgtgtgagatgacaacaggatttgctggaaatgtgggccactattgtatccgccttacgtaaccacatggagtgatggaaatgggtgagcagcccggaatgtaggcggtggcctggcccatgcatctccagagaccatgaagactgctcaagccctacataggatgtggatccaggctgttaaaaagttgaggagatggaaaggccgtgtgagtccctctgcaagctctccccttgttttccccaacctttcttcatgggaaggggagggaagcaaaaccattctcacagtgagtcctttatcctcagattgatttgtgcttctggcatctttcagcaacaaattgtgagattgtaggttgtagtcactggtgggtttttaaaaatacttgtattaattttagcagatctatgtgaaactgatagcctcttactggatctgtggatcaaaggctgctgttttccatgtgctargaatctgtaatggttttgcttcctgggtagagcttaacatactggcttttgtgtttgttcatgtttgagaatttcttgttttgggataaaactttttgctttcttacactgcagaaatctatattcttattatgtctaggcttctaacttagaagaaaaagtgtttttcacatgttcttttttcctcttacagtttgaacatgtgtgagtgtttactttgatggcttgagacttttatgaagcatgtcccttacgtggacagcttgcgattatctttgtttt

SEQ ID NO: 93340 - DNA, 667 bp, Homo sapiens
tgggggtggatttcccccttactgttcttgtgatagtgaataagttctcatctgactgtgtagcacttcccccttctctctctctctctctctctctctctctctctcttactgccatgcaaagatgggcttgcttccccttcaccctttcaatacaattgtaaatttccacaggccttcccagccatgcctgctgtacagcctgtggaattgtgagtcaattaaacctcttttctttataaattacccagtcttgggtagttctttatagcactctgagaacagactaatacactccttaactgaattggtaccatatctcatctaatttaagacaccattatttggggtatcactaagaaagactaactggtgycaattaactgtgaggtgccattgagtataagatacatccctatttcagaggtataaaaatgtgagagaaaaataaggtacatcttaggataaataaaattacattggtgagtgaacatcttttaaccctaggaaaatttagaatcaagtcttctgagatccctggagttctactagtattccttactggatacaggttttaattttgggaatattaaaaattaggtattaaaaagttcaagggaatcaaaaccatgatattaacattttggtgtttggaaagaccctatat

SEQ ID NO: 93341 - DNA, 1195 bp, Homo sapiens
gatccactgcttatcttattcagtgtattccatactttgaaaggacacttttgctttccaacatgacatttaacaagcagacttgatattatctatcccagtttgaaactgaaactcatttcaaaggaggggatcattttctagatgatagttatatagcagttttctctccacttcttccaccttagaacctactcaaggaaaactgctcacttcatttagaagcttttttttttttttttttttttcagagacagggtctcactgtgttgtccaggctgcttgcaaactcccgggctccagtgaccctcccacttcagcctttcaagtagctaggactacaggcattccaccacatgcctggcttctttttgcatttttaaactatgacttaagtgttgttttttactgtttttttgtttttttttttttctgtgtaaattttcctttgcttatattcagggccctgagtgaaaatctacagagatgctgaaagagaaaaaaggactttgaaggatttatatttttttatgttctttacttgttagtagttaaaatattagcaagcaaggggatcttttaagtttttctctaaaatataattattctaactattgaaacaatttttccagaaaagcctcttttagacaattgtagtttttaatctttatatatctgtacatctagaattctacaaataagacatgtaataccctgtgtttgcacctctcccatcttcctcttgcttctctggtgtgtgggtgaatggagtgtgcacaaaagcaaggaccacccccaggacaggcactctgctccctgtgctgcccaggtcctttggtcttcttctgtgacagtttcttttcttagcccactaagcaatgatagccaccaagatcatatgctaaatataccccctctttggcaaaaaaccccacatatatatatatayacacacacacacacacacataataaaaaaatcagaagttgagaggtgacaacgtgctagcagccctcgctcgctctcagcacctcctcagccttggcgcctcctcagcctcggcgtgtggccacacttgaggagccctacagcccgctgctgcactgtgggagcccctctctgggctggctgaggccagagatggctccgtttgtggggaggtgtggagggagaggcacaagccggaaccggggct

SEQ ID NO: 93342 - DNA, 697 bp, Homo sapiens
ttttgggaggccacacggcaggtggatcacttgaagccaggagttttgagaccaacctgcctgaaaccctgtctctattaaaaaaattaaatttaaaagagaaagaatttgttgccagctaccctccactagtagaaatgctgaagtaaattctttgggatgaagggaaatgatataccaagtcaaactcctgttttcaaaaaggaatgaagggaaaacttgtcttwttttatcctctttatttgtttcaaatgtatatgatgttgaaagcaaaaaaaaaaaagtaacattgggtgatttatatgtagatataatacatatggcaactatatcagaaaggactgggatgggcaggtaaatagaatcatttggtgacaagttttttacatttttcataaattgtatgatattaactctgaaatgttaatatctgaaaatgtaaaggtatatttcagttcttagaacagacacttaaaaaaaaaagacaaaaaaacataaggacataaacctaaaatgcaatagagaaattatattggaatcttaaaaatattaaattactccaaaggacgaaaggacggacagagtaataaaaagcagtaattgaaagatctaaatgtggacatattgataattacatctggccaggtccagtggcttatgcctgtaatcctagcactttgggaggccaaggcaggag

SEQ ID NO: 93343 - DNA, 663 bp, Homo sapiens
cttggctttctggcccacactaaaattatctagggcaattttatcccaagatccttaattactctctgaagaccctatttccaaataaggtcacattcacaggtgtcagggattaagatttggacatatcttttggaggaacattattcaacccactcctacctcaaaaactataagaattgctttgcctagttgcacttttgtttttattccaagcttttatcgggggattcggtcttccatatgttctttttttcctctgtccgactttccattctgatttataccttcctcaagacttttaaattagtgataatttctcatcttacatatgtccttatacttcagtttgtgaaatgtgtgttggacaaaagcatgaactggaaaacacctatcaggtttagtggcagacctctgccaaaggagttccaggatagcagtgagccaagaaactagattgcagtgcattgaggagggaatgagcagctaygaagaggagggtgtctgtctctttaaacccttgcctgtgaaaggctgacagtacagaacactggctggagtgaggctgacattgacaggaagctgccgaaagagagagggatgctggagaaataaaactcaacttatggcactcacatcaaggaagtgggaagggatggatcc

SEQ ID NO: 93344 - DNA, 665 bp, Homo sapiens
ttgtaaaggtttgtttaaaattagtatttattttattcataatggaaattattataataaatattagctgttaaaacaactttatattacatagtatggttygtataaaaacataataggtttttttttagtgtcattgtttatcattttctgttctttctgggaaagagacacactcaggactcattaatatgatgcattttataacataaattagcatatatgtaaccctagaacactacatttctttagtttctaatctagacttttatgaaataattatactgaattttaaacatattaagacttttgataacaattagagatttataatctctatttgtttctgttttggctctttgaaactcatattctctaggtaaacaagaggaaagacaaaaaaaggaaactaatttatatacaagaatttgtgcttctggtgacaacgtagtaacaaagactaaaatttgggtttttttcttcaaataggcaatcaataaaatatatgatataaagttctcaaatactggaaaacaaacaacacaaaaaatccttgagaaaaggaaaatgaattgaggtaagctctcaattgacccagcttattgcttggagaaagtttccaagttgaaaaacagataagggagctcaaacacaagctgtgttga

SEQ ID NO: 93345 - DNA, 707 bp, Homo sapiens
cactaatcccaggtaaagaatctttgttgttcgatatcagtcatggtaattcaattttcttgacattaattgtgaaaccaacccaacagtcccatggatgtttctttggataatatagaaattgatctttctgatcttaaagcttgaagcttacatttgttttatcactattccttcctcaggaaagaccaccagacctctgaaaaagtatcaaagaactgagactctccaggtcatcacatctagacaataggagacctcaggccccttattcatcacgattgctktcttcccttccttagttcttgttttcccacacatagttagattacttccctgctatataaatccctaattttagttggttagggatatagatttgagcctgatctctcatctctttatagctgcaacatccagttaaagccttcttctttggcaataatcattggcccagtgattggctttctgtgtggcaagcagcaggacctagaccaaacccctggtgtttcagtaacaactggctgatattttagagaacagtgtatagcaaaacactggccaccaagggaacattattgaagcgcatcaagtaagttcttttccaattataagagatgttggatgcaaaatatatttttaatgtttatttatttatttacttctgcttggcattatcatatctgcatctaatacctgaaattatt

SEQ ID NO: 93346 - DNA, 815 bp, Homo sapiens
acctactcattcgtggctgcctattctcaccaccttctcctgaaggattcttttgagttcctttcccgggctcttgcagcccgttggagtacgtgtttgcaaacctgcaccctaycatctccaagttcttcagaggcaggctttagtctgttcagctttgtttgctggtgcccaactcagtggcatgcagggtggacaagttgttctcaaacactccctgtggctcggttgcctgaggtgagatgatatttacaatgccaatgctgggccccatgcccagagattctgactcaactgacctgaggtctggacatgggccgtctaagctccccaggtgattctagtgtgcagccatgacagaggcccaaaggagaccatcaatgaatcaacaaggtggctctgaccaagtgacacctccttttttctctttctggtggtgaggaagcagattctcaacctctattcatctttagcatctatccatggttaataccatttgtttgagccatacaactcttggagaaccaacttctggagggagacctattggcaggcatgtctgaaactgcactgaagaactcactgagtcttatgaaatccctgtctgcaacagactgcgtgctctcattctcctccagctctactctgtacctgccactgtttactacactgtagatcccggctcccaaacttggtacttgtcagaatcccccactccagtagttacaaatgagaccttttgaggggtcagatgtcagaggccatgtgtgtgtgtgtgggtgtgtgtgcacgtgtatgtgtgtatttcaagcctc

SEQ ID NO: 93347 - DNA, 781 bp, Homo sapiens
agtgattgtgaaaactctgatgtcagatgcatctggaaagtttaaattgtttcatgaaatgtgcatatggaaaaagtaatacttttaaatatgattttcacataatatgtgaacttaaatatatatgtcactgaattaacaaaccatataagtagtcagctgaaggtttcaaccacatccctaaaggattacgtatttatgtttgccaagacacatttctgaggatctcattggaaagacaggaaccactttacatttagacctatatgattcattaaagctcctaatcatgttctttaactttttttttctttgccttttactcaagtaggaaaagattttcacttaagtggagaggcaaggaataagggcaaaaggaaactggctcttaaggctgacttgactagcaggacctagggcgtgaaaaagaatggagagaatgtgcttattatatctttaatgaacccttaatttgaaagcctcctagtgaaagagtctcagagggaagagccgtragagcagcaggggatgtggctcatttgttctcactctttctccctgaccagcagctgtccctgtcgggctgcggagggcccagtcctgtcactatcccgcatccacaggacgagctcagctcgggtgtcttaggggaatgcacaccaaattcgagggcaagtgtgaagaaagaaagtatgggagtttttaagaaagcttctaaaaggctgaaaagatacgcaaatgaagaaactcggggctcaacacaccactttaaaggactaca

SEQ ID NO: 93348 - DNA, 1315 bp, Homo sapiens
  misc_feature (1)...(1315): n = A,T,C or G
tgcattaaatcacttcaaaacttgatcttgtactgctttcacttttgttgtaagtagccttacaatgagcanattaaaaatgtgttactataatatgttaaggattatgttgtttgtaagggtaaaatactgagagattttatttcctttggatttgggggggacagctgtaaaaggttccaatgtttaatttctttttttatgatgtccactaagatttcatacacatttctatactcagtcacatttggagtagttgctgggtatttcttttaatgagtgttttatgtgggtaatttgatctctaagaggtttagtttagaagggtntgcaaggggtaattagaaactattacactaacttttaaattgacctcttgtttttagtaagtaaaaaattaggttataacaacacttaacatagattgtctaggtttagttgaaaaagtataaaaaaaaacctatgattgttgaacatgccgtaaaaaacaaaatattaaaacttgtgacagatttgtctttggaagggaaggaatgactgttgtgtaaggacaaagtgaaaaaggttctaaggagattaatattaatgggaatgtttaccgtggccatatacttaaagaccttaaacatttgaattagatttggaagactggtaccaatggccaactgataatgggttcctatggggtactgccggtgagttataggaatgtatatgaaggcaaaactaaaatgtgatttgggaagattttccagagtggcctgatagaaagaatagaacattacagtttttcattttgttcactttgattttattaaacctctaaaacaaattgatatttgagaaggagagacaagggtatgtaaaggatataatgatatttttcctaataatgctagtgtacgtgtcctatagaaagaagaagaggtagtatttaggaaaagatgagagaaaaaggagtgtcttgcttagtagcttttttatgataacattgaaagtttctctcttgaaacttgaaattttgaagtactgtaattcagtatgggtgagtatcttaatttggaaaaaaaccactaagctgacttgtaatacaaagtaaatggtaacattttcattcatagctaaatattaagtagcagaaaagaattgtcatggaaatmattttttgcttttaaactttcaattcatctatatatgtaaataaagtcttaatgcaagcaaaattttacagaaatagttatgtaattatgaagtaatttcaggacttcccatgacatttaatgatggaaactatttttctgatttccaaaccaaa

SEQ ID NO: 93349 - DNA, 1375 bp, Homo sapiens
cgtatacaaataccttaggacaatatgttgtttcctgaaattcttaggaggaaaaaaacatcatatgactataagctgaaatttttaaattaatgcaattatttacccatgatcaagatgatacttgtgggcaagaagtggaagaaaaaagaaaatattaatagataaagaatgtaatcacatcctgagagtgatgaaaaattagaaaaaaaattaaaaaattaaaaatttttttaaaaaagaatataatcatttagcaaatagcataagatatgagacttagggagatctaagagaaaacacaaagacattgaatattaatagtagtccaaagagcttttgctgaaaaataattgagcatgaaaatgatacaactacccgacaggtatttatctacaataccagcaatgctgaatgtgaaacactgtagaaatgtccagagactcaaggttttctgtcctttcaaagtgcatcaccagtcagagtccccacagagaagtagatggcatattcaactctgcataattccaagaggatttagtaaagatgctatttgtaaatacagatacggtacagaaaaccccaaggaaaagtgcaggttcctggggctagcaagcagtgctgtctactccaaggccttaaggatgcaagaaaggagtggtcatggggaccctgacatgcatgtagagaggacatgctgagagaaccagtggccttctacttgaggacacagccaagctctccacctcccctctacctgctggggttccccactggccaaacccaaccggaagccagaggatcctttgatgtggttcataagggccagactcccccaggagagggcagggtggagaagtgtggagaggggaaacagagggacaaaaggaagatttccagtctttccagatccagttattggacctgtctgagatacataaatggaaaaaaaaamaacagagaaagaatgcttttctggtgtgctggaaatcttctgtttgtgtgtgtgtaagtgtgtgtatctatctatatatgtgtgtgtgtgtgtgtatgtatatatgtgtgtgtgtatctgtgtgtgtgtgtgtgtgcgtgtgtgtgtgtatatgtatatatacaaaacagagaaagaatgcctttctggtgtgctggaaatcttctgtttgtgtgtgtgtgtgtatatatatatatatatagagagagagagagagagagagaaagagatatggagtcttgctctgtcaccaaggctggagttcagtggcacgatcttggctcattgcaacctctgtctcccgggttcaagtgattctcttgaacaagtagctgggattacagactcccaccatgaagtccagtttatttttgtattttt

SEQ ID NO: 93350 - DNA, 1375 bp, Homo sapiens
cgtatacaaataccttaggacaatatgttgtttcctgaaattcttaggaggaaaaaaacatcatatgactataagctgaaatttttaaattaatgcaattatttacccatgatcaagatgatacttgtgggcaagaagtggaagaaaaaagaaaatattaatagataaagaatgtaatcacatcctgagagtgatgaaaaattagaaaaaaaattaaaaaattaaaaatttttttaaaaaagaatataatcatttagcaaatagcataagatatgagacttagggagatctaagagaaaacacaaagacattgaatattaatagtagtccaaagagcttttgctgaaaaataattgagcatgaaaatgatacaactacccgacaggtatttatctacaataccagcaatgctgaatgtgaaacactgtagaaatgtccagagactcaaggttttctgtcctttcaaagtgcatcaccagtcagagtccccacagagaagtagatggcatattcaactctgcataattccaagaggatttagtaaagatgctatttgtaaatacagatacggtacagaaaaccccaaggaaaagtgcaggttcctggggctagcaagcagtgctgtctactccaaggccttaaggatgcaagaaaggagtggtcatggggaccctgacatgcatgtagagaggacatgctgagagaaccagtggccttctacttgaggacacagccaagctctccacctcccctctacctgctggggttccccactggccaaacccaaccggaagccagaggatcctttgatgtggttcataagggccagactcccccaggagagggcagggtggagaagtgtggagaggggaaacagagggacaaaaggaagatttccagtctttccagatccagttattggacctgtctgagatacataaatggaaaaaaaaacaacagagaaagaatgcttttctggtgtgctggaaatcttctgtttgtgtgtgtgtaagtgtgtgtatctatctatatatgtgtgtgtgtgtgtgtatgtatatatgtgtgtgtgtatctgtgtgtgtgtgtgtgtgcgtgygtgtgtgtatatgtatatatacaaaacagagaaagaatgcctttctggtgtgctggaaatcttctgtttgtgtgtgtgtgtgtatatatatatatatatagagagagagagagagagagagaaagagatatggagtcttgctctgtcaccaaggctggagttcagtggcacgatcttggctcattgcaacctctgtctcccgggttcaagtgattctcttgaacaagtagctgggattacagactcccaccatgaagtccagtttatttttgtattttt

SEQ ID NO: 93351 - DNA, 846 bp, Homo sapiens
ggatccaaaataagataggctagaaaaaaagactcagtttttcctaggcaggcttcaagcctatttgcaaaataagtatggtacatatatacatgtatatatatggccaataatttatccaataatccaaatttttgttagctgcctgtatctatcatatactgtggaatcaatgtattcaatgaccaggtgaggtagtttacaaaaaccaccacaagttctcccttccacatccctgcaatgtgatgttgcagttcttcccatcagaaagttgagtctatttcctgcccctgcattttagttggccatgtgacttgtgaagcaaatgtacgcaagcagtggctttaattcacctgtgctctgggtttactctcctgcttgcatttgtatccctaagaccaccatgtgaataagcccgtgctagcctgctagaggagtggaaacatggaggagcaccaaggctcttagccagtggccacacataagggaagccttcctggatcacctggccaccatctaacccattggttggctccagacatggggacaagcccagaagacatcagctacccagctgagctgcccagactagaatcatctgaccayaaaatcacaagctaaatatatgattgtttaaagccatgaaattttagtggtagggggaattgttactagcaaaaactaactgatttggccaggctcagtggctcatgcctgtaatcccagcacttttgggaggctgaggtgagtggatcacctgaggtcaggagtttgaggccaatatggtgaaaccccatccaatatggtgacagggtgaaaccccttctctactaaaaatacaaaaat

SEQ ID NO: 93352 - DNA, 918 bp, Homo sapiens
gtcaaatctattcagtgattattggtaagtagggatcagaatttaagtcactgactttctgagttgaaaggggaacctggaggtcatttaatccaacacttatccaatgaatgaactttcactgcaacacctccaataagtgccaatccartccatgctggaacactcgctactccagaggcagcccatttctccattccttttgtcagacagttctaagggacaagtttttccttaaattaaggcaaaaatctgtttttgggcagttctgccaacccagagtcataaaaaataagtctcctacatagtagcagccttgcaaatatccatacagtaatttccatgtctacttcctcacctcttccctcccatcctttcactcttctcccaggtaaacatctgcagttcctccaacattcttcctacaatataatttcaagttttctccatacctcagtttttttcttcttgacctgcttcaagttttcaatgttccctttagagtgtggtgcctaaaattatatacaatttttcctacatgttttgaataatgaaagtaggtctatcatcttggtttttgtggatattatatggtaactaataacttgcaccactgaagaaatggcaaatgtctccaataatcatggtaacaaatggacaggtcagatttttatagacttaacttttgatttcatcaattctagagaacaaacacaggatttatatgtctgtatttttcttttctctgataacaatgatagctacaggttatcaaggacttactttgcgtcaggcacatactttacatgtatgttttctcatttgattctgataataatccaacgaagtaggtctctttatacccattttatagacagaagtgaaacatagatcaaatcatttaatgtggatctgtac

SEQ ID NO: 93353 - DNA, 918 bp, Homo sapiens
gtcaaatctattcagtgattattggtaagtagggatcagaatttaagtcactgactttctgagttgaaaggggaacctggaggtcatttaatccaacacttatccaatgaatgaactttcactgcaacacctccaataagtgccaatccagtccatgctggaacactcgctactccagaggcagcccatttctccattccttttgtcagacagttctaagggacaagtttttccttaaattaaggcaaaaatctgtytttgggcagttctgccaacccagagtcataaaaaataagtctcctacatagtagcagccttgcaaatatccatacagtaatttccatgtctacttcctcacctcttccctcccatcctttcactcttctcccaggtaaacatctgcagttcctccaacattcttcctacaatataatttcaagttttctccatacctcagtttttttcttcttgacctgcttcaagttttcaatgttccctttagagtgtggtgcctaaaattatatacaatttttcctacatgttttgaataatgaaagtaggtctatcatcttggtttttgtggatattatatggtaactaataacttgcaccactgaagaaatggcaaatgtctccaataatcatggtaacaaatggacaggtcagatttttatagacttaacttttgatttcatcaattctagagaacaaacacaggatttatatgtctgtatttttcttttctctgataacaatgatagctacaggttatcaaggacttactttgcgtcaggcacatactttacatgtatgttttctcatttgattctgataataatccaacgaagtaggtctctttatacccattttatagacagaagtgaaacatagatcaaatcatttaatgtggatctgtac

SEQ ID NO: 93354 - DNA, 1120 bp, Homo sapiens
tttttagacaggaagattaaagaagtactacacagatctcgaagcctttgccatgcttgctgctgctttctgccatgatattgaccacagaggcaccaataatttgtaccagatgaagtaagtgaacacatgtccaatgttgacacgtattggtggacattggaaagtacttagggtgagaaaaacgcttctccctattccttggcccagtcaatgcctctttgccatgttggaaattccagggctggattctattccctcccaagcttccgccttcgcgataacgttgctctttctccctaggttcttgcgtccccctttcctttctgttttcatttccagatgtgcctctgccttcttcctataggccttcaggctttcttctctcaactttgtttaatcagagtattgaattcctatattaaagtgcatgaatctggctgggcacagtggctcgcacctgaaatcccagcactttgggagagtgaggcgggcggatcaagtgaggtcagttcaagaccaacctggccaacatggtgaaaccctgtctctactaaaagtacaaaaattastcggatgtggcacacctgggattataggcacatgtctataggaggtagacatgtgcctctgaggtaggagaaacacttgaacccaggaggcagaggttgtagtgagccaagattgcactactgcactccagctggagcgacaaagagagactctgtctcgaaaaaaattaaaaataaaaaacaagtacataaggtacatgaatgttaggcttacacttgtacactcctatggagcactccccagctcaggctagagaatactacccctgggctcactacccttcacctccctggtctttttgcttctgccaaactctccttcagctggtcttccatcttaacatcgatgccatctttctctcttgccccaagaaaggaagtacaataagaagggtgcaagctctgggctcaggcagatttggattcactgggtcacaaattatttaaactttctaagcctcaatttcctcatctgggaagtaagaattatagtaatggtacccagcacataaggttgttgtaaagattaaatatgatcatgcatataa

SEQ ID NO: 93355 - DNA, 585 bp, Homo sapiens
taagattaggcaaatttacttagagctagaaactagaaattagggataaacacactgacatgtttggataaggccagagtgctagatgttgccatttttcaaagaagatttactaattttattatccccaagaaayatattcaaaaccaattattacatatgcaaatgtacatattattaccaataataacagggtaaaaacttaatagtatcccctctggggaaaaaatgaatgggaagttcatgggaaagggacattataaataggcattcctcctaagacttttcaccctctttggtacattataaagaaaaaaaatagcagggagaaaatgacaacgaattaatgtgaaattctgatttaggatgatgaaaatccagctaaacggaaataaaacagcatattcaagttcatctaaaagctgaactaaaactactagatctgtgaaaagagtttcaacattaactagtgaaatggtgtttacaacacatagtagaagatatgcattcttttgcataatttctgtcatagaagcaaacagtttgtttacacttgaaataaaatcagttgacattgatcaccaa

SEQ ID NO: 93356 - DNA, 620 bp, Homo sapiens
ttttgtgcttatatatcattatacatatagtaactataattttaaatccacagttgtttgtaaattttaagatctasgtagtagagaaaagctaggggacagatgagtttaaaagtctgtgaggtgatttttctcctttttaaaaatgtttttattttttcaatgtatataagcatatatgccattataaaaatttaaacattataaagtggatgctgtagaaaataaaagtgtcttgtaatctctgctttagacataaccactgaaaacaatttatatttttacagatttttttcccatgtatgtttgtgtatatttgtgttaggttattcttgcattgctataaagaaatacctgagactgggtaatttataaagaaaaggtttaattgacctacagttctgcaggctttataggaagcctggtgctggcatctgctcggcttcttgggaggcctcaggaagcttttactcatggtggtaggcaaagtaggaacagacatctcacatggctgagctggagcaagagagaaagagagagtggggcacacatttttaaatgatcagattttgagcaacagctcacttaacaccaaggggatggcctaagccattcataag

SEQ ID NO: 93357 - DNA, 662 bp, Homo sapiens
aaatctcaaaaattaccaccaaagaacttatccatgtgcccccaaaaccacccataccccagaaattattgaaataaaaataaaaaataattattaaaaccaaaccaaaacaaaccaaaatatgacactgtggtacataaatagtttggtttaaattggattcagtttaaratttttgatattagaattaaaatagtttcctttctgatataacagaaagtgtaaatacctcaaacaaacaagatgatgaaggcagcttatgaataagtaacacaaaaatcctcccaaataatttcacctatcagggtcttttttctagagccagtgtgcatagaagaatacctcaacttgactggttagaataagccttatgtccaaatacacgtgttttcatctaaatttgttgattgtgcccttcttgaattggggtgaaagaaagatcgtagatgacttcttgctccatagccaaatatatggagaagtaaaaataaaaaaagaatttattggataaacagatgatgatcattatatcaatagaaattggaaaagaagctttgatgtaatttattcattcacccaattcactgtattctgagtttagaaaaatagtacaagataaaaattatttcaatatataatcattccctccagaaacttaaaat

SEQ ID NO: 93358 - DNA, 2171 bp, Homo sapiens
  misc_feature (1)...(2171): n = A,T,C or G
ttttagaactattttaaatatttctacaaaatcatggctggaatttggattgaatctagagatcagttcagagaggaaaatgtcttaacaatatagagtttcctaatcaataaacacactatattgctattcttttagacatttaaaatgttttcttgaaaatttttgtaattttaagtgtgcaagttttgcacacctttgtgagatttatcactcaatatttaatattctttatgttattttaaaatttctgattgttcattgtagtatataaaaataaagtgatattttatacagattatattctgaagcttcctaaattcgtttattagttctagtagtttttctgaaaattacacagcgttctccacatatatcatgaactctcagttcctgggtgtcatgatagcattttctaaatagtcccaaatttgataagacagcccaaaagtcactgtgaagttaatatgtccarcaatgttcatacaactgagaggtgcttcttcctttctaatctgagtgcatttgatttcttattcttgccttactgaagtggctagaactgccaggaaaatcttgaatggaagtggtaagagcagagagagactcttgtcttcttcctgatcttacgaagaaagcatttcatatttcaccattaaatataaagtttgctgtagtttcataccgccattcatcaggatgaggaagtttccctctgttcctagtcagccgagagttcttatcaggcatgcatactggattgtgtcaaatgttatttctacgtctactgagatgacctggtaatttttcctttaaagtttattattatggtgagttacattgattggttttcaaatgtttaatcagccttgcattccttgagcctgcgtaggatgtgtgaccagcagattatatacagggagtgtttcctgtgtagagctagtattcaactttcttcttattctcattaaatacttaaatttaaatattaaacacctttggttctaaaaaaatnnnnnnnnnnnnnnnnnnnnnnnnnnnnnnnnnnnnnnnnnnnnnnnnnnnnnnnnnnnnnnnnnnnnnnnnnnnnnnnnnnnnnnnnnnnnnnnnnnnnccgcctttagangannngaaancctgnctcgagngcnanctcgacnacttctgttgagctagtattcaactttcttcttattctcatttaaattacttaaatattaaatatttaaacaccatttggttctaagataatatcaccccccaccccaccactcccacccccccccttttttttttcagacagagtcttactctttcatccaggctggactgcactgtcaccataagggctcactatagcttaaaatttctgggctcaggggctcctcccacctcagccactgagtaattgggactacaggtatgcaccatcacactcagctgattttatcttttttgtagaggcagagtctcactgtgttgcccaggctggtcttgaactcctgagctaaagcagtctgcccaactcagcctcccaaagtgctgcaattactggtatgagccactacacccggatcagatattaccttttaatatattaaatttaatttgctaaaatgttaagaatttttaaatcaatgttcaaagaaagtattagtctgtgttttttctctttttctgagtctttatctgatttgggtatcagggtaatactggcctcatagaataaattgaaagttattttctcttcttcaattttctagaaaagtttatatagaatcaataacatttatttcttaaatatgtggtagaattcattagtgaagccatccgattctggataattctttgtggaaattaaaaaaaaatcttttctgcctgtttgttctactagttattgagaaaattatattgaaatctctgactataattatcatttgtgaatttatcactgcaaatctgactttttaaagatctggtagtattgtttgctctaattccactttgtctaataccaaaatagatttttccccttttaagaactttcagggtttacatgtttaacaacaaattaacaacatttaacacatgtctgggagtctatttcatgttagcatgttgaaacatacaaaaatagtattccaactcttttagaacagtgttagcatgca

SEQ ID NO: 93359 - DNA, 2171 bp, Homo sapiens
  misc_feature (1)...(2171): n = A,T,C or G
ttttagaactattttaaatatttctacaaaatcatggctggaatttggattgaatctagagatcagttcagagaggaaaatgtcttaacaatatagagtttcctaatcaataaacacactatattgctattcttttagacatttaaaatgttttcttgaaaatttttgtaattttaagtgtgcaagttttgcacacctttgtgagatttatcactcaatatttaatattctttatgttattttaaaatttctgattgttcattgtagtatataaaaataaagtgatattttatacagattatattctgaagcttcctaaattcgtttattagttctagtagtttttctgaaaattacacagcgttctccacatatatcatgaactctcagttcctgggtgtcatgatagcattttctaaatagtcccaaatttgataagacagcccaaaagtcactgtgaagttaatatgtccaacaatgttcatacaactgagaggtgcttcttcctttctaatctgagtgcatttgatttcttattcttgccttactgaagtggctagaactgccaggaaaatcttgaatggaagtggtaagagcagagagagactcttgtcttcttcctgatcttacgaagaaagcatttcatatttcaccattaaatataaagtttgctgtagtttcayaccgccattcatcaggatgaggaagtttccctctgttcctagtcagccgagagttcttatcaggcatgcatactggattgtgtcaaatgttatttctacgtctactgagatgacctggtaatttttcctttaaagtttattattatggtgagttacattgattggttttcaaatgtttaatcagccttgcattccttgagcctgcgtaggatgtgtgaccagcagattatatacagggagtgtttcctgtgtagagctagtattcaactttcttcttattctcattaaatacttaaatttaaatattaaacacctttggttctaaaaaaatnnnnnnnnnnnnnnnnnnnnnnnnnnnnnnnnnnnnnnnnnnnnnnnnnnnnnnnnnnnnnnnnnnnnnnnnnnnnnnnnnnnnnnnnnnnnnnnnnnnnccgcctttagangannngaaancctgnctcgagngcnanctcgacnacttctgttgagctagtattcaactttcttcttattctcatttaaattacttaaatattaaatatttaaacaccatttggttctaagataatatcaccccccaccccaccactcccacccccccccttttttttttcagacagagtcttactctttcatccaggctggactgcactgtcaccataagggctcactatagcttaaaatttctgggctcaggggctcctcccacctcagccactgagtaattgggactacaggtatgcaccatcacactcagctgattttatcttttttgtagaggcagagtctcactgtgttgcccaggctggtcttgaactcctgagctaaagcagtctgcccaactcagcctcccaaagtgctgcaattactggtatgagccactacacccggatcagatattaccttttaatatattaaatttaatttgctaaaatgttaagaatttttaaatcaatgttcaaagaaagtattagtctgtgttttttctctttttctgagtctttatctgatttgggtatcagggtaatactggcctcatagaataaattgaaagttattttctcttcttcaattttctagaaaagtttatatagaatcaataacatttatttcttaaatatgtggtagaattcattagtgaagccatccgattctggataattctttgtggaaattaaaaaaaaatcttttctgcctgtttgttctactagttattgagaaaattatattgaaatctctgactataattatcatttgtgaatttatcactgcaaatctgactttttaaagatctggtagtattgtttgctctaattccactttgtctaataccaaaatagatttttccccttttaagaactttcagggtttacatgtttaacaacaaattaacaacatttaacacatgtctgggagtctatttcatgttagcatgttgaaacatacaaaaatagtattccaactcttttagaacagtgttagcatgca

SEQ ID NO: 93360 - DNA, 2171 bp, Homo sapiens
  misc_feature (1)...(2171): n = A,T,C or G
ttttagaactattttaaatatttctacaaaatcatggctggaatttggattgaatctagagatcagttcagagaggaaaatgtcttaacaatatagagtttcctaatcaataaacacactatattgctattcttttagacatttaaaatgttttcttgaaaatttttgtaattttaagtgtgcaagttttgcacacctttgtgagatttatcactcaatatttaatattctttatgttattttaaaatttctgattgttcattgtagtatataaaaataaagtgatattttatacagattatattctgaagcttcctaaattcgtttattagttctagtagtttttctgaaaattacacagcgttctccacatatatcatgaactctcagttcctgggtgtcatgatagcattttctaaatagtcccaaatttgataagacagcccaaaagtcactgtgaagttaatatgtccaacaatgttcatacaactgagaggtgcttcttcctttctaatctgagtgcatttgatttcttattcttgccttactgaagtggctagaactgccaggaaaatcttgaatggaagtggtaagagcagagagagactcttgtcttcttcctgatcttacgaagaaagcatttcatatttcaccattaaatataaagtttgctgtagtttcataccsccattcatcaggatgaggaagtttccctctgttcctagtcagccgagagttcttatcaggcatgcatactggattgtgtcaaatgttatttctacgtctactgagatgacctggtaatttttcctttaaagtttattattatggtgagttacattgattggttttcaaatgtttaatcagccttgcattccttgagcctgcgtaggatgtgtgaccagcagattatatacagggagtgtttcctgtgtagagctagtattcaactttcttcttattctcattaaatacttaaatttaaatattaaacacctttggttctaaaaaaatnnnnnnnnnnnnnnnnnnnnnnnnnnnnnnnnnnnnnnnnnnnnnnnnnnnnnnnnnnnnnnnnnnnnnnnnnnnnnnnnnnnnnnnnnnnnnnnnnnnnccgcctttagangannngaaancctgnctcgagngcnanctcgacnacttctgttgagctagtattcaactttcttcttattctcatttaaattacttaaatattaaatatttaaacaccatttggttctaagataatatcaccccccaccccaccactcccacccccccccttttttttttcagacagagtcttactctttcatccaggctggactgcactgtcaccataagggctcactatagcttaaaatttctgggctcaggggctcctcccacctcagccactgagtaattgggactacaggtatgcaccatcacactcagctgattttatcttttttgtagaggcagagtctcactgtgttgcccaggctggtcttgaactcctgagctaaagcagtctgcccaactcagcctcccaaagtgctgcaattactggtatgagccactacacccggatcagatattaccttttaatatattaaatttaatttgctaaaatgttaagaatttttaaatcaatgttcaaagaaagtattagtctgtgttttttctctttttctgagtctttatctgatttgggtatcagggtaatactggcctcatagaataaattgaaagttattttctcttcttcaattttctagaaaagtttatatagaatcaataacatttatttcttaaatatgtggtagaattcattagtgaagccatccgattctggataattctttgtggaaattaaaaaaaaatcttttctgcctgtttgttctactagttattgagaaaattatattgaaatctctgactataattatcatttgtgaatttatcactgcaaatctgactttttaaagatctggtagtattgtttgctctaattccactttgtctaataccaaaatagatttttccccttttaagaactttcagggtttacatgtttaacaacaaattaacaacatttaacacatgtctgggagtctatttcatgttagcatgttgaaacatacaaaaatagtattccaactcttttagaacagtgttagcatgca

SEQ ID NO: 93361 - DNA, 515 bp, Homo sapiens
  misc_feature (1)...(515): n = A,T,C or G
aaannnnnnnnnnnnnnnnnnnnnnnnnnnnnnnnnnnnnnnnnnnnnnnnnnnnnnnnnnnnnnnnnnnnnnnnnnnnnnnnnnnnnnnnnnnnnnnnnnnnttttaatattataaaaaagttgaagaacctgagacttasagaattaatcaaggccatacaactagtaaatggtagataggacaggaatgtcaactcaggcaggctgggtgaatgccagtagatagagctaattcaattaataatcaataaatctagtgtggacaaactacacaaatcaggatttttaaaaaatcctttggaccaaattactttccttgtttgctgacgtgaaaaatcttttttttgcctactatgttgtgtttgatcagttagacacactgtattttcttgattcatttagaagaacagaaaaatggtgacccataacctgctgaaaaatatacgtaaaaactcaccattattgttaaataactttcattgtattcctctactatagagagaaaaattggaa

SEQ ID NO: 93362 - DNA, 1041 bp, Homo sapiens
aggtcacttaaaatgtcagtagcatagccaggaaggaaatcagaatgaatgtatttccagccactggaattacagtttctcccagtctgaatatttccatttaactctgttgcacagaggattaacaattttacttctctcagaataggaaagataagattcatcttatttctgctgtatttgaaattatgcaaccaaattcagtttcacagaatgttattaggaagaaaaccaaccctattcactatataaggaagtctctctgcttgcaaatgttcacaagatgaatgtacagatgaaaggcaagcaatttatttttatttgatactgagaatggcaatataaacctcagtgaatttgtcctttgaaggaaatgcaaaatataggtcaaatatctttagaactgtatcaacataaataagtaatgtaaattgtgattaggccaattttgagttatgggacaagtgtagtaatcacacatttcatcataatgttagtattagtgtgtgaagtatatacgtgcatatatacatataagattcagaaactgcctttcaatttctgttattgattgaatgagttatacctggaataccattacattgcaaatcagtcaggccttaatacctctaaatggagcctgaacaagctgaaactctagattgggaactatacaccacacttttatatcataagtgaataaaagcaatagtttttttttaaagggtagaaagaaaaagcaataagtatcgtattattttcaagctggaagggaacttagataaaatataatcaaattcctccattttacagacaagtcaaagaggtccccaagtagtggtttcctgtatttaccatttactgtttactacacaatggtttcagcgtacgctgctcaggtgatgggtgcaycaaaattgcagaaatcaccactgatgcacttttccatgcaatcaaacatcagtgttcccccaaaactattaaaacaaaaatttaagaaagaaacaaatagaaaaaagaagacttcccaagtaggatttt

SEQ ID NO: 93363 - DNA, 875 bp, Homo sapiens
atagcattcttacctgttctggaaggttgcctttcattgtcttgctggagcacgtaaaccctttccctacagtagataagccctgagtgtaggaaggaacagtgcagaaatctacctgtcttacagctacccaagaccatgcttctgtctgtaagttctcttcataaatcacccaataccaacacactagattagtctgcctccttcattggtttctcagctcctttagcatttgtgggttgctatgcacatatgggcctttcacaaataagtcatatgtttcttatttcctttctcccaagtaaagaggtaacagtgctgtcaaacagtttctccatagcttggaggagataagaagcagggcccaatgcagaaatttactctaatacttcctggattttgttttgcaaaaatccctttgagccatgtaaggtagaggaaggagacagaaacaattgagcaaagtatgaagaagaaagaagctgcctcctgttcacatagggagaggtctgtgggtcttaacctgtgaggtctagcaaacctgacctcactccttgacaaggctgaaatgaagaaccactctgagatcctctaaagagagggaatcccaggacccccaggctctccagggttctagtcctcagaagagcacaccaagctccaaggttacattgtgggcatagacaatgaagaygctttgtcaatggaacacttgctttcttaacagctccctgtcctccaaaagaaatgtttcccctggtattcccaattttgccacctgctcagtaacaatgatgaaaatctaggagtcattctggactccccccctcaggccaacactggccactctccaatcacctggaaagtggccctgt

SEQ ID NO: 93364 - DNA, 2143 bp, Homo sapiens
tgcatttattaaagaatgtatgtgtgcctctgtcatggagtctgtcactcagtgctggcaaagcttgatccatagccctaaacatccactcttgtgattaataccattcaggccacggtgaagtagttttccaaatgccaggacaatttaagagttgtatcattactgatgtcagagatgaacactacctgggattgcagggaatgtttacacaatagaaatgcttgagtcgccaggagcggtggctcacgcctgtaatcccagccctttaggaggctgaggcaggtgtattatctgaggtcagaaattcgagaccagtatggccaacatggtgaaaccctgtctctaytaaaaatataaaaaaagtagccaggcttggtggcgtgcgcctgtaatcccagctactcgggaggctgaggcaagggaattgcttgatccagggaggtggaggttgcagtgcaccactgcactccagcctgggcgacacagcgagactccgtctcaaaaaaaaaaaaaaaaaaaaaaaaagaacagaaaagaaaagaaaagaaaaaagcttgagtcaactaataccatagattagaaacatcttcctagaagcatttgatagacaaggtttcttctactcgcaaatactattcttttgttggccataaatctgttattaacatatttacaggagattatatttgggtcacttatcccttctactccaaggccaccctgagatctgaaaatgggaaagaaagaaatttcaggccaaccgcttaaccccttcttttccagtaagagaaaatacaattaatttgtcaaatattttctctcaagaaactattaacatacttgatttttttacataatgaggtgttgctttccagtagtgccaaatttctattttcttgccttccttcacattccagtcaatgccggtagaagtattcattaatttaaatggcatttacaaaagccagttatgcatagtgaatgaggactgttttgtagtaataaacagttcagaatagtcttaaatgttcaactgattgatggatagatgataaagaaatgaagagataaaaatggatctagcatttgtgaaatgtaatgccaacccttcacaatattgtatacctctggatatttgagaataaaaacataatttatattatatcttaaaatattttataaattttccactataatgacaatatattatattaggcccattacagtatttaacataacatattatcataatttcattcttatttaaatattgttttaataattttattaccttaaagttgctacagtcagccaagtgaagcttccctaaattgaagtaataatttaaacacacaaaaaatctgtccattataattccagaaaggttgtctaatttgacattcctatgaatacattgttttatgtaatatatatatatatatatattttttttttttttttgcaagggagtcttgctgtcacccagactggagtgcagcggcacaatctcagctcactgcaacctccacctcctgggttcaagcaattctcctgcctcagcctcctgagtagctgggactacaggtgcccaccaccacaccctgctaattttttttttgtatttttaggaaaggtgcggattcactctgttggccaggctggtcttgacctcaagttatccgcccacgttgacctcccaacgtgctgggattacaggcatgagccattgcacctggcccgtgataaatcttaaatatggcaaaaaaaattaacaattttaccaaaatagaggaaataacttatataaaaatagataatatgtagatagtgtttttatttttaattattcatcctaacattgctagcccagcttctgagcacccaatcatgaataatggtagttaattctatcttctttgatcttgtgccatcttccagataaaatcacagatttaaacacatttgttaagtataatcatcatacagaatttgtcaaagtagaagaagaaaacattttatttcacagttaacttgacgtatagtaacttttaaatattttggcctatgtaactgcggtttttgccttttaaaagtaattgtattatatgcagaacacacatatatgtatgtgtgttgatgc

SEQ ID NO: 93365 - DNA, 570 bp, Homo sapiens
cacgttgagtgaatggacttcattgccatgttccagttcyagccactggctggtgggggcagatggtgctgaggctgcccgatcgagggtagcttgctattcttcaccgatccagcaaacacttgtggagggaattctgccaggcttcatgatggatactgatagaaaacgtaacagcaaccctttaaggaaggaactttcatccccgttttctaggtgaggaaaccaaggcccagagcagggctgccttgtatccaactccaaggtgaaaggaggcagcttgctgcatttaaacgtgggtctgcttccaagcccagcaatgatcaagccggctatagtgggcgcagcagagtggcagcatgaatctgagattggtcgcagtgtcttgtgcctactgaggagcaggggccatgtccctccccctacacctagcactgagccacactgagcacgctgtttcttaatctgactggtccccatttcttctccttgcacatactgttctgtccacctggaatgtagccttgccactgctttcccacttggcagactctctgtgtgtccttcaca

SEQ ID NO: 93366 - DNA, 570 bp, Homo sapiens
cacgttgagtgaatggacttcattgccatgttccagttctagccactggctggtgggggcagatggtgctgaggctgcccgatcgagggtagcttgctattcttcrccgatccagcaaacacttgtggagggaattctgccaggcttcatgatggatactgatagaaaacgtaacagcaaccctttaaggaaggaactttcatccccgttttctaggtgaggaaaccaaggcccagagcagggctgccttgtatccaactccaaggtgaaaggaggcagcttgctgcatttaaacgtgggtctgcttccaagcccagcaatgatcaagccggctatagtgggcgcagcagagtggcagcatgaatctgagattggtcgcagtgtcttgtgcctactgaggagcaggggccatgtccctccccctacacctagcactgagccacactgagcacgctgtttcttaatctgactggtccccatttcttctccttgcacatactgttctgtccacctggaatgtagccttgccactgctttcccacttggcagactctctgtgtgtccttcaca

SEQ ID NO: 93367 - DNA, 552 bp, Homo sapiens
aaattggaatttgtatccagctgaagttatctacacagtgcagtttttgtgtatagcaaagtgaggattcaaaatattaagtattttttgagtaacttcacttcactttgaggtctctgtgtagctgttctccagaaaggaatgtagtcaagaacagtgaattataagagcttagtgttttccaccttttgaaggcctagttgcatccacataaacttttggttagttcagggtagcawtggtatttataaccctagattttcctaaaattcagcccattctccatgtttggtgactttattcaaggtttcactctcacatagttgaattctactggttttaactttaaacacacgcagtcatttgcatccctagagtaaagatgtccagaccttcctcatttttgccttacaaaaatgcaaaacagtggcacatgggccccctaccaccaaaattataacagccacaatgcaacttacattttggtggaggtaataggataatgtaatgttttactggttcctactatcttaggggatttcattagctaca

SEQ ID NO: 93368 - DNA, 552 bp, Homo sapiens
aaattggaatttgtatccagctgaagttatctacacagtgcagtttttgtgtatagcaaagtgaggattcaaaatattaagtattttttgagtaacttcacttcactttgaggtctctgtgtagctgttctccagaaaggaatgtagtcaagaacagtgaattataagagcttagtgttttccaccttttgaaggcctagttgcatccacataaacttttggttagttcagggtagcattggtatttataaccctagattttcctaaaattcagcccattctccatgtttggtgactttattcaaggtttcactctcacatagttgaattctactggttttaactttaaacacacrcagtcatttgcatccctagagtaaagatgtccagaccttcctcatttttgccttacaaaaatgcaaaacagtggcacatgggccccctaccaccaaaattataacagccacaatgcaacttacattttggtggaggtaataggataatgtaatgttttactggttcctactatcttaggggatttcattagctaca

SEQ ID NO: 93369 - DNA, 1090 bp, Homo sapiens
gtaacttatacggtaaatggctttaggaagcaagacctggcactgtgtgtgctcactacaactgggtgccattgcttctaggcccttccagttgtcaaagtgaagaattttttttgtcttttaggccacaaatgtataccrttatctccaatttcacttaaacaccagaggtttttcttcaattcccccattttatattttcatctcccatctcttgcaataaaaactctctttaaacaacatcaatatttgtagtcatttgctaaatattatgatacattcaaagtaatttcagaattacaccatcacatcactacggtcatcccacctcctgagtaaacagcataggatgtctgggtcattcttttagccttagaatattttccactgaggtgtctagttagaaagctatatgcaagacttactcaaaataattaattctctgcatgttatgttatcaaattgacttacagttagatttatttgggaatatatatgaatatataacattacatattatattttatgttaatatatattataggatatctatattatgttatcaaattgacctacagttagatttatttagaagtgtatatatatgaatatataaatatatatattcttgggattttcttttgtatcactaataggtctttggatatgtaaaatctctatggaattcaaaagtgaaaccaaatacaagtgtatactcaaagactttctttctattccacctctttaccattttgattaccttctccttttattttactggctttttattttgcaaaattaagcaaatgtatatttgcacaggtacacatgctacacacatacatgagcaaacacacttactttttttctacttatacggaagctaaaaactatatatgatattttacatcttgcttttccttaacaacgtaccctagaagtgacccaatttcagttcatagagatctttttgtattttataaatttttgttttgtgtttattttaatttttttaaaattcttttaagctagaggcatcatgttacctgactacaaactatgctacaaggctatagtaaccaaaacagta

SEQ ID NO: 93370 - DNA, 1090 bp, Homo sapiens
gtaacttatacggtaaatggctttaggaagcaagacctggcactgtgtgtgctcactacaactgggtgccattgcttctaggcccttccagttgtcaaagtgaagaattttttttgtcttttaggccacaaatgtataccgttatctccaatttcacttaaacaccagaggtttttcttcaattcccccattttatatttkcatctcccatctcttgcaataaaaactctctttaaacaacatcaatatttgtagtcatttgctaaatattatgatacattcaaagtaatttcagaattacaccatcacatcactacggtcatcccacctcctgagtaaacagcataggatgtctgggtcattcttttagccttagaatattttccactgaggtgtctagttagaaagctatatgcaagacttactcaaaataattaattctctgcatgttatgttatcaaattgacttacagttagatttatttgggaatatatatgaatatataacattacatattatattttatgttaatatatattataggatatctatattatgttatcaaattgacctacagttagatttatttagaagtgtatatatatgaatatataaatatatatattcttgggattttcttttgtatcactaataggtctttggatatgtaaaatctctatggaattcaaaagtgaaaccaaatacaagtgtatactcaaagactttctttctattccacctctttaccattttgattaccttctccttttattttactggctttttattttgcaaaattaagcaaatgtatatttgcacaggtacacatgctacacacatacatgagcaaacacacttactttttttctacttatacggaagctaaaaactatatatgatattttacatcttgcttttccttaacaacgtaccctagaagtgacccaatttcagttcatagagatctttttgtattttataaatttttgttttgtgtttattttaatttttttaaaattcttttaagctagaggcatcatgttacctgactacaaactatgctacaaggctatagtaaccaaaacagta

SEQ ID NO: 93371 - DNA, 1001 bp, Homo sapiens
ggttgttactctgtttgcggccagaagcacaggagatcccagtgggccccaggaccctgtgagcctttgacagccttgaagaatgtagagggacatcctgtggcagtggaatgggaacacaaggattatacagtaaggatagcaaggggaggtggtgaggccagcctccgtgagaagctgggtaggagtccaatggaagacaagtggaagatggctggatgggtagtatgaagcaaggtcaccagagaaggaggccttcaaatgcaggatgaagactttggcatgggagccgggcaaggtggggtatgcttgtagtcccagcactttgagagacagaggtgggaggatcacttgaggccaagggcctgagaccagcctgggcaagataatgagatcctgtctctctcttaaaaaaaaaaaaaaagaaagaaagaaaaatagtctcaactactcaggaagctgaggtgagaggattcattgagcccagaaggtcaaggctgcagtgatccgtgattgcaccactgcactccagcctgggatacagagcaagaccctgtctcgttaattaatgaacaaataaataaataaatattgtcatggggacaggcaagagagactagttaggaggccattacagtaaaccacaaaccaggggctcaaggctggtccaggaaagcaagatgtgagaggagggaaaggcccaagagctaaggcagtgagcagaagaatgaacctcaattgaaaacctctgtgaagtacggaacatcaacgaaagaagcctttgcatatttgttttgtccccaaagcagacatatacaagagtaccttgactatcaccaaaaagatcgccagtatagaaaatacgtttggctgatgcaacygatggagaaaacccttcaagatgctcatgaactttgctccaaatcttacaacacaactgaagggaaccacaactcaaatggagttatgtaagatttcactgtccatttgtgctttaaatg

SEQ ID NO: 93372 - DNA, 2652 bp, Homo sapiens
gtcacagagaaaaattaggaaaarttttgcagtattccattatcattattaaacgattacatctcagttttcaggctgtgtgcaggtgggggtgtgtttgtttgtatgtatttgttatgggacagatctattttttaaaaaagaatagtggatgaatttgaacatggactttggaactaaaggctaatgctgtaagacgtttctccttagctttgccatggctttgacggccacagtttcagtcacagtgtcaaagcaaccacagacaacacctaaacagataggtgaggctactttccaataaaactttatcatactgaaaataataagcagtcagcacattggcctagagaaatgaaacaaacaaaagaagctgacatctgtttgtctccaaaggaacaatctggttttggatctccttatcacaagtctgtttattcactggcagtctattttcaccttggattttagtattttttagtattttgagtatttcagtatttagcatttagtattagttcaactttcaggaattaattcgggaaataggttttttgtgttacacttcttgtaattagagactcttctgggcagatgtttcattctaatgtacccctgtccttctgggaaatcatagagatggtagtttacagccaacggcttcatagtggagaacggtcatttgttttaaacactagtcagtccctgacatttttctcactttttaaaaaattaaacaatttgagtaaaatttaattgtgttaaaatggagattagcatgatcatttaatataagtagggaaaggtcttttattttgactagggaactctgaaattcaataaatgacaaagctaattagataccaagggcgagtgtctgatttgttaatcctgtaactgaaatgagacttgctgggaacactatcaaactggcggttttgaacttccaaaaagcgcattcctcctgttcctaacttaaggaaaaacaaattcagaccgagtgttactatagaaagccgaatctctctcttgttctgctaataatgaattattattcatgctcgaagccaaaattattaacctcttaaattatatgcatcaaaaggagatgactctatctaaaaccaggaacaaaattagatatgggtgatagtgtctctggctgtctaatgacaacccgctcccttcctaatttaattagcccactctccggaagcaggaatcaccaagctgaagagctgtgtgtgaaggcttctccgtaaatgtgagtcaaacaacgtattcggttggtgcaaaggtaattgtggtttctgccattgaaagtaaaggcaagaacctcaattacctttgcagcgacctaatacacgcccaccatgggtttcctcctggggacacacagctgtttagcagcccagccttcgcttttagttaggagctcagggaaggaagtaggagaaggctgggagaaacagaaagagagagtttaatccatctggaattcaggcagccccttccctttctatggataaaccacactggtcctccctctgcaggttgaggcggaatctgtgcaccaacgaatagtgacaacaaatatctggctcgcaaaacgctttcacagatatactgttgaaggcccatgaacacttcatccaggagttattattgtgcctaagttacagagggagaaaaagaggcttagagagtttggggagtttttgggggaccataaagaaaatcccagaaaatctaacgcagctgggtgcaaagacactgggtacattttaatcacaattgggtttggccaagcgctccctgggttcaagtgtgctggtgacaatgacttaacagagtctgcctgctcatttgcttgttttccaggcaattgctttcatggtgtcagcagctctcacatcagcgctctgggcctttctttttcctcttggttacaaggctggatgcattactgtcctggactaaattggagttgcttagcaagcaggaagacaagggcggggagggttcctatccagccagcagctctcagtgcttgccagaacacagcaccagccttttaacctgagacggtgtcgttgttggaagccttggattgaagccacttccaacagcacaccatctcctgatcacaggaagcatctgtgggctaaggactgaagcctctttggcacaaaagtcacaaaaatgctctccagttatgatgtgcgaaagttctatattttgtgcaatataaagcaacagacataggaacaggtttactgagacacaatctctttgaagaacaagttcctgaaagaaagctgaaagtttgccatcaagcaaaccagcagaatttgtgtttttatagaaattacatatctgggcagaacccgaggaagagcagcaaagtcactgcatcccttggctcctcccaacggggctggttggcaaattaaaaacgagatgaggaagggttgggacaccacatactccatctgttcctcacagtgcagggctaatatatgaccaggctttggtgggaaaacagcccaggcacacgctgcctgtcatgtccctctgtgggcagaggccaacaaggatccagacctctggactggaaaggcagatgtggaagaagtggaagaactgtgacat

SEQ ID NO: 93373 - DNA, 2652 bp, Homo sapiens
gtcacagagaaaaattaggaaaaattttgcagtattccattatcattattaaacgattacatctcagttttcaggctgtgtgcaggtgggggtgtgtttgtttgtatgtatttgttatgggacagatctattttttaaaaaagaatagtggatgaatttgaacatggactttggaactaaaggctaatgctgtaagacgtttctccttagctttgccatggctttgacggccacagtttcagtcacagtgtcaaagcaaccacagacaacacctaaacagataggtgaggctactttccaataaaactttatcatactgaaaataataagcagtcagcacattggcctagagaaatgaaacaaacaaaagaagctgacatctgtttgtctccaaaggaacaatctggttttggatctccttatcacaagtctgtttattcactggcagtctattttcaccttggattttagtattttttagtattttgagtatttcagtatttagcatttagtattagttcaactttcaggaattaattcgggaaataggttttttgtgttacacttcttgtaattagagactcttctgggcagatgtttcattctaatgtacccctgtccttctgggaaatcatagagatggtagtttacagccaacggcttcatagtggagaacggtcatttgttttaaacactagtcagtccctgacatttttctcactttttaaaaaattaaacaatttgagtaaaatttaattgtgttaaaatggagattagcatgatcatttaatataagtagggaaaggtcttttattttgactagggaactctgaaattcaataaatgacaaagctaattagataccaagggcgagtgtctgatttgttaatcctgtaactgaaatgagacttgctgggaacactatcaaactggcggttttgaacttccaaaaagcgcattcctcctgttcctaacttaaggaaaaacaaattcagaccgagtgttactatagaaagccgaatctctctcttgttctgctaataatraattattattcatgctcgaagccaaaattattaacctcttaaattatatgcatcaaaaggagatgactctatctaaaaccaggaacaaaattagatatgggtgatagtgtctctggctgtctaatgacaacccgctcccttcctaatttaattagcccactctccggaagcaggaatcaccaagctgaagagctgtgtgtgaaggcttctccgtaaatgtgagtcaaacaacgtattcggttggtgcaaaggtaattgtggtttctgccattgaaagtaaaggcaagaacctcaattacctttgcagcgacctaatacacgcccaccatgggtttcctcctggggacacacagctgtttagcagcccagccttcgcttttagttaggagctcagggaaggaagtaggagaaggctgggagaaacagaaagagagagtttaatccatctggaattcaggcagccccttccctttctatggataaaccacactggtcctccctctgcaggttgaggcggaatctgtgcaccaacgaatagtgacaacaaatatctggctcgcaaaacgctttcacagatatactgttgaaggcccatgaacacttcatccaggagttattattgtgcctaagttacagagggagaaaaagaggcttagagagtttggggagtttttgggggaccataaagaaaatcccagaaaatctaacgcagctgggtgcaaagacactgggtacattttaatcacaattgggtttggccaagcgctccctgggttcaagtgtgctggtgacaatgacttaacagagtctgcctgctcatttgcttgttttccaggcaattgctttcatggtgtcagcagctctcacatcagcgctctgggcctttctttttcctcttggttacaaggctggatgcattactgtcctggactaaattggagttgcttagcaagcaggaagacaagggcggggagggttcctatccagccagcagctctcagtgcttgccagaacacagcaccagccttttaacctgagacggtgtcgttgttggaagccttggattgaagccacttccaacagcacaccatctcctgatcacaggaagcatctgtgggctaaggactgaagcctctttggcacaaaagtcacaaaaatgctctccagttatgatgtgcgaaagttctatattttgtgcaatataaagcaacagacataggaacaggtttactgagacacaatctctttgaagaacaagttcctgaaagaaagctgaaagtttgccatcaagcaaaccagcagaatttgtgtttttatagaaattacatatctgggcagaacccgaggaagagcagcaaagtcactgcatcccttggctcctcccaacggggctggttggcaaattaaaaacgagatgaggaagggttgggacaccacatactccatctgttcctcacagtgcagggctaatatatgaccaggctttggtgggaaaacagcccaggcacacgctgcctgtcatgtccctctgtgggcagaggccaacaaggatccagacctctggactggaaaggcagatgtggaagaagtggaagaactgtgacat

SEQ ID NO: 93374 - DNA, 2652 bp, Homo sapiens
gtcacagagaaaaattaggaaaaattttgcagtattccattatcattattaaacgattacatctcagttttcaggctgtgtgcaggtgggggtgtgtttgtttgtatgtatttgttatgggacagatctattttttaaaaaagaatagtggatgaatttgaacatggactttggaactaaaggctaatgctgtaagacgtttctccttagctttgccatggctttgacggccacagtttcagtcacagtgtcaaagcaaccacagacaacacctaaacagataggtgaggctactttccaataaaactttatcatactgaaaataataagcagtcagcacattggcctagagaaatgaaacaaacaaaagaagctgacatctgtttgtctccaaaggaacaatctggttttggatctccttatcacaagtctgtttattcactggcagtctattttcaccttggattttagtattttttagtattttgagtatttcagtatttagcatttagtattagttcaactttcaggaattaattcgggaaataggttttttgtgttacacttcttgtaattagagactcttctgggcagatgtttcattctaatgtacccctgtccttctgggaaatcatagagatggtagtttacagccaacggcttcatagtggagaacggtcatttgttttaaacactagtcagtccctgacatttttctcactttttaaaaaattaaacaatttgagtaaaatttaattgtgttaaaatggagattagcatgatcatttaatataagtagggaaaggtcttttattttgactagggaactctgaaattcaataaatgacaaagctaattagataccaagggcgagtgtctgatttgttaatcctgtaactgaaatgagacttgctgggaacactatcaaactggcggttttgaacttccaaaaagcgcattcctcctgttcctaacttaaggaaaaacaaattcagaccgagtgttactatagaaagccgaatctctctcttgttctgctaataatgaattattattyatgctcgaagccaaaattattaacctcttaaattatatgcatcaaaaggagatgactctatctaaaaccaggaacaaaattagatatgggtgatagtgtctctggctgtctaatgacaacccgctcccttcctaatttaattagcccactctccggaagcaggaatcaccaagctgaagagctgtgtgtgaaggcttctccgtaaatgtgagtcaaacaacgtattcggttggtgcaaaggtaattgtggtttctgccattgaaagtaaaggcaagaacctcaattacctttgcagcgacctaatacacgcccaccatgggtttcctcctggggacacacagctgtttagcagcccagccttcgcttttagttaggagctcagggaaggaagtaggagaaggctgggagaaacagaaagagagagtttaatccatctggaattcaggcagccccttccctttctatggataaaccacactggtcctccctctgcaggttgaggcggaatctgtgcaccaacgaatagtgacaacaaatatctggctcgcaaaacgctttcacagatatactgttgaaggcccatgaacacttcatccaggagttattattgtgcctaagttacagagggagaaaaagaggcttagagagtttggggagtttttgggggaccataaagaaaatcccagaaaatctaacgcagctgggtgcaaagacactgggtacattttaatcacaattgggtttggccaagcgctccctgggttcaagtgtgctggtgacaatgacttaacagagtctgcctgctcatttgcttgttttccaggcaattgctttcatggtgtcagcagctctcacatcagcgctctgggcctttctttttcctcttggttacaaggctggatgcattactgtcctggactaaattggagttgcttagcaagcaggaagacaagggcggggagggttcctatccagccagcagctctcagtgcttgccagaacacagcaccagccttttaacctgagacggtgtcgttgttggaagccttggattgaagccacttccaacagcacaccatctcctgatcacaggaagcatctgtgggctaaggactgaagcctctttggcacaaaagtcacaaaaatgctctccagttatgatgtgcgaaagttctatattttgtgcaatataaagcaacagacataggaacaggtttactgagacacaatctctttgaagaacaagttcctgaaagaaagctgaaagtttgccatcaagcaaaccagcagaatttgtgtttttatagaaattacatatctgggcagaacccgaggaagagcagcaaagtcactgcatcccttggctcctcccaacggggctggttggcaaattaaaaacgagatgaggaagggttgggacaccacatactccatctgttcctcacagtgcagggctaatatatgaccaggctttggtgggaaaacagcccaggcacacgctgcctgtcatgtccctctgtgggcagaggccaacaaggatccagacctctggactggaaaggcagatgtggaagaagtggaagaactgtgacat

SEQ ID NO: 93375 - DNA, 1285 bp, Homo sapiens
tggacaagttactcagcctctttgagccttggtttccacatctgtaagaatgggtgtgagacttaccttgcggaatcgtgcaggattgaccaaagccagacggtgtggctggtgcctckgaggcagctgtttccaccattcagagggttgttcttctgtccattcagcaattcgggcagctcactcagatcagggcctctgtcaggctctggatgtacagcaggacagggtccctgtctccaaggactcactgtatatagtgggggacagtcacatgagctggtgattgtaacacagggtgacaaaagaggagtccagcctgcgatgtcctgcagtgagtcctaaagacgtggtagggccgagcgcagtggctcacacctgtaatcccagtactttgggaggctgaggcgggcacatcacctgaggtcatgagttcaagaccagcctgggcaacatggcgaaacctgtctctactaaaaatacaaaaaaattagccgggcatggtggcgcacccctgtaatcccagctgctccagaggctgaggtgggagaattgcttgaacctgggaggaggcagaggttgcagtgagccaagatcacaccactgcactctagcctgggcaacagagtgagactccatctcaaaaaaaacaaaacaacagtaacaataacaaaagaggaggtaggacctgggaagtggggggaccaggggggtggcacagggagggcaccaaggcaggcagcactgtgggctgcgggtcagcgtgtggacatgtgtgcgctgccctggccgtggcatgttgctcaccaaggcggggaacacacccagcccccacaggtcaggtgctttgcttctcctccctcctccctcctccttcctccctcctcttcctccttctcctccctctaggatctcaaagtacaggggtgggaggagaggctccgaggccctgctgtccccatgccttccttgtgggactcctgggccactgtgctccccgctgaagtcgagtggaggaggtggggagcgcttgggtcaggccctctggcctgcgcatgctgtgtctcacggtggctgatgttccgaacggggtgatattccgttccggctggtgcagaggatgctgcgggaggccaagcctgatcgtctggcccggccagatctgcagtgcagagcagcccccaaaggtccgctgtagtgaagggagggtactacagggaagtcggcctggggtggcggggtgactggttccatgagcctttgagtgagccctcacatccacacc

SEQ ID NO: 93376 - DNA, 1285 bp, Homo sapiens
tggacaagttactcagcctctttgagccttggtttccacatctgtaagaatgggtgtgagacttaccttgcggaatcgtgcaggattgaccaaagccagacggtgtggctggtgcctcggaggcagctgtttccaccattcagagggttgttcttctgtccattcagcaattcgggcagctcactcagatcagggcctctgtcaggctctggatgtacagcaggacagggtccctgtctccaaggactcactgyatatagtgggggacagtcacatgagctggtgattgtaacacagggtgacaaaagaggagtccagcctgcgatgtcctgcagtgagtcctaaagacgtggtagggccgagcgcagtggctcacacctgtaatcccagtactttgggaggctgaggcgggcacatcacctgaggtcatgagttcaagaccagcctgggcaacatggcgaaacctgtctctactaaaaatacaaaaaaattagccgggcatggtggcgcacccctgtaatcccagctgctccagaggctgaggtgggagaattgcttgaacctgggaggaggcagaggttgcagtgagccaagatcacaccactgcactctagcctgggcaacagagtgagactccatctcaaaaaaaacaaaacaacagtaacaataacaaaagaggaggtaggacctgggaagtggggggaccaggggggtggcacagggagggcaccaaggcaggcagcactgtgggctgcgggtcagcgtgtggacatgtgtgcgctgccctggccgtggcatgttgctcaccaaggcggggaacacacccagcccccacaggtcaggtgctttgcttctcctccctcctccctcctccttcctccctcctcttcctccttctcctccctctaggatctcaaagtacaggggtgggaggagaggctccgaggccctgctgtccccatgccttccttgtgggactcctgggccactgtgctccccgctgaagtcgagtggaggaggtggggagcgcttgggtcaggccctctggcctgcgcatgctgtgtctcacggtggctgatgttccgaacggggtgatattccgttccggctggtgcagaggatgctgcgggaggccaagcctgatcgtctggcccggccagatctgcagtgcagagcagcccccaaaggtccgctgtagtgaagggagggtactacagggaagtcggcctggggtggcggggtgactggttccatgagcctttgagtgagccctcacatccacacc

SEQ ID NO: 93377 - DNA, 1285 bp, Homo sapiens
tggacaagttactcagcctctttgagccttggtttccacatctgtaagaatgggtgtgagacttaccttgcggaatcgtgcaggattgaccaaagccagacggtgtggctggtgcctcggaggcagctgtttccaccattcagagggttgttcttctgtccattcagcaattcgggcagctcactcagatcagggcctctgtcaggctctggatgtacagcaggacagggtccctgtctccaaggactcactgtatatagtgggggacagtcacatgagctggtgattgtaacacagggtgacaaaagaggagtccagcctgcgrtgtcctgcagtgagtcctaaagacgtggtagggccgagcgcagtggctcacacctgtaatcccagtactttgggaggctgaggcgggcacatcacctgaggtcatgagttcaagaccagcctgggcaacatggcgaaacctgtctctactaaaaatacaaaaaaattagccgggcatggtggcgcacccctgtaatcccagctgctccagaggctgaggtgggagaattgcttgaacctgggaggaggcagaggttgcagtgagccaagatcacaccactgcactctagcctgggcaacagagtgagactccatctcaaaaaaaacaaaacaacagtaacaataacaaaagaggaggtaggacctgggaagtggggggaccaggggggtggcacagggagggcaccaaggcaggcagcactgtgggctgcgggtcagcgtgtggacatgtgtgcgctgccctggccgtggcatgttgctcaccaaggcggggaacacacccagcccccacaggtcaggtgctttgcttctcctccctcctccctcctccttcctccctcctcttcctccttctcctccctctaggatctcaaagtacaggggtgggaggagaggctccgaggccctgctgtccccatgccttccttgtgggactcctgggccactgtgctccccgctgaagtcgagtggaggaggtggggagcgcttgggtcaggccctctggcctgcgcatgctgtgtctcacggtggctgatgttccgaacggggtgatattccgttccggctggtgcagaggatgctgcgggaggccaagcctgatcgtctggcccggccagatctgcagtgcagagcagcccccaaaggtccgctgtagtgaagggagggtactacagggaagtcggcctggggtggcggggtgactggttccatgagcctttgagtgagccctcacatccacacc

SEQ ID NO: 93378 - DNA, 1285 bp, Homo sapiens
tggacaagttactcagcctctttgagccttggtttccacatctgtaagaatgggtgtgagacttaccttgcggaatcgtgcaggattgaccaaagccagacggtgtggctggtgcctcggaggcagctgtttccaccattcagagggttgttcttctgtccattcagcaattcgggcagctcactcagatcagggcctctgtcaggctctggatgtacagcaggacagggtccctgtctccaaggactcactgtatatagtgggggacagtcacatgagctggtgattgtaacacagggtgacaaaagaggagtccagcctgcgatgtcctgcagtgagtcctaaagacgtggtagggccgrgcgcagtggctcacacctgtaatcccagtactttgggaggctgaggcgggcacatcacctgaggtcatgagttcaagaccagcctgggcaacatggcgaaacctgtctctactaaaaatacaaaaaaattagccgggcatggtggcgcacccctgtaatcccagctgctccagaggctgaggtgggagaattgcttgaacctgggaggaggcagaggttgcagtgagccaagatcacaccactgcactctagcctgggcaacagagtgagactccatctcaaaaaaaacaaaacaacagtaacaataacaaaagaggaggtaggacctgggaagtggggggaccaggggggtggcacagggagggcaccaaggcaggcagcactgtgggctgcgggtcagcgtgtggacatgtgtgcgctgccctggccgtggcatgttgctcaccaaggcggggaacacacccagcccccacaggtcaggtgctttgcttctcctccctcctccctcctccttcctccctcctcttcctccttctcctccctctaggatctcaaagtacaggggtgggaggagaggctccgaggccctgctgtccccatgccttccttgtgggactcctgggccactgtgctccccgctgaagtcgagtggaggaggtggggagcgcttgggtcaggccctctggcctgcgcatgctgtgtctcacggtggctgatgttccgaacggggtgatattccgttccggctggtgcagaggatgctgcgggaggccaagcctgatcgtctggcccggccagatctgcagtgcagagcagcccccaaaggtccgctgtagtgaagggagggtactacagggaagtcggcctggggtggcggggtgactggttccatgagcctttgagtgagccctcacatccacacc

SEQ ID NO: 93379 - DNA, 751 bp, Homo sapiens
tgttcaaaatgcagaatcttggacctgaccccagacctgctgaatcagaatctgtaagttaacaagcccccctgatgattcgtgtgcacattaaaatctaagtgctgataaatggagtctcagtctctgcatttgtcaaatggaagtatgacatttccccagcaggctggttatggcaaagtttgagataacatgcatgaaaatgtacaaataatggctagcactgaaaaatcactcgtgttctaggaatgaatgaatggatagtcattaacaatagctaacacttgctgtgcactaggcatttgccaggcactgttgtaagtgctttatgtgtgctaattcattggatgagtaaagtaggcaacgggactgtgtcaaagctggggaggggacattcttacctaaatgtttcatagtttgcctctccaattttgatgagaggatttggattggttttgcttttgttcctatttagcacctaacaaaagctatgcatgamgtgcaaaggtaaagaccttcctcaattagtgaccagaaatcacagtggaattcccaagttcaatgaggagtctgattaggatttcctggacatgcatctgcttcactggggttctttgcaatgtcaccaccagagaactgaatactaaagttaattctttccttcaataagttttatgcaaattatgcttctggtcttttcctggatgctggagatagacacgaatcagacagagtcaaccagcagacagaa

SEQ ID NO: 93380 - DNA, 757 bp, Homo sapiens
aaaaaaaaccttttccatgcttttcactacaccatggttaaatttttcctaagggctttggacccatgtaggactgtaagctttagcaaataaaaatacagataagaaatgaatagttttttagtataagcattatttgttgcttatctgaaatttaaatttaactggccaccctagatttcacctggcaacccttcttttacagacagttgctaatgccatgaaatgaagagtacagaaactctgcgtatatatatttcttaaaagttaagcaagatagccaggcacggtggctcacgcctataatcccagcactttgggaggccaaggcaggtggatcacctgaggtcaggagttcgagtccagcstggccaaaatggcaaagccccgtctctactaaaaatacaaaaattagccaagtgtgctggcgggcgcctgtaatcccagctactcaggaggctgaagcaggaaaatcccttgaacctaggaggcggaggttgcagtgagctgagatcgtgctactgcactccagcctggtgacaaaacagaactctgtctcaaaaaaaaaaaaaagaaagaaaaaagaaaaaaagttaaacaagataaagtttgtaaagtttctggatttcactgaagcttaaccccttggtactgggccttaaaaaggagttgtagctctagctgggtgactaggacaagccgttttctctccctgggctcagtttccccttctatacaaagccccagccatctctca

SEQ ID NO: 93381 - DNA, 757 bp, Homo sapiens
aaaaaaaaccttttccatgcttttcactacaccatggttaaatttttcctaagggctttggacccatgtaggactgtaagctttagcaaataaaaatacagataagaaatgaatagttttttagtataagcattatttgttgcttatctgaaatttaaatttaactggccaccctagatttcacctggcaacccttcttttacagacagttgctaatgccatgaaatgaagagtacagaaactctgcgtatatatatttcttaaaagttaagcaagatagccaggcacggtggctcacgcctataatcccagcactttgggaggccaaggcaggtggatcacctgaggtcaggagttcgagtccagcctggccaaaatggcaaagccccgtctctactaaaaatacaaaaattagscaagtgtgctggcgggcgcctgtaatcccagctactcaggaggctgaagcaggaaaatcccttgaacctaggaggcggaggttgcagtgagctgagatcgtgctactgcactccagcctggtgacaaaacagaactctgtctcaaaaaaaaaaaaaagaaagaaaaaagaaaaaaagttaaacaagataaagtttgtaaagtttctggatttcactgaagcttaaccccttggtactgggccttaaaaaggagttgtagctctagctgggtgactaggacaagccgttttctctccctgggctcagtttccccttctatacaaagccccagccatctctca

SEQ ID NO: 93382 - DNA, 757 bp, Homo sapiens
aaaaaaaaccttttccatgcttttcactacaccatggttaaatttttcctaagggctttggacccatgtaggactgtaagctttagcaaataaaaatacagataagaaatgaatagttttttagtataagcattatttgttgcttatctgaaatttaaatttaactggccaccctagatttcacctggcaacccttcttttacagacagttgctaatgccatgaaatgaagagtacagaaactctgcgtatatatatttcttaaaagttaagcaagatagccaggcacggtggctcacgcctataatcccagcactttgggaggccaaggcaggtggatcacctgaggtcaggagttcgagtccagcctggccaaaatggcaaagccccgtctctactaaaaatacaaaaattagccaagtgtgctggcgggcgcctgtaatcccagctactcaggaggctgaagcaggaaaatcccttgaacckaggaggcggaggttgcagtgagctgagatcgtgctactgcactccagcctggtgacaaaacagaactctgtctcaaaaaaaaaaaaaagaaagaaaaaagaaaaaaagttaaacaagataaagtttgtaaagtttctggatttcactgaagcttaaccccttggtactgggccttaaaaaggagttgtagctctagctgggtgactaggacaagccgttttctctccctgggctcagtttccccttctatacaaagccccagccatctctca

SEQ ID NO: 93383 - DNA, 757 bp, Homo sapiens
aaaaaaaaccttttccatgcttttcactacaccatggttaaatttttcctaagggctttggacccatgtaggactgtaagctttagcaaataaaaatacagataagaaatgaatagttttttagtataagcattatttgttgcttatctgaaatttaaatttaactggccaccctagatttcacctggcaacccttcttttacagacagttgctaatgccatgaaatgaagagtacagaaactctgcgtatatatatttcttaaaagttaagcaagatagccaggcacggtggctcacgcctataatcccagcactttgggaggccaaggcaggtggatcacctgaggtcaggagttcgagtccagcctggccaaaatggcaaagccccgtctctactaaaaatacaaaaattagccaagtgtgctggcgggcgcctgtaatcccagctactcaggaggctgaagcaggaaaatcccttgaacctaggaggcrgaggttgcagtgagctgagatcgtgctactgcactccagcctggtgacaaaacagaactctgtctcaaaaaaaaaaaaaagaaagaaaaaagaaaaaaagttaaacaagataaagtttgtaaagtttctggatttcactgaagcttaaccccttggtactgggccttaaaaaggagttgtagctctagctgggtgactaggacaagccgttttctctccctgggctcagtttccccttctatacaaagccccagccatctctca

SEQ ID NO: 93384 - DNA, 706 bp, Homo sapiens
actgtgggggcacaaagatggaggggtggtgaggaggccgcatctacagggacactgggtggggacaggggatgagtgggtgagagtcggggcctgagaggattcaaaagtgactgaaatgatgatggaggggttatttatagaaatggggaagtcacagagagaaggtgcctttgagtcggggaggggacgggaagaagaaggagggagtggatttttattttgaacctggtggttgtcagtggtttgctggaccttcgggggggccaacagtgaacagcaggggctccctgataatcaaccctaaaaccttgtctggaacatgttcagcttcttccttgcccaccctcctcccaccccgccaggtgctgagctcaccctttgtgattcttggccttacattctgcacctcccagtggcactggaaccttggatgccccggggagctgcagggccccagtsaccagctggtgctgagggtcagagactgcgactgtgcaggccatgtctgcaggtgctcccctgtgcaaggcctccaggggtgggggtgtccctcagaccttcagggaagttgctgataaagaatttccttagagggggtaagtccccctcccagacccagcaaggccttctctctgtttccccggaaaaacctcttccatccttccgaagctccaggccttgtgggtgtgacagcgtgcctgga

SEQ ID NO: 93385 - DNA, 1535 bp, Homo sapiens
ttatacacttttaaaaaaatgcaatatttgctggacacggtagctgttgcctgttatcccagcacttcgggaggccaaggtggttggatcacttgaggccaggagtttgagactagcctagccaacatggtgaaaccccatctctactaaaaatacaaaaattagccgggaatggtggcacatgcctgtagtcccagctacttggggggctgaggcacaagaatcgcttgaacccgggaggcagaggttgcagtgagctgagatcgtgccaccacactctagcctgggtaacagagtgagatagattctgtctcatagaaaaagcaatattaaatagaaataggagtttaaaatcattttgtctttaggatgattgtttgctttgttttctttgaagagtattaattttaggttatccctacgtgactattaattgctatcaccagatactgtgaatttattatttttttcttttttattcatagtgtatttttatttttaatttgtatgggtagagggaagaaagacatctttaattggattaacattttagttaattaagataagccataggtgagtgataaagagaaaagagataggcttttgattcacacaatactaaatttaatttctagcttcctcacttgataggtgtgaccttgcaaacattagttaataccaactatgattttctatatgaaaaggagaataataatatgtcctttaaggacgattgtgttgaagtaacattataaatatcaacagcatttaattcagtgtttcatacattcttatcagcatcattaagtaaacttactgtaactactactaatatcattattcctaatactgttttaagccttcagattgctcttatttgtctgacttctagctgattttgaagtacaaaatattatatcagagtaaggaagaaatagataattcttcacttaaatctttgcctcttttaggttagtgaacaaagcataagtctttgccccycaaaggactttatgttagccaattctagtatgccatattccagtgggacatgagtctttttgccccttccttttagccttggtggtgatttacaaggataaacacttgagcactcaagatagttatgtttgttagtacatgtaaatggttaattctacactgacaggcacatattaaattggttctgttcctaacaatgaagttaactctttgttattttagcacagccctcatgcttgccatatgtcatggagcatgagagatagttggcatggttcttcagcaaaatgttgacatctgtgctgaagatacatgtggaatgactgcagaacgttatgctgttgcttgtggacttaatcggtgtttacatttaaagactaggtgagattttatagtttgtttcaggtaatttttgaatgacagtgagttagttcacttcatcggccagaaactagtcaaaaagctagactagttagaaggaataatgggtccaggattctttattttaggactttcaacagctttatccctag

SEQ ID NO: 93386 - DNA, 649 bp, Homo sapiens
catggctctgcctgctccaggtgcaaggggggcttctctctcagtgtgtcctggggtgggagttgggggtgaatgggtggagaatgggcaaacagcaaagtcacttctgtgtccaaatgagagctctggagttgtggtggaaaaaggacagaccacacttcctgcaacaagggagcactttttcaaggcaacacttgtctttagaggatgttgacgatgccycaaacttactgtagctgtcagggaaattaggtgagctatttagtatcattcagtttcattttacagaatcagcttgttgttcttagactttcctctgatccttttaggtctcaacttacatattgccctcttaaagaagctttctagttcccagactgagttaggaacccctacccctgctggactcagttagtcctttccacattgtgctgtaattggctataccccatctgtcctttccaccagactaggagtcttccgagggccctgaggttcccaatttccggtgtttggactggtgctctgtaaatgtttagggaatgaaagggtaatgaataaattaatgaaacaagtaagaatcatagagcattagaagcactaaagaaaaggtgtaaaatccatcatcatttaaatgatattcaaatgc

SEQ ID NO: 93387 - DNA, 858 bp, Homo sapiens
gtgccattttccagcagctaccgcactttttccacatcgttggcactggtagcattggcattgtctccctcattctcttcagagctgcacctctttgcccgagccaccagtgaggcctggcagtgagcctcagccgccagcagcgatcttgcagcacagctcctggtgcagctctgcgtcatactgccaccagtcgtgtagtagtgcaatggggacttggcccaggaggcctcctggcccgggaggcccatgcagctgcccccgtgcagacccgaagtcagcgaaggagaagaggccccaggtaccttgcagcttttgttgttgttgttgttgttttgttttttgaggcagggtctcgctcttttgcccaggctggagtgtagtggygctacctctgctctctgcaccctctgcctcctgtgctcaagccatcccccggcctcagtctcccaagtagctgagactacaggttcactccatcaggcctggcaaatttttgtatttttggtagagatgggggtttgactttgttgccctgagctcaaagcgatccgcccgcctcagcctcccaaaatgctaggattacacgcctgcaccaccatacctggccactctaaagtcttatttccacacagctaagacatgttttaggaagtctgctaaaatacccctggagacctccttattgtggtctcccttttgtcgtgttaatttgattgatcttttctgccctcctgcttttcagaaatttaaaggctaaaaagaggacctaaactttaaaacttctcttttagtctcccattaaactaattgtaagaaccaccaaaaaagggaaaagttctttggaaaaattatttg

SEQ ID NO: 93388 - DNA, 858 bp, Homo sapiens
gtgccattttccagcagctaccgcactttttccacatcgttggcactggtagcattggcattgtctccctcattctcttcagagctgcacctctttgcccgagccaccagtgaggcctggcagtgagcctcagccgccagcagcgatcttgcagcacagctcctggtgcagctctgcgtcatactgccaccagtcgtgtagtagtgcaatggggacttggcccaggaggcctcctggcccgggaggcccatgcagctgcccccgtgcagacccgaagtcagcgaaggagaagaggccccaggtaccttgcagcttttgttgttgttgttgttgttttgttttttgaggcagggtctcgctcttttgcccaggctggagtgtagtggcgctacctctgctctctgcaccctctgcctcctgtgctcaagccatcccccggcctcagtctcccaagtagctgagactacaggttcactccatcaggcctggcaaatttttgtatttttggtagagatgggggtttgacyttgttgccctgagctcaaagcgatccgcccgcctcagcctcccaaaatgctaggattacacgcctgcaccaccatacctggccactctaaagtcttatttccacacagctaagacatgttttaggaagtctgctaaaatacccctggagacctccttattgtggtctcccttttgtcgtgttaatttgattgatcttttctgccctcctgcttttcagaaatttaaaggctaaaaagaggacctaaactttaaaacttctcttttagtctcccattaaactaattgtaagaaccaccaaaaaagggaaaagttctttggaaaaattatttg

SEQ ID NO: 93389 - DNA, 858 bp, Homo sapiens
gtgccattttccagcagctaccgcactttttccacatcgttggcactggtagcattggcattgtctccctcattctcttcagagctgcacctctttgcccgagccaccagtgaggcctggcagtgagcctcagccgccagcagcgatcttgcagcacagctcctggtgcagctctgcgtcatactgccaccagtcgtgtagtagtgcaatggggacttggcccaggaggcctcctggcccgggaggcccatgcagctgcccccgtgcagacccgaagtcagcgaaggagaagaggccccaggtaccttgcagcttttgttgttgttgttgttgttttgttttttgaggcagggtctcgctcttttgcccaggctggagtgtagtggcgctacctctgctctctgcaccctctgcctcctgtgctcaagccatcccccggcctcagtctcccaagtagctgagactacaggttcactccatcaggcctggcaaatttttgtatttttggtagagatgggggtttgactttgttgccctgagctcaaagcgatccgcccrcctcagcctcccaaaatgctaggattacacgcctgcaccaccatacctggccactctaaagtcttatttccacacagctaagacatgttttaggaagtctgctaaaatacccctggagacctccttattgtggtctcccttttgtcgtgttaatttgattgatcttttctgccctcctgcttttcagaaatttaaaggctaaaaagaggacctaaactttaaaacttctcttttagtctcccattaaactaattgtaagaaccaccaaaaaagggaaaagttctttggaaaaattatttg

SEQ ID NO: 93390 - DNA, 2039 bp, Homo sapiens
tcactgagttgacgttaaatttcaaattcttctttgcccttaatactattctatcctgaagccacctttatatactgatgaaagaagtaagcaatctgttattatcatctgtttgtatatatcaaatgctcacctcacaatagcatcaaccagtgaaaaacttcacgttttactgtttttatttggataactatttactttgcaatcaactagcaaggtataaaattgtatgatatgcagaactttaactggattgctttaagtgaacatttaaatatgataagccatattaatgatatttaatacacttaaaatgaacatgttttattcatcatgagtaatacaacctaccactcaatgaaaatctaaagttagagtaaatttgctcatgaattcaataacttttccataatatttttagttatttggttaaggttctcttaatgtttctttcactttttaatagtttacgccttttttgcctgtgttttttattggtttgtttaaagcaaaatctcataccgtgtgctacctggaagcactgtaacctagtgacaagatcataggctctagggacacactgccgggccacgtctcttctcctgtctgaaacttggtcttttgtggtcatgagaactgaagatctatcctgaagattggataagatagtaaagtgcttcacattaattcctggcatataaatacataataaatgcttccactttatcttggctcactgcaacctccgcctcccgggttcaagcagttctcctgcctcagcctcctgagtagctgggattacaggcacttgccaccatgcctggctaatttttgtattttttaatagagatggagtttcaccatgttggtcaggctggtcttgaacaactgacctcaggtgatccacccacctcggcctcccaaagtgctgggattacaggcatgagccaccacgcctggcctatattcttaatttagtactattctgagtaaaaataattagctattagttttataaatttaccatgactattttataaacatcagtgctttccataaagtgaaacaggttatgttgtggtgcatttctttaccttgtgctggccaatccctcattatgctgttcccctgttgtaatacttacattaaatgttaccagtttgtatttaagtgatttatgtctcctgattggactctgacaaagagaaaaatgctaggaagagtaccaggagatagccccacaaagatgggatttgggcataggtttggttattcaagtagcagtgcttagcttcttgccaatgggaaatggaatgctggtaatttataggaagtgacctcacaatgacccaagctcctgtttgttgattgtgatgaaatgcatgctgaggcacatgccttgggagctaagtggcagctatacttcactactatggcagtaaagatgactataaagactggcgggggatggatcctttcaaatgtacctgagctgggatgcccagcttgtggaacgcacagcaggaggtgagcagtggccrgtgagtgaagcttcatgtgtatttacagtccctccccatcgctggcattaccatctgagctcttcctcctgtcagatcagaggcaacattagattctcataagagtgtgaaccctattgtgaactgcccatgccaaggaagtaggttgtgttgcccttatgagaatctattgcctgatgatctgtcactgtctcccatcatcctcagttgagactgtatagtggcagaaaaacaatcttgggcttcccactgattctacattatggtaagttgtataattatttcattatgtattagaaagtaataataatagaaataaagtgcacaataaatgtaatgcacttgaatcatactgaatttatcctctccatccatggtctgtggaaaaattatcttccatgaattcatcctcttcctttttttgctgcccaggctgatctccaactcccagcctcgagcaatccacccttcaaagcctccccaaatgctgggattaca

SEQ ID NO: 93391 - DNA, 850 bp, Homo sapiens
aattcacaaatatggaatctgcaaaggatgaggattgactggtgatacttttaaggttcaacttggcattctgcgagctccctggtgccacgccaggcctctggtcagctgtgtgaccttaggtgtccatatctgaactagatttcatctcctttgcagagttgttgtgagaattaaatgaaatgatgtctgtaaaacacctagcacagtgcccgatacacagtaggtgctaaaaaaccggccattatgagatggctcatgcctgtaatcccagtgctttgggaggccaaggtgggaggatcacttgaggctggaaattcaagagcaacctaagcaacatagcaatatcccctctctagaaaaaaaaagttttaaacattagctgggtgtggtggtgtatgtctgtagttccagctacttgggaagctgaggcaggaggatcacttgagcttgggagctggaggctgcagtgaatcatgatcatactggtgacacagtgagaccctgtctcataaaaacaaaaaacaaaaaagtgcattgttactattatcatcatyggcccaggaccctgtgttctatacacagggtgattttaaccaaggtttagagaaggcctgtctgcaccagaactccgggctggcatcattttcataaattctttgtcccattcagctcctctctggctattcagaaaataatctgaatgttgaaacttgtaagcaataaaaggatttcatgacacaggccaaatcaggacttttccgctttgcaatgacagccttcccctctcctctgctgtggccctggctctccactctctccttgggcttcccatgggactgcttagcat

SEQ ID NO: 93392 - DNA, 850 bp, Homo sapiens
aattcacaaatatggaatctgcaaaggatgaggattgactggtgatacttttaaggttcaacttggcattctgcgagctccctggtgccacgccaggcctctggtcagctgtgtgaccttaggtgtccatatctgaactagatttcatctcctttgcagagttgttgtgagaattaaatgaaatgatgtctgtaaaacacctagcacagtgcccgatacacagtaggtgctaaaaaaccggccattatgagatggctcatgcctgtaatcccagtgctttgggaggccaaggtgggaggatcacttgaggctggaaattcaagagcaacctaagcaacatagcaatatcccctctctagaaaaaaaaagttttaaacattagctgggtgtggtggtgtatgtctgtagttccagctacttgggaagctgaggcaggaggatcacttgagcttgggagctggaggctgcagtgaatcatgatcatactggtgacacagtgagaccctgtctcataaaaacaaaaaacaaaaaagtgcattgttactattatcatcattggcccaggaccctgtgttctatacacagggtgattttaaccaaggtttagagaaggcctgtctgcaccagaactccgggctggcatcattttcataaattctttgtcccattcagctcctctctggctattcagaaaataatctgaatgttgaaacttgtaagcaataaaaggatttcatgacacaggccaaatcaggacttttccgctttgcaatgacagccttcccctctcctctgctgtggccctggctctccactctctccttgggcttcccaygggactgcttagcat

SEQ ID NO: 93393 - DNA, 1306 bp, Homo sapiens
ctcttcctgttgtcctcgcttggagcctttgactgggcatccttcccagcctgttcccaactccatgaaggcaacagggaagcagtttaactctagaatcccttcttcctcacttccccaccctaggctggagagggaagcttaaggtctctagcattctggaggtgctccaaaacattttcggcagtcaatggccttgggagtgggcatctgcgcccgccggtgcctcagctcctccttgcccatgctgctggccagcttgttaaaggcagacttgtacttcttatcgaaggccactagggaagaaggtggaagtcaacatgttaggaccgcagcctcccacacctggccccagatccctaaactcctcagccccttgcctgcaatctcacctatgtccacgtggtccttgcccagagcagccattgtcaggaataatatctcacggtagattcccctttagtggaggcagaagtgtatgagtgagagaaaaggggtgtggagccccggacagaccagggatcacccagatggtagcaccatacctctgcaggtgcaggccagtgggtgggggccctagagtttccagcaggagccccacagccttgtgcacttcattgagtccaacatggcgcagcactgactccaacagtgccaaactaagggatgcaggtacagggcctggccataccacccgctgggggatctggcctggatgaaaggaaagaaggccaccagaatcactgagccctctgggtatgggacccaccctccccacccaggccaaataccagactcactgtggaccctccagagcacatagagaggtgggcagctattggggtcaggggtcagtacatcccacagcagccgtacctgaacagaggctggatcaggggttagccaaggagatggggcctgggggagccaagatagtggagacagttaggctcaacgaatgggaggcagaggacaagaaacggacaggtgatgccaaagagacagagggccattacaggacacagccaaagagaagtgggaaaggaattcttatcccccacaagaatgtaagctcttgagagcagggactgttttgtaatctgctacatacctagtgcctaaaaccgtgcctggaacataaaaagcactcaatactggtggaacgaatagacaaatatgaatgaatcatttgtttaggtaccaggctctgcacaaggttgtccacacaccagcccagtgagataggtgcttatgccatttyacagatgaccaaattgaggctcagagtggtaaagtgaaacggcaa

SEQ ID NO: 93394 - DNA, 640 bp, Homo sapiens
ttggaactgatgtctcctggaatctcagtgttgactcatatactcctcccaccacacaattaccttaggagagcatgtctgggcttagggttgcaatctccatctaccacccaatggtatgctcagcgttcaccaaacacagccctgttctccaagyttcagtgatacatatctaacttccaatggaatagatgtactagcattctcacagattttacaagctcaacatgcacaaaatcaagccaccaccttcccctccacacctgttcctccctctgtatttctgacctcagtccaggacaccagcattcacccatgtcagaagccaagaggcaacttttacttccacagttcacatcaaatcaatctccacaactagctaatcccgcccatgcctttgtcttcttgacttcatcatttctccccagacactctccagcacaggctccaattccgtcccttgggaatgtttctctgatctgtagcttgggtgatttgtgtgaaatgcacagctctgtaaccatgctacccacttgcttaaaacgcttcaacaactccccttgcctacagcctcaagtcctgctcctcactgggcccaaacctccacagcacagtgtggcccagcctcctgcttcctgct

SEQ ID NO: 93395 - DNA, 1280 bp, Homo sapiens
aaagctatactatataaagtactgctaggtacaaaagaaaagtctgtacagcttttagcaaaactgctttcccagaaaagcaaattaaaataatgcaatcagcagatcaaggagactacagctagacatcagagctacaacttctcatatctgtgtcagaaaatcctatttatccagaatagactaaaatttcaggacaaaacagggactttttaacatttcttactttacccattttaagttctttttatctcccccaccccccaagccactaattcagcaagatccaggagaaagagggctacttttagaattggctactttatttttctttctatggcaagactgtcatggagcctggatatttcaggctcatatgcatccatgaccagtgtcccactgtggtcaaaaaacttagcaatggactttgtgaactcggcttcccgctgctgctttgttctcccactgatgaaggtcagcttcaaggtgtatttgtcatcaaaccctttaagactggaggacagctgccaaatatcatcaggatccattcctgtaggatctttcctgtgggccacgagaaagatgctcttctccttatatgaggtataaatggtcagaatccccatcatcacaaaataggatatgacacacaaagccaaaacgggtttggactctggaaaggggtgcatataatcccaaatcaaagccactatggcaaagaaacaggagattgtacagatggtgaggcgaccatcaattagaccaaaattctccacatatttgtatttttccagaagtacctttttggcagaatcatccaaagagtttttcacagctgatccatcccacttgtcaatttttacaggcttatcatctatcttccacttatccaacaagccgctacggccactycctgtcccgcagttggaagcaccaccagccccactacagcctccgctaccaccgcttctctcgccctgtacagctgccgccgccatcttgtccgcctctgcgtctccctccgtatctgactttttttttttacctccccaaaactattgttcgagtaactgttatctgtctgatgttcatgataagagctcctgcggaaaagttcatcttgatttgtatctacctgtttactcagcaactactttgtaaaattccagactctgaggacatggtaaaaaaacaaatcagctgcgtgtagtggctcacacctgtacacaacactttgggaggctgaggcagagggattgcttgaggccaggaattcatga

SEQ ID NO: 93396 - DNA, 643 bp, Homo sapiens
atagcctaaaagtggcccttgccatgacacagcctccaccccgaactagacaaagtaccatcatttccaggggaacaccgtcactccctgcttggtgacagaggcaggcaccaatgcattgcatggaaccaatccagcactgagacttcacacaagcagctcggggtgcatttcccaacagaagccctgggctttaaggaatttccaggtagtggctgggcactcgcagcagcagctgggggtggggaggggaagcagccagcagaccagataattgtttcatcttgtctgagaaggaaaatctgagcgctgcctgcagcctgataaagaagccctccccaccctgggccagaggtgcgcaatggccccagatttggctggggygagataaggttattaattcaccattcgagccctattcaatggttctcatccttaattgcaatcaagcaggcatgaggctgagggagggatgggaaaggagggacctgctcccaggaccagggactggggctgaggcggccccagtacagcaggcagcagggtgctgggggcttcagggatatccccagacccgtagtgggggtggaggggctgctgtcagagtttcacccaagctgggttcattctccattatgcatat

SEQ ID NO: 93397 - DNA, 643 bp, Homo sapiens
atagcctaaaagtggcccttgccatgacacagcctccaccccgaactagacaaagtaccatcatttccaggggaacaccgtcactccctgcttggtgacagaggcaggcaccaatgcattgcatggaaccaatccagcactgagacttcacacaagcagctcggggtgcatttcccaacagaagccctgggctttaaggaatttccaggtagtggctgggcactcgcagcagcagctgggggtggggaggggaagcagccagcagaccagataattgtttcatcttgtctgagaaggaaaatctgagcgctgcctgcagcctgataaagaagccctccccaccctgggccagaggtgcgcaatggccccagatttggctggggtgagataaggttattaattcaccattcgagccctattcaatggttctcatccttaattgcaatcaagcaggcawgaggctgagggagggatgggaaaggagggacctgctcccaggaccagggactggggctgaggcggccccagtacagcaggcagcagggtgctgggggcttcagggatatccccagacccgtagtgggggtggaggggctgctgtcagagtttcacccaagctgggttcattctccattatgcatat

SEQ ID NO: 93398 - DNA, 626 bp, Homo sapiens
tcggcgcctccccagggctccctgccttgtaaaatatagtgcctgcctttcacctgggtggtctggcctggaaggccgagctgcagaggcaggggatggaagtagggatgcaggggacgtgatggtgggggtcagggggcaggggggacatctggttgccaatcctgaccccactcctgcccagccaagtaacctggggcttgtttctttacttctttgagtctggtttcctcccttgtaaaatgcagagggaagtaacgactgccttgtagaactgggaggatcaaataagatgttaaagtggccgggtgtggtggctcatgcctgtaatcccagcattttgggagggatgcaggaagactgcttgaggccaggagttcgagaccagtcttggcaaagcagcaagagcccctacttctcaaaaaaaaaaaattagccagacatggtggctcaagcctgtagtcccactgcttggagtggagagggcgacatgagcccaggagttcaaggatgyggtgagttgtgattgtgccactgcacttcagcctggtgatatggtttggctgtgtccccccacaaatctccacttgaattgtatctcctagaattctcatgtgttgtgggag

SEQ ID NO: 93399 - DNA, 519 bp, Homo sapiens
catgggcagccacgctgacatcacagacagaggtggggcttgcgtggaggagcaggaggcagccatggcagcactaaggctgggacagaaagaaggggcatctcrccctacctgatggcggctcacgtttattcgttttttcgccgttgacccgaatggaagcaggccctccgtgagactgtgccacagttccaggggtgtagatagattatcttttccaaagagaatcaatgctcctctctgctggtgaaccagcgacccagcacggaattgtacatgttggggatgaaccagcaactcagcacgggattgtacatgctggggatgaaccagcaactcagcacgggattgtacatgctggggcttcagcttcaagtgaacaagatgaagtccttgccctcctggagcttacattctagaggaagggaaaaaaaaacacgcaagtaaaaaaaaaaagtaaaccaagagagtcatgataattttaatactgatcagtgatagaaaaatgagattgaggcc

SEQ ID NO: 93400 - DNA, 536 bp, Homo sapiens
ccccccccacccccaccccaacttatcaagtggaaatacctttccctccgcagtgctggaggagactgctttttctctgttaagaaaccctgtgataatctcggctggagcagatgctgttctcaagactcatcacagccacctgctgttgtcactagcccctagctgtggtcagatctcagcatgttccacggtggcgggtatacacagacctaggaggaaacagaaaaagaacgacaagactggtgacatgtatgggagtggattctaagggttttagatccaggaaggcagaatgtaacactagcctgggctggaygcattgatacgggcacactcattagaggttctgaatttggctgttagcttctgcagctggaggtggctctaacagcttggttggttgactgaaacttggacttgacagtaacctgcagttaatgagggttgtgatgtcatgatgtggaagagggaatccaaaggcttggggagaccgcaatgttggactgcatgtatcatgtctaatctgcactccc

SEQ ID NO: 93401 - DNA, 1334 bp, Homo sapiens
atgtggtgaacaatcctcttagatgttaaaaacgaaactgacccaggaagagagccctcatcagtaccagaccatgctggcatcctgatctcagactttcagcttgtagaactgtgagaaaataaacttatgttatttaaacctaaatacataagtacacctttatctcctttttccattctctttgtatgcttgggatccaggatacacaaattgaagttacttgtttaatgattttataactatgtcagaatttaagttaaaagtgagttactctgtatgtagaaaggctgaaaatagtacaactgcagtaattctgtcagctataagggacgtgtggactgagagggtagtcttaatagattgtgatcaactatatgtgaaaacattttgtrtagtgagttgatgtgtagtttacatgtaaactaactcctttagttcgaaaggaattttattttacgttaaaagattattttaggctgggctttagtggctcacgcctataatcccagcattttgaggggctaaggcaggaggatcgcttgagcccaggagttcaagaccggcttgggcaaatggtgagaccttgtctctaaaaaaattaaaaaattagccaggcatggtggtgcgagcccatggtctcaggtaggatgattgcttgagcccaggtgatagaacaaaaccctatctcaaaaaaaaaaaaaaaaatttttttttttgtatgtatgtaactctttacttatctactacctaataatccacaaaaatacccacaaatccttaattacgtggaggaggaggagatgataatagagatcattttaactttgaaagataatggattccgggccagatgtggtaactcacccctgtaattcccaacactctgggaggctgaggtgggacgatagcttgagtccaggaattcaagaccagcctgggcaacatggcaatacctcatctctattaaaaaaaaaattattaagaaagaaaggggccaggtgcggtggctcacgcctgttaccccagcactttgggaggctgaggcgggcggatcacaaggtcgagggattgagaccatcctggccaaccaacatggtgaaaccctgtctttactaaaaatacaaaaataagctgggtgtagtgttgcatgccttttagtcccagctacttgggaggctgaggtaggagaatcgcttgaacccggcaggcagagattgcagtgagccgggattgtgccactgcactccagcccgggcgacagagcgagactccgtctcaaaaaaaaaaaaaaagaaagataatggatttggttctgccattagatctgggtt

SEQ ID NO: 93402 - DNA, 587 bp, Homo sapiens
tgtggtctgtattctcttatccaaccctcattggcctctttgatactctctgcttgcagtgctctgggccatgaatcaggaaccagagaccaaygttctactgttgaaacgctgtgtgaccttgaaaaagtcacttatcctttctggagttcaggctaattggtgcttgtggcttcaaaaggggtctcaggtcccttccagctcccaggccccttgcctccaagcctgcagcagtacatctcgcctctgagcccctgcagatggttctctctctgcctgaaacaccatttctccccagctagctggaatcatctttccaaattcagcacagctcactttcctcagggaagccttgctgacttggctcctgccccaactagcgtgggcgtcccctgtctgggctcccattggttgctgttgagctgggtggcgttctcctctgtgcaacactgatgggaccattcagagatacaactggagactctggcatcctcagtacatgtagatccgccctgatgctgggaaaatgggcctctatttagcaaacaacctctcgtggtggcagagtttggagccagaggttgtgg

SEQ ID NO: 93403 - DNA, 727 bp, Homo sapiens
ggatccggccatacctgatgtggacatctggattctttagttatacaagccaataatatttgttttgcttaacttagtttcagccttaaaggacatacccaacattgttaccatcaatgtcrtcaaacccttatgtccatctaccatgagtggacctctgtgctgcagagactgaaatgtgctacgtcccaggctcccactgccacctcttctctttaagaccctcacaatttaggaggctgctttttgaggccctggaggactcagcctgcatctagtctatgaactctccctgagccggattcccaagatgaattacaccttccctgacagcttcatggcaaatgaggaaactaaataaacaaaaggggcctggaacttctctgataggtcttgacctctgaataggggccctgtgaataaagttactttatttttaggataccaaacttgccaataaggaaatggaggttcagaggagtgcaccgacattttcagtctcccagctccttcaaagcaggtttctcctcctggctccaggccccgggctgtctctactcccagtttgctcacctgtcagcagtgccccagggcttgccttcttccgtctccagttggggtagtggtgccaagttcaacagtctagggactgtggaaagtgctgatagtggcttgcacacggtctgtgctcaataactgttgaatgtgtgagttgattgatagaatg

SEQ ID NO: 93404 - DNA, 503 bp, Homo sapiens
gtggtctcttctgattccagaagcccagtactcttaaccaaagggctgtactgcctgaagttgtttggaaagattttgtagaatggtgcctcttgggctcttccttaaaagatgaatcagaatatgcatgtttgaattttggagtgttttttgggggagggggcggatggagggggtgaaaggagcattccaacctaaggaaaccttaattaacatcatccattttccagacactgagctagaccctcacatacaatatttcagttaacccttaatcctgagaggtaagtatcattatatctattttattacatgacaaaagygggtctcagaagtttaagtaatttattcaagtctatggtgaccttttgttcaaaattttccattttaaatggtctatcctatcttctttacactcactaaaatgttgtggggatcacatattttgcgtatctaaatagtgtgccaaactgtttcatacttggcagcagcacaaaaatcca

SEQ ID NO: 93405 - DNA, 2286 bp, Homo sapiens
tctaaaatgaggtaatgagactaactgactctagagttttttgggtgttttgttttgttttgttttgttttgttttgttttgttttgttttgtctgagatggaatcttgctctgtcatccaggctgaagtgcagtggcgctatctcggctcactgcaatctccacctcccgggttcaagcaattctcctgcctcagcctcccaagtagctgggattacaggtgcccaccaccatgcccagctaatttttgtatttttagtagagacggggtttcaccatgttggccaggctgtctccaattcctgacctcaagtgatctgcccacctcagcctcccaaagtgctgagattacaggcgtgagccactgtgcctggcctagcgttattttagccctaactaacattattctctgggtcagtgaaatttaagtggaatatattgggcagtgacctaatggagcatgaagcaggatttgaatcacttccaaagctgtacaccaaccacttaggcaaagtagtgatttcagtaacttagtatttcagtaactggtgctcacaggcaaatgcgtaatggattaaccccatattatttaaatgcttccaaaaagctataggaaaatggccattaaaaacaaactgacaaatttagccaacaggccactatttgacaattctgcaagcttatttttaaaattcagcttatcaaaactgccattccagaagccagggacctgagtttccatagaggatggagtagaatggaggggcctctgtataaatctacctcctcgggaactgggacagttcagcattcaccagagtaacgtatgaagaaacaggagattcctacatgctcctggggatccagaagagagaccactcacatgactggaagatttccagctcaggtaaccacaaaggccatatatttggtgaatacaggcaatgttagttagaataaaaccaaatttctctgaataatataaagtcattactaataaaacttttatagatttttctctgaagaaatttccaggaaggtrttaagagaaagccctacaattaaggtatggaggctggctgcaggccctgaaagctgctctgatgagcaatgacttaatgctgatagtgggaagtctcttgcccactgcaggatacagagaattcttcctcaacccgaggcttctgctcattcactcccttctcagcaggtcccttcttctctgagggctgatgcatcccagccttctgctgggacattttctcatgaagagctctcttacagccgtctttgaaaggaaggacagagaagaaagatgtctatgtcttcacaatggccaggcttttctccaaaactacctaaagcaattgaaacaaaattatggcttacagaggttagattattagtggagatcctgtaggacgatagaatctcaagagcagagcctaccaggaagtagagtgaagcctacaacttcctcagccatgaggacccaacaatccactgggtaaaagaaagatgcagcaagtgctggggtggggtcagggtgggtgctgttatgagaaggaaggggaggtcccacaggtgtttagaagaaaaagcaggcaataaatgaatgaaaacaaatggggtttaaactaagctaagggatgagtatttttgtttcttatagctgagataaggttcttatgaagttcccagggaatgtcccttcagaggtcaggaagcattttgcttccacaagttttgagagtcatgaaggcaggaacacattttgagatgccagagctcaaatcccatgtcactgggacatcaacaatagtgctatggggaagactcagggtgccagctcttgagtcacaatcacagaattagaatgtggaagtagctacagaacccaaggaagccctgccttctgatagctacactcaatgcaaggctgcgtatttcaccctggaggtctctaacaggggaggccaccccctcaatagccagcttttttacccttttgcttacgttgtcaaccaatttctaaccacagcaaaataacctaagtatacctctccttgaaaacatcaaaacattttctcagcagcttttattttcttgaagacaatttcagtaaaaacaattcttgtggcttttcctaaatgaatttttttttaacttctagtgattcttactcttcgtttttaggaactctccaggttttcacttcctacattctttcaagagtatagtgactaaaactggagaataatcatttaagtctgactaataaattta

SEQ ID NO: 93406 - DNA, 2286 bp, Homo sapiens
tctaaaatgaggtaatgagactaactgactctagagttttttgggtgttttgttttgttttgttttgttttgttttgttttgttttgttttgtctgagatggaatcttgctctgtcatccaggctgaagtgcagtggcgctatctcggctcactgcaatctccacctcccgggttcaagcaattctcctgcctcagcctcccaagtagctgggattacaggtgcccaccaccatgcccagctaatttttgtatttttagtagagacggggtttcaccatgttggccaggctgtctccaattcctgacctcaagtgatctgcccacctcagcctcccaaagtgctgagattacaggcgtgagccactgtgcctggcctagcgttattttagccctaactaacattattctctgggtcagtgaaatttaagtggaatatattgggcagtgacctaatggagcatgaagcaggatttgaatcacttccaaagctgtacaccaaccacttaggcaaagtagtgatttcagtaacttagtatttcagtaactggtgctcacaggcaaatgcgtaatggattaaccccatattatttaaatgcttccaaaaagctataggaaaatggccattaaaaacaaactgacaaatttagccaacaggccactatttgacaattctgcaagcttatttttaaaattcagcttatcaaaactgccattccagaagccagggacctgagtttccatagaggatggagtagaatggaggggcctctgtataaatctacctcctcgggaactgggacagttcagcattcaccagagtaacgtatgaagaaacaggagattcctacatgctcctggggatccagaagagagaccactcacatgactggaagatttccagctcaggtaaccacaaaggccatatatttggtgaatacaggcaatgttagttagaataaaaccaaatttctctgaataatataaagtcattactaataaaacttttatagatttttctctgaagaaatttccaggaaggtgttaagagaaagccctacaattaaggtatggaggctggctgcaggccctgaaagctrctctgatgagcaatgacttaatgctgatagtgggaagtctcttgcccactgcaggatacagagaattcttcctcaacccgaggcttctgctcattcactcccttctcagcaggtcccttcttctctgagggctgatgcatcccagccttctgctgggacattttctcatgaagagctctcttacagccgtctttgaaaggaaggacagagaagaaagatgtctatgtcttcacaatggccaggcttttctccaaaactacctaaagcaattgaaacaaaattatggcttacagaggttagattattagtggagatcctgtaggacgatagaatctcaagagcagagcctaccaggaagtagagtgaagcctacaacttcctcagccatgaggacccaacaatccactgggtaaaagaaagatgcagcaagtgctggggtggggtcagggtgggtgctgttatgagaaggaaggggaggtcccacaggtgtttagaagaaaaagcaggcaataaatgaatgaaaacaaatggggtttaaactaagctaagggatgagtatttttgtttcttatagctgagataaggttcttatgaagttcccagggaatgtcccttcagaggtcaggaagcattttgcttccacaagttttgagagtcatgaaggcaggaacacattttgagatgccagagctcaaatcccatgtcactgggacatcaacaatagtgctatggggaagactcagggtgccagctcttgagtcacaatcacagaattagaatgtggaagtagctacagaacccaaggaagccctgccttctgatagctacactcaatgcaaggctgcgtatttcaccctggaggtctctaacaggggaggccaccccctcaatagccagcttttttacccttttgcttacgttgtcaaccaatttctaaccacagcaaaataacctaagtatacctctccttgaaaacatcaaaacattttctcagcagcttttattttcttgaagacaatttcagtaaaaacaattcttgtggcttttcctaaatgaatttttttttaacttctagtgattcttactcttcgtttttaggaactctccaggttttcacttcctacattctttcaagagtatagtgactaaaactggagaataatcatttaagtctgactaataaattta

SEQ ID NO: 93407 - DNA, 722 bp, Homo sapiens
cctttgcatccttcccagtgaaaactgctttcagccactctctgctagcctctcaccagcacagagctgaattcacaaatgccttgaggggaaaacctttaccaagtgttcagttcacatctcaattcattctagaatcttggcttttcaagtcaaaatacctggacagctccacacgtctacccactccccacccccatgaggttacttaaagtgctgctgttttctctggtttttaaccactgccctctccccagcttctcagcctcttgtcccttgccaagaactagcaaataccctgagggggaaaaattgtttcattccaatgatcttctttctctctctctctctctccacccgctttctgtagctggccctgtgggtcctagcttttcaaagacttcaaacagaattcctttaaaccagattttatctacttcttttcgaagggagtgctggtttgccacaaaactccatcgtaactgaaagaggaaatcttctacaaattccaggtaaatcaaattttcctaccttgatttctgaagaaaacaaaaaaaagagaagaggccattggtagtatatacttgcatttttcttgtaatacttgcrtaagtctgaatgggtattaaaggctcttgctagaatcatgtgccaaagattgtctaccatgacctaaacaatcaggcctgtccaaggtccaagaatttgatcaggttggatcc

SEQ ID NO: 93408 - DNA, 738 bp, Homo sapiens
ccctttcccagggcctgcagctgtctcctgagagccaagccacttgcaactgtctggaccccaggccaggtccttgctcattgtctctgtacctgcccatgtctgacatgtctcccagtccttggggatctcttctgtgctcctcttggagaactctttgttggctccaggtacccttgcctcccagtttacatgcacatacatgcaatttgagaatagatgtactttwatgtacacatgcacacatacgtactcatttcaaaacaatttggcctcaattacctgctataatatctgggacctcatcctgatagtagacagctgtgggtgacccgctgcacttgctcagttgtggttcacagcgggacacaaggtgatttctaagccagcactcgcctccctagttgccacgtgaccatgtcttctttgggtgtcctgggcttacaccctgaggggctttccctgaggggaacccatactggaaaacctgtcaacatggctctggagacctctggatgaagaggcagccgaatgtgttacctttgcaaccaaaacgatgtcatgttggagaatccacagtccttcccatcttccaccctcaccatcattcagccacacacctcccagggaaggcacctcagaagcagccacattaaagggagtttagcccagctgagagtggccagatttgtgcactggagaatttccatttggggaaattggacaagggcctatggg

SEQ ID NO: 93409 - DNA, 687 bp, Homo sapiens
agattgaaaacttaagtgcatcaaaagacattatcaaggaaaggaaaagaccacctgcagaatgggggaaaatacttgcaagtcatatatttgatgagggtcagtatccgaaccattcttgttaactgccttctagagccaggcagtgtggatgctgcagtgagcagaacagacagacagacagccagccctgccctcccatcagaactgaggtctatgaaagggaagagcattcctaggtgcagtggctgcccttgggcctggcacacagcaggtatccagcctgagtttgtcctatgrcagctggtctgaatccaaccccctaccataccccagccatgctgggcacaacctcatcctagctttcacaggttctgctccgaccctaaggccttctcttcggcccctcccctcccagtgcatgccgcccttgcttctttctctggtcctgtgccagctccccatctcccctcaggctctccccccaactgagggtggcccccgcagcagcctggcctacaagtacgtcatccatgaggacctgctgccccttatcgggagcaacaatgtgctcctggaggagatggacacctatgagtgggcgctcaagagctgggccccctgcagcaaggcctgtggaggaggtaccggttccctgacccgccagtgctttgttggggcagccca

SEQ ID NO: 93410 - DNA, 899 bp, Homo sapiens
gttcttttcatacatgctgccagactggtatgagattgggggaaaagtcactccgcttgtgcaaaggtgacctcgcctggctcactacgtgccatccagcctgtaatcactgcgcatggaggcggggtggggggtgctggccaggcgcacatcccgcctcctgtctacagagcctttctgacgtcacatgtaaattcacaacccgtgagtccctttcctgctgtccccggcatggttattcaacactggggcatactctgtgttataagaaaaatgcagagaacaagatggatttgatagcttagctctttgaatatttcaagtctatatcaattaaaacttaggcctcctrcgtcagctgcttggggccaggaaggagtgaatgggtcccacggcactcaggtgcaagaattgtcgcattatgcttctaaatcaaaggtcatctggctttggtgtcctgcaggacaaggtgggaggcaatgtcagccactataaggtagctttgtccctccaactcttcatccgagagactggaacagaggaaggggtctcgtttctagggtacagcagccacctccctttccctggcctctcagctgagcactgcgtcgtcgtgggccctgggggtcccagagcctctccagagttctccaaggacttggccccagaagacccagacgtccccctcaaagtcaagcaggcttacaagtgtctgcagccctcacccttcccagcaagggtgctatgtgcagtggggccctcgttcctttcccggtgtcccctccccaaacccctgaacacaagctctcagccagacctgccctctgccacctcgccaggggcagtcccattaatcttccgccagaggcctaaaataaaaaagcttcttacctcctgac

SEQ ID NO: 93411 - DNA, 667 bp, Homo sapiens
ttttttcttgacctgctccagtttcctcacattgttttctaagaatagtagccagaatcaaacatcataaagaactcagatgaaccagggagaatacctagcactagggagacagaagcttttggaaacacaagtatgggtgccatgatgcttcatcccttctatgcgcttaaaaatctgcccacattcagkagatcatgctctagatgtcaatgctgtgctggagacccagagaactggctgaagaatgctctgaaacttatgctctctcaaatgtcactgccttgatgagaccttccctgaacaccctatgtaagttgcagctcttttatcctaacttcctctatgctcctttcttgctttattttccttatagtatttatgaccaactaacaatatatgttgttaggccaactataacaataaatgctataacttttaaaaatattacagacgtaagaagcttcacaatgggaagggtttctggttctgtttcatgatgtacccaagtgccaagagcagtgcttgggacatagtcagtgttcaataaacactggtggaaagaggaatggaaacgtgaaaggacggttggaaagaggggaggccatctctcactatgcaatctagactgggaaatacttctcaccactgttggccactagagtag

SEQ ID NO: 93412 - DNA, 570 bp, Homo sapiens
tggaacattcacaccacaggaagtacaactgctgtttccagcaaggacatttctaatgagtcaatttcaaatatctacgtactacatcaaaacattatagtcagataatattttttctgtaccctacctctcctttccaccccaaccctggaagaacaaatggctgcccagtggacagagatgcaagcagccaaggtatgaaagrgagaggaagatggcagccccattcctgtcccgggaggaccccaccctggatccagcctgcaagaaagaagctttgacgaataaggaaatttggagttttcattattacagtttaattagaggaatggatgcagctgctgtgacttcaatttggagacttatttgttatccagaggtgaccagaaatacaagtgacctacctgagatttttccatcaaggctggtgggaggtattatacaaactgctttgtgattttaccctattatgttccacttgttcaaggcactaattatgggcaaatagttgctctcttctcatggaaaataagaagaaaatagcaagtgttcctttaaaattctttttac

SEQ ID NO: 93413 - DNA, 740 bp, Homo sapiens
gatccttcacatgcacagttcacaatagggcttgtgctcctatgagaatcaaatgctgccactgagctgacagaaggtggagctcaggcagtcatgctccctggccggctgctcacctcctgctgtgtggcccggttcctaacaggccacaractggtagctgtccccagcataggggttggagccttctactctgagggatatttgaaatatttcctcataaaaatcatttcacatattttatttcctaaaaactaaaactgttgtgaacttttcacattgggaaaaaaaaaaaaaaaaaaaccctgataggaagaagcacattttttaggatgaagctacagacacctggtattggtcctacccctgcaaacctaccacgcctgtgaaccccgcctttcactgctcagagagtttcagcccctagctcctcacctgtctcaatggaaactattgttggaagtttggtttctggaggaaaataggatgggcttagcagctccagtaatcattaataaatactaatgaagctgatttgttggtgtttcaacagtttcacataaaatgagtcttgaacaaatgaaaacaatagaaacaaagaatttattagtatccttgtacagatagttggaagaattaattttaaaaggcccaaattctgtaaagcaatcagtttatttattgacctgtccaagaagctacttatggggctgccatcactggctatggcagcagatccc

SEQ ID NO: 93414 - DNA, 665 bp, Homo sapiens
agagatgaagatgctttttaaatctccctaagcttatatagaaataacaggccttgtcttagggaatgtccagctgtggagacttggtcattcttaccaaatttttcaatgcacctgcatccttgacttgccattgaaccagagaacataagggctaaaaatgactctagaggccctctaagacaatccaccatttaaaggcagattagaactcaggtcttttgtgctcagggccagttatctttcctctgcacatgtgctagccaaagcagtggccagcagccacatgtgactgttgaacccttgaatatggctaatccgtttggactaatccatgttggctaatccaaatggagatgtgctataagtgaatagactatgacagatttcaaagacctactagaaaaacaagaacgtaaagtagctcaaaaatacttttttatattgattacatattgaaattataataaatattgagtaaaataacatatattagcattaatttcactgctttctttcttaatgtggctaccagaaaactttaaagtatatatgtggcttgcattatctttctattggacagcactgttctgcacaactttccatcttgactaygggctcagaaagaaagcaatgagtgcccagactctcaaaccctcctgtaa

SEQ ID NO: 93415 - DNA, 529 bp, Homo sapiens
cagtgcccagcagtcacaggactgaaaggaactttcatgacttttcttctctgtcaacagtaataggtggatctttgggatttctggtcatttaggccactcagtaactggatcccagtttccctaataatgtgttgcatttgcaaagtcgacccccagaataatctgcttcttctagtcccactgtccagtgtgccatgagatagatacctgctcttcttgtccttttttgtcttcatagataatgtttatgtatacactgtatataataaagggagattttaccagtgggttaggattggcacagatcatgctaaaactctttccataatttagcagatactctcagagcacctctcacatgccctcaatcctttgccagttaccagtcgtgcatacagtttcagatgtgcttcttttcaggacagtcagtccccaactctgtccgaggacttccctcaagatccagaacttcagcttttctygtgtatgcagacagctgcaagagcttaggaatttacatccctca

SEQ ID NO: 93416 - DNA, 2922 bp, Homo sapiens
ttcatcacagatacagaaagacaggaattatggattgtgagcaacttattttcctatttaagtagaacttgttttttctattccaaactgaacatctaatttggaatggattcccctgatgacatttaccacaaaattttatatgtagataagataaaaatattgtcagtaatgttgcaagcctttcttcattaaaagattttctagctgcacgcaacatgagctttatatagcctgcttagaaaagaaagtacttgagtagcagaatgtacaacacaaacaaacaaaatgcaaatattggaagcacagaagtgrcttcagttatcaggcaatgctttgctgcatctgaagtcaaagatacgcatgctactttaattagtgattgaactaaaagtaggagttttaatctggtttaaagagtgatcttctttcattaaaaaataaaaagacaaaaaacaacttttccttgaaaaggtctgagcctattgcttaaaaaatgatctggcttgacttagacatataaatttttcaaggacattaatattctttggtataacacttttgaagtgggacagctatactaatacatggggctaaaatttttaaatccccatgagacttttctcaaaaaggtttagagctgtaactaattagaactaaaacatgcctatggagattcaggttctcaaaaaaactgtcctgatagtgaaagcattttggaagacaaaactttgtttttctctttgcctgttgtttcctgtaatgactggtaataaaacagaaggaaacacattttagccctaagacacatctggaaataatatttcaaataatcgtcctatgggtctaccagaatggattttaagcaccctggtgacctacttcccttacttctggaaactctctagatgaaatcagaagattattgacagtactgtgatgttcttggggcccgaggaaaataaatatgcattcctctcttttaaaactcacccatgttcatagcaatactattcacaatagtcaagaggcagaagcagcccacgtgtccaccaatggataaatggataaattaaatgtggtgtgtacctgcaaaaacattattcagccttaaaaaaatggaaattgtgacgcatgctacaacttacatcaaccttgaagacattatgctaagtaaaataagccaattacaaaaagacaaatactatatgattccacttgtatgaagtatcaagactagtcaaactaatagaaaaaggaagcagaaaggtggttgccagggaatgaggagacaggggaatggggagttactgtttaatggatgtaaagtttcagttttgcaagatggaaaagttctgaagattggttgcataacaatgtgaatatacttaacactactgaaccatatgatttgaaatggttaaaatggccaatttcatgttatgtgtttttgactacaattttacaattttttaaataaaaaaaacttcagcagtagtatcttctttctttaattcgactatttgactgattgggtcaagaatacttacgctgttcagaagacagcaaaaatccacttgtgcaaaaaagttcatagggtattcagtgttgcaactcaagggccttagagacatctagccactgtcgtacatgcaggagtgaggcgcagggaggcaaagtggctttaacctaagaccatgtagttaatttgcagttcaaccagtgcaaaaaggtaaattccttcacatcacaatacactgacttcttacatatctcagtgaaccagtaaattctcttgaaaaacgtattggtatgaaacttttttaaaaaatgaaaaaacaacttatgtgttaatcattgctgaggtcttattttcatcaattgattgcttgttccaaagttctttagcaaatgtgaacagaatgaaatgtagaaatgaggtatcattagtatacgacttctctgaatgtctagatttcagcaattcattttttctggttttggtctttaacactaatatgcatggctactgaatcatttgttcagaaagctgcaaaattgtgagaagggctatggtgggattcatgtgaattgcatgtctaaaaggacagttttcttaagatgtgtgattaaccataattacttatgcagaatacctttctaaagagattgaggcaaaatacaaagaaatcaataatgggagaaagcattcactattagagcttcctctttagttttcagaatatttagatgatgccttctcattctaaaacttctaatccatctctactgcattctgcacccagccttccagaaagccaggcttgcctagccactgacaaacataactctttcatacttccttctctttcattgagaagaacaacaaaaattcccaatgttcacaagcaatgttgaccacaatgctcacattctctttctattccagatgagttgtgacttataagaatatgctcaaagtggcttttgcttttaattcggtcagtctcttgagtgcaacatctcagtaatattattattgttattgctcaaaggtatagttacaactgtttataactgctgctccccacctatcaatcaaaagctacctgagtgtgctacagtgaactcagaggagggcaccatggaatatttcaaatcattgaggggacactgcagtacttggttgcaggaaacgtggatgccacacaaactactagctccagggagttggtagtttcaacattaactaacactacatttactagatgacaccatatttttgtgtagctgggtattcagaggttgttgtaatataaatcaagtactatgcaaaatttaatgtagaccaagaaatgagggtagcattgcctagtttgagtccaaggtttgagaagttatgcagtatgcaacagatatgca

SEQ ID NO: 93417 - DNA, 2158 bp, Homo sapiens
aaatattttaaaaatacattttctagtacagataatgtacacagcacaatttaaattaaaaattttaaaatttaaacttaaaaaataaattaaatataaattaaaaattttaaaagtagcaaaggaaaataaggaaaagtaatttttccaccttgtgccccagccactactcactcctactacctagagataaacactgctgcaactcttttgtgcactagaggcattctatgaatataaagcaaatatgtacatatggcattttaaagttatcaaccatatgttcacactggtatctctaagctcaatcagtcccataacatgtttcattctagttttctcccactccaaatttgtgactcccatcttcaaaattttcctcaatacattttcttatttgatcaattcccaggcgcataaacaatctcttgggcctttgtccttctcttttggggatgtccctggcatcttgcttggctctggcaccccatgctaacctgctgccccctctgccccttccccatgtgaatgctcttcccatccacactgggctcagacacagagttggcagataaaatataggacatccaattaaatttgaatttcaaataaacggtaattattttatataggtatgtctcaaatattgcatgggatatacttgtactaaaaattactcactgtttatctgaaattcaaatttaacagggcttcctgtatttttatttgctaaatctggcaaccttacatgctgggccacccatcaccaccataccttagcacagaaccctcttcatcttactggagttttaacgtgtgaaactgagcagccctcctccccactgtgtcttgctcggccctgacgaatagcttttgggctgaagtgttagggaagggattgaaaggacagggaaagggacaaggagaaagtgggaagggtaagaaggaaagaaggaaggagacaagaagaaaagtgagaggaagaggaagaatgcattacatttttaaaatctagatttatatttttttaacctcacctaatctcacctatatctattttttaacctcacctaaactgtatacagtgtaatggctttaaaaccccacagagccaggcagatcgctagatatcaggagtctgagaacagccagggcaagacgatgaaacctcatctctaaaaaaatacaaaaattcaccatgggtgatggcttatgcctgtagtcccagctacttgggggacagaggcaggaggattgcatgggtctaggaggtggaggctgcagtgaacaactatctcaccactgtactccagcctgggtgacccagtgagaccctgtctaaaaataaataataataataaataaattaaaccccacatggacaaaaatgccacctaaagtcaaggaatatgaaattataacaagcctaactcagtgaatactaagttactaagtccatagaaactatactggtgaagtaagtttgaaaatttgggaggattatgaaggtctgttttaggcaaaattttttattgatgtttactacctccttactcagaaaaacaaacaaacaaaaaaccctgaaaaacaacaatatcttatgtagaaaaaaaaatcttgggagaactagccttcttttgatgattgcaatgtgggaacataygcagtataaataacatagaaagactttaaagtctcctcatgcaaaccttgccctctttgtaagttgaatattacctttcagaaaggagtaaaaatgaaacgttgggtttaaatgattcctttggtcaaaagcagcatcttggctttttacatacttattacctatagataaaacaattaatttcaaagcacaggtatattcaaagtaaatgcttttccagggtgattttgtttttgttttttaattttttggttttgttgttttctttttgttctagcccgaagtggacaaaagcaagtgaaggcattcaaacaaatcattcaaagttggaaacagggtttgatgggacatctatagcatgtagaaatatttatgaaaaatggggaaaggcctgcagggagcacagtggggcgattccttataaaatcacttggaagtgctgggggtaagtgatgtaagcatgagggaggctggaactcgcttgaaaaggcatac

SEQ ID NO: 93418 - DNA, 1421 bp, Homo sapiens
cacaactgaaaacacactcactggggatgtggggcaactgacattcttgtactttattggtgggagtataaactggaaaaatacctataaggggacaaattggcagtatctagtaaaattaccaatgcatgtacgctttgctgcaggaattcctctttcatcaattcatgcaacttatacttgctcccaattcaaatcacattggtctaaagttatttattactaaatcgtttaatagtagatgacttcaaaacttaacatacttaccagaaggggactgctaaataaactatggaacagccaaatactatgtaatttttaaaatttktattttaaataaaattttaatttaaatttaaatttttaaatgaagaaactatctttataattatatttagctatctccaaaacatagtaagtggacagaaaaaaaaaggcaaggtaaaacaactgtgtatatagtatactataaataatgtttaaagaaaatgaaaaaagaatacttatgcttgcatgtgcataaaatatatctggaagggctgcgcatagtggcttatgcctgtaatcccaacgctttgggaggttgaagcaggaggatcacttaagtccaggagttcaaaaccagcctggacaacatggtaggatcctgtctctacaaaaaaataacataaaatatagaacaaaaattagctgggcatggtggcgtgtgcctatagtcccagctactagtgaagctaaaattaggaggatcacttgagcctggggaggtcaaggctgcagtgagccgtgatcataccactgcactctagcctgggtgacagagcgctgccttgtttgtaaaaagaaaattaaaaataaaatatttctggaaggatgcccaagacactaaacattggttgcactcaggtagctcggaggagggagaattttccctgtaaacctttttatgtctttttactttggagctctgtaaatccctgaccttttcaaaaataaaaacaatttcctaacaacagaaaacaaaaaactgtcggttgactttcaaaccaagcttgaaaagaaaacatcatattttaattaggggctagtctgggactgggagttggaaattgtacccactggaacgtgggccactaaatggcaaaaagaaaaaaaacacagttaaatttccctgtaggggcaaaatatttcacatccaattaaagccaacttactatagctggtcaaattaaggccagtttcatcttacactcaggcttcactgtcctgatgagctggtctctgaaatcctgaggagcagactctggaggctgggcatgtcagggcccctgagcctaatggccccagtgtcagcccaagatgggctctcggatgtgactctcagggggaaatccagctccccacagcaactgtgtgaccct

SEQ ID NO: 93419 - DNA, 688 bp, Homo sapiens
atcttcatgtgaaacaaagaaacaaaccttgcaatgggtatgagaatgaattagcaagcagagactgcttcatttatcttcatctgctaggtcctagcatacagttggtgtcaagagatttttgctgaatgaggagaatcttcgtcaactccggtaattcttgattttatgaaaaattaccactgaaaaggatcagatgaagtttttttcctcctagccaaattctctagaaaatcatatcaccaactagttcttcggaattttaacttttacttaaatacttttacctatttaaggtgtacagcatgaattttttttttttttagatgragttttgctcttgttgtccaggctggagtgcaatggcacaatcttggctcactgcaacctctgcctcccaggttcaagcgattctcctgcctcagcctccctagtagctgggattttaggcatgtgcaaccatgcccggctaattttttatttttagtagagacggggtttctccatgttggtcaggctggtcttgaactcccaacttcaggtgatctgcccgcctcagcttcccaaagtgctgggattataggcatgagccaccgcacccagctagcataattttttttttttttaatagacagggtctcattcagttgcccaggctggagtgcagtggcgtgatgatagctcactg

SEQ ID NO: 93420 - DNA, 688 bp, Homo sapiens
atcttcatgtgaaacaaagaaacaaaccttgcaatgggtatgagaatgaattagcaagcagagactgcttcatttatcttcatctgctaggtcctagcatacagttggtgtcaagagatttttgctgaatgaggagaatcttcgtcaactccggtaattcttgattttatgaaaaattaccactgaaaaggatcagatgaagtttttttcctcctagccaaattctctagaaaatcatatcaccaactagttcttcggaattttaacttttacttaaatacttttacctatttaaggtgtacagcatgaattttttttttttttagatgaagttttgctcttgttgtccaggctggagtgcaatggcacaatcttggctcactgcaacctctgcctcccaggttcaagcgattctcctgcctcagcctccctagtagctgggattttaggcatgtgcaaccatgcccggctaattttttatttttagtagagacggggtttctccatgttggtcaggctgstcttgaactcccaacttcaggtgatctgcccgcctcagcttcccaaagtgctgggattataggcatgagccaccgcacccagctagcataattttttttttttttaatagacagggtctcattcagttgcccaggctggagtgcagtggcgtgatgatagctcactg

SEQ ID NO: 93421 - DNA, 762 bp, Homo sapiens
  misc_feature (1)...(762): n = A,T,C or G
caaattatttcaccaccttcacttcccataaggtggctagactcagtaacataagacttgataactttgaactctcccttcaggtcccagaaaagaagtgatcattttgattctcctgagtgtcatttggaaatgtttccacattgtgataaataatgtcaaccaattccccaatccaaaaaagtgtaataactatgacttcttggctctgtcaaagattgtccaacaaaatgaaacatctaggaggtcattctgctcccaagatctgatctgcaagtacatctttgaggctgattttcttaggaagagagaataattcacagtgccagggacrtaagtttcttaaagatatgctgtctctggtaagctccagagctttcctttggccacaggtgggacacttcagagctgctctccccaggtgactatgaacatagagannnnnnnnnnnnnnnnnnnnnnnnnnnnnnnnnnnnnnnnnnnnnnnnnnnnnnnnnnnnnnnnnnnnnnnnnnnnnnnnnnnnnnnnnnnnnnnnnnnnagctgagtatagtaaggctgaaaccttctggactgcattctcagatttggcattcttagtcacaggatgagataggaggtcatttttactagtaccacaagatacaagtcgtagagaccctgctgataaaacagggtgtggtaaaaaagccagcccaaacccaccaaaaccaagatggcgatgaaagtgacatctgattgttctcacttctcattatacctt

SEQ ID NO: 93422 - DNA, 605 bp, Homo sapiens
tatgagatggagtctcaccgtgttgcccaggctggagtgcagtggcgtgatctcggctcactgcaaactctgcctcccaggttcaaccctttctcctgcctcagcctcccgagtagctaggattacaggtacccaccaccactcccgtctaattgttgtatttttagtagaaaaatacaatacatataatttttgtatttttagtagagatggagtttcaccatactggccagctgatctcaaactcctgaccttgtgatcttcccaaagtggatccccctcagcctcccaaagtgctgggattacaggcatcagccactgcgcccggccggagtcaactcttgattattcaaggttgactctgagaattggtgtgatccttgcctcttttgttttttcttcctttcttgtagtcccttccatgaaagaactttcaagctcagggagaagaaawaaaaggagagcaggcaatttggtttccaattcattgctcaattagtgttttgggagatggggatgtagggccagattgaaattgtcattaatcagtatcacccgtatcttgtctcctgagtagctttccataaaaatgggggtcttatgca

SEQ ID NO: 93423 - DNA, 2299 bp, Homo sapiens
caaacttatgtatcttaagactcaatataacccccttgttataactaaggaatcaacgttttkattccccaaaaacacaagtgaggaatgtaatgcccaacctggtttttactaactctgtttttagactctcccttttcctttaatcacctagccttgtctccacctgaattgactctcccttagctaaaagagccagacagactccatcttggctctttcactggcagccccttcctcaaggacttaacttgtgcaagctgactcccagcacatccaagaatgcaattaactgataagatactgtggcaagctatatccacagttcccaagaattcgtctgattgataacgcccaaagccccaggtctatcaccttgtaatagtcttaaagcccctgcacctggaactgtttactttcctgtaaccatttatccttttaactttttgactactttacttctgtaaaattgttttaactagatccacccccccatccccttcctaaaccaaagtataaaagttaatcaagccctttccttgaagctgagaaaattttaagcgttagccgtcttccagtcaccagctaatgaaagactcttaatttgtctcaaagtgttgcgttttctctaactcgctcaagtacaacaatctcctgtagtgcttggcacttagtatctattctgttacctatggaatgaatgaatggatatattataccctctgcctccaagttgtcttatcatttatgtttctctgtcataaacataattcaacatattccttttggttgttctcagactttcttagctttcttataattatatgccattcttgtttttcatgacgttttacatcgtgaatttcacttagaagatgattattttgggatgattccttcacctaaaagaagctaagggtaagtgcatttagagagagattgttgagaaccctttagccctaatgcatttattcagagtgcactggactatgtctttgcagaacttgtcaaattgttgtggtcctaatgtccttttagagtgttgttctttgctgatttgtagtttctaagcaacattgttaggattatggatttccaactccacttaacaactggtaaaaatgatacgtgggataaactctagtctaaatttgttcttagtagacatgagtagcctctggttctgcacactcaggcttagcctaaaagagggttaaaataacactttgacaacaagagctgtgggcatggaggaatgttatccattgaaatgtttccttgattttaataatcttgactcaaatgagctcatgttatttttatttttaaagagcttagcacacaatctggcacagaatgaatgttcgataagtgttagctattattattgttgttattgttaacaaagcattttcctttgcatcttcttccttaggtctttctttcttatgattctttgatatcccattacatgcaaatacatcttactgaaaagatctgtgaacaaatggttgactcatgctttttattttgtgcactgttaccctttggtctttttgcctgcatgaaggctgttgtcactcactattgctatgggttgtgttgcagcactttcccattacactatttgtaccatcttcatcccaaatcagccctgtctcttgtttatcttaatatggtcaatcagttgctacagcttcctcacacactcatagccaaagactccctgtttgactaggggattacaaaaaacaacaatcaccacaataataacagctaatatttgttgactgctttctctaggctaggctgtgtggcacttaacatctgttatgtcatttaattaacacaataaattgatgaggtagaaatcagtttgtaaattacagtgttctgctaaggtaatgctactgtcatcccccaaattttggtcaagtcttgtttcagtgctctagccatgtcatagctttgttactgggtatcagtgcatagatatattgatactaggtctggggttgaaagagggagctatcagctcttagaggccagaggggacatgacatgataatgaacaagaaacacaagggaaagtgtattagttttctgttgctgttataacaaatcaccacaaatttagctatttaaaacaacataaatgtgttacagttctgtaggtcagagtctggtgtggtgtaggtcagagtctggtgttaaaataaactaaaactttattttagtttgacctaaaataaaggtcagactttattttatttgggccaaaataaagatgtcagcaggg

SEQ ID NO: 93424 - DNA, 1500 bp, Homo sapiens
cgcttagttggcaattagtcagacacggccttaccctcttctgtagctggctcaagtgcattagacctgacctctgtcactcaaagcataagctttatgatgtcagggattcatgaaccacatcttttatccctccccagcacacatacagtgtgtgcacacctatgcacacatacacacacaccctcacttcccctcctatgtcccctgcctccatgatgagcatcgtcacgctctcagttgcactccatacccattccttcaggtcacaactcagacgtcacttattccagaaagccctcctccgaccacgccaccccctgcaacagcctacatcaggcgcccgggtttgctccttccagggaaccccatgcgatctctctcatgggatgtattacactgctcactggccattgattggtatcactcactaaatgatctgtgactgagggagggatgccggctgctttactgtcacaggaaaggcattcaataaacgcttgttgaatgatttaataaatagagctgtggatgaatggctagatggatgcgcctgagcgaaaccaaactggaaaggaaaacctgttgcaacataaccgcaccatgctcccagcaccacactgaggtcacgtgggggctctatgctgtttggggtcacctgaggcatattatgtctctttggagtgagtgatatactttgataatcatctcaatggtttagtgtctgggtccttatgggtttgggtttggtggtgaggccaaagctgggggttaaattaaggtaacgctaaggcataggattgggggtgaacatagagctggcctgaggttgtgaatagggttggggatgggatgaggctgaagttgagactaagggtagaaatgagaataagggttgttctttgtggctcaatcccagcactttgggaggccgaggcaggcagatcacttgaggccatgagttcgagaacagcgtgggcaacataatgaaaaccccatctctacaaaaaagacaaaaattagccaggcatggcagcatgcacctgtagtccctggtacttgggaggctgagctgggaggattgcttgagcccaggaggttgaggctgtagtgagtcatgatcataccactgctctccagcctgcgtaacagagtgagatcctattaaaaaaaaaaaaaagaaaagaaaggaaggaaggaaggaaggaaagaaagaaagagaaaagagagaggaaggaaggaagggaaagaaaaagaaagaaaggaaggaaggaaggaaggaagraaggaaggaaggaaggaaggaaagaaaagaaaaagaaaaaagaaatgaggataaggctgtggctaaggacaggctgaggccaggctaataattgggacagggctggatctggggatgaatgtgaggttgggctggggcctgggctagggttggagagacggctggagctgggaagtagatggggctgggatatagttagagatggggctccctct

SEQ ID NO: 93425 - DNA, 424 bp, Homo sapiens
tatgtatgtataggaaaagaaaagacatcggatacatggggtttggtactatttgcagttttaggcatctactgggcatgatccactgatcaatggtcttggaacgtgtctgccatggataaggggagtctactgtattgattctgattaatgcctgagaatgggatgttatttcattcacacggaagcctttttcctttcttccattctttcttcctttttaaaaaaatctccttcagaaaaaaaagcaaccctggatatatgagacagggggcagggtgacacaggggaaataaaccacagtcctttacctggatctactcagaagactctgtagctactatttccccaacatgtaccatgccatgtatttatttgaatastcatgtccttgtgactcaaagttgatgttctacaggtcgtg

SEQ ID NO: 93426 - DNA, 763 bp, Homo sapiens
gttcacagtggtattttctgacttgacccctaattctggcagagttcagagttcgtgagtccccaaacagtgactatgctcaccacttcctctcctttgacttccttctctgtctgcagctccaaattcattgaagggctcaaggctggtgtcaggggagcctggaggagctgtcaccatccagtgccattatgccccctcatctgtcaacaggcaccagaggaagtactggtgccgtctggggcccccaagatggatctgccagaccattgtgtccaccaaccagtatactcaccatcgctatcgtgaccgtgtggccctcacagactttccacagagaggcttgtttgtggtgaggctgtcccaactgtccccggatgacatcggatgctacctctgcggcattggaagtgaaaacaacatgctgttcttaagcatgaatctgaccatctctgcaggtatgagctgayggctgatgggccaagcttggtgaagcacgttctaggaaggagaaagtgggagagaagcctcagagacccagaagggcttgaaacattagggaagtgacaatgaaaagctggggcaaggcaaagactttaagaagtaggctttcatttcagaagaaggctgccttcaaaaaaaaggaagattttaggaaaaacttccccagtgaatgcatgtacactctcccacctgtgtcccccaaatgtcatgaaatatatatttggagacggctccaagaatgggatgacgtggcttctta

SEQ ID NO: 93427 - DNA, 763 bp, Homo sapiens
gttcacagtggtattttctgacttgacccctaattctggcagagttcagagttcgtgagtccccaaacagtgactatgctcaccacttcctctcctttgacttccttctctgtctgcagctccaaattcattgaagggctcaaggctggtgtcaggggagcctggaggagctgtcaccatccagtgccattatgccccctcatctgtcaacaggcaccagaggaagtactggtgccgtctggggcccccaagatggatctgccagaccattgtgtccaccaaccagtatactcaccatcgctatcgtgaccgtgtggccctcacagactttccacagagaggcttgtttgtggtgaggctgtcccaactgtccccggatgacatcggatgctacctctgcggcattggaagtgaaaacaacatgctgttcttaagcatgaatctgaccatctctgcaggtatgagctgacggctgatgggccaagcttggtgaagcacgttctaggaaggagaaagtgggagagaagcctcagagacccagaagggcttgaaacattagggaagtgacaatgaaaagctggggcaaggcaaagactttaagaagtaggctttcatttcagaagaaggctgccttcaaaaaaaaggaagattttaggaaaaacttccccagtgaatgcatgtacactctcccacctgtgtcccccaaatgtcatgaaatatatatttggagacggctccaagaatgggatgaygtggcttctta

SEQ ID NO: 93428 - DNA, 708 bp, Homo sapiens
aaatggttaactgatttttttaatttaatggatttatctatgaattatgtaatatctactgccattattcagaagaatcatctttcctgtttttaatgggcatataatatctaaggatccaaattctacctggattatatttcattaatttgaaaatgaattaatcccattctacttttacacataaaaaggattccatccatatatctgaaaataagaccatgctaatttgtctaatagttaatgcactgcaatcctgtaaatgttacagtaaaataccatgccaaaaataggcacagtttcagatgcttcagcatatgaggcatggatacttcaatsatttgcaaagggttctgctcagtagactgaatggaaaagatggtcattgctctttaatgtaattttgcagctctcatcaaagaaaatatctccatgaaatttattggtaactgtttatctttgatcagtgcaaactgaagtcaaatatacaaggtaaacacacataaagataagttcacacatttctgtgaattttctaaatgtacacacttctgcaaattctctaaattcacaaataacaaatttgcatgcatgcaagcatatgtgcacatgtgcacacacatgacataaaatatgagagggtggaggtaatttttcccccttaatactatactgataagtgaatgctatgggaacagtttggctctc

SEQ ID NO: 93429 - DNA, 1901 bp, Homo sapiens
ctgtaatcccagctactcagaaggctgaggcaggagaatcgcttgaagccaggaaacagaggttgcagagagccaagatcgcgccattgcgctccagcctgggtgacaaagtgaggctctgtctcaaataaataaataaataaataaataaataaataaataaataaataaaaatacagaagtagccaggcatggcagtgcatgcctgtaatctcagctactctggaggttgaggcaggagaatcgcttgaacctgggaggcagaggttgtggtgagccaacatggtgccattgcactccagcctgggaaacaagagcaaaactccatctcaaaaaaaaaaaaaaaagaagaaaaaaagttgaaggaggtgttcttttgtgcttttcttttccttcttgtgaggactcaccaagagatgccatcttggcagcagagagcagctctcaccagacacaaaatctgctagcaccttgaccttggacttcccctcttccagaactgtgagaaaagaaatttctgtgatttatcagtttcccagtttcaggtattttgttttagcagtacagactgaaacaacagaaaaaaaagacagtgacattgcattcaagactgtccacatctactagctttacagtctcctccataaataaacactcctaaagcttgcttctccctctggtctaagaaggcattttgttgttcaaatgggatgcatactctccctgctattccccttatcattccctttatcttcctatgaaaactatagcttatcctctgagctattattcaaattcagctctgtgcaacttttctttatgcacataagaaaagttgggtgttcatttttgtgttttcatactaccatatgaatatttctaatattgcctttcacacatcagtttgtctttattgactacgttatttattattagagggctatgaagatgtcgtagagcaaacattgagctttattcatatctctagtgttttgtacaatgtctggaatatcgtagatcttcaaaatcattttaagtgcatggtatacactcactggttttacctttaaaattgactgtttgaaataagcatatttttacttaagcagaggatccaagtgggctttagaggaagtcttgattcaacatataccttctaaaactccctcttgtgttatagtcatactctactgatctctgtctttatgacacacatttctttaggtatcaaatgtagaatttatctcagaaatgcttaggaatctagactttttctccgtctaaactcaccagttcttgcagagctgttggtattatgttcttaaaaaagaaatttgacaaagtccttcccctgcttaaagattctttcatgaaagtaaaaatatgtacaccccacttctaaatgcaaatctttttacaatctatctctagagatcttcgtcagtcttaatttcaatcatcaccctaaactacactcaactttgcaccttgcactcctggagagaaacaaggaagatctttcactcttctacatctttgcattcattcattcttacatttgactaaaatgtccttcattcattcacctggaacattagttgtgtccwaatctctggttcaaattcattgcatttcattccttcattcattcattcactcattaaatctattaattgaacaagtattatcttcaattccctgtgttgctatgcctttccatttctccacatctttaccaggtgcatttaatcacagcaccatctccccctccatactcaggcccagaccacccagaaaactctagtcccattcctatttcttatgcttaattccttttcttcatgtgttatttcagagtgattctttcctgtttcatcatgggcctccctttattagctttt

SEQ ID NO: 93430 - DNA, 602 bp, Homo sapiens
acagcctgggactgaccctctgtcctgtgggtctttgcctctgggctctctgctctgcatttcttgaaaccattattatttatcatttttctcacactcttttgcgtatggctcctattgcactcaaaatgtttttgagattcatccatgttgttttgtgtgtcaaaagtttgttcctttagccattccatggaatraatgtatcacattcttgtattgatagatatttgaatgtatatttgaatgtatattgatagatatttgaatacaagaatgtatccattcttgtattgatagatatttgaatgtttccagtttttcctattacgaataaaactgctatggacattcttgtatatatcattttctgcacatatgttttaatttctcttggataaatgcttaggaattactgagtcatagaataggtagttgtttagttctgtaagaatatgccagacattttttcccaaagtgtttatactattgtacattccaaccattaatgtatgaaggtgagaaagcttttgctacttccaaagaggcctctctatatacatgtaattttttctaactggagacaggctgatgacttcagggac

SEQ ID NO: 93431 - DNA, 3002 bp, Homo sapiens
ttcaggctcctcagcatgagaataggacactgtgagagatattcttcaggaggcctgaaggctgatcatgatagagattccttggtttttgtcccagaaactctgggtaaacttccctattctggtagatcgttatcccaatatcatttctcccaagtttgtgcaaatggttatgccatatttttccaatcgatttaaagcaagtgcccccaaatggttgctaggagaaaaactgcactattcagccctgtctcatcaaatactcagattgttcatggtagcgaggattttagacgctgaaattagagtgaaggatgaaatctacaagatctacagaattgagacaaaatcagagttgtgtgaatttgtcacatctgcccagatccaacatcttgagagtaggattagggtgccacaggcagggcctgagactaggaagagagccttgctcactgacccatcccttgtctgggcttccaagtggaactagagtttcaytcaacctacatgtgcctataggtcctccctgtggcaatgacatctctcagctcagtaagggccacttgcagtaggaatatgaccctaaccagaagactcagtggatccttatcaccttcatagaaaggtactcaccatccatgtcaacagccaagccaacacgctgttgctccaatacgtaaaaggcacttctgtagggctggcatgggtcagtcagtccaagataaactgaaggagtcgaataccatctatccagtgagtcctgcaagacttcaggctctttctcagccagcagctccctgctgagcctggaaaagtaggaaaaagtaaagaataagccagggggaatcagaaaccacacagccccagctagatttcatggctaacataaggaactgtttaaaaagaaaaaggacagatccattaatgaggtaatgaattattgcctttatgttgggatagaccagggccaggtagaaaagaatgaaagagaaagacagggagagggagagagagagagaggagaaagtgagctcagcgaattggccgggtgacacactgatgaaggggtcaaaggacactctgagttagtgccctcgggacacacagcgaacagtgatcatgaaaagagtgggctcaataattttccataaacttgctcaagattccatgcagttgccatacggcctttgaggtatggtcaacctatagtaagttagtaaatgacaaggggaggaagaaatggaaacctaaacatctactgcaatgaaaaccaacagcaatgtcagtgggagtaatttaaccttcgtggaaaacatgaaattgaacacactcttgttttccctggacctggcatctccaggtgtcaacacagaattaagcatccataattgctcaaagttacctggggcatgatgggtcttggtcttcttccacttcttggtacttttcaatttctgcaataagttcagacatggacagacatatgaagctggttctcctacacacataacaatccactgtctaatcctcacacagggacttcaggctcctcagcatgagaataggacactgtgagagatattcttcaggaggcctgaaggctgatcatgatagagattccttggtttttgtcccagaaactctgggtaaacttccctattctggtagatcgttatcccaatatcatttctcccaagtttgtgcaaatggttatgccatatttttccaatcgatttaaagcaaatgcccccaaatggttgctaggagaaaaactgcactattcagccctgtctcatcaaatactcagattgttcatggtagcgaggattttagacgctgaaattagagtgaaggatgaaatctacaagatctacagaattcagacaaaatcagagttgtgtgaatttgtcacatctgcccagatccaacatcttgagagtaggattagggtgccacaggcagggcctgagactaggaagagagccttgctcactgacccatcccttgtctgggcttccaagtggaactagagtttcactcaacctacatgtgcctataggtcctccctgtggcaatgacatctctcagctcagtaagggccacttgcagtaggaatatgaccctaaccagaagactcagtggatccttatcaccttcatagaaaggtactcaccatccatgtcaacagccaagccaacacgctgttgctccaatacgtaaaaggcacttctgtagggctggcatgggtcagtcagtccaagataaactgaaggagtcgaataccatctatccagtgagtcctgcaagacttcaggctctttctcagccagcagctccctgctgagcctggaaaagtgggaaaaagtaaagaataagccagggggaatcagaaatcacacagccccagctagatttcatggctaacataaggaagtggttagaaaagaaaaaggacagatccattaatgaggtaacaaattattgcctttatgttgggatagaacagggccaggtagaaaacaatgaaagagaaagacagagagagagagacagagacagagacagagacagagatagagacagagagaaagtgagctagtgaattggccaggtgacatactggtaagggagtcaaaggacactctgagttagtgccctcatgacacacagcaaactgtgatcatgaaaagagtgagctcaatagttttccataaaatatgctcaaaattcgatgcagtggccatgagagtacagcttttgaagtatggtcaacctatggtacgttactaaatgataaggggaggaagaaatggaaacctaaacatctactgcaatgaaaaccaacagcaatgacagtaggagtaattcagccttcgttgaaaacatgacatcaaacacactctggtttccctgaatctgttgcctccaggtgttaacacagaattaagcatccacaattgctgaaagttacctggggcatggtgggttttgatcttcttccc

SEQ ID NO: 93432 - DNA, 596 bp, Homo sapiens
attattgagcacagtcttttcatgatcactgtatgctgtgtgtcctgagggcactaactcagagtgtcctgttactccctcatcagtgtgtcacctggacaattcactgagctcgttttctctctctctctctctctttctctctcagtgtgtgcgtgtgtctttgtgtgtgtgtttgtgtgtgtgtgtgtgtgtgtgtgtgtgtctgtctttctctttcattcttttccatttggccctgttctgtcccaacatgaaggcaataatttgttacctcattaatggatctatccttttasttttttaaccacttccttatgctacccatgaaacctagttggggctctgttgtgtctgatttcccctggcttattctttactttttcctccttttccaggctcagcagggagctgctggaggtagtagagcctgaagtcttgcaggactcactggatagatgttattcaactccttccagttgtcttgaacagcctgactcctgccagccctacagaagttccttttatgcattggaggaaaaacatgttggcttttctcttgacatgggaggtgagtacgtttctatgaaggtgat

SEQ ID NO: 93433 - DNA, 1864 bp, Homo sapiens
gctatgacactaaacctaggcctgccttgattttaaaaaagatagcaacattcaccaccacaattaccatttattggcccttcattgtgtgcctaacattatgttgcacattgtattcatatttttctccatcactgtgtgagctcaacagctataagaagtggctatacatgcagcaaatacctttggtgccctctctgtctccttgcctactccaggaggtctcatgcaggccagatggcatgacagctgtgtccctttgcctgagagggtgccctcgcctcctgagaagatggtaaattgagggctaagctagaggtgctcagtccaggagtgatcctcaatctttgaggggtaggaatttctgggaaaatttcttgacttcctattccccatggtgggacaattctggggtaggttcccaggtctcccagagggtcttcaaaaagattgacagcagtggcctagtggtaacctcatggcagccactttattggtttgtctcctctccctcctgtctcacttaccattccctctcattgctctctgggatttctgcccaagcgtgttctcaatccttgtgtcatgatttgtccttgaaggaatctccaccaacatactgcacgattgtcctcccagaacaggagagaaagagagctttgggaggctgacatgcatgaggacgtgtagctggtgagtggccagcaggacatgaatcagcaccatcacttatgtttccatcagaatcagtgtgggcatatttttctagttagttaatcaaattaattaatgtgtagcttttttgaaaatgatttaagcctttagaacatatcctaatacttccttcttctatcaaatctatttgtcctgtgtcacattccattgagactcaggatttaaccagcaatataattagatayaaaatataacaaattaatcaatattgcaatgctatagctgaaagtgatgaaaggtagtatgcctctagcgctattcatactttacactagacttttccaattgcagtgccttaatttaaaggaagaactctgttagtagaatttcaggcatctaagtagtcaaggaaaccccctctccatgctgttcaatggacttttcctgagccccttacacatctttccatttgctaactctacctgctgatactgatgctttatctaatcatcaatgggattcctcttgaaatggaaggcaaagttcaaccctgaatgtgtgctggcctggctccttcgcagtgacaaaaacatgcaactgtctcttctttacctctctggctcatcagggaacatggaggaactgtttacgtgcctttgtttcccagcctgtgaaaggaagataacacttgctccaacatgcttttcagcgggtgatgtgaagataaatgtgataacgtctacaaagtcctccaaattctcgggatgaaatgtgctatgtaaatggaacacagccccgttatgattgaagtttaatgcagcagctctcaggcctatacagggaatgcagtctggctggaaggtaggattgctgagttgtcccctctaatcattgtccctgtggattcaccatccagcagcctcatcttagaaatgcccatcctttccattcattcaatttggtttttattttcaagagaccagttacacagttacgtttttccctttatattcttcagctatgggggtcaggttttagaaaacacgtatgtacaaacatacattgccacctaattgatgacctaactcctggagggcctaaggactagatcagcaactagacatttagatataaattctgtgctgaaaacaatattcttgatcctctgcatgtttgtgtgtggcctgac

SEQ ID NO: 93434 - DNA, 1864 bp, Homo sapiens
gctatgacactaaacctaggcctgccttgattttaaaaaagatagcaacattcaccaccacaattaccatttattggcccttcattgtgtgcctaacattatgttgcacattgtattcatatttttctccatcactgtgtgagctcaacagctataagaagtggctatacatgcagcaaatacctttggtgccctctctgtctccttgcctactccaggaggtctcatgcaggccagatggcatgacagctgtgtccctttgcctgagagggtgccctcgcctcctgagaagatggtaaattgagggctaagctagaggtgctcagtccaggagtgatcctcaatctttgaggggtaggaatttctgggaaaatttcttgacttcctattccccatggtgggacaattctggggtaggttcccaggtctcccagagggtcttcaaaaagattgacagcagtggcctagtggtaacctcatggcagccactttattggtttgtctcctctccctcctgtctcacttaccattccctctcattgctctctgggatttctgcccaagcgtgttctcaatccttgtgtcatgatttgtccttgaaggaatctccaccaacatactgcacgattgtcctcccagaacaggagagaaagagagctttgggaggctgacatgcatgaggacgtgtagctggtgagtggccagcaggacatgaatcagcaccatcacttatgtttccatcagaatcagtgtgggcatatttttctagttagttaatcaaattaattaatgtgtagcttttttgaaaatgatttaagcctttagaacatatcctaatacttccttcttctatcaaatctatttgtcctgtgtcacattccattgagactcaggatttaaccagcaatataattagatacaaaatataacaaattaatcaatattgcaatgctatagctgaaagtgatgaaaggtagtatgcctctagcgctattcatactttacactagacttttccaattgcagtgccttaatttaaaggaagaactctgttagtagaatttcaggcatctaagtagtcaaggaaaccccctctccatgctgttcaatggacttttcctgagccccttacacatytttccatttgctaactctacctgctgatactgatgctttatctaatcatcaatgggattcctcttgaaatggaaggcaaagttcaaccctgaatgtgtgctggcctggctccttcgcagtgacaaaaacatgcaactgtctcttctttacctctctggctcatcagggaacatggaggaactgtttacgtgcctttgtttcccagcctgtgaaaggaagataacacttgctccaacatgcttttcagcgggtgatgtgaagataaatgtgataacgtctacaaagtcctccaaattctcgggatgaaatgtgctatgtaaatggaacacagccccgttatgattgaagtttaatgcagcagctctcaggcctatacagggaatgcagtctggctggaaggtaggattgctgagttgtcccctctaatcattgtccctgtggattcaccatccagcagcctcatcttagaaatgcccatcctttccattcattcaatttggtttttattttcaagagaccagttacacagttacgtttttccctttatattcttcagctatgggggtcaggttttagaaaacacgtatgtacaaacatacattgccacctaattgatgacctaactcctggagggcctaaggactagatcagcaactagacatttagatataaattctgtgctgaaaacaatattcttgatcctctgcatgtttgtgtgtggcctgac

SEQ ID NO: 93435 - DNA, 629 bp, Homo sapiens
tcccacctcagcmtcccagagtgctgggattaccctggtgcagagttttactctttgtgtagtgccttagtataagaaactcctatcagacaaaagagtctaatgactgatttctaaataggcatatacattctaatgatcgtaggtgaaactaaatgtaataataataaaaataacagaatggtgtttagaatttctactaagtagtttgagatagcaaaaggacacattatacttttacctacctttctgagctactccctttcatgacctatttgcagccaatcgaggaacctgggatttacaaagcatttgcccaaaaaactaactgaactagtgccaacttatctaatttcctttaaactttatccaatatgtgctgaattggcacattacaagactttgagtaagtaaggaaaaagccccattcttaaatgctaaccaactaacatattcttaacttgctactagcagtttcttatctctgaaaggttagcaatagataagaaaaataaattatttttaataataacaccattgatgtattttgcacctatcagagccataactatactaataaaataattattgttttggaaacttaaatcacattgctcaccacatatctt

SEQ ID NO: 93436 - DNA, 629 bp, Homo sapiens
tcccacctcagcctcccagagtgctgggattaccctggtgcagagttttactctttgtgtagtgccttagtayaagaaactcctatcagacaaaagagtctaatgactgatttctaaataggcatatacattctaatgatcgtaggtgaaactaaatgtaataataataaaaataacagaatggtgtttagaatttctactaagtagtttgagatagcaaaaggacacattatacttttacctacctttctgagctactccctttcatgacctatttgcagccaatcgaggaacctgggatttacaaagcatttgcccaaaaaactaactgaactagtgccaacttatctaatttcctttaaactttatccaatatgtgctgaattggcacattacaagactttgagtaagtaaggaaaaagccccattcttaaatgctaaccaactaacatattcttaacttgctactagcagtttcttatctctgaaaggttagcaatagataagaaaaataaattatttttaataataacaccattgatgtattttgcacctatcagagccataactatactaataaaataattattgttttggaaacttaaatcacattgctcaccacatatctt

SEQ ID NO: 93437 - DNA, 1192 bp, Homo sapiens
gcatgtagtcccagctactcagtaggctgaggcaggaggatcgcttgagccgaggagttcaagtctgcagtgagctatggtcacgtcactgcactccagccttggctagaatgaaagggaggagtcaggatttgaactgggaccttctcaccctacatctgtgcttgaaccctgagccacctacatcctagttccccagctttgcacccacccctgcccctgcaggcagaaccactcccaagatccttctagtgagagccctgtctctccgggattcaggctgctgcgatggaagggggtggttaagaagggctgggtctgtctccagtgagatgtgggcccccaggccagctaccctctgagattgggtcccggcagatggctcagcagttacaggacattctcagagggaattagcccacccctggcctgcccctgctcctctaggctctaggagagggggcaagggcaatgcaggaacatcctctgaggcctccatctgtttccaggctgtgggaagatggtctggggctaagctgttttttatttaatgtgcgagattgaaaagtctccttttctcccctcctggagaaccgtggctttcccgactggcttatccataatcgccaagtgttttattatgttaaatctgcagcatcataaatacttatgaggaggatttacatcttggagacttatgaagaaatcataagtggggtcctgagccctcacgagtcagggagtcgggggaccggcaacctgggtactggaggcagcctctccaagagtcttcacaggactgagacctgccccagggtcttggtcttgaagctgtcctcttggccatgccctgtctccaagtagaaccccagacattasagcagctgaaagtctagactttcctaagaccctaagagcacgactgtcccctgggccactctcccttcctgggtggaagcagcagagagggaagccagtgtcctctgttcatgcctgtggaccaggcttgcagctggcacatttcatgaagcttgatgaatgttgaaaatagccctagagcccacggatggaggctctgggcaagagtggtttatgcagcagataattagcaggcgggaaggagacctgtgcgggtgaagggccatgtagggggacagaggaggggacagagcagcgttccacactgcatcgt

SEQ ID NO: 93438 - DNA, 1686 bp, Homo sapiens
aggtgccagggcccaatagcaaggcgctcccagggttcgtgctcctccggacctgcctcatccccctcttcgtgctctgtaactaccagccccgcgtccacctgaagactgtggtcttccagtccgatgtgtaccccgcactcctcagctccctgctggggctcagcaacggctacctcagcaccctggccctcctctacgggcctaagattgtgcccagggagctggctgaggccacgggagtggtgatgtccttttatgtgtgcttgggcttaacactgggctcagcctgctctaccctcctggtgcacctcatctagaagggaggacacaaggacattggtgcttcagagcctttgaagatgagaagagagtgcaggagggctgggggccatggaggaaaggcctaaagtttcacttggggacagagagcagagcacactcgggcctcatccctcccaagatgccagtgagccacgtccatgcccattccgtgcaaggcagatattccagtcatattaacagaacactcctgagacagttgaagaagaaatagcacaaatcaggggtactcccttcacagctgatggttaacattccaccttctttctagcccttcaaagatgctgccagtgttcgccctagagttattacaaagccagtgccaaaacccagccatgggctctttgcaacctcccagctgcgctcattccagctgacagcgagatgcaagcaaatgctcagctctccttaccctgaaggggtctccctggaatggaagtcccctggcatggtcagtcctcaggcccaagactcaagtgtgcacagacccctgtgttctgtgggtgaacaactgcccactaaccagactggaaaacccagaaagatgggccttccatgaatgcttcattccagagggaccagagggcctccctgtgcaagggatcaagcatgtctggcctgggttttcaaaaaaagagggatcctcatgacctggtggtctatggcctgggtcaagatgagggtctttcagtgttcctgtttacaacatgtcaaagccattggttcaagggcgtaataaatacttgcgtattcaatgtaagcctcattgatgtctctgttagagtcttaacaagcaatggcacactcagattaggcaatttgaggattttttaaaatttattattattattgagacaagatattgctctgtcacccaggctggagtgcagtggctcgatcatagctcactgcagccttgaactcctgggctccagtgatcttccagcctcagcctcctgagtagctgggactacaggtgcacaccaccatgcctcgctaatttctgtatttttaaaatttttcrtagagatggggtattactatgttgctcagcctggtctcaaattcctgagctcaagcgatcctcccacctcagcttcccaaagtgctgggattataggtgtgagccactgtgcccagcctaatttgaggatttttttttctttttttcctttttcttttcttttttttttttttgagatgaagtcttgctctgtcacccaggctggagtgcagtggctcaatctcggctcactgcaaccttgaggatgttttaagagcaggtgtaggaaccccagggggttgtgcattctatctaaaaactagtaataggccattccagct

SEQ ID NO: 93439 - DNA, 1686 bp, Homo sapiens
aggtgccagggcccaatagcaaggcgctcccagggttcgtgctcctccggacctgcctcatccccctcttcgtgctctgtaactaccagccccgcgtccacctgaagactgtggtcttccagtccgatgtgtaccccgcactcctcagctccctgctggggctcagcaacggctacctcagcaccctggccctcctctacgggcctaagattgtgcccagggagctggctgaggccacgggagtggtgatgtccttttatgtgtgcttgggcttaacactgggctcagcctgctctaccctcctggtgcacctcatctagaagggaggacacaaggacattggtgcttcagagcctttgaagatgagaagagagtgcaggagggctgggggccatggaggaaaggcctaaagtttcacttggggacagagagcagagcacactcgggcctcatccctcccaagatgccagtgagccacgtccatgcccattccgtgcaaggcagatattccagtcatattaacagaacactcctgagacagttgaagaagaaatagcacaaatcaggggtactcccttcacagctgatggttaacattccaccttctttctagcccttcaaagatgctgccagtgttcgccctagagttattacaaagccagtgccaaaacccagccatgggctctttgcaacctcccagctgcgctcattccagctgacagcgagatgcaagcaaatgctcagctctccttaccctgaaggggtctccctggaatggaagtcccctggcatggtcagtcctcaggcccaagactcaagtgtgcacagacccctgtgttctgtgggtgaacaactgcccactaaccagactggaaaacccagaaagatgggccttccatgaatgcttcattccagagggaccagagggcctccctgtgcaagggatcaagcatgtctggcctgggttttcaaaaaaagagggatcctcatgacctggtggtctatggcctgggtcaagatgagggtctttcagtgttcctgtttacaacatgtcaaagccattggttcaagggcgtaataaatacttgcgtattcaatgtaagcctcattgatgtctctgttagagtcttaacaagcaatggcacactcagattaggcaatttgaggattttttaaaatttattattattattgagacaagatattgctctgtcacccaggctggagtgcagtggctcgatcatagctcactgcagccttgaactcctgggctccagtgatcttccagcctcagcctcctgagtagctgggactacaggtgcacaccaccatgcctcgctaatttctgtatttttaaaatttttcatagagatggggtattactatgttgctcagcctggtctcaaattcctgagctcaagcgatcctcccacctcagcttcccaaagtgctgggattataggtgtgagccactgtgcccagcctaatttgaggatttttttttctttttttcctttttcttttyttttttttttttttgagatgaagtcttgctctgtcacccaggctggagtgcagtggctcaatctcggctcactgcaaccttgaggatgttttaagagcaggtgtaggaaccccagggggttgtgcattctatctaaaaactagtaataggccattccagct

SEQ ID NO: 93440 - DNA, 633 bp, Homo sapiens
atttattttttgagacagagtctcactctgtcaccccaggctggagtgcagtagcttgatcttgactcattgcaacctctgcctcccggattcaagcaattctcgtgcctcagcctcccatgtagctgggactactggcatgtgccaccacacccagctaatttttgtayttttagtagagacagggtttcgccatgttggccaggctagttctgaactcctggcctcaagtgatccgcccatctcagcctcccaatgtgctgagattacaggcatgagccactgcagttggtaaagacccaatctcaaaaaaaagagagttgtatctaggttacagcagtcctgattgttgaatcaatgcatcagcctgagtgatagcgatggggaaccattgaaggatttccatcacaagctaatcaattagagccatactttagagagagtgggcagggctggaaggttaggctagaggaggaaagcaggaagcaatgttctgtctgcaagaggcctagcgtgtctcacttctgcatgtaggcatgtgtctcatgtgtgtgatgatgagcactctgtgtattaacttgggagagctagtacagtaataatcagcatgaactgcaggagtcaggcagacct

SEQ ID NO: 93441 - DNA, 631 bp, Homo sapiens
ggatccgttgaggtcctgctgtgtgtttccctctagatccctcgtttgcatgggtctctcccttcctctgggtctctgcctctgatcaccacccctgtgtgagcgtttctcacaaagtctctgctccggcgtgtgtctctcagggtttctctttggtgtgtctctaaatcgctgaccatttctggcccatgttcatctgtgttctgggatcttagactccaagaaccctccaatcctttgtgttgtttctgcctcccttcaccttcctgaccgggcagtcctgggaaaggagagccacctccctggagagggtcaccaggagctgccagatcctgggccagcctgacccagcctggaccacacttcctgctttggtctggccgctgtggccatgggggttccatcagtcatcagttccacccaccagagcagctcctctgccggggccagcaacagtggggatggggacacttgggtgccctagggaggaccagagcatctgargacactgtgcctagccccagcatagggaactcaggttcttgtctcagggaggagtgactgtagtggactagaagaaacagcactgcccttcaaatcaggccctggcaggggaatttgggagggtggt

SEQ ID NO: 93442 - DNA, 757 bp, Homo sapiens
gggttcgagaccagcctggccaacatgaagaaaccccatcactgctgaaaatacaaaaattaggggtggtggcacgcatctgtaatcccagctactcgagaggctgagacatgagaatcacttgaacccaggaggcggaggttacagtgagatgagatcacgccgctgcactccagcctggacgacagagtgaaactgtgtctcaaaaaaaaaaaaaaagttttcttctctctataactagacccctccccaaaggtgaacctgttagcagtttgtcccatgctcattctctgttggcgataataacggttagctttggagagcccttgactaagtgtcaggtactcttggaagcacttttccakgtattaactcatttaatcctaacagccctatgaagtaacttgtccagaattctacaggaactaggacccaggctttgttttgggggttttgtttttgtttttgtttgagacatgggctcactctgtcatccaggacagagtgcagtggtgcaatcatagctcactacagccttgacctcccaggctcaaacaatcctcccacctcagcctcctgagtacctgggactacgggggcacaccaccatgcctagctaatttttttgtgttttagaggtgggtctcactcttgttgcccaggctggtctcaaactcctgtggtcaagccatcctcccacttcagcctcccaagtgctgggattataggcatgagccaccacatccagccaggatcc

SEQ ID NO: 93443 - DNA, 757 bp, Homo sapiens
gggttcgagaccagcctggccaacatgaagaaaccccatcactgctgaaaatacaaaaattaggggtggtggcacgcatctgtaatcccagctactcgagaggctgagacatgagaatcacttgaacccaggaggcggaggttacagtgagatgagatcacgccgctgcactccagcctggacgacagagtgaaactgtgtctcaaaaaaaaaaaaaaagttttcttctctctataactagacccctccccaaaggtgaacctgttagcagtttgtcccatgctcattctctgttggcgataataacggttagctttggagagcccttgactaagtgtcaggtactcttggaagcacttttccaggtattaactcatttaatcctaacagccctatgaagtaacttgtccagaattctacaggaactaggacccaggctttgttttgggggttttgtttttgtttttgtttgagacatgggctcactctgtcatccaggacagagtgcagtggtgcaatcatagctcactacagccttgacctcccaggctcaaacaatcctcccacctcagcctcctgagtacctgggactacgggggcacaccaccatgcctagctaatttttttgtgttttagagrtgggtctcactcttgttgcccaggctggtctcaaactcctgtggtcaagccatcctcccacttcagcctcccaagtgctgggattataggcatgagccaccacatccagccaggatcc

SEQ ID NO: 93444 - DNA, 629 bp, Homo sapiens
aaaacaacagcctcaactscgagaagatgattttcttatggtcttaccaccagaactgatccatctgctttcaatttcttgcactttaaaattcacttgtatatttgtatgtgtgtgattcattcacattttggcccctgcaaaaagctttggttacctatcaaacacaatatgaaatgctgtcagtttattcatctgtcccttcatgtagagaattgagaaggaggctgtggaaagcagctataaactgctgtggaaaacagctatttctgaaaaattcctagtattgaatttcaaaaactcaaagcagcataagatcagcccagagtgcagtatttctctgtggtttaagaaccatattacgtagtacatatatgttcttttattaggttaaaatttcaatataactaaaaaaatttgctaatcctctcatttattctgtttctcttcatttttcaagtactacacattactgttatgtttctgttgctaaaatattctaggcaaagtttaagtaagaatattcctaagtaaccaaaggtttaatttttaatttactttaccagaaaatcgcaaaagaatagggttgacattatctatagttaaaaatgtgattgttagagaaaaag

SEQ ID NO: 93445 - DNA, 1006 bp, Homo sapiens
cataatgctattgcacgcttaatagactacaatatagcataaacataatttttacatgcactgggaaaccaaaaactgtgcgtgactggctttattgccttatttgcttcattgcagtgaacttgcagtatctccgaggtatgactgtaccaaatcaaagcactctttttgtaatcagccctcaaaattgtcagtccatgtttgtgcgttcttgcttttgttctgggaggttgttttaggaaatgtttagatctttgttttaagaaaaggtcagatgctaagcagattggaagctggggtagaaaaccacaagattctgaagttcattctgccagtaatataaaaggaaacccttagaggcaatgtcagcaggcagggcttagtaaagttcaccgaacttggagctcctcccctgcatatctgtccctcatctctctgatactgctccctagcggtgagggcggatggtcgaggttggtcccagcaacctcctggtatgtcaatgttttccttctcccttaggtacttaaaggatactatttaggcaggaggaaaagatacctttaaaaagagaagcttgctttctagtcatgtagatgctgagtctaataaaagtttcgattttttactttttattttttttgagacagagtctcgctctgttgcctaggctgcagtgcagtggcatgatcttggctcactgcaacccccacctccgggattcaagcaactctcctgcttcagcctcctgagtagctgggactacaggcgtgcgccaccatgcccagttaatttttggattttttgtagagacagggcttcaccatgttggccaggctgatttcaaactcccgcctcagcctcccaaagtgctgggattacaggcgtgagccactgcacctggtccatcagttttttattcttgttttgtctccattcttcattgagcgaaggggctataccctctcatttatyctttagatagctttgttgccaactgcttttt

SEQ ID NO: 93446 - DNA, 692 bp, Homo sapiens
tcccctttccaaaatatgtggggyttccttttttttttttttgctgtgattttcttttctgctatgaggtaagtgattaaccttcagaatatccgccgtaatcccagaagtgaaaactcattgatccaacattaatatgtgctttgtgcaattttgaatgttctttggcaaagtcaattccataattcatcacagtcccatctctgttgttaactgtgttgagcaaaaacgcccccaccctcacccagtgttgcccttgatctaatattctaagtgtcagaggttccatattttaatagaaaatgtgccctggctgtgaggtagtggagagtgaacgtcactcattacctacagggacaattctcaatgaaggccttaaatgatgctcaattaagctggttctcatgtggcctctgtgtcttcgacagctgctgaatcctctgatcacacacgatgggacttgtacacttgaaatcaaacatatttttaaaacttctgttgttgagaattcccacctcatttttccatggacaaaattattctttatgtcatagtgcacttaaaatttggtattacctagaagttaaagaaatatgataaccgtgccaaactgctatctctaggtaagattattccgtcagaaaaccctctcccagttcccctgtagctcttcaggaatccccatctcccca

SEQ ID NO: 93447 - DNA, 692 bp, Homo sapiens
tcccctttccaaaatatgtggggcttccttttttttttttttgctgtgattttcttttctgctatraggtaagtgattaaccttcagaatatccgccgtaatcccagaagtgaaaactcattgatccaacattaatatgtgctttgtgcaattttgaatgttctttggcaaagtcaattccataattcatcacagtcccatctctgttgttaactgtgttgagcaaaaacgcccccaccctcacccagtgttgcccttgatctaatattctaagtgtcagaggttccatattttaatagaaaatgtgccctggctgtgaggtagtggagagtgaacgtcactcattacctacagggacaattctcaatgaaggccttaaatgatgctcaattaagctggttctcatgtggcctctgtgtcttcgacagctgctgaatcctctgatcacacacgatgggacttgtacacttgaaatcaaacatatttttaaaacttctgttgttgagaattcccacctcatttttccatggacaaaattattctttatgtcatagtgcacttaaaatttggtattacctagaagttaaagaaatatgataaccgtgccaaactgctatctctaggtaagattattccgtcagaaaaccctctcccagttcccctgtagctcttcaggaatccccatctcccca

SEQ ID NO: 93448 - DNA, 692 bp, Homo sapiens
tcccctttccaaaatatgtggggcttccttttttttttttttgctgtgattttcttttctgctatgaggtaagtgattaaccttcagaatatccgccgtaatcccagaagtgaaaactcattgatccaacattaatatgtgctttgtgcaattttgaatgttctttggcaaagtcaattccataattcatcacagtcccatctctgttgttaactgtgttgagcaaaaacgcccccaccctcacccagtgttgcccttgatctaatattctaagtgtcagaggttccatattttaatagaaaatgtgccctggctgtgaggtagtggagagtgaacgtcactcattacctacagggacaattctcaatgaaggccttaaatgatgctcaattaagctggttctcrtgtggcctctgtgtcttcgacagctgctgaatcctctgatcacacacgatgggacttgtacacttgaaatcaaacatatttttaaaacttctgttgttgagaattcccacctcatttttccatggacaaaattattctttatgtcatagtgcacttaaaatttggtattacctagaagttaaagaaatatgataaccgtgccaaactgctatctctaggtaagattattccgtcagaaaaccctctcccagttcccctgtagctcttcaggaatccccatctcccca

SEQ ID NO: 93449 - DNA, 692 bp, Homo sapiens
tcccctttccaaaatatgtggggcttccttttttttttttttgctgtgattttcttttctgctatgaggtaagtgattaaccttcagaatatccgccgtaatcccagaagtgaaaactcattgatccaacattaatatgtgctttgtgcaattttgaatgttctttggcaaagtcaattccataattcatcacagtcccatctctgttgttaactgtgttgagcaaaaacgcccccaccctcacccagtgttgcccttgatctaatattctaagtgtcagaggttccatattttaatagaaaatgtgccctggctgtgaggtagtggagagtgaacgtcactcattacctacagggacaattctcaatgaaggccttaaatgatgctcaattaagctggttctcatgtggcctctgtgtcttcgacagctgctgaatcctctgatcacacacgatgggacttgtacacttgaaatcaaacatatttttaaaacttctgttgttgagaattcccacctcatttttccatggacaaaattattctttatgtcatagtgcacttaaaatttggtattacctagaagttaaagaaatrtgataaccgtgccaaactgctatctctaggtaagattattccgtcagaaaaccctctcccagttcccctgtagctcttcaggaatccccatctcccca

SEQ ID NO: 93450 - DNA, 692 bp, Homo sapiens
tcccctttccaaaatatgtggggcttccttttttttttttttgctgtgattttcttttctgctatgaggtaagtgattaaccttcagaatatccgccgtaatcccagaagtgaaaactcattgatccaacattaatatgtgctttgtgcaattttgaatgttctttggcaaagtcaattccataattcatcacagtcccatctctgttgttaactgtgttgagcaaaaacgcccccaccctcacccagtgttgcccttgatctaatattctaagtgtcagaggttccatattttaatagaaaatgtgccctggctgtgaggtagtggagagtgaacgtcactcattacctacagggacaattctcaatgaaggccttaaatgatgctcaattaagctggttctcatgtggcctctgtgtcttcgacagctgctgaatcctctgatcacacacgatgggacttgtacacttgaaatcaaacatatttttaaaacttctgttgttgagaattcccacctcatttttccatggacaaaattattctttatgtcatagtgcacttaaaatttggtattacctagaagttaaagaaatatgataaccrtgccaaactgctatctctaggtaagattattccgtcagaaaaccctctcccagttcccctgtagctcttcaggaatccccatctcccca

SEQ ID NO: 93451 - DNA, 692 bp, Homo sapiens
tcccctttccaaaatatgtggggcttccttttttttttttttgctgtgattttcttttctgctatgaggtaagtgattaaccttcagaatatccgccgtaatcccagaagtgaaaactcattgatccaacattaatatgtgctttgtgcaattttgaatgttctttggcaaagtcaattccataattcatcacagtcccatctctgttgttaactgtgttgagcaaaaacgcccccaccctcacccagtgttgcccttgatctaatattctaagtgtcagaggttccatattttaatagaaaatgtgccctggctgtgaggtagtggagagtgaacgtcactcattacctacagggacaattctcaatgaaggccttaaatgatgctcaattaagctggttctcatgtggcctctgtgtcttcgacagctgctgaatcctctgatcacacacgatgggacttgtacacttgaaatcaaacatatttttaaaacttctgttgttgagaattcccacctcatttttccatggacaaaattattctttatgtcatagtgcacttaaaatttggtattacctagaagttaaagaaatatgataaccgtgccaaactgmtatctctaggtaagattattccgtcagaaaaccctctcccagttcccctgtagctcttcaggaatccccatctcccca

SEQ ID NO: 93452 - DNA, 268 bp, Homo sapiens
gcccttttggaaactattagaagtttcctggggccagcttgcttgtgacacccccaaygggaggtgtccatgactgagggcagggtgtatgtaaggctttgttcacctcactggactttagttttatagtgactttattgaaaatatcctgcagtaatgcaaaaacacttactttttaggagttagaaatggagtcaatatatcttcaaaagcaccttggggcctgtttaactcaaggtcttgcagaagtggcaagagttcgcccagt

SEQ ID NO: 93453 - DNA, 712 bp, Homo sapiens
ataatggctctgatgatttcacttttacatatttgtatttttattcttaagaggcaatgtactaaattcaaaaggaagaaaaaaactgttaccaacttaatatatcttattgaaatttataattttaaggtaaatataataatcccaaaataataagataaagttattttataataatatataataaaacataacagttcattgtctccaaactgaatcataagtgatctttaatttaatctaatagcttgcttgcttgctttctactcaaatataaattgcctatggggttttattaaatgtggttaatttcagatagttgtccttgacatttatataagttgtgacagactctagccaagattttaccaaggatggtgcaaagtaagttcaaaaaagaaaatgaacagaagsaatccatttcctttatcattatgtatttactcataagaaaaccaatcttcaggaagtgaatcatgcaccttgaaaaggagtagtgaatcccaatagttatgttcttaactctgctaaaatgtcttttcgccttgataattttacttcctttgctgaaaccaaactggataggcacaagaaaacccaagtatagcatattcttttggctgccattatttccagactgattaaatatagagttgactgattaaatctaggcgagtttccttattactacttttaagtaattaattgattt

SEQ ID NO: 93454 - DNA, 518 bp, Homo sapiens
ggcaagaatcaagttcattcaagttgtggcagaatcaagttcctttcagttgtaggactgaggtcttaaattcatgtcactctgtaagcttaggcgtgcccttatttgctaggaggcctctctctcatccttgcmtgtgggccctgacacatcagagtcagtaatggtgcatcaaattctatgtttgtaatctctctgaacttcctttgtgccaactctgttgtgtctttcttcttgctcgcatattctgacccatctgccttcctcttctgctcttaaatatttaattgggcccacctggataatccagggtagtctcagtaatttaaaggccaccactagtatcaattacaacctcacagtcccttcacttaagcaccaatatttgtttgattgaacaatcagtgaacaagaatcattagaggacatcttcaaagttcttcctgctacatcatagaagccaaccagatagtatcttcacaaaataattatcaaaaagcttgaatggagtttgacaa

SEQ ID NO: 93455 - DNA, 518 bp, Homo sapiens
ggcaagaatcaagttcattcaagttgtggcagaatcaagttcctttcagttgtaggactgaggtcttaaattcatgtcactctgtaagcttaggcgtgcccttatttgctaggaggcctctctctcatccttgcctgtgggccctgacacatcagagtcagtaatggtgcatcaaattctatgtttgtaatctctctgaacttcctttgtgccaactctgttgtgtctttyttcttgctcgcatattctgacccatctgccttcctcttctgctcttaaatatttaattgggcccacctggataatccagggtagtctcagtaatttaaaggccaccactagtatcaattacaacctcacagtcccttcacttaagcaccaatatttgtttgattgaacaatcagtgaacaagaatcattagaggacatcttcaaagttcttcctgctacatcatagaagccaaccagatagtatcttcacaaaataattatcaaaaagcttgaatggagtttgacaa

SEQ ID NO: 93456 - DNA, 518 bp, Homo sapiens
ggcaagaatcaagttcattcaagttgtggcagaatcaagttcctttcagttgtaggactgaggtcttaaattcatgtcactctgtaagcttaggcgtgcccttatttgctaggaggcctctctctcatccttgcctgtgggccctgacacatcagagtcagtaatggtgcatcaaattctatgtttgtaatctctctgaacttcctttgtgccaactctgttgtgtctttcttcttgctcgcatattctgacccatctgcyttcctcttctgctcttaaatatttaattgggcccacctggataatccagggtagtctcagtaatttaaaggccaccactagtatcaattacaacctcacagtcccttcacttaagcaccaatatttgtttgattgaacaatcagtgaacaagaatcattagaggacatcttcaaagttcttcctgctacatcatagaagccaaccagatagtatcttcacaaaataattatcaaaaagcttgaatggagtttgacaa

SEQ ID NO: 93457 - DNA, 705 bp, Homo sapiens
cttatttamtaattgatgttggaagagctggctagccatatgcagaaaactgaaactgaactccttccttacaccttatacaaaaattaactcaagatggattaaagacttacatgtaaacccaaaactatgaaaaccctagaagaaaacctaggcaataccattcaggacgtaggcatgggtaaaaatttcatgacaaaaacaaagcaattgcaagaaaagcaaaaattgacaaatgggatctaattaaactaaagagcctctgcacagcaaaagaaaccgtcatcagagcaaacaggcaacatacagaatggggggaaatttttgcaatctatccatctgacaaagggcaaatatccacaatctacaaggaacttaaatttacaagaaaaaaaactgcatcaaaaagtgggcaagtgatatgaatagagacttctcaaaagaatatatttatgctgccaacaaacatgaaaaaaagctcaacatcactgatcattagagaaatggaaatcaaaaccacaatgagataccatctcatgtcagtcagaatgccgattattacaatgtcaagaacaaaaaatgtgtagactaaaataaatgttggatgtaataaaaaataacatatttgttattaggttggtgcaaaagcaatcatggtttttgcaattacatttaattaacttatttgttattaggttcacagtt

SEQ ID NO: 93458 - DNA, 705 bp, Homo sapiens
cttatttactaattgatgttggaagagctggctagccatatgcagaaaactgaaactgaactccttccttacaccttatacaaaaattaactcaagatggattaaagacttacatgtaaacccaaaactatgaaaaccctagaagaaaacctaggcaataccattcaggacgtaggcatgggtaaaaatttcatgacaaaaacaaagcaattgcaaraaaagcaaaaattgacaaatgggatctaattaaactaaagagcctctgcacagcaaaagaaaccgtcatcagagcaaacaggcaacatacagaatggggggaaatttttgcaatctatccatctgacaaagggcaaatatccacaatctacaaggaacttaaatttacaagaaaaaaaactgcatcaaaaagtgggcaagtgatatgaatagagacttctcaaaagaatatatttatgctgccaacaaacatgaaaaaaagctcaacatcactgatcattagagaaatggaaatcaaaaccacaatgagataccatctcatgtcagtcagaatgccgattattacaatgtcaagaacaaaaaatgtgtagactaaaataaatgttggatgtaataaaaaataacatatttgttattaggttggtgcaaaagcaatcatggtttttgcaattacatttaattaacttatttgttattaggttcacagtt

SEQ ID NO: 93459 - DNA, 705 bp, Homo sapiens
cttatttactaattgatgttggaagagctggctagccatatgcagaaaactgaaactgaactccttccttacaccttatacaaaaattaactcaagatggattaaagacttacatgtaaacccaaaactatgaaaaccctagaagaaaacctaggcaataccattcaggacgtaggcatgggtaaaaatttcatgacaaaaacaaagcaattgcaagaaaagcaaaaattgacaaatgggatctaattaaactaaagagcctctgcacagcaaaagaaaccgtcatcagagcaaacaggcaacatacagaatggggggaaatttttgcaatctatccatctgacaaagggcwaatatccacaatctacaaggaacttaaatttacaagaaaaaaaactgcatcaaaaagtgggcaagtgatatgaatagagacttctcaaaagaatatatttatgctgccaacaaacatgaaaaaaagctcaacatcactgatcattagagaaatggaaatcaaaaccacaatgagataccatctcatgtcagtcagaatgccgattattacaatgtcaagaacaaaaaatgtgtagactaaaataaatgttggatgtaataaaaaataacatatttgttattaggttggtgcaaaagcaatcatggtttttgcaattacatttaattaacttatttgttattaggttcacagtt

SEQ ID NO: 93460 - DNA, 705 bp, Homo sapiens
cttatttactaattgatgttggaagagctggctagccatatgcagaaaactgaaactgaactccttccttacaccttatacaaaaattaactcaagatggattaaagacttacatgtaaacccaaaactatgaaaaccctagaagaaaacctaggcaataccattcaggacgtaggcatgggtaaaaatttcatgacaaaaacaaagcaattgcaagaaaagcaaaaattgacaaatgggatctaattaaactaaagagcctctgcacagcaaaagaaaccgtcatcagagcaaacaggcaacatacagaatggggggaaatttttgcaatctatccatctgacaaagggcaaatatccacaatctacaaggaacttaaatttacaagaaaaaaaactgcatcaaaaagtgggcaartgatatgaatagagacttctcaaaagaatatatttatgctgccaacaaacatgaaaaaaagctcaacatcactgatcattagagaaatggaaatcaaaaccacaatgagataccatctcatgtcagtcagaatgccgattattacaatgtcaagaacaaaaaatgtgtagactaaaataaatgttggatgtaataaaaaataacatatttgttattaggttggtgcaaaagcaatcatggtttttgcaattacatttaattaacttatttgttattaggttcacagtt

SEQ ID NO: 93461 - DNA, 705 bp, Homo sapiens
cttatttactaattgatgttggaagagctggctagccatatgcagaaaactgaaactgaactccttccttacaccttatacaaaaattaactcaagatggattaaagacttacatgtaaacccaaaactatgaaaaccctagaagaaaacctaggcaataccattcaggacgtaggcatgggtaaaaatttcatgacaaaaacaaagcaattgcaagaaaagcaaaaattgacaaatgggatctaattaaactaaagagcctctgcacagcaaaagaaaccgtcatcagagcaaacaggcaacatacagaatggggggaaatttttgcaatctatccatctgacaaagggcaaatatccacaatctacaaggaacttaaatttacaagaaaaaaaactgcatcaaaaagtgggcaagtgatatgaatagagacttctcaaaagaatrtatttatgctgccaacaaacatgaaaaaaagctcaacatcactgatcattagagaaatggaaatcaaaaccacaatgagataccatctcatgtcagtcagaatgccgattattacaatgtcaagaacaaaaaatgtgtagactaaaataaatgttggatgtaataaaaaataacatatttgttattaggttggtgcaaaagcaatcatggtttttgcaattacatttaattaacttatttgttattaggttcacagtt

SEQ ID NO: 93462 - DNA, 536 bp, Homo sapiens
tggaattttatttggaaaaaaacaaaacagaaactcaagtcttgagaggctagtggctccaggcatcctctctaggaggcttgatattgcctagagctgccaggagcctgggggagttttgggccgtcagaggatggaggagcagagggtttccagtcagttctggaaagcagccctgctccccatccccaggggagagaacrccacacctatatgaggcctcacttctggtgtttctacttgctgtgtgccaggctgggtggcaatcaagacagtttcggtccttggttgtgtgtggctcatggcttagatgaagatgattttctttttttattttttagaggtggggtctcactatcctgcccaagcgatcacaaactcctggcctcaaaccatcctcctacctcggcctcccaaagtgctgggattacaggcatgagccagtagttcacctggcctagatgaagaaattgatagttgcaatatatttacaatgccagcttcacaggggaagacacaaaaatggggtggggctg

SEQ ID NO: 93463 - DNA, 536 bp, Homo sapiens
tggaattttatttggaaaaaaacaaaacagaaactcaagtcttgagaggctagtggctccaggcatcctctctaggaggcttgatattgcctagagctgccaggagcctgggggagttttgggccgtcagaggatggaggagcagagggtttccagtcagttctggaaagcagccctgctccccatccccaggggagagaacaccacacctatatgaggcctcacttctggtgtttctayttgctgtgtgccaggctgggtggcaatcaagacagtttcggtccttggttgtgtgtggctcatggcttagatgaagatgattttctttttttattttttagaggtggggtctcactatcctgcccaagcgatcacaaactcctggcctcaaaccatcctcctacctcggcctcccaaagtgctgggattacaggcatgagccagtagttcacctggcctagatgaagaaattgatagttgcaatatatttacaatgccagcttcacaggggaagacacaaaaatggggtggggctg

SEQ ID NO: 93464 - DNA, 1810 bp, Homo sapiens
tttcatctttatgaaaggtacacattccattgctaggcaaaagacatggtataaaagataaatttccttttcctggcttcagtactgctttttattaaattgtctttagctcagataattgcattatttccattttaggttttcagaggtcaaacaacctcagatccagatgtactatgaatgcaactataatagtttcagagcaattatctccatctagctctgtagggcagaacaactcgaactctggagcccagctggtgagaaatccttttatacatagccctctcagaatcagtccaaactgaattcaagattagtttcagcagagaatctacttagctgtggctagtggcctaggtagctgttgcctctgcaggcatctaagcagccctgagaacagctgagtgccccaggtcatacctgaaactctctgcccattaaccaaggccagcgtaagctcatgttcaacaccattgcagcagccaaggtcaatcagaagaagcagtctctttctggcgaatgagtcactgcaaatggctggagagtttctctccatagtttattacatctcctctgatctgctcccctgggggagaagttggttcattgtttaccaaaatcagttgctcccactggtgtctctgctgcctctttctgctctgatgagctgcaagcttcaggcagaagcatatttcagggaaggggcgttacaaacacagcccatagcaaatgcaacttgttctagtttgtgccttccttgctttggctcatatcaattcataaggcctttttcagagtgttctaagctcctttccacatcttcattagaaggagtttaggacaggacaaagtggcttttctgtcctactgaaatatcagttgtattattacacatataccatgttcataatagacattctaagactttcatatctggggttctaataaggtacaatcctggctgctccttctgcaagaggagcacttgaggattcacagtgttcacaagaggaacactgtgtgagtgttcacacacatatgtgccgcatctctacatgaaatgcacagaactccaatttatcattagttaatgcatttaaataacaattacaaatacgaatgaaatgcatatgaactcaagcaaatttctttgactctcccttatcagttaatcaggatccttcttaggtcttctgcaacaattagagttttttcagaaagtggtccagaaaaaaaaaaaaaagctgtgcttttaaaaaatgtgttaagatcttgggcatttagtctgttggccaattctagaatggtcatcctgtcaacctacccatatgtgagtccatccttctgatttattattgtttaaaaagaacaaagaaactgcgctcatttattctgaaggataggggaatttctgttcctcactacagtgatgccacctctcaccagagttcaataatgtgaatctcttgttaacacatatttataagttagttgtrttcccttaaatatttttgcttatatgaactgtagttctcagttttctacccatctaatattacatatttcagtttgtggattacccagatgccttgttctttcttctatactggagcttttggccacttaatgttctctattgacctgaagcttagctgagaagagaaaaagatgaaatttaaatgcataatttttaagttctaaattatgaatttgtcactgtgcttttctgagatgcttgaactctaccataggtcactttgaggggtcttttcaaatagtatttttattttttccattttttaatttt

SEQ ID NO: 93465 - DNA, 857 bp, Homo sapiens
tgcatagagaaaatgaatagagtcctgggttctggtacaggagtttggggcaaaaccaaggaaacttagatgctgcttcaggtatgcagaggtctgggaaggcacatattctctcctcttcctgtgttatctctgcaggaggcaaccctcagcaggtccagcttttcttaccaagtgtgtctggagggctgcctaccaccacaccttgttgtgaggccatttcctctctctgatttccatcaccctgaggtccctctgtaggaaaatgggagtgggatacagggaaaagggtgctttttcaccatttgaggaagaactaagggacttcaacataacctggggaggggctagtggtaaactctcccccaaattcccagttcattgagctcctcccaacccaggagctttgctttgatgaagagsagggtctctagctgcagctacttttttggagattagaaaacctgaaaccactcttgcctatgtctaaaatacaccacccaagggtggtgtcaggttggtctttctctgcagaatgggagtatcagtgatggttggccagaaggctcaagaaggaaggaaggatttggaatcagaagactcagatctgagaccagattgtctcattttttttctaggtaaaatggggataataaaaacaatcctacccacctcagagcagtcagaatcaaaaatgaaaagttctgagaacaaatgccacaaccgatcacacactgcaaatgctgtaacaatgagctattacctcctgaccacgaattgtctctatgatgagacatgccttggaacgtgtgtgacctactatgttctcaggggcacctggtgggtcccagggtgta

SEQ ID NO: 93466 - DNA, 815 bp, Homo sapiens
aggcctgaaggctgatcatgatagagattccttggtttttgtcccagaaactctgggtaaacttccctattctggtagatcgttatcccaatatcatttctcccaagtttgtgcaaatggttatgccatatttttccaatcgatttaaagcaaatgcccccaaatggttgctaggagaaaaactgcactattcagccctgtctcatcaaatactcagattgttcatggtagygaggattttagacgctgaaattagagtgaaggatgaaatctacaagatctacagaattgagacaaaatcagagttgtgtgaatttgtcacatctgcccagatccaacatcttgagagtaggattagggtgccacaggcagggcctgagactaggaagagagccttgctcactgacccatcccttgtctgggcttccaagtggaactagagtttcactcaacctacatgtgcctataggtcctccctgtggcaatgacatctctcagctcagtaagggccacttgcagtaggaatatgaccctaaccagaagactcagtggatccttatcaccttcatagaaaggtactcaccatccatgtcaacagccaagccaacacgctgttgctccaatacgtaaaaggcacttctgtagggctggcatgggtcagtcagtccaagataaactgaaggagtcgaataccatctatccagtgagtcctgcaagacttcaggctctttctcagccagcagctccctgctgagcctggaaaagtaggaaaaagtaaagaataagccagggggaatcagaaaccacacagcccc

SEQ ID NO: 93467 - DNA, 815 bp, Homo sapiens
aggcctgaaggctgatcatgatagagattccttggtttttgtcccagaaactctgggtaaacttccctattctggtagatcgttatcccaatatcatttctcccaagtttgtgcaaatggttatgccatatttttccaatcgatttaaagcaaatgcccccaaatggttgctaggagaaaaactgcactattcagccctgtctcatcaaatactcagattgttcatggtagcgaggattttagacgctgaaattagagtgaaggatgaaatctacaagatctacagaattgagacaaaatcagagttgtgtgaatttgtcacatctgcccagatccaacatcttgagagtaggattagggygccacaggcagggcctgagactaggaagagagccttgctcactgacccatcccttgtctgggcttccaagtggaactagagtttcactcaacctacatgtgcctataggtcctccctgtggcaatgacatctctcagctcagtaagggccacttgcagtaggaatatgaccctaaccagaagactcagtggatccttatcaccttcatagaaaggtactcaccatccatgtcaacagccaagccaacacgctgttgctccaatacgtaaaaggcacttctgtagggctggcatgggtcagtcagtccaagataaactgaaggagtcgaataccatctatccagtgagtcctgcaagacttcaggctctttctcagccagcagctccctgctgagcctggaaaagtaggaaaaagtaaagaataagccagggggaatcagaaaccacacagcccc

SEQ ID NO: 93468 - DNA, 815 bp, Homo sapiens
aggcctgaaggctgatcatgatagagattccttggtttttgtcccagaaactctgggtaaacttccctattctggtagatcgttatcccaatatcatttctcccaagtttgtgcaaatggttatgccatatttttccaatcgatttaaagcaaatgcccccaaatggttgctaggagaaaaactgcactattcagccctgtctcatcaaatactcagattgttcatggtagcgaggattttagacgctgaaattagagtgaaggatgaaatctacaagatctacagaattgagacaaaatcagagttgtgtgaatttgtcacatctgcccagatccaacatcttgagagtaggattagggtgccacaggcakggcctgagactaggaagagagccttgctcactgacccatcccttgtctgggcttccaagtggaactagagtttcactcaacctacatgtgcctataggtcctccctgtggcaatgacatctctcagctcagtaagggccacttgcagtaggaatatgaccctaaccagaagactcagtggatccttatcaccttcatagaaaggtactcaccatccatgtcaacagccaagccaacacgctgttgctccaatacgtaaaaggcacttctgtagggctggcatgggtcagtcagtccaagataaactgaaggagtcgaataccatctatccagtgagtcctgcaagacttcaggctctttctcagccagcagctccctgctgagcctggaaaagtaggaaaaagtaaagaataagccagggggaatcagaaaccacacagcccc

SEQ ID NO: 93469 - DNA, 815 bp, Homo sapiens
aggcctgaaggctgatcatgatagagattccttggtttttgtcccagaaactctgggtaaacttccctattctggtagatcgttatcccaatatcatttctcccaagtttgtgcaaatggttatgccatatttttccaatcgatttaaagcaaatgcccccaaatggttgctaggagaaaaactgcactattcagccctgtctcatcaaatactcagattgttcatggtagcgaggattttagacgctgaaattagagtgaaggatgaaatctacaagatctacagaattgagacaaaatcagagttgtgtgaatttgtcacatctgcccagatccaacatcttgagagtaggattagggtgccacaggcagggcctgagactaggaagagagccttgctcactgacccatcccttrtctgggcttccaagtggaactagagtttcactcaacctacatgtgcctataggtcctccctgtggcaatgacatctctcagctcagtaagggccacttgcagtaggaatatgaccctaaccagaagactcagtggatccttatcaccttcatagaaaggtactcaccatccatgtcaacagccaagccaacacgctgttgctccaatacgtaaaaggcacttctgtagggctggcatgggtcagtcagtccaagataaactgaaggagtcgaataccatctatccagtgagtcctgcaagacttcaggctctttctcagccagcagctccctgctgagcctggaaaagtaggaaaaagtaaagaataagccagggggaatcagaaaccacacagcccc

SEQ ID NO: 93470 - DNA, 1081 bp, Homo sapiens
gctcaaggtaactcagttttcccaaagtgcacaaatccagatggaaccagaatttgaatccaggcatgcttagttatgaagcgcacattatcagtacactataagaccttatctctgcttatcagagtttgagtttggaataaatgatctaagatcaaacagaggtttgtttgatcagcctgcacaattacttatgtgaggaagaaagtagcaatcttctagttctacaacttttgtgttacaagctggcataaaaggatgtgcatagcttgtttgattgaatgctataattcccaggatcgttcctttctcattcttccccaccctgtggtgttagagtctgctattacagtggatgaaaatcaaatgcttagacacacagaaaaatatggatatgctatccacatgacgctcacattaaaatggcaggacatggagaaaatgatactgcgggcagccaggagctcctctcctgacacctcatggcagtgaaaggcaagtgtgcacagtcctttgaagcctctttctttccttagttgaatcatttcaggagtgaactgcatacattgttaaaatatccagtgagaggtggaaagaatggcacagtcttatgggagcttgaaaggtctctgttcttctcgtgcaytttaaagtcaggctggctgtctttggtgtagtctttttggcaggccaaaaagtttacgtgttttgaagaaaatgatgcgtgttcttctttgtagttttgctaagcatttaaaagcacaaaagagggtcttttaaaaatgtaactgcaattgaaatgcctggagaacagaagcagcagatatggctagtgtaggcacactccagagctttgagcatgatgctcagactgaaggaggatcagaagaactcactggagttaacaaaagcattatttatagaagcagcaaagtgtaagaagctgatagccacgctggtagttagacacagtatttgctgactatttttcaaatacgtttttgataatagctaatgaatctggctaaggtggacattacttacggttctcagttcattaaaaatgcacacatctgtgtgt

SEQ ID NO: 93471 - DNA, 1081 bp, Homo sapiens
gctcaaggtaactcagttttcccaaagtgcacaaatccagatggaaccagaatttgaatccaggcatgcttagttatgaagcgcacattatcagtacactataagaccttatctctgcttatcagagtttgagtttggaataaatgatctaagatcaaacagaggtttgtttgatcagcctgcacaattacttatgtgaggaagaaagtagcaatcttctagttctacaacttttgtgttacaagctggcataaaaggatgtgcatagcttgtttgattgaatgctataattcccaggatcgttcctttctcattcttccccaccctgtggtgttagagtctgctattacagtggatgaaaatcaaatgcttagacacacagaaaaatatggatatgctatccacatgacgctcacattaaaatggcaggacatggagaaaatgatactgcgggcagccaggagctcctctcctgacacctcatggcagtgaaaggcaagtgtgcacagtcctttgaagcctctttctttccttagttgaatcatttcaggagtgaactgcatacattgttaaaatatccagtgagaggtggaaagaatggcacagtcttatgggagcttgaaaggtctctgttcttctcgtgcattttaaagtcaggctggctgtctttggtgtagtctttttggcaggccaaaaagtttaygtgttttgaagaaaatgatgcgtgttcttctttgtagttttgctaagcatttaaaagcacaaaagagggtcttttaaaaatgtaactgcaattgaaatgcctggagaacagaagcagcagatatggctagtgtaggcacactccagagctttgagcatgatgctcagactgaaggaggatcagaagaactcactggagttaacaaaagcattatttatagaagcagcaaagtgtaagaagctgatagccacgctggtagttagacacagtatttgctgactatttttcaaatacgtttttgataatagctaatgaatctggctaaggtggacattacttacggttctcagttcattaaaaatgcacacatctgtgtgt

SEQ ID NO: 93472 - DNA, 632 bp, Homo sapiens
  misc_feature (1)...(632): n = A,T,C or G
tttttttktttttttttttgagaccaagtctccttctaaaacccaggctggagtgcagtggtgtgatgtcacctcactgcaacctctgcttcccgggttcaaatgattctcctgcctcaacctcacaagttgctgggattacaggagcccaccaccatgcccagctaattttagtatttttagtagagttggggtttaccatgttggacaggctggcctccaactcttgacctcagcctcccaatgtgctgggattacattgtgagccaccgtgcccggcccagttctcacttttcatggtgcctttcagtgccattagaggagaggttcctgttacctccatggaccttgcgtggtgagcagtgctttccctgaggagctggtgaatggccaagtcctctcggcttcctcaccaccaccatcccccttgggcctcctcacttcacatgacccagctgttccttcagttggacacctgggccctccccaccagcccacctggcccacctcacctgggacaaaccccttgggtaagcagtgcatccagcccatcgagcacagcttggaaggcctccagacaaggcatctttatcagaagcctcanagggaggcggcggaagggccaggcctgc

SEQ ID NO: 93473 - DNA, 1117 bp, Homo sapiens
gaaaacatcagacaaacccaatgtaagagacattctacaaaaatacctagcaatactcttcaagaaaagtgtcaatgtcatgaaagactaggaaagactgaggatgtcacagattggagaagacaggagatatcacaggaaaatgcagtgtgggatcctggattagaccttgggggagaaaaagacattagttttcctggaagaggggatagcaagagaaaaagacattagttttcctggaagaggggatagcaagagaaaaagaccatggagtccgccaagatgtggacccttcagcctctggcaggagggagcccagatcagccagcctccgctacccccaggctgcatgaagattatcacttttaacatatgccacaatgggaaagaagttgaacagcaccaaggttgagaaccagacgacagaaaactatccactccccctcctgcttccatcttgcagattggcaaagggccaagagtagcctctgaaattagtgactccaaccaggctagagctggtgagttctgggcatagctcacatcttgtgggctccaatttttcagagatggctgaaatacaggataatagggaaaactctagaataaaacatatyaaggcttaaatttcactgtcagctgtgatcttggacaacttacttaatctctctgatctttggtttcctcacctataaaatggggattaacctcatagagatgttggttggaaggattaaacaaggcacaataaaggctcaattaacaggttgtttgcctctttctgcattagcatctttgatggtgttggcagattaacagcaggcgaccctggaggcattagacttctgtttaagttaagactacagcctcattgggtggagttgctcagtctgtctggttgaagagcatcactagccacaaatggccaatccatacagagaataaataataaacattaaaaacaaaacactgatttaaggaagaactcaaacccaaacagatctaaagtcacaacttagatgggtcttggtggtgaaacagggcaagcagagtaaagctggggtgaggcacgtgcctgttgtttcgatggaatatttattctcccaggcttccttaa

SEQ ID NO: 93474 - DNA, 457 bp, Homo sapiens
tatgagaaaacatttttttaaaaccttttttgaaagctgccaaagacttttcaagttactttaactcttaaagggtaggtaaggcgagcaaaaaacctgcatcatgactttcaagcggtctaaaggtgccgtgcatgtccgtgcaaccgcactagctattcctgctgacaccaaacgcttccaccaatctccagactgcttttcttgttcggtaaattcatctggaatagctatactctctcctatatcaattaactgataaataggaagaattattagacaataaacaaaagtgtaaacacttgataaattataaggatagctttctacaaggagcaaagataactttttacaaggaccaaaaatccaaagatttttttcatgccacttcctgttactgaagatcamcaattttcttagcacctgtactacatcaagtgatttttaataatgcatt

SEQ ID NO: 93475 - DNA, 746 bp, Homo sapiens
aatagggagcctaccgaggaagccaagtgaggtttcatcccatttgggattggagtaatccctggcaacatcctgagcggagcaaactttctgttcatccaatgccaagaaagagacttcacgatgccggtaagagttggacttgtcatggtgtctagaatgagacaaaacacatttctctggcaagtcctgcaggactcccttctcttcagaatcctgcagctttctgatgagccaggtaggatagaacgacagaaggttagaccaagacagattcaacaccatagtatctcaggtgatttgataggacacaaagggtgtggtcacagaaagcaaaggrgggtctcctccaagagagaaaaatctatccttctaaatgtggggtggagtgtgactgtcctggagacagagcaaacatgagcagcaggtgctcagtgcacttgccacaaacgagcggctgcaggaggacccagactctccctgtaagctagcatcaagcatcatgacttgcagcactgagaactaagctgggacttcacttcctttacacaaattgcgttgacattacatgcagcatccaagtgaacacagctcttgaggcattcccaacgcacagatcctgtgtttttaaggtcccccttttttttcaatattttgacataatatgaaatttttatttttaattttctcgattgcattcaaatacttgccaacatgctgtcacaaaacatacagaaagcatatat

SEQ ID NO: 93476 - DNA, 746 bp, Homo sapiens
aatagggagcctaccgaggaagccaagtgaggtttcatcccatttgggattggagtaatccctggcaacatcctgagcggagcaaactttctgttcatccaatgccaagaaagagacttcacgatgccggtaagagttggacttgtcatggtgtctagaatgagacaaaacacatttctctggcaagtcctgcaggactcccttctcttcagaatcctgcagctttctgatgagccaggtaggatagaacgacagaaggttagaccaagacagattcaacaccatagtatctcaggtgatttgataggacacaaagggtgtggtcacagaaagcaaaggagggtctcctccaagagagaaaaatctatccttctaaatgtggggtggagtgtgactgtcctggagacagagcaaacatgagcagcaggtgctcagtgcacttgccacaaacgagcggctgcaggaggacccagactctccctgtaarctagcatcaagcatcatgacttgcagcactgagaactaagctgggacttcacttcctttacacaaattgcgttgacattacatgcagcatccaagtgaacacagctcttgaggcattcccaacgcacagatcctgtgtttttaaggtcccccttttttttcaatattttgacataatatgaaatttttatttttaattttctcgattgcattcaaatacttgccaacatgctgtcacaaaacatacagaaagcatatat

SEQ ID NO: 93477 - DNA, 746 bp, Homo sapiens
aatagggagcctaccgaggaagccaagtgaggtttcatcccatttgggattggagtaatccctggcaacatcctgagcggagcaaactttctgttcatccaatgccaagaaagagacttcacgatgccggtaagagttggacttgtcatggtgtctagaatgagacaaaacacatttctctggcaagtcctgcaggactcccttctcttcagaatcctgcagctttctgatgagccaggtaggatagaacgacagaaggttagaccaagacagattcaacaccatagtatctcaggtgatttgataggacacaaagggtgtggtcacagaaagcaaaggagggtctcctccaagagagaaaaatctatccttctaaatgtggggtggagtgtgactgtcctggagacagagcaaacatgagcagcaggtgctcagtgcacttgccacaaacgagcggctgcaggaggacccagactctccctgtaagctagcatcaagcatcatgacttgyagcactgagaactaagctgggacttcacttcctttacacaaattgcgttgacattacatgcagcatccaagtgaacacagctcttgaggcattcccaacgcacagatcctgtgtttttaaggtcccccttttttttcaatattttgacataatatgaaatttttatttttaattttctcgattgcattcaaatacttgccaacatgctgtcacaaaacatacagaaagcatatat

SEQ ID NO: 93478 - DNA, 558 bp, Homo sapiens
cttgcctgagttgagggtgtgatgagtgtgaccacgggctacgcagcattcatgtggaagtgaaggaggaggactggatcaatcccagtggaaagcgcacctctcagcagcccgcaccatcctccacctacactgtgtagtgacagtgctttgagatgtagcaaaggctataaatttatctattctctggtgtctcaaagacctgacattctgtgtcagaatgaaaatctgtctagtttcttcactttaaaaatgataaaactgcaggttcacaaagttactggtttacttgaggtcacacagggatgcattttgagcactgccaataaaaggaatcacaataattattcagtaattatttatagaatccatgtaattcaataaataaamataattatttattgaccaattcatactaggcattttgttcaaaactgtacacatacttggatatcatattttcatcataatccttaaggcaatgttattatccataagaaacaggtaagaaacctgaagaagagggatagcaaatcatgtatttggctatatttctat

SEQ ID NO: 93479 - DNA, 780 bp, Homo sapiens
gggatccttgtgaagtaatttaattaattttattttattatctgttttagcaagttttagcttactatttaaaagaaagctaaaatatcaaattaattggacttttccctttccttgaattctctagccatgatatgagtcccacagctaaatatgatcagcttattttcttaaatttataaaaggagtggagtgacaggattttccagaggcatgactccatatttcataaagtttcttacttcagtgtgttgtaaactgtgtggtttatgaatcagcaaaaccgctcttggggaatattttacaaacgaaatcttgaggccgggcatggtggctcacgcctgtaatctcggcactttggaaggctgaggtgggcggattacctgaggtcgggagttcaagaccagcctgaccaacatggagaaaccccatctctactaaaaatacaaaattagccaggcatggtggcacacgcctgtaatctcagctactcaggaggctgaggcaggagaatcgcttgaacccaggaggcagaggttgcggkgagccgagattgtgccactgcactccagcctgggcaaccagagtgaaactccgtctcaaaaataaaaagcagaaatgaaatcttgaaccgtcattatctggacacttgtttataaacatgaaaatgtcttggctttttccttaatttgcaaaaggtctgtatgaaaagatgctatatccattttcccaagaggtaaacttacaaattaaatattgaattttaagtaaacaagaaac

SEQ ID NO: 93480 - DNA, 780 bp, Homo sapiens
gggatccttgtgaagtaatttaattaattttattttattatctgttttagcaagttttagcttactatttaaaagaaagctaaaatatcaaattaattggacttttccctttccttgaattctctagccatgatatgagtcccacagctaaatatgatcagcttattttcttaaatttataaaaggagtggagtgacaggattttccagaggcatgactccatatttcataaagtttcttacttcagtgtgttgtaaactgtgtggtttatgaatcagcaaaaccgctcttggggaatattttacaaacgaaatcttgaggccgggcatggtggctcacgcctgtaatctcggcactttggaaggctgaggtgggcggattacctgaggtcgggagttcaagaccagcctgaccaacatggagaaaccccatctctactaaaaatacaaaattagccaggcatggtggcacacgcctgtaatctcagctactcaggaggctgaggcaggagaatcgcttgaacccaggaggcagaggttgcggtgagccsagattgtgccactgcactccagcctgggcaaccagagtgaaactccgtctcaaaaataaaaagcagaaatgaaatcttgaaccgtcattatctggacacttgtttataaacatgaaaatgtcttggctttttccttaatttgcaaaaggtctgtatgaaaagatgctatatccattttcccaagaggtaaacttacaaattaaatattgaattttaagtaaacaagaaac

SEQ ID NO: 93481 - DNA, 743 bp, Homo sapiens
atgcccagctaatttttgtatttttagtagaaatgaggtttcatcatgttggccaggctggtttcgaactcctgacctcaagtgatctgtccacctcggtctcccaaagtgctgagattataggcgtgatccaccacgcctggcctcggggacgttgattctcatcattcttttttttccacaccactatttatttactcgtttgttaagcatttatcaagtgcttactctaataataacaatgcctgtacagacagtccctgagttaatggtgactgacttaatgatattttcagttgatgatgggtttacagggatataaccccrtcttacacttgcttggttattttttttttttttgtcttttttttttcctttctgtggagaacggcgtcttgctgtattgcccaggcaggtctcgaacttctgggctcaagctatcctcccacctcctcctccctaatagttgggattacaggcatgagccaccatggccggtggacgtaaccccaacttaagtcgaggagcatctgtatttgacttgatactttacgaagggctccataccacagctctgcatctgtaaatcctcacaaaaggcttggaaggggttcccatttttaggctgccctagttttaccagctggtggtaaaccctggtgtcagcaccagcattcctggggatccagaggtgatgctgacaggacccccgtcttcagggcatgtattgctgggtctgtccc

SEQ ID NO: 93482 - DNA, 656 bp, Homo sapiens
tcccgtgacatgaaacagaataagtgcttcataaacgggagtgacactaggcgtggtggcatgcatctggagtcctagctacgcgggaggctgaggcaggaggattgcctgagcctaggagttggaggctctaatgcacttggatagcacctatgaatagccagtgccctccaacctgggcaacatagtgagctcttgtcacmaaaaaaaaaaaaaaaaaagctagaagagaataatttgaatatttctagcacaaagaaaagacaaatatttaagataatggatagcccagttacacagatttgatctttacaaattatatgaatgtattaaattatcatggctgggtgcagtggctcacacttgtaatcccagcacttttggaggctgaggtgggtggatcatctgcggtcaggagttccagaccagcctggcaaacacggcaaacatgtactaaaaatacaaaaaattagccaagtgtggtggcaggcacctgtaatcccagcaactcaggaggccgaggcgggagaattgcttgaacctgggaggcagagtgcttgcagtgagccgagaccgcaccactgctttgtagcctgggcaacagagtgagatgccatttcaataataataataaactatcacatgtaacccccaaa

SEQ ID NO: 93483 - DNA, 1584 bp, Homo sapiens
agaggctgaggcaggagggtcacatgagcctagaagttcgaggccgcagtgagctatgaatgcaccattgcactccagcctgagcaatagagtgagaccttgcctcaaaaattaaaaaataaaataaatataaaaataaaacaagagagagagggcaccgtctctgtggtactatttggctgtgttacataactggcattttatttggaaaaaaaaaatgtcctccaaggggttcatttcctcrgatcaaatgtcattccaggtgttggtatgcattcgacacgtgcattcttcagccctggttattctgttttattttatgtaaaactctatttcaaaatacaggtcttcccagaagactgggtgcccattctccttcaggctgtgctaaatggaaggtgctaaacacctgcctgaggccacgtccaggccacacacctgggcaggtgatgctccacctcctacccccaagtgcaccctctgggtaaacacaggctctgctgggccccagccaccaccaagggttctggtttcactgttgctaaggatagtgaactttttaaaacaaccttcctttcttctctaatctggtagaaaaacaaaagcccagtcaggaaccaaccaagtggaagagagtgcagctgaataaaatcaacattgcacttggctttctctgacaccagttcccagaatctcttgagtgatgggaggatccatgcaggggttgttttggagagcctggccaaggggtctcttgcagggcctgaagtccaacatttaagggagcaggaaaaaagaagaaggaggtttcctcttctcatattgctgcctcttcccatcacctctccttgaacctcaagaaaagggctgggcacaatggctcgtgtctgtaatcccagtgtgttgggaggctgaggcaggaggatcacttgaggccaggagtttgagactagcctgggcaacatagtgaaacccctccatttctactttaaatttttcttttacaggcggagtgcggtgactctcgcctataatcccagaattttgagaggccaaggtgggcagctcacttgagctcagatgttcgagaccagcctgggcaacatggcaaaaccccatctctacaaaaaatacaaaaattagccaggcatggtggtgtgcacctgtagtcccagatacctggaggctgaggtggaaggatcacttgagcctgggaggcagaggttgcagtgagccaagatcgcatcgctgcactccagcctgagtgacagtgagactctgtctcaaaaaaggaaaaaagaaaagaaattaaaattaaataaattttaaaaatctttttttctttctttctttcttttttttttcaaagaagtctcctaagagccaggctattagcactatcctccctttcaagtgctatacagtgatcaggtgaaactggagaacatctgagttgggagagaattctaagatctcaagtgtaaaagcttaatttcactgactaaaaactgaagtccagaaaaggaaagaggtttttggcaaggggacacagccaactagtggcagagctggcaatagaaccca

SEQ ID NO: 93484 - DNA, 1584 bp, Homo sapiens
agaggctgaggcaggagggtcacatgagcctagaagttcgaggccgcagtgagctatgaatgcaccattgcactccagcctgagcaatagagtgagaccttgcctcaaaaattaaaaaataaaataaatataaaaataaaacaagagagagagggcaccgtctctgtggtactatttggctgtgttacataactggcattttatttggaaaaaaaaaatgtcctccaaggggttcatttcctcggatcaaatgtcattccaggtgttggtatgcattcgacrcgtgcattcttcagccctggttattctgttttattttatgtaaaactctatttcaaaatacaggtcttcccagaagactgggtgcccattctccttcaggctgtgctaaatggaaggtgctaaacacctgcctgaggccacgtccaggccacacacctgggcaggtgatgctccacctcctacccccaagtgcaccctctgggtaaacacaggctctgctgggccccagccaccaccaagggttctggtttcactgttgctaaggatagtgaactttttaaaacaaccttcctttcttctctaatctggtagaaaaacaaaagcccagtcaggaaccaaccaagtggaagagagtgcagctgaataaaatcaacattgcacttggctttctctgacaccagttcccagaatctcttgagtgatgggaggatccatgcaggggttgttttggagagcctggccaaggggtctcttgcagggcctgaagtccaacatttaagggagcaggaaaaaagaagaaggaggtttcctcttctcatattgctgcctcttcccatcacctctccttgaacctcaagaaaagggctgggcacaatggctcgtgtctgtaatcccagtgtgttgggaggctgaggcaggaggatcacttgaggccaggagtttgagactagcctgggcaacatagtgaaacccctccatttctactttaaatttttcttttacaggcggagtgcggtgactctcgcctataatcccagaattttgagaggccaaggtgggcagctcacttgagctcagatgttcgagaccagcctgggcaacatggcaaaaccccatctctacaaaaaatacaaaaattagccaggcatggtggtgtgcacctgtagtcccagatacctggaggctgaggtggaaggatcacttgagcctgggaggcagaggttgcagtgagccaagatcgcatcgctgcactccagcctgagtgacagtgagactctgtctcaaaaaaggaaaaaagaaaagaaattaaaattaaataaattttaaaaatctttttttctttctttctttcttttttttttcaaagaagtctcctaagagccaggctattagcactatcctccctttcaagtgctatacagtgatcaggtgaaactggagaacatctgagttgggagagaattctaagatctcaagtgtaaaagcttaatttcactgactaaaaactgaagtccagaaaaggaaagaggtttttggcaaggggacacagccaactagtggcagagctggcaatagaaccca

SEQ ID NO: 93485 - DNA, 1584 bp, Homo sapiens
agaggctgaggcaggagggtcacatgagcctagaagttcgaggccgcagtgagctatgaatgcaccattgcactccagcctgagcaatagagtgagaccttgcctcaaaaattaaaaaataaaataaatataaaaataaaacaagagagagagggcaccgtctctgtggtactatttggctgtgttacataactggcattttatttggaaaaaaaaaatgtcctccaaggggttcatttcctcggatcaaatgtcattccaggtgttggtatgcattcgacacgtgcattcttcagccctggttattctgttttattttatgtaaaactctatttcaaaatacaggtcttcccagaagactgggtgcccattctccttcaggctgtgctaaatggaaggtgctaaacacctgcctgaggccacgtccaggccacacacctgggcaggtgatgctccacctcctacccccaagtgcaccctctgggtaaacacaggctctgctgggccccagccaccaccaagkgttctggtttcactgttgctaaggatagtgaactttttaaaacaaccttcctttcttctctaatctggtagaaaaacaaaagcccagtcaggaaccaaccaagtggaagagagtgcagctgaataaaatcaacattgcacttggctttctctgacaccagttcccagaatctcttgagtgatgggaggatccatgcaggggttgttttggagagcctggccaaggggtctcttgcagggcctgaagtccaacatttaagggagcaggaaaaaagaagaaggaggtttcctcttctcatattgctgcctcttcccatcacctctccttgaacctcaagaaaagggctgggcacaatggctcgtgtctgtaatcccagtgtgttgggaggctgaggcaggaggatcacttgaggccaggagtttgagactagcctgggcaacatagtgaaacccctccatttctactttaaatttttcttttacaggcggagtgcggtgactctcgcctataatcccagaattttgagaggccaaggtgggcagctcacttgagctcagatgttcgagaccagcctgggcaacatggcaaaaccccatctctacaaaaaatacaaaaattagccaggcatggtggtgtgcacctgtagtcccagatacctggaggctgaggtggaaggatcacttgagcctgggaggcagaggttgcagtgagccaagatcgcatcgctgcactccagcctgagtgacagtgagactctgtctcaaaaaaggaaaaaagaaaagaaattaaaattaaataaattttaaaaatctttttttctttctttctttcttttttttttcaaagaagtctcctaagagccaggctattagcactatcctccctttcaagtgctatacagtgatcaggtgaaactggagaacatctgagttgggagagaattctaagatctcaagtgtaaaagcttaatttcactgactaaaaactgaagtccagaaaaggaaagaggtttttggcaaggggacacagccaactagtggcagagctggcaatagaaccca

SEQ ID NO: 93486 - DNA, 737 bp, Homo sapiens
atccaagaggtagctgatgggatttagccttggttttggaacatagtttttgtgaaaatgaagctaattggcctatggagagagtaaatctgtagtcgtcaaaaccatgttgagtttttttgagatagggtcttgctctgtctcccaggctggagtgcagtggctctgtcatggctcactgcagccttgmccttctgggctcaagcagtcctcccacctcagcttccagagtagctgggaccacaggtgtgcaccatcacacccagctagttttttttttttttgtagaggtgggttttcaccgtgttgcccaggctggtctcaaactcctgaactgaagcagtctgcctgccttggcctcccaaagtgttagggttacaggcatttatcactgcaccccgtccttttttctttttttttccccccagagaaagagtctcgctctctcactcaggctagagtgtagtggcacgatcatggctcactgcagccttgagttcctgggctcaggcgaccttcctgcctcagcaacaagggtagttgggacaacgggtgtgtgccatcatgtctggctaatttaaaaaaaaattttttttttttttttgagacggagtcttgtactgtcatcctggctggagtgcagaggcgcgatctccgctcactgcaacttccgcctcctgggttcaagcgattctcctgcctcagctttccgagtagctgggattacaggtgcccac

SEQ ID NO: 93487 - DNA, 737 bp, Homo sapiens
atccaagaggtagctgatgggatttagccttggttttggaacatagtttttgtgaaaatgaagctaattggcctatggagagagtaaatctgtagtcgtcaaaaccatgttgagtttttttgagatagggtcttgctctgtctcccaggctggagtgcagtggctctgtcatggctcactgcagccttgaccttckgggctcaagcagtcctcccacctcagcttccagagtagctgggaccacaggtgtgcaccatcacacccagctagttttttttttttttgtagaggtgggttttcaccgtgttgcccaggctggtctcaaactcctgaactgaagcagtctgcctgccttggcctcccaaagtgttagggttacaggcatttatcactgcaccccgtccttttttctttttttttccccccagagaaagagtctcgctctctcactcaggctagagtgtagtggcacgatcatggctcactgcagccttgagttcctgggctcaggcgaccttcctgcctcagcaacaagggtagttgggacaacgggtgtgtgccatcatgtctggctaatttaaaaaaaaattttttttttttttttgagacggagtcttgtactgtcatcctggctggagtgcagaggcgcgatctccgctcactgcaacttccgcctcctgggttcaagcgattctcctgcctcagctttccgagtagctgggattacaggtgcccac

SEQ ID NO: 93488 - DNA, 622 bp, Homo sapiens
gtttgataccagcctgaccaacatggtgaaaccccatctctactaaaaatacaaaaaaaaaaaaaaaaaaaaaagaattatcctggcgtggtagcagacgcctataatcccagctacttgggaggctgaagcaggagaatgtcttgaacctgggaggtggaggttgcggtgagcagagattgcgccactgcactgcagcctgggtgacaagagcaaaactccatctcaaaaaacaaaaaaaargaaaagaaagaaaaaaaaaaagaaaagagcacagtatataacagagtgaaaaaaaaatattggctgggtgcagtggctcacacctatgatcacagaactttgggaggcgaaggtgggcggatcacctgaggtcaggagttcgagaccagcctgaccaatatggtgaaactccgtctctacaaaaatacaaaaattagctgggcatgatggtgggtgcctgtaatcccagctactggggaggctgaggcgggagaattgcttgaacccaggaggtggaggttgcagtgagccgatatcgcaccattgcattccagcctgggcgacagagtgagactccatctcaaaaagaaaaaaaaaaagaaagaaaaaaattctgtac

SEQ ID NO: 93489 - DNA, 812 bp, Homo sapiens
aaaattgcacgagaagcaatttatgtaaaatttcgcttaggaaacattgttttggcaggttagtagtatggtgtgcatttcccagaaaattcagtgccgtgagtattacctttagttaagcatcttagaaatagtagctctttatggctaagtcagaaatactaccctcaaattctatgtgaccctagttatactgttgagcctttctgtgcctctgtgccttcatccttgaatcggggataatatacttacctcctaaggttattgtaaggattaaatgcatgtagtataaataaagagctgagaacaatgyatggcgtaaagtgataggtattattatatgcttttgttggctgttgattgaaggtgttcgctgttttgggggtgtcctttaatagagtaacttggtactgtggaaatagcatgattgtgagcaaaagaatcagatggtggtggctgcagactttgctgttcccttcttgactgttggttatagccaatgcagggtaagttataaagtcaagagcagagccgttttcacaatggacattgctttgtgatgtctgtgagcttgaatgtgagaatgattattttaattctctatgtaaggactttaaagtattggctattcggtagcttgaaaactctgtaatctcaatgctttaaactgagagtggaaaatcaataaagcaaaagcatgaggccacgcagtgtagaatgagtgtcttttcaccacgtagggaaatctgtagtcctaagaaaagagggagtgagaattctggcgaaaggattgtgcctctgcacaaagtgca

SEQ ID NO: 93490 - DNA, 730 bp, Homo sapiens
tcagaaggaccagcctgtacaaaggcccaaagttgggaagaaagtaagtgaatgggaggcacagaaaggccagcgtgtctggatgaaggcaacaatagcaggagttgagctgggagagaaaaataggggctacatcacataggtcaggaagaggagcttggatttgatcccawatgcacgggaagccgcttgatgctggtaagtggcacactctggtttatcttttaagagaatttcactccggatgctgagtcaggaagggatgtgtgtgtgttgggcttggacgagaaggacggaagcagggggaccagtcaggactttatcccagcgggccatgtgagagacgatagtgctaggccagagaagtggttgtagagactgtgaaaaaagggaagattcacggtgtgttttggagtgggcaaaatttcttactggattgtgtgtttagggctgagaggaccaggagtgagggtaagcggttaaggttgagggaagaagaagaatgaaagatgactcctacaattaggtttaggcaattgaatcgatgtggtgacattttcacagctgggaaagacagagagaaactggtaaatcagtgctataagttctgtgagggcagggaaaggtacacatacaatatatgtgatatatgagggagtgaattcagttcattatttccacatgtctattcattgtatctggattagataatagctccaatttaacacat

SEQ ID NO: 93491 - DNA, 529 bp, Homo sapiens
ttaattataaaaaaagratgtattttaaatgttacttgtgaatatttaggtgaaagatggttttataaaagattaatagtgccagcctgtgggtaaatatgcctctattaaccattttgatatttaaatatcataaacgtaaacctgtttgccagtttttcaaaagaccttctgtaaagaatggagccttacttctttaaaaatctgatacctcccacatcctgctaaagatgtgttcaggattaggatataagcgttggtggaataattttattatcaaaatgaaatgaaacttctagagtggcagcatggggagtggaagagcaactatatgttaatgaattgctgtgttgaagcctaagcagtggctacgtgaaaatgtttgagtttgctcttttctcctatgaaagtttgttcattttctgtttcataggggtagtaagctgataatgtattaaattgccaagtaattgcattttgagtcagccaataaatttttaatcttgaatgaattgcatatatttcctga

SEQ ID NO: 93492 - DNA, 529 bp, Homo sapiens
ttaattataaaaaaagaatgtattttaaatgttacttgtgaatatttaggtgaaagatggttttataaaagattaatagtgccagcctgtgggtaaatatgcctctattaaccattttgatatttaaatatcataaacgtaaacctgtttgccagtttttcaaaagaccttctgtaaagaatggagccttacttctttaaaaatctgatacctcccacatcctgctaaagatgtgttcaggattaggatataagcgttggtggaataattttattatcaaaatgaaatgaaacttctagagtggcagcatggggagtggaagagcaactatatgttaatgaattgctgtgttgaagcctaagcagtggctacgtgaaaatgtttgagtttgctcttttctcctatgaaagtttgttcattttctgtttcatargggtagtaagctgataatgtattaaattgccaagtaattgcattttgagtcagccaataaatttttaatcttgaatgaattgcatatatttcctga

SEQ ID NO: 93493 - DNA, 753 bp, Homo sapiens
ccttgagcccaggagttcaagaccagtctgggcaacatagcaagactccatctctaccaacaacaacaaaaaatagttggacacagtggcacacacttgtgttcccagctaatcgggaggctgaagtgagaggatcacttgagcccaggacgtcaatgctgcagtgagccatcatcatgccactgcgctccagcctgtgagtgacagagtgaraccctgtctcaacagaaaaaggggaagaaaaagcacactcatagcacattgcaggcctcctgaaagttgttaccagtgccccattccctgcaggacagagtctgagctactgggaagggcttctaaggctatgtgcttcccatctgcctctggaaccttagttggctgctctgaggcccaggccttgcccccggcaacctcaagcactttataacaccagcctttctgagctacctcactggttcccaaccttgctttctttaccagaaatctcctccccacctcctatcaaaccccaaccccatgccttgctttgtgtgcctgatagacgttagctcactctttttccccagatgtggtaaaattcacaaaacatgggacgggtgcagtggctcacacctgtaatcccagctcaggagtttgagaccagcctgggcaacatggcgaaaccatgtctctaccaaaaatacaaagaaatatagccaggtgtggtggcatgtgcctgtcgtcccagctactccagaggctgaggtgggagga

SEQ ID NO: 93494 - DNA, 567 bp, Homo sapiens
tctcaccacttctccctatctaaacttctcttgcttctttattggttgacttgtttattgtctgtctctccccctagaattgcagttctataagagtaagaacattatctttcatgcccacttctatgtccccagtgcctggcacataggaagaaaggctaataaatctttttgctgaatgaatgatgaaatgactaaatgaaaaatataatcacagatgtgtgttcctgattttatgtaatataaatgatcttagaaatatgagtttaagtcgaattttataaaaattaaactgtaagagaaaaactacactgtattatacctattttatacctattacaycaaattaaaccatattaagaggccaggtgtggtggctcatgcctgtaatcttagcactttgggaggctgaggcgggtggatcatttgaggtcaggagttcaagaccagcctggccaacatggtgaaaccccatctctacttaaaaaaatacaaaaattagccaggcatggtggtacacacctgtattcccagctactcaggaggctgaggcaggagaattgcttg

SEQ ID NO: 93495 - DNA, 726 bp, Homo sapiens
agactgaagctgcttaggtaattgtttgaccttgaaggagttacttagcttctttacaccgcagtttcctcatttagaaaatgaggctagacctgtctttgagcaagttgtaagggagaattaggtcatgtccataaaatacttgaggtctttggaagaaaagcatttacaaacatataaatggcataattaatgtcatcatcaccattattattgttgatgatggggaatagttcaatgcacatgccaacttcagagttgggaatatttgttacagagaatgtgaacctaaagactactatggatcatctttttcccactccattttctactggattaaaacatcccactgtcacagaagtattcttgttcatagaattggtgttttatagctrgcaacaaaatatgtgcctacaaagtctcctgacccatcacccttctttttcaaaatgattcagagtcccttaggagtatcttagatggaaccagaaagattttcacctacttaaagccttatctgtaatgccatactttctatgttaatattaacaactaacactgatagagcacccagtgcattccaggtactgtgctaagaattcacctgtgttatctcatttaaatctcataacaacctgatacactcttcactctctcactttcgttagtctctactcaaaggggaggcttttcagatcactctatataaaaaagtaacctaccccc

SEQ ID NO: 93496 - DNA, 1101 bp, Homo sapiens
ttctctggccactttcaggcacaatacatatcaattaactttctaatccattaataaggatggtttctcacctgcacgtgctcaaatggaagtctagaaatatcccagttcaagactgcagtgggttgttatcttgcctttttcctttagtttatgatttattgctgaaatgaagccatactgtgtctagtgtaactgtacactttatttgagggtgtagaattattatatcttaataaaaaaggtttttctgtttatgtactttgtgacataggtgaatttacccagaaaacttataataagaaaactgcacaagttactgggcgtctgaagatgtcaggaggcatcatggaatttttaatgtgctggaaagtaaaagaaccacttgctgagtttaagtaagccctataatatctatcccatgccagagctaacttctgagagtaaagtacttgtattcatcagaaacctaaaatgggtgaaaatgaaccaagaccatggaatcttcatatgaaatagtgttaccatgagcaaatgatgaaagaattctttaatgtgcaaccactcagacacttctgccagtagttatagaagagaaactgaagaaatcatgtcacactctgaaaatataaataaattataaaaaagaaaaaaaagaagtaagctaagagaaaaaagagctggggactagtactttttaaggtttaagtttaggagctaagccttgtcagtttttattggttaataagattgagggaataggtggcaagtacagacggtaaagagactatattttgggtacaaccctaacggccttcaaagtgtatatcttttttgcgattctttcctagaatgttttgtcttacttgacagtgtctcaraggatttagtccactcttccaactttaacttccacctacatcctgatgacatctaaataaatatttccagccccaatatctcccagaagttctagatgtgaatttccaaatgtctactttacatgtgcctccagatgctttacaggcatctcagactcaacctgtttgttgcttcctgttctttctattttggcgctccgtgtgttcattgtcttagctg

SEQ ID NO: 93497 - DNA, 661 bp, Homo sapiens
aagcagtctagtatacagaattttaggtttggtgggataaattcacatcaccagtacatataaacatgaatggaatgcaactggccaggtaggatgtttagaatgagcctcattgtagtgtttgctgggtggaagatgtctgtgggggtgctgagttattaaggagcatagcatgaaagctattcagaagtggggaggtgaagggttttttacagcatgagaggcaaacagagctgaagagctacacccaattgtttgactgagggccgtggtgcgtatgagtccactggtccaacagctcctctgtattggtgttgctttaatttccttaacacctattagcattttacttaaatacaaacctagtttaatttattttgaaatcttttttgagtcagatgtcarttgaacaaatacctaactgaatattgtgttcttccagctttctctgtacacggaaatagttctgttacacagaaggtagttaacacatgtgtgccaattgatttattgaaaatacaaacaaaaatgtctttatcaaatttgttatgttaaaaatctatggtgttaaacctgagaaacacaagcaatacggaaaggattccctatttaacaaatgatgctgggaaaactggctagccatatgtagaaagctgaaact

SEQ ID NO: 93498 - DNA, 641 bp, Homo sapiens
ctcctggcttccaggctttcactggggattggttgtctccattcttcttttccccttcccactggaagtggatgagtctagattgcaatcccagctcctgaacttactagctgtgtggtcttgggcagtttccttcactctgctgagttgattcctcagggatggkacttgtggctacctcaggggggttgtgagcacaggtgagataatatgtgtgaagcacttagccctgcactgggagtatggtaagggctagatgagtgttagctgctgcaccgcaggccagacctgctcttggagtttggtcattgatgaaaggctgctgggagtctcagaccctatctgaggaaaaagaagaacacatcctggttcacctgagctcagaaggcatcacttctcaccatcacctcctcaaatctcagcgtgtgtcttacagagcctgagccagaattgtgggggagtggttgctgttttgttttaaagcatgcagataaaattccaattatgatgacacattcagatctctgacccccaaggaggagtcaggtcataggaaattcctccagccacctattgtcacctgcttttcatgacctgcatgagggggaaggccttagggctaggctcagagtggagagcct

SEQ ID NO: 93499 - DNA, 620 bp, Homo sapiens
ggaggaggaggacagagcagaagaggtgagcccagccacagagggagcagctaaatgaaccagggaatcctgaccatcatactgggctcatccgagcactgcctttcccctccccaaatgactgagctgccagtagagatgactgacggccactgagaaaccatgaagtcctggcccaagggacagtgtcaggcatgtctgagaataaggcatcctcagaatccagagtttgggccagaaaggyctcagttgtttgacaaacaacactccttgtttgacaaaggaggaacctggtctgcagaggaggtgaggtctgcccaggatgacccagcttggtgagtgaaagagctggaggcaacacccgcctcccaacccaagccctgtgtcccgtcaggctgaactgggcttcgtgctctaggcagcctctccttctctctcctatatccaaagagttctagtcctctctccccttcacccgtcaccactaccataaacccttactgcttacttatagcttgcccaggcattgttatacatactctagaaatagtaattcagttgttcttcaaaataaccccattaggcagacaccataattttccctgctctataagaaactg

SEQ ID NO: 93500 - DNA, 620 bp, Homo sapiens
ggaggaggaggacagagcagaagaggtgagcccagccacagagggagcagctaaatgaaccagggaatcctgaccatcatactgggctcatccgagcactgcctttcccctccccaaatgactgagctgccagtagagatgactgacggccactgagaaaccatgaagtcctggcccaagggacagtgtcaggcatgtctgagaataaggcatcctcagaatccagagtttgggccagaaaggcctcarttgtttgacaaacaacactccttgtttgacaaaggaggaacctggtctgcagaggaggtgaggtctgcccaggatgacccagcttggtgagtgaaagagctggaggcaacacccgcctcccaacccaagccctgtgtcccgtcaggctgaactgggcttcgtgctctaggcagcctctccttctctctcctatatccaaagagttctagtcctctctccccttcacccgtcaccactaccataaacccttactgcttacttatagcttgcccaggcattgttatacatactctagaaatagtaattcagttgttcttcaaaataaccccattaggcagacaccataattttccctgctctataagaaactg

SEQ ID NO: 93501 - DNA, 1146 bp, Homo sapiens
gcatgtgtgtgttccaaatatcctctttcattgagaactaaaagtattaactamattattcttctgtttcatgaacaagtctgtgtcatagggggaaaggtttttctctaagcatttataaatttactggagaatttttccagaattccatttgttttctcttttctcattctagagcttgatgtgttgctctttgataactatgagaggctctcatagttgaaaggctctctccaaagcctgcaagtttggaaggaaaggctgagggcgcatggaggagtaggtctgtgaagcttgggactaaagaacaccaagcagaaagcaggcccaggctggaggatgggacaccactcccctgaaaatggacagcaagactcctccgagtgtggccaaagaacatccaagcagggcagtgcttttcaagacctgtcaccagactcagagaacagagattggagctggtcaaggtgagcttgggccagggcggggaaagggaagacagaggcaagggaaggtgccgaggcagcaggggctgcctttaatttccccggagggcagagaattggagacatgcctatagaatctggaacagtttcagttcttctgcttctcacagtggctactagacattctttcctttccagatggacacatcaaaggctgggagaggagacttctgctcttcccatgccttgacccctcttctaagtactccaagcactctctgttggagctcctgaaatccctaagcaggatgagttccttgatgagatcccaaggtacacatgtgcttaaggagacttgttttttcaaagaaaaaaaagacaacaacaatgtgaacagtgtccttacatctctaaaaatttttttttcctttggttctcttcatgtgggcaatatattcctaacaaagggataatgaaataactaattttctgagttgcatcttaggagcatctgctattagaactggcctgctaaaatctcattcttcccttctaaattctgtcttcatctccattcctgccttctttctcatttcttacaccaagtaattgtaccaggatgcaccctggtacaggtgcattcactgcaatgttctgctctggaggacagagcccacgttaaagggcatctgtgtgtttt

SEQ ID NO: 93502 - DNA, 767 bp, Homo sapiens
tatttaaataagggttttacacgattagatttaaaggttaaatgtgattttttattcaaaaaaaaatctttaagcttcaataaatccagctcctgtctcccgggatatcctgtcactagaaggaaaagagagtattttagacagtacttttttttttgacactggtctcactgtcacccaggctggagtacagtggcgtgaactgcagcctcaacctcctgggtttaagcaatcctcccatctcagccttcccagtagctggaactacaggtgcataccactatgcccagctaactttttaatcttttgtagagacagggtcttactatgttatccaggctggtctcaaactcccgggctcaggcagtcatcttgcctcagcctctcaaagtgctgggactacaggcatgagccaacgctccaggccctagatagtactctttatttttctcttcacatagtaagaaatatttcataccaactttattaaaaacaaaatgaaatagatgtcccactgtaagtttcttgaccttttagctgagcactcttattcttttagctccctggaataaaagaattgtttctgataaaagtagatcctcacttaattccttcagattttggtcaaaacaggcaaataaagtaagcctaaaagcgcagttgtctctcactctgccaggcacacatataggcacgcatgtacacacagagtaccagatgcaacaagatttgaaactgtggttaaraagctctataactatcaaaac

SEQ ID NO: 93503 - DNA, 885 bp, Homo sapiens
atttgtaatgtacttgtaaattgagactttatatgccaaaatacaaatttgcaggcattttcagaagacccttccaaactttaaaggtgtccctcagtagccatgaagcacagctccttttagagagttgcacagcactgagctgtctgttacagagagcagtcacatgctaaggaaatgcagggctcatggcatagagagaattttccatttctattaaaattaagtgattttattcatggtctgatttcttttaggtttttgcaatctccaggaacgccaggccacatgattgaaacagttgttcaatttttcttgctgaagatggtgaactgggttaagtttagaaacaaycatagctggaaaaagtatgactttgttagctgcttacttccttttcagagaaaaaatacttttctagtttctttctttagttacaaaaataatatgtgctaattataacaagccaatcaatggagaggcctgcggatatgaagttcatagtcattcattcatcttctgcagagtggctccccaaggcagccaaacattgacaagcaggcttgtgtgtttccacactgtctcttgagcgaggcttatttagtctacacttgcctcctttaaagctgttcacaagcagatgaggatcaatctcggattctagaaggaagaacccagcccctactgttagaaggagcagtgaaggcggcaggtcaaagcacagcctggagccgactgtctgtgtccaaatcccacttcaccacttgctgcataactggagcagatgattcagcttttctctgccttaactgactcatgtaaatggggatattaaaatatcacatatggattattatattgactaggaagttaatgcaatacagc

SEQ ID NO: 93504 - DNA, 885 bp, Homo sapiens
atttgtaatgtacttgtaaattgagactttatatgccaaaatacaaatttgcaggcattttcagaagacccttccaaactttaaaggtgtccctcagtagccatgaagcacagctccttttagagagttgcacagcactgagctgtctgttacagagagcagtcacatgctaaggaaatgcagggctcatggcatagagagaattttccatttctattaaaattaagtgattttattcatggtctgatttcttttaggtttttgcaatctccaggaacgccaggccacatgattgaaacagttgttcaatttttcttgctgaagatggtgaactgggttaagtttagaaacaaccatagctggaaaaagtatgactttgttagctgcttacttccttttcagagaaaaaatacttttctagtttctttctttagttacaaaaataatatgtgctaattataacaagccaatcaatggagaggcctgcggatatgaagttcatagtcattcattcatcttctgcagagtggctccccaaggcagccaaacattgacaagcaggcttgtgtgtttccacactgtctcttgagcgaggcttatttagtctacacttgcctcctttaaagctgytcacaagcagatgaggatcaatctcggattctagaaggaagaacccagcccctactgttagaaggagcagtgaaggcggcaggtcaaagcacagcctggagccgactgtctgtgtccaaatcccacttcaccacttgctgcataactggagcagatgattcagcttttctctgccttaactgactcatgtaaatggggatattaaaatatcacatatggattattatattgactaggaagttaatgcaatacagc

SEQ ID NO: 93505 - DNA, 1532 bp, Homo sapiens
ggcgcgatctcggtttactgcaacctctgcctcctaggttcaagcaattctcctgcctcagcctcccgagtagctgggattatagacacacgccaccacacccggctaatttttttgtatttttagtagaaacagggtttcatcatgttggccaggctggttttgaactcctgacctcaggtgatccgcctgccctcagcctcccaaagtgctgagattacaggctaattaagtatttaaccactctgttcctgtttcctcagctacagagagactgagtagattatctcacagattggcttccagaactaaaatacaaaactaaaaggaagaggaggaggagaaggaggagagaaattgagacaatttatgtagatatcatccaagataaagatgactaaagaaacagagcaattggaggattataatttaagagagttttgtttttaggagataaaatgtctggtagaaaaagtttacataacacatttttaggtgttcaggatatccaaatcctggcacttgttcttcttacctacagggttctctgccaaagaacacctacaaaaggatcaataatcgaataagaaatccagtgtaaattttatcagtatctgaatagttccctgaaaatccaagggaaagctggatggcaggcataatttgggacaaagaaggaatggagtctcttatgtcccatccaaaatctagaccttgggatcctatgctcatgtgtgggagaaggtgtataggcacatacactctcatgttcagagagttggtgggtggagggagagggaaaaggtgagcccaaggacagcagagagaaagaaaaagaacctaartatatgggcatgctcacctgtccaatatcaggctgaactgagcccagagatacccattatatttctgtgcaggattactgatcactaggggaaacatggccccataaataacagatttaatcagataagcagctcctctcccatgagaactagttcagaactaaagtaaagagctggctgtgagggattcatccaagaatccactgagccatgcaaggatggatgttttctcttatgagctgagatagaaagctgggaagagaagcgaagtgtctcatccttacccaacagtattattttgattcttcaatttttataatatgatatcctttgatggtgggaactatgtcttacccatcactgctcctagcttactgaactacagtgaatgttaattgaatcagtaaatatattaataatcaggattgactggatttaaataagattattgcaactcaaagaatcctcgggagggcatcatccatcttcaccatttgttatgaactcttcatgtgtattaattcatttaatgcaataacactataaggtggggaactatcatcattcccccattttacaaatgaagaagctggggtctggaggacccatctcgccccatcacacagttagcaagtggcagaacaggaatgggaagccagatattagatacaggatttatgcatttgc

SEQ ID NO: 93506 - DNA, 528 bp, Homo sapiens
ttttttttttttttttagatggagtgtctctctgtcgcccaggctggagtgcagtggcgcgatctcggctcactgcaacctccgcctcccgggttcaygccattctcctgtctcagcctcccgagtagctgggaccacaggcacccaccaccacacccggctaattttttttattcttagtagagacggggtttcactgtgttagtcaggatggtactgatctcctgaccttgtgatctgcccgccttggcctcccaaagtgctgggattacaggcgtgagccaccgtgcctggccaaaacatgattaatatttctatgtgatattctgatttcttaaagagggtacacccgcaaacaaaaagctatataatagtccccttttatccacaggaaataagttgcagacctccagtggatatctgaaacattgactagtaccagacttatataaactctgttttttttcctatacatacatacctatgaagaaggctgagatacaacagcaaactagcatgaaattcttt

SEQ ID NO: 93507 - DNA, 528 bp, Homo sapiens
ttttttttttttttttagatggagtgtctctctgtcgcccaggctggagtgcagtggcgcgatctcggctcactgcaacctccgcctcccgggttcatgccattctcctgtctcagcctcccgagtagctgggaccacaggcrcccaccaccacacccggctaattttttttattcttagtagagacggggtttcactgtgttagtcaggatggtactgatctcctgaccttgtgatctgcccgccttggcctcccaaagtgctgggattacaggcgtgagccaccgtgcctggccaaaacatgattaatatttctatgtgatattctgatttcttaaagagggtacacccgcaaacaaaaagctatataatagtccccttttatccacaggaaataagttgcagacctccagtggatatctgaaacattgactagtaccagacttatataaactctgttttttttcctatacatacatacctatgaagaaggctgagatacaacagcaaactagcatgaaattcttt

SEQ ID NO: 93508 - DNA, 1667 bp, Homo sapiens
atgggctaagttgctgtatcccccaaattcctaggttgaagctctaatgcccggtacctcagtgactgtatttgagacaaggcctttgaagaggtgcttagcttaaaacgagactcttagggtgggtcttaatccagtcgtactggttatccttataagaaaagaaaccttggatggaaaatcgaggcaccaggagttggtgcccagaggaaaggccatgtgagaacacaggaagaagagaactcagaagggatcaaacaggccgacaccttgatcttggacttccaacctctggagaaagtagaaaataaatttctgttggttaagccacccagtctgtggtatttggttaatgtagccctagtaaatgttatttacacatacatatacacatatacaaacactctagcaaaggatgctttcatctacacatccacacacacactcctcacggatgattatcttctgcagttgaaagcttcttcatatatttaatagcattgccaaacattgaaaatagcccttcaccaaactattttggaatttggtgcatkgttattatatatgacagatgttttcatctcacagtaaaatgtgtaggttaagcctggaaaatactacataaaaaaaaattgatctgggagttgtggctcatacctgtaatcccagcactttgggaggctgagacagaaggatcgcttgagctcaggagttcaagaccagccaaggcaacatagtgagacctcattactagtgaaaaaaaaatgtatcaggtgtggtggcatgcacctgtagcctcagctactcaggaagctgagacaggaggatcgcttgaggctgagagatcgaggttgcagtgagctgtgatcacaccactgcattccagcctgggtgacagaggagaccctgtctcaaaaaaaaaaaaaaaaaaatgcatcgagagatacaaacttcttcatgtttgttcagtttgctaaaaaagttcagataatattttatactgtgcagggttacacatagatgagattggctagcaaagaatttcgggagcaaaaatgaattccataattagtcaacttttccttttaggtattactggattgtttctctgtgaaagacaatcaccaaaataagattttttcgtgtttttttttttttttttgccaaggatttggtagctctgctttgtaatatgtgatgatagtaataaataaataatttctctggcattaatgatattaacattttatgtaactcattcattaaggtctcaagtggatgctcaaagctattacaattcagtacaagtcacttagtatgaaacacacgcctcccacagcactacactggttttaaaattgatagcaccatcaggtctacaaggtcttgagaagaatttcattttctcaccagtctaaagtgattgtgctatgttccctgaccttcaaaagctttttgtcatttttctgccatgtagtgcagaggttctttcctccatccatttcatttaaatatgtgctatgtgggtaaatccaataaactaagtagccatttagttaaaacccttgtgggggtcagagctctagggaacatttcaaggcactaatgttccttcttcaactctgatttcctagatcattgatcatcttctaccagctctttgaaat

SEQ ID NO: 93509 - DNA, 1667 bp, Homo sapiens
atgggctaagttgctgtatcccccaaattcctaggttgaagctctaatgcccggtacctcagtgactgtatttgagacaaggcctttgaagaggtgcttagcttaaaacgagactcttagggtgggtcttaatccagtcgtactggttatccttataagaaaagaaaccttggatggaaaatcgaggcaccaggagttggtgcccagaggaaaggccatgtgagaacacaggaagaagagaactcagaagggatcaaacaggccgacaccttgatcttggacttccaacctctggagaaagtagaaaataaatttctgttggttaagccacccagtctgtggtatttggttaatgtagccctagtaaatgttatttacacatacatatacacatatacaaacactctagcaaaggatgctttcatctacacatccacacacacactcctcacggatgattatcttctgcagttgaaagcttcttcatatatttaatagcattgccaaacattgaaaatagcccttcaccaaactattttggaatttggtgcattgttattatatatgacagatgttttcatctcacagtaaaatgtgtaggttaagcctggaaaatactacataaaaaaaaattgatctgggagttgtggctcatacctgtaatcccagcactttgggaggctgagacagaaggatcgcttgagctcaggagttcaagaccagccaaggcaacatagtgagacctcattactagtgaaaaaaaaatgtatcaggtgtggtggcatgcacctgtagcctcagctactcaggaagctgagacaggaggatcgcttgaggctgagagatcgaggttgcagtgagctgtgatcacaccactgcattccagcctgggtgacagaggagaccctgtctcaaaaaaaaaaaaaaaaaaatgcatcgagagatacaaacttcttcatgtttgttcagtttgctaaaaaagttcagataatattttatactgtgcagggttacacatagatgagattggctagcaaagaatttcgggagcaaaaatgaattccataattagtcaacttttccttttaggtattactggattgtttctctgtgaaagacaatcaccaaaataagattttttcgtgtttttttttttttttttgccaaggatttggtagctctgctttgtaatatgtgatgatagtaataaataaataatttctctggcattaatgatattaacattttatgtaactcattcattaaggtctcaagtggatgctcaamgctattacaattcagtacaagtcacttagtatgaaacacacgcctcccacagcactacactggttttaaaattgatagcaccatcaggtctacaaggtcttgagaagaatttcattttctcaccagtctaaagtgattgtgctatgttccctgaccttcaaaagctttttgtcatttttctgccatgtagtgcagaggttctttcctccatccatttcatttaaatatgtgctatgtgggtaaatccaataaactaagtagccatttagttaaaacccttgtgggggtcagagctctagggaacatttcaaggcactaatgttccttcttcaactctgatttcctagatcattgatcatcttctaccagctctttgaaat

SEQ ID NO: 93510 - DNA, 897 bp, Homo sapiens
ggaaggtaatgcagttatattttaaagtcatttctgcatgattgatttttgtctgataatttaattatgggcactatttattggaagagtttgcttcttattctagacatttgtccttacttggcattctattatgctgccatgacacattgcactacttaccagtaactgattatgacactttcaggctgattctcatcctggcaatgatgcagaaaggttttcagtactgtgtgctcagacagcactatacttggaaaggaagcttttgctgctgctgcgaaattggaccaagagtacmaagttctccatgaaccaaaactacctcagctttcttactcttttagcactggtcataaaggcagtgcaggatagtcataggaacatgggctgggatcagggggctttaggttagaatcgcaggcctggagcatctgctcctcttccccatcctaatagactgatgtactgaatctatggaagactcccttaccttatctgattgactggtcaagaaaggctcaatacagagacatgttaagaaccaagaaaggacttcgtgttttcttccttttacaacagctctagaaaacagttcttgctgagatagataatccaacatgtacatgtgggctcagaatgctttacttaaactgaagaggaaaactgaaataatacttataattcaagcagagacaacccttagtctcaactatttaaatctttcaggcaaaagagtttcttaggcctgaattatgagtggttgcctcgtgctccacttcacctcacatgggtaaacacaggccaagtgtgcagcagtgattttaatgggctcagccaggctaaaagcctaatgaaatggttgcatgatgaaaaaccaatagaattttaactctg

SEQ ID NO: 93511 - DNA, 2042 bp, Homo sapiens
cgcctcagtctccggacaagctgggattgcaggcctgagccactgcatctagcttgctgtaaatttttaaattcaaagttcttaatgtaatgtaaaataattttgtagtctgacccctatttatcttttcaacctcataaattgcccctctaacttctttgtgcccaatatgttaactacttaggtctggggtctttcttcttgtggtttttccatatactgtttcctggaatacattcattccacattatgaacctgttcacactcatactttcttctctgcatcttgttttgtgccccaaggaggctgattttgagagctagatctacggctctcttttcaccttctaatagagttcccttaacagagagcccgaacaaagggttggaagagggagagtgacatctaaatatgtattatttggactccttctccaccgtgtttccatagcttgggtgcctcccttgacgtttcttgaactaaggtcatggttcccttagagcagccctctcgacgcagcctctctatctccaggctccggtaacccctccctcccctgttattttcaagcccggcacagtatcctgtgacctttcttgttgtgtccttataccttactcaggtctttgaaattgtctcctgattaaacttgcttcaaattacctaaatttaatgttctattcctttcctttaggaacctgactgggatcctgaaagaggtatctggacacaatagtctggagctcagaggaaagcttgtaaataagggggaagggggagggatagcattaggagatatacctaatgctamatgacgagttaaagggtgcagcacaccaacatggcacatgtatacatatgtaacaaacctgcacattgtgcacatgtaccctagaacttaaagtataataataataaaattaaaaaaataaaaaatatacatatacattttggactcatttatagtattaaaaagtgcaagtggatttaatgtcacaaggttgagtaagatttccttgggagaaaagcgtagataaaaagaagacctgcctagggctaagcattgaatcactccagtgctaggggatttaacagagtattgttagggtggcagggatagaggctggaagagtaaggagagccgaaggagagactgagaagaagtgaagaaggtgaaaatccaggcaagaaaacaaaagactaccatctcaacaatatattaaaaagcaaaaccaacaacaatcaacaaaactttgaagttattgttttttccagtatgtcaaatccaagaccatattttcaggacaggttatccattatattacctgggcgtctattttgctacaaaaaaattgtgccaaaatgatacttccaagcatttggaatagattgcagctataagctataatgaggtatatagaaaaaacatatttcctttctgcggccaacagtaggactaatgggcttttctctgttataactatcactaaaacaaccaccaaaaataaagattcagtgaatccttcatttatgatttattggaaagcagacaccaatgaagaactaacagaccaattagagaacaaactagacaaataattaaaagatatttggaaaattatgattaggacagtgaaggatgtaaaaataatatgacaactaattaacaggaaaaaaaagatagcacttataacaccacttgcattcttagaaagtagatgctgtttatgacaggccattttttgtttgattgttttctgctaagctgtttgatggattggggagttgggttctgagagaagtgctgagataaagagatgaaagtggcaaaaaaaagtgaggtccatgatgtcagaaggctttgctctagttggggtaacctgtctttgacacaaaaatctttaataaaccagacagaatgcataaaatgcttggtatgagtagaccttgctttgctatatgcttatatccaatgaaagaaatgtattttatatccagagtaaaatgaagacttttaatgacaattcaggtgttggaaaca

SEQ ID NO: 93512 - DNA, 2042 bp, Homo sapiens
cgcctcagtctccggacaagctgggattgcaggcctgagccactgcatctagcttgctgtaaatttttaaattcaaagttcttaatgtaatgtaaaataattttgtagtctgacccctatttatcttttcaacctcataaattgcccctctaacttctttgtgcccaatatgttaactacttaggtctggggtctttcttcttgtggtttttccatatactgtttcctggaatacattcattccacattatgaacctgttcacactcatactttcttctctgcatcttgttttgtgccccaaggaggctgattttgagagctagatctacggctctcttttcaccttctaatagagttcccttaacagagagcccgaacaaagggttggaagagggagagtgacatctaaatatgtattatttggactccttctccaccgtgtttccatagcttgggtgcctcccttgacgtttcttgaactaaggtcatggttcccttagagcagccctctcgacgcagcctctctatctccaggctccggtaacccctccctcccctgttattttcaagcccggcacagtatcctgtgacctttcttgttgtgtccttataccttactcaggtctttgaaattgtctcctgattaaacttgcttcaaattacctaaatttaatgttctattcctttcctttaggaacctgactgggatcctgaaagaggtatctggacacaatagtctggagctcagaggaaagcttgtaaataagggggaagggggagggatagcattaggagatatacctaatgctacatgacgagttaaagggtgcagcacaccaacatggcacatgtatacatatgtaacaaacctgcacattgygcacatgtaccctagaacttaaagtataataataataaaattaaaaaaataaaaaatatacatatacattttggactcatttatagtattaaaaagtgcaagtggatttaatgtcacaaggttgagtaagatttccttgggagaaaagcgtagataaaaagaagacctgcctagggctaagcattgaatcactccagtgctaggggatttaacagagtattgttagggtggcagggatagaggctggaagagtaaggagagccgaaggagagactgagaagaagtgaagaaggtgaaaatccaggcaagaaaacaaaagactaccatctcaacaatatattaaaaagcaaaaccaacaacaatcaacaaaactttgaagttattgttttttccagtatgtcaaatccaagaccatattttcaggacaggttatccattatattacctgggcgtctattttgctacaaaaaaattgtgccaaaatgatacttccaagcatttggaatagattgcagctataagctataatgaggtatatagaaaaaacatatttcctttctgcggccaacagtaggactaatgggcttttctctgttataactatcactaaaacaaccaccaaaaataaagattcagtgaatccttcatttatgatttattggaaagcagacaccaatgaagaactaacagaccaattagagaacaaactagacaaataattaaaagatatttggaaaattatgattaggacagtgaaggatgtaaaaataatatgacaactaattaacaggaaaaaaaagatagcacttataacaccacttgcattcttagaaagtagatgctgtttatgacaggccattttttgtttgattgttttctgctaagctgtttgatggattggggagttgggttctgagagaagtgctgagataaagagatgaaagtggcaaaaaaaagtgaggtccatgatgtcagaaggctttgctctagttggggtaacctgtctttgacacaaaaatctttaataaaccagacagaatgcataaaatgcttggtatgagtagaccttgctttgctatatgcttatatccaatgaaagaaatgtattttatatccagagtaaaatgaagacttttaatgacaattcaggtgttggaaaca

SEQ ID NO: 93513 - DNA, 2042 bp, Homo sapiens
cgcctcagtctccggacaagctgggattgcaggcctgagccactgcatctagcttgctgtaaatttttaaattcaaagttcttaatgtaatgtaaaataattttgtagtctgacccctatttatcttttcaacctcataaattgcccctctaacttctttgtgcccaatatgttaactacttaggtctggggtctttcttcttgtggtttttccatatactgtttcctggaatacattcattccacattatgaacctgttcacactcatactttcttctctgcatcttgttttgtgccccaaggaggctgattttgagagctagatctacggctctcttttcaccttctaatagagttcccttaacagagagcccgaacaaagggttggaagagggagagtgacatctaaatatgtattatttggactccttctccaccgtgtttccatagcttgggtgcctcccttgacgtttcttgaactaaggtcatggttcccttagagcagccctctcgacgcagcctctctatctccaggctccggtaacccctccctcccctgttattttcaagcccggcacagtatcctgtgacctttcttgttgtgtccttataccttactcaggtctttgaaattgtctcctgattaaacttgcttcaaattacctaaatttaatgttctattcctttcctttaggaacctgactgggatcctgaaagaggtatctggacacaatagtctggagctcagaggaaagcttgtaaataagggggaagggggagggatagcattaggagatatacctaatgctacatgacgagttaaagggtgcagcacaccaacatggcacatgtatacatatgtaacaaacctgcacattgtgcacatgtaccctaraacttaaagtataataataataaaattaaaaaaataaaaaatatacatatacattttggactcatttatagtattaaaaagtgcaagtggatttaatgtcacaaggttgagtaagatttccttgggagaaaagcgtagataaaaagaagacctgcctagggctaagcattgaatcactccagtgctaggggatttaacagagtattgttagggtggcagggatagaggctggaagagtaaggagagccgaaggagagactgagaagaagtgaagaaggtgaaaatccaggcaagaaaacaaaagactaccatctcaacaatatattaaaaagcaaaaccaacaacaatcaacaaaactttgaagttattgttttttccagtatgtcaaatccaagaccatattttcaggacaggttatccattatattacctgggcgtctattttgctacaaaaaaattgtgccaaaatgatacttccaagcatttggaatagattgcagctataagctataatgaggtatatagaaaaaacatatttcctttctgcggccaacagtaggactaatgggcttttctctgttataactatcactaaaacaaccaccaaaaataaagattcagtgaatccttcatttatgatttattggaaagcagacaccaatgaagaactaacagaccaattagagaacaaactagacaaataattaaaagatatttggaaaattatgattaggacagtgaaggatgtaaaaataatatgacaactaattaacaggaaaaaaaagatagcacttataacaccacttgcattcttagaaagtagatgctgtttatgacaggccattttttgtttgattgttttctgctaagctgtttgatggattggggagttgggttctgagagaagtgctgagataaagagatgaaagtggcaaaaaaaagtgaggtccatgatgtcagaaggctttgctctagttggggtaacctgtctttgacacaaaaatctttaataaaccagacagaatgcataaaatgcttggtatgagtagaccttgctttgctatatgcttatatccaatgaaagaaatgtattttatatccagagtaaaatgaagacttttaatgacaattcaggtgttggaaaca

SEQ ID NO: 93514 - DNA, 2042 bp, Homo sapiens
cgcctcagtctccggacaagctgggattgcaggcctgagccactgcatctagcttgctgtaaatttttaaattcaaagttcttaatgtaatgtaaaataattttgtagtctgacccctatttatcttttcaacctcataaattgcccctctaacttctttgtgcccaatatgttaactacttaggtctggggtctttcttcttgtggtttttccatatactgtttcctggaatacattcattccacattatgaacctgttcacactcatactttcttctctgcatcttgttttgtgccccaaggaggctgattttgagagctagatctacggctctcttttcaccttctaatagagttcccttaacagagagcccgaacaaagggttggaagagggagagtgacatctaaatatgtattatttggactccttctccaccgtgtttccatagcttgggtgcctcccttgacgtttcttgaactaaggtcatggttcccttagagcagccctctcgacgcagcctctctatctccaggctccggtaacccctccctcccctgttattttcaagcccggcacagtatcctgtgacctttcttgttgtgtccttataccttactcaggtctttgaaattgtctcctgattaaacttgcttcaaattacctaaatttaatgttctattcctttcctttaggaacctgactgggatcctgaaagaggtatctggacacaatagtctggagctcagaggaaagcttgtaaataagggggaagggggagggatagcattaggagatatacctaatgctacatgacgagttaaagggtgcagcacaccaacatggcacatgtatacatatgtaacaaacctgcacattgtgcacatgtaccctagaacttaaagtataataataataaaattaaaaaaataaaaaatatayatatacattttggactcatttatagtattaaaaagtgcaagtggatttaatgtcacaaggttgagtaagatttccttgggagaaaagcgtagataaaaagaagacctgcctagggctaagcattgaatcactccagtgctaggggatttaacagagtattgttagggtggcagggatagaggctggaagagtaaggagagccgaaggagagactgagaagaagtgaagaaggtgaaaatccaggcaagaaaacaaaagactaccatctcaacaatatattaaaaagcaaaaccaacaacaatcaacaaaactttgaagttattgttttttccagtatgtcaaatccaagaccatattttcaggacaggttatccattatattacctgggcgtctattttgctacaaaaaaattgtgccaaaatgatacttccaagcatttggaatagattgcagctataagctataatgaggtatatagaaaaaacatatttcctttctgcggccaacagtaggactaatgggcttttctctgttataactatcactaaaacaaccaccaaaaataaagattcagtgaatccttcatttatgatttattggaaagcagacaccaatgaagaactaacagaccaattagagaacaaactagacaaataattaaaagatatttggaaaattatgattaggacagtgaaggatgtaaaaataatatgacaactaattaacaggaaaaaaaagatagcacttataacaccacttgcattcttagaaagtagatgctgtttatgacaggccattttttgtttgattgttttctgctaagctgtttgatggattggggagttgggttctgagagaagtgctgagataaagagatgaaagtggcaaaaaaaagtgaggtccatgatgtcagaaggctttgctctagttggggtaacctgtctttgacacaaaaatctttaataaaccagacagaatgcataaaatgcttggtatgagtagaccttgctttgctatatgcttatatccaatgaaagaaatgtattttatatccagagtaaaatgaagacttttaatgacaattcaggtgttggaaaca

SEQ ID NO: 93515 - DNA, 1575 bp, Homo sapiens
gcagtggttctcaccatgactgtaaattaaaatgatctggggatgttttaaaagtacacctactaaataagataatctgcagatggtatctatgtttgtttatggtaatttgcaaccaagattgagaaacctgctgagttaatttctgcactgggtgtaggtttggaccagctttgaattagtcatctcatgataggatgatctgattctgctattactggacacattggtgtaattggtatataccaattggtgcatggtataatattttttcaaactttttaccttgctcttcaactccattctttatatggatgttagagtaattccagaattatcctttgcttgaagagatatagaactatggcaaaaatgtgttgctttaacgttagattttcagctatatccacttaaaaccaagaacttaaaaagttgatttattagtctcttgactgtaaatgggttttgtaggacatgatgttttcctgacataattatttctagaatgagttcctccaatttatttttaaattaagaaatttagaaccatggcattcagartatataccctgattattgaaatgtgctatatgaattgcctaagatctaatcagcacattgttgataaatatttcatacatattttaaatttccatatttttactgcatttcagtatcacaaattgtatttttcattcaatgactggcctatcaacctaatacatatttgtaaatcttaattcaaactcaatgagtatggatccatacaagcttaaactgcaatttcgcacaactgtagttttaaattacaaatcatgaatgcatttaatgtgctctgctgtctggaaagtggtttagagagctacatgtataaaaggtggcacaaaacactctagggcaaggagaaaatttgctatccttttgctattaatgattactcttaattccaccttcctgtatttcccatagttacctaattttcccttaagaatatactttttttcatcttttcatatttatgtttcaaatcatagaattttatgaacattctaaatgtgtgcagcttttagggagcttggcctcttacaaaggcagatacagaatcacatcatttaaatttagtactgttttgggaatggcattgtgtagagtttatcagcgcattcatcaggatagaagatggctcatgtatttcctgcggggtagacattgtttattccagaaggaccactcagtatgtgaaagtcattttccctagtgaccgaatagtttctccacatttgactcctttttatccccagtaccaattctctaaaattatctggctctcctttttcattcatagtagaattaccttactaaaccacatattgtatatagcatcccctcttcaaaaatcagcaaaggctccccactgctgacagaaaattaaatgactccctgaaatgccgtccaaagtcttgcatgctctccctttgaattacagtctcttctcattcacagcattcctcttcacactcttctccgcacatttcttccaggtgtgtgcccagctctatgatttcgctcatgatt

SEQ ID NO: 93516 - DNA, 701 bp, Homo sapiens
gccttccctcctccctcctctcctcttggaggttgtgatatttatgacttgcctctctacgtatgcaagctgagtgttttccttccacctgctccccggctagcctcagaaagaagcaggggcctgagtaggggcaaacttagggcaagtctccaggttcctccagatctgtgccctctgtaagaaggatatgactcttctgcctggctcactggaacactagaggccattcacccaactgatatttactgtaaaccttctgcagtgccaggcaacgtcccaggggctaggtgtcatcttaggagattataaccaaaccttaacacccaagtttagggtgtcgtcataatgcctgagtggccctggggtggggggccacccttacccagcaggcaytggcccaggctgtagggatgaacctgccaccaccctgtgaaggccagggctcagagtctcatgctgattatgcctgggggcaccctgcatcatttctgttgtgggcgtgttgtgcagggagttcctccaaggagactaagagggcaggaaccttgtgttgcacaattctctgtccctaaagatgcctggcccagtactagatacagcagaataggtgatggctaaataaatggagagacctgggcttgtacaaagggcacagtctctgcagacagacacacccaggtgcagatcctggcactacc

SEQ ID NO: 93517 - DNA, 1365 bp, Homo sapiens
caaaagttgtaactgatacaaaacaatgtagccttcaaaaataacttatgcttggttttgattcatggacatacagaaatatttagacacaaaaaactcaaacccccatcttgtctcaattagacagcccagcctggaagacagaagcaacgaggaaagaaaagagagtttagataattcattcaaggataagtaagaagaatatactgaaatctaattttccagaaaagaatttatccataaggattaggcttttgatctctgcctattgctgatgtctcaaatagtaattatgctcatatcccagtgataaaacaatcatgtcaaaccagactcacttcagctgccacatgagccttatataacaagaccaggtttcagcccgttttctacagtaacaactataaccacttgttaatgatttaacaatgacaatgtgctgccaaaacattatttcaattgagcctcataataaattaataaaatctgtgaagtagatgtaacttttatcctcattttcagaggagaaaacttgaattcatagagaatgggtggttttcctgggtcagaggaatgataactcccatcaggactaaccacaaatctamgggtctttccattgacccacttggctccttcagaggaaggcacagcaggcttttaccagaagagcctgggacaatcagcagtcccagcattaaatagtcctctttgtcctaaatagcccccaaaatatgctgtatgatatgacttccaggatccttaggcacgagctgttgatctagaaagcttcactaattagggctggcctacacagaaaaggaacctaactattccataagcatactcccagcactgttgaacttggtttcacaaattcatttacacttgtttttaatttgcttcgcaagtattcttaaggtattttcccccatgtgtcctgtctgtccaagaacacagggaccatgtgggtctgtgttcacagctctacccttagcacccaagacaatgctgagtaaatggttcaataaccatctggtgaatgaactcaagggcaaggacctggccttgtaatttttatgtcacttctgactacaaatgtactatcctgggaattcaaacaaatgctactgactagatgcagaaaggaattacatttagtaagaacagagagtaagtacaattagtaccttttttcccctctttcttcccttcagaccacttcaatcttgttggtgtcatcgtgacagctggagagccagaaaataactgtaataagaaaattgtacagtggtttcaatgttctaatgccattcctatagacagactttactaacaaatgaattatttgttcaatttcaatgt

SEQ ID NO: 93518 - DNA, 1365 bp, Homo sapiens
caaaagttgtaactgatacaaaacaatgtagccttcaaaaataacttatgcttggttttgattcatggacatacagaaatatttagacacaaaaaactcaaacccccatcttgtctcaattagacagcccagcctggaagacagaagcaacgaggaaagaaaagagagtttagataattcattcaaggataagtaagaagaatatactgaaatctaattttccagaaaagaatttatccataaggattaggcttttgatctctgcctattgctgatgtctcaaatagtaattatgctcatatcccagtgataaaacaatcatgtcaaaccagactcacttcagctgccacatgagccttatataacaagaccaggtttcagcccgttttctacagtaacaactataaccacttgttaatgatttaacaatgacaatgtgctgccaaaacattatttcaattgagcctcataataaattaataaaatctgtgaagtagatgtaacttttatcctcattttcagaggagaaaacttgaattcatagagaatgggtggttttcctgggtcagaggaatgataactcccatcaggactaaccacaaatctacgggtctttccattgacccacttggctccttcagaggaaggcacagcaggcttttaccagaagagcctgggacaatcagcagtcccagcattaaatagtcctctttgtcctaaatagcccccaaaatatgctgtatgatatgacttccaggatccttaggcacgagctgttgatctagaaagcttcactaattagggctggcctacacagaaaaggaacctaactattccataagcatactcccagcactgttgaacttggtttcacaaattcatttacacttgtttttaatttgcttcgcaagtattcttaaggtattttcccccatgtgtcctgtctgtccaagaacacagggaccatgtgggtctgtgttcacagctctacccttagcacccaagacaatgctgagtaaatggttcaataaccatctggtgaatgmactcaagggcaaggacctggccttgtaatttttatgtcacttctgactacaaatgtactatcctgggaattcaaacaaatgctactgactagatgcagaaaggaattacatttagtaagaacagagagtaagtacaattagtaccttttttcccctctttcttcccttcagaccacttcaatcttgttggtgtcatcgtgacagctggagagccagaaaataactgtaataagaaaattgtacagtggtttcaatgttctaatgccattcctatagacagactttactaacaaatgaattatttgttcaatttcaatgt

SEQ ID NO: 93519 - DNA, 563 bp, Homo sapiens
tcctgcttaactagaaatcaagagactccactccyttctgtagtggagcaatggcacagagatcactgtggagattccatagacaagcctgatttctcagctgaaccaaaaattaaatgagattcttaacaatatgacctactgattctacaaccacgattacactcctaaagccccatcacaacttccctgcctttaggcacctgtctaataagttgtttcttctttgctgactctggcatatcatgaacgtgttgaaacagctctctcagtgcctcttccgtatggtgctgggtctcctcctggtgagggcaggaatctacccggttccgtttctgagactttgccagctgaaaggacttagtatgacatgaagctatgaggtcaaggtcatcctaaggaaaatttaaaagaagagtaaattaatatatcctgccaactttgttttggggttcttacaaaaacctggaacaaaaaaagggagagtggggacatggtatactcctatactcaggaacaagaaaaatcttaacactattatcagataacaaggaacctattaa

SEQ ID NO: 93520 - DNA, 663 bp, Homo sapiens
aaagggtgccccggaaagagctgtgccgtctagcacacctcttrgtcatgtctttcacaatgtctggtgttgcctggagcaaggtttggatcataacagcgaatcaagctggaagggaagggttctgaggaagcctggcccctgagaagcacatggaaacttatacatttctgcttctttccttaactgccaattctgcctaccactctgagtggcccacccagccagctctcacttcaatctcattggcttgctcacatgccaatcaagtgctgagccagcaactcatgggaaacccaaacagtatctcacacaaactcaaatagaagcttgtatttcttatggtgctctcaggaggccttcaccaaaggtggagaacaaggacaaaagggcaagagtgctgaacttggcatccccattctgccccatctcagcctgtgaccttgggcaagttacaaccccctattttcccataattgaagcctatagcctctgtgcttccctcctccaaccagcactgagattaggatgttggaaggatgtagaaaggtattaggtattagagcaacaatatacagatacaccgagattggccttgaacctccaacagggaactccagctcagcaaggtgtttcgccaacagaaacagcctgtccctgtgc

SEQ ID NO: 93521 - DNA, 663 bp, Homo sapiens
aaagggtgccccggaaagagctgtgccgtctagcacacctcttagtcatgtctttcacaatgtctggtgttgcctkgagcaaggtttggatcataacagcgaatcaagctggaagggaagggttctgaggaagcctggcccctgagaagcacatggaaacttatacatttctgcttctttccttaactgccaattctgcctaccactctgagtggcccacccagccagctctcacttcaatctcattggcttgctcacatgccaatcaagtgctgagccagcaactcatgggaaacccaaacagtatctcacacaaactcaaatagaagcttgtatttcttatggtgctctcaggaggccttcaccaaaggtggagaacaaggacaaaagggcaagagtgctgaacttggcatccccattctgccccatctcagcctgtgaccttgggcaagttacaaccccctattttcccataattgaagcctatagcctctgtgcttccctcctccaaccagcactgagattaggatgttggaaggatgtagaaaggtattaggtattagagcaacaatatacagatacaccgagattggccttgaacctccaacagggaactccagctcagcaaggtgtttcgccaacagaaacagcctgtccctgtgc

SEQ ID NO: 93522 - DNA, 663 bp, Homo sapiens
aaagggtgccccggaaagagctgtgccgtctagcacacctcttagtcatgtctttcacaatgtctggtgttgcctgkagcaaggtttggatcataacagcgaatcaagctggaagggaagggttctgaggaagcctggcccctgagaagcacatggaaacttatacatttctgcttctttccttaactgccaattctgcctaccactctgagtggcccacccagccagctctcacttcaatctcattggcttgctcacatgccaatcaagtgctgagccagcaactcatgggaaacccaaacagtatctcacacaaactcaaatagaagcttgtatttcttatggtgctctcaggaggccttcaccaaaggtggagaacaaggacaaaagggcaagagtgctgaacttggcatccccattctgccccatctcagcctgtgaccttgggcaagttacaaccccctattttcccataattgaagcctatagcctctgtgcttccctcctccaaccagcactgagattaggatgttggaaggatgtagaaaggtattaggtattagagcaacaatatacagatacaccgagattggccttgaacctccaacagggaactccagctcagcaaggtgtttcgccaacagaaacagcctgtccctgtgc

SEQ ID NO: 93523 - DNA, 663 bp, Homo sapiens
aaagggtgccccggaaagagctgtgccgtctagcacacctcttagtcatgtctttcacaatgtctggtgttgcctggmgcaaggtttggatcataacagcgaatcaagctggaagggaagggttctgaggaagcctggcccctgagaagcacatggaaacttatacatttctgcttctttccttaactgccaattctgcctaccactctgagtggcccacccagccagctctcacttcaatctcattggcttgctcacatgccaatcaagtgctgagccagcaactcatgggaaacccaaacagtatctcacacaaactcaaatagaagcttgtatttcttatggtgctctcaggaggccttcaccaaaggtggagaacaaggacaaaagggcaagagtgctgaacttggcatccccattctgccccatctcagcctgtgaccttgggcaagttacaaccccctattttcccataattgaagcctatagcctctgtgcttccctcctccaaccagcactgagattaggatgttggaaggatgtagaaaggtattaggtattagagcaacaatatacagatacaccgagattggccttgaacctccaacagggaactccagctcagcaaggtgtttcgccaacagaaacagcctgtccctgtgc

SEQ ID NO: 93524 - DNA, 663 bp, Homo sapiens
aaagggtgccccggaaagagctgtgccgtctagcacacctcttagtcatgtctttcacaatgtctggtgttgcctggarcaaggtttggatcataacagcgaatcaagctggaagggaagggttctgaggaagcctggcccctgagaagcacatggaaacttatacatttctgcttctttccttaactgccaattctgcctaccactctgagtggcccacccagccagctctcacttcaatctcattggcttgctcacatgccaatcaagtgctgagccagcaactcatgggaaacccaaacagtatctcacacaaactcaaatagaagcttgtatttcttatggtgctctcaggaggccttcaccaaaggtggagaacaaggacaaaagggcaagagtgctgaacttggcatccccattctgccccatctcagcctgtgaccttgggcaagttacaaccccctattttcccataattgaagcctatagcctctgtgcttccctcctccaaccagcactgagattaggatgttggaaggatgtagaaaggtattaggtattagagcaacaatatacagatacaccgagattggccttgaacctccaacagggaactccagctcagcaaggtgtttcgccaacagaaacagcctgtccctgtgc

SEQ ID NO: 93525 - DNA, 824 bp, Homo sapiens
ttcatatgcatcccagcttcccactccctggtgtgcaaaggtgctcactgaagtgaagtcctcacagccataccaacaagcagtgtttgacatgtggttgcctgcagaagcagccagatgaagggtatttaaatttctaaggcactaggagattatagagagcaatgattaggaattggcttgcttactgggctccgtggctcactcctgtaatcccagcctgaccaacatggagaaaccccatttctactaaaaatacaaaattagccaggtgcggtggtgcatgcctgtaatcccagccactcaggaggctgaggcaggagaatcacttgaaccgggaggcagaggttgtggtgagctgagattgcgtcattgcactccagcctaggcaataagagtaagactccatcttaaaaaaaaaaaaaaaaaagaagtggyctgcttagttttgagtttatcacttaccaacagtttgacatgggaaagaggattaaactcttcatggcttgattttcttatctataaaatggatagtactacctgataggattgatatgagaaggaaatgagataaagttcttcacattgcacctaacttagcatattagtttcctaagcctgccgtaaaaaatcagcataactaggtggtttaaaacaacagaaatttgccgggcatggtgactcatgcctataatcccagcactttgggaggccgaggtgggtggatcacttgaggtcaggaattctagaacagcctggccaacatggtgaaaccctgtctctactaaaagtacaaaaatcagccgggcgtggtggcgcatgca

SEQ ID NO: 93526 - DNA, 824 bp, Homo sapiens
ttcatatgcatcccagcttcccactccctggtgtgcaaaggtgctcactgaagtgaagtcctcacagccataccaacaagcagtgtttgacatgtggttgcctgcagaagcagccagatgaagggtatttaaatttctaaggcactaggagattatagagagcaatgattaggaattggcttgcttactgggctccgtggctcactcctgtaatcccagcctgaccaacatggagaaaccccatttctactaaaaatacaaaattagccaggtgcggtggtgcatgcctgtaatcccagccactcaggaggctgaggcaggagaatcacttgaaccgggaggcagaggttgtggtgagctgagattgcgtcattgcactccagcctaggcaataagagtaagactccatcttaaaaaaaaaaaaaaaaaagaagtggcctgcttagttttgagtttatcacttaccaacagtttgacatgggaaagaggattaaactcttcatggcttgattttcttatctataaaatggatagtactacctgataggattgatatgagaaggaaatgagataaagttcttcacattgcacctaacttagcatattagtttcctaagcctgccgtaaaaaatcagcataactaggtggtttaaaacaacagaaatttgccgggcatggtgactcatgcctataatcccagcactttgggaggccgaggtgggtgratcacttgaggtcaggaattctagaacagcctggccaacatggtgaaaccctgtctctactaaaagtacaaaaatcagccgggcgtggtggcgcatgca

SEQ ID NO: 93527 - DNA, 762 bp, Homo sapiens
tatgagatcttccttggccttattacattttataacagcaggatagcctgttacattcattttgtttgtttatttttctcctggccttgtttgtaaagaactgtatataaaataaaatactccattgatttatacattggcatctggccatccataatcaaagactattcataacctcacctttctagtgtcacttcctcaggaaactcagagatagattgatgaatattatctatcaatttgcctttcttttcattggaaatatagaaatatatattattttggcatgctgaatttgaccttttccacaccagtgttttatctgcctgggacaaagggcgtaaaagtcagtaaaaagcaggtcagaggrgaagactaccgatgagaaagaaagcttgattcagaagggcagtagtggcattcacagtgtttttgaagtacttaagatattgtactttctcaagagaaactgtcttcaacaagtaaagaagaatgtcaggaaattgtatggctcttggaaatagctctccatcaaagagtgatgagagagctttctgaaagcatgaagcttatggagtggggagcctaggtaatacctagactgtcatctcacagactttctgagagtttggtcattatctcaaaattgataaaagatcgttaaataaggaattaaacacaaatgtgggctacagtccagctgtcaaaaagtaagacaaatctgacaccagtgtctagttagacaaatgcgtaaactagccc

SEQ ID NO: 93528 - DNA, 738 bp, Homo sapiens
aagaaataaacattttacattagtcacactcaccccctgggcatggaagcagagccaagccctgttaagagtaaaaacagcccaggaaggtgttcctgaggtaacggcattacagataccagtaaggacagaaggcttaagagcgatcctcagactgaagtggcatcatttagaggcacacgtgacaccaagagccaacagaggtttctgcctccaggtaccccagtttggcacctaataagcactgtgcttactctttctccccagtggtatgattgtgacattcctctgaaatacagcttagcagctacccacagggtttgagagatgattggcagctgcagcttccaccaaaacaaggagaatacgtgtatttctgtaaattaatgctaaggaaaaaaaattgctcagaatcaccaccaagttcctagagtaaaagaaaacatgaaaaaccaaaactttataactggaaggttacaaagtaagagggccagaatatagctttaactagttaactaggtaggattattgatataggagaagctggactgaagcaacaaggaagtgacttatcctcaaaattgctctacggagattatactgaaacatactagaaataatctaagcagsaacaagcagaaagtggaagagttctggccatgacagttgtattgaacctcaagggtaagagtgtatataactcagagtaaggggaaaaaaataaggtcactcttaaca

SEQ ID NO: 93529 - DNA, 684 bp, Homo sapiens
agtgggatctattcagctagggtcggccatccttccttgtgtttttgcaatctcatcttgtgtgtagccatcctgagttcagcagtgtgaattgagtggtgggagttaacacacacacacgcatacacactcacactcatagatgcacaccagctctgggcaacttggagaggaccttaaatgctctgtctcccactctcctttcggtgccctcccttggggtgatatcaccagacaccattcattattgaggccaaaccacagcatccaccatcattatcctcctccagcccagacgtagtgccctcttgctctcttccctcccaaatcagctctcagcagcacctctggagaccatgtgttgaactgtttgttaagatgtggctgggcatgccatttccactcctgttttgctgtgtttacaaataggttcttaagtcagatcaagtacataccccagcccagcccctgtaactggttccatgggtgtgaggtaggccctgagaatctgtcttttgaaccagcaccccaggagatcctaatacgggaggtttcgacaactctttgggaccctagcctttgcctctatacacagacayatacattctctgctcaatcacaaatgttggccaggcatggtggctcacacctgtaatcctagcacttcgggaggccgagacagga

SEQ ID NO: 93530 - DNA, 561 bp, Homo sapiens
tttttttttttttttgagacggagtcttgctctgtggcccaggctggagtgcagtggtgcgatctcggctcattgcaagcttcacctcccgggttcatgccattctcctgcctcagtctctcgagtagctgggactacaggcgcccgccaccacgcctggctaattttttccatttttagtagagacggggtttcactgtgttagccaggatgktctccatctcctgacttcgtgatccgccagcctcggcctcccaaagtgctgagattacaggtgggagccaccgtgcccagccagaaaatccctgtactatttttgaaacttttctgtaaatctaaaagtaattcaatatttcaagttaaaaaaaaagttttcagacaatttgattatgagtgtgtgtcaaagtttgattatcgttgtaatgcaagcaaaatgacctgtaagcagctaactcaaatatatactcttggtaagaatatttttattaaaaaaagaatggtcaggctgggcgtggtgactcctgtctgtaatccctgcactttgggaggccgagatgggca

SEQ ID NO: 93531 - DNA, 779 bp, Homo sapiens
tgtttttttgaagttgctgccacatcatagaacattgttgtttgcatggttgaagttgggttgcagccatgtctgggctccagccagtggagggggaagaaagggtggaggaggcctgcctaccttccctaggccctggtcctccatggcccatgtgcagcatagtcacatggcctccctggctgcaagcaaggctgagaaatgtctgcctgggctgttgtgtggccatgaagaaggggaaagtggctttgggtaggtaactaacagcctcactacagaagatggagagtmttttcacttgtgtgtgctgagagaagaatatgcctccctgctagtcatgtgcccacactctttggcaacttgcacatgtgcccccttccttgggaaacatctgtgtgccagactatgctgcaccaacttaggggaccagaagccaaagaaggcaatttctgccttttagcaactcacagtgtagtctggagagggtgtgtgtggaacccagacaatctgtaaatgccaaaacagagaatctcttttgttgtatgctgggcaccgcagatagagagctaaaagaccacctggggcctccatatgctcgcagttgggtggactggaaaatggaatgaagtgctgagagcagtgtggctgaggaattaggagggcttcacagaagaggtgacattctagctgggcgccgacattttctatttcaaaagatggggtatcttcgggagagaaaaccaatagcaaaggcatggagacttggaagctcatggagg

SEQ ID NO: 93532 - DNA, 779 bp, Homo sapiens
tgtttttttgaagttgctgccacatcatagaacattgttgtttgcatggttgaagttgggttgcagccatgtctgggctccagccagtggagggggaagaaagggtggaggaggcctgcctaccttccctaggccctggtcctccatggcccatgtgcagcatagtcacatggcctccctggctgcaagcaaggctgagaaatgtctgcctgggctgttgtgtggccatgaagaaggggaaagtggctttgggtaggtaactaacagcctcactacagaagatggagagtattttcacttgtgtgtgctgmgagaagaatatgcctccctgctagtcatgtgcccacactctttggcaacttgcacatgtgcccccttccttgggaaacatctgtgtgccagactatgctgcaccaacttaggggaccagaagccaaagaaggcaatttctgccttttagcaactcacagtgtagtctggagagggtgtgtgtggaacccagacaatctgtaaatgccaaaacagagaatctcttttgttgtatgctgggcaccgcagatagagagctaaaagaccacctggggcctccatatgctcgcagttgggtggactggaaaatggaatgaagtgctgagagcagtgtggctgaggaattaggagggcttcacagaagaggtgacattctagctgggcgccgacattttctatttcaaaagatggggtatcttcgggagagaaaaccaatagcaaaggcatggagacttggaagctcatggagg

SEQ ID NO: 93533 - DNA, 508 bp, Homo sapiens
gtataaaggtgagagttggagtatggattcatttatagcccagagcagaaggccttagaaattttaggaaataggaggaccaggaggctacagaatgctgctagaagacatacatctctaaacttctttttttgttgttggagacggagtcttgctctgtcgcctagactggagtgcagtggcacgatctcggctcactgcaaggtccacttcccgggttcacgccattctcctgcctcagcctcccgagtagctgggactacaggcacccgccaccatgcccagctacttttttttgtagtaaatctctaaacttctaataagttttttggtgattctctcagaatttcttggtatacaactatattgcctataatcattgacaattttactttttttgtttttttttgaratggagtttcactcttgttgcctaggatggagtgcaagggtgccatcttggttcactgcaacctccacctcctgggttcaagtgattctcctgcct

SEQ ID NO: 93534 - DNA, 672 bp, Homo sapiens
aatattttttctgtgactctcaagtgcctaaaacagtgcttggcaatgcctacgagttgcacaataaatgtttgttaaaatgtcatactctagagtacaatttttaaaatttaatcatagtaactttttttcattttaagcacacaggttcttagccctacactaacacctagcatcacattaagtgacgctgactttttaaaaaatgtttaacagggctgggtgtgttggctcacgcctgtaatcccaacactttgggaggctgaggcaggtggatctcctaaggtcaggagttggagaccagcctggccaacatggtgaaaccctatctctactgaaaatacaaaacttagctgagtgtggtggtgtgcrcctgtagttccagctactcaggaggctgaagcatgagaattgcttgaaaccgggaggcagaggttgcaatgatctgagatggcaccattgcactccagcctgggcaacaaagcgagactctgtctcaaaagaaaaaataaaataaaatgtttagcaggtaatgcacgcacctgaacaaaattcaagtggttaaagggggtgtacagtaaaaaagaagtgtccttcccactcctatgccctaatcaccaagctgcaaccagagttagaaatattccttcaaagatagtctgtacatacaca

SEQ ID NO: 93535 - DNA, 687 bp, Homo sapiens
gtcactgcacccagctaaatgcttttaagaaaaaaaaaaaaaaaaaaaaaaggagggtgaagggggagaagagaaaaaagttgattcatctaaagtgttcatgtgaaaatacataatacactatatatataaattatatacacatataattcatatatttgttttacacaattacataaattatacatagttagagaggggaaaggacaaagggagagagggagctttttctttctgtaaggcttccacatgtgacttgtaactcaaatacatagatagtcattgctattggcagagcataagagataggggagttttgctatctcatacagctatcccagaaataaaacgatatcactgggtgtcccttacatgctacatatacattaacacaaatacttaacaaatttatagataagtattattatcamcattttatagataaataaattaactttctaagggtctgatttttctactacactgaaactttctaatgtccaaagcactaaaaactcctattacatagtatggttccctaaaacagccatcccagaagtaacaaattatggctttttctcaaagtggaagaaatcaagaagcagcctaatttgacagggtgtcctatgcaaaaactagaccccttgagatactccaaccactgtcctgccctttgtctcacatgca

SEQ ID NO: 93536 - DNA, 687 bp, Homo sapiens
gtcactgcacccagctaaatgcttttaagaaaaaaaaaaaaaaaaaaaaaaggagggtgaagggggagaagagaaaaaagttgattcatctaaagtgttcatgtgaaaatacataatacactatatatataaattatatacacatataattcatatatttgttttacacaattacataaattatacatagttagagaggggaaaggacaaagggagagagggagctttttctttctgtaaggcttccacatgtgacttgtaactcaaatacatagatagtcattgctattggcagagcataagagataggggagttttgctatctcatacagctatcccagaaataaaacgatatcactgggtgtcccttacatgctacatatacattaacacaaatacttaacaaatttatagataagtattattatcaccattttatagataaataaattaactttctaagggtctgatttttctactacactgaaactttctaatgtccaaagcactaaaaactcctattacatagtatggttccctaaaacagccatcccagaagtaacaaattatggctttwtctcaaagtggaagaaatcaagaagcagcctaatttgacagggtgtcctatgcaaaaactagaccccttgagatactccaaccactgtcctgccctttgtctcacatgca

SEQ ID NO: 93537 - DNA, 492 bp, Homo sapiens
tgctgtatgctccattacttyctatttaattttctcaacaaccctaggtgcactgatcccattgttcagatgggaaaattgaagctcaaagaggttaggaaacgtgctcatagtcacacagttaagatgtgacagggacaagattcacaagaagttatgtctgacttcagagctgtagcccctctgctgcatctagagacttgttccaaaaatgagtatttctccacctgcctcttcttgctcatacgttctctccctctttcctattcattctaaaaagcagcttgctcttgcctttttcctaagatgttctttgctatcatcttttagtcaagtgtagttgttagcaaagacttcctacatcaataaagtgatgaggcaacttctaacccttggctttctgatttccagtgaatgctccttttctatttaagacaggacaggaggggaggagccaagatggccaaataggaacagctcccgtctacagct

SEQ ID NO: 93538 - DNA, 556 bp, Homo sapiens
ctgttcaaaagctacttcttttctgagcacttagccaactttcatataggcatgttgaagtaaattgaagccttcacagcaacatcttccctactctatgaaacagtagaactgagtgctagaacggacgtcaaaatagcagcaatgaaacccactgtggcatcagtatttaggattcaggccctggtcctgccagttgtgacctgagtaaagccacttgacttctcagagtccatttkacaactctctaacaggacaaacctagtcctttaccaggaagaacacaccaaatgtgaaagggccctgcaaactggaaaatgcaatggtgataacaacaaccaaacccaagaaaaacctttgttaggagctttcttcttaccaaaggactgtgttaagtgatttatggaaatttttttccatttacccttcaaaattaccccacaaaataggcactattatcatcaccatttaacacatgtggaatctgaggcccagagaattaaggaacctttttacttatttaatttattcaatttaatttatcttatttcattta

SEQ ID NO: 93539 - DNA, 789 bp, Homo sapiens
taaaaatacaaaaattagctgggcgtggtggcatgcaccttttaatcacagctactcgggaggctgaggcaggagaattgcttgaacctgggaggcagaggttgcagtgagccaagatcacgccattgcaygccagtctgggcgacaagagtgaaactctgtctcaagaaaataaataataaaatactgtgcagcagttccctggcagatattatgaaatgtgccaggctgggaggctcaagactctataaattgctgaatctgtgtcccctgcttcactcccagcaagagagaagtaacagaggtgagagtaagaagaagaatgatactagtagtgggtgacatttgttccagcatttctgagttccaacacgttatggtactcaacacattaaatgtattaattcatgtggttctcacaatggccctggaagatgggtgctatttgaagacccattttgcagatggagaaactgaggcacagaggcactaagtcacttgcacagggtcacatagccagtaaatagcagattcaaactcagtcagtccctattctgtttctttttaactttctattttaaattaagtttagacttacagaaaagttgcaaagatagtacagagttccctgaagcccttctcccgctttccctaatgtgaacctcttacataaccatcgggcagtgatcagaactagaaaaatgacataggtgcagtgcttttaactaaactacagactttatttggattttaccagtttttccagaaacatccattttctgttgcagg

SEQ ID NO: 93540 - DNA, 885 bp, Homo sapiens
gcatttacaactctctcaatctgaaatcctgagcatgcctagatgaacagaaggagggcaacacgtatttatctgtagctgagcattacactcttccacctttagaagattcccctctctctgccccagaggtaaacgggggctgcatgggaaggattctctactttcctctccctgctgggctccctctattctctatttttttattttaatttttattttttgagacggagtctcgctctgttgctcaggctggagtgcaatggcgtgatcccggctcactgcaaactctgcctcctggattcagcaattctcctaccttggcctcccaagtagctgggattataggcacccaccaccatgcccggctaatttttgtatttttagtagagacagggagacgaggtttcaccctgttggtcaggctggtctcgaactcctgacctcaggtgatctacctgcctcggcctcccaaagtgctgggattacaggcgtgagccactgtgccccgccacttctctattaaatgcaagccttttaagctttacctgctgagagctgtcaatctgagaagtaaatgagattatataggcgagagcatctagcacaggcctggcagttaggaggtgacttgaatggagttctggctggagtcaacccatggatatgtgtggattagtgagagacgcagcacagaatgtgggtccttgctgcttctcactttggggtgctcctgggtgtggccccactgagaggctgtcacacttgtgcccaccggcgattgtctagtggtcmccaacaagtgaagcagcactgtccccgacccaggtcctaaagccagcatcagagctgtgttgctgcttacgcacagatgttttaaatgca

SEQ ID NO: 93541 - DNA, 553 bp, Homo sapiens
agtttgcatatgcacagaacctgtctggaagtgaattgtgttccataaagctggtaatcgtggttgcctataggcagaagagctggggtttgaggtcagggataggaagagactctttgctttatgccttttgtactattggaattttctacaatgcattcattacattttcagtaaaaattaagtgaatgagctgatgatggttagcctctcctcctcaacacagtccctttctcagccagttgttcatggaattagtacctatgctttaggtaagcatgccgagttttgctgaagcagaaggcagatttgtaactgtggccttgggattagcaggtccccccgtgagattggagrgtgtcttacagttaagtgatatcatctttgcagaggaagggtggttcatttcacacctttgcccaaaatcctaatggacatttaagccatacacagcactactcagtggagtagtgggctgcaggcttgcatacctaccaagctggcaggtagcatgaagctcacggtggcatgtacaaaatatgagaccttcata

SEQ ID NO: 93542 - DNA, 514 bp, Homo sapiens
agactacaggtgcacaccaggctgctgctgcttataaagacaccagttattaccttgtaactcttatgacctcatttaatcttcattactactctggaggccctgtttccaaatacagtcacaattgggggttacagcttcaacataacgaatctgggggccacaattcagttgcaacacgcagtgggtaaggaaatgagcaaatgacaagatgatgtcaactgtgatgagtgctccaaggagaataaacagggagatgtaacaaagagaaaccaggaaggacgccaggctctctgaggaagtgacagtggagctggcacttgcaaattcggaagagccagccrtgggtcacaagtgtcgccagcagataggaggccaagtggctgaggagccaaggggagaggggtggggaatgagttggccggtgctcaggcaccgggaagccatggggttctaaaacagggcaggtgatctggtttgcatctcagaaagaccagttgactgctgggatgag

SEQ ID NO: 93543 - DNA, 734 bp, Homo sapiens
ggatccaaacaaagttgtccaggttgtccagtaatagactatccttttaaccacagacttaaatctgtgtttttggagacagggcactaggaaagtgttcatagggcatgctggtwtggacaaagttggatactgttaatcagcacagcccttcccactggagctctgcttttgattttacacaactccagggggcaccattcacatcaaagtcatcatagactcagtcatcagaccattttcaacatatggcgttaaggtgtcttgagaaagtgagaggcctttttctagcggggctgctttccatatgctctggtccacccttccaagaaccacagatagcccatgaacccttcttagacttactcattcattcagcatatgttgggtgacacccactgtgtgccaggcattgttccaggcactagagatgcatccgtggacaaagtagacaacagtcaatactcacagtgagaaagacagacaaaaatcaatatttgtaatagaataaataagtacattgtattgtagggtgagaaacgctatgaatgaggaacaaagtagagtctttcgggggggtgggggcaatagcaagttgcactgttcaaccaggtggtcaggctgggtcgcactaagaagttggcgttgagcacatggttcattcagcgatcacatttttgtagaacgctgttcattttttaattccttcactcagcaaacatttattgagggca

SEQ ID NO: 93544 - DNA, 686 bp, Homo sapiens
gcaacctttaacccagtcaaactgatacataatattgaccatcacagtcagtgtctctacattctaattaatattataagagatttatggttgtaccatttcctttgttgttgccagtctgtttcattttagctattcgggaatctgtgttgtgactctaagggtaatgtgaaacatttccttaaataatcaaataactttttgtgcaagttcaaagctttttgtttttgtgttttagtaggacaacactctcctacattgtctgtatttctaagggtttctaatctgttccacattccagtaatcactcccaccrtttattacagatatattcttcatttcagctttagttagtttgctttctcacccttatacctctcttttgtgcttaaagaaaattacactgaggaccttggcttttaagttaaaaaatatcacttacctgatcttcatactgagtaattttattcaaatgaaataattttcttagtggcactcttagtatatatttatctaatgcagtgtaaacagtagaaacatttaattcagattaatttacttaaagtctttctcaatttgtttcagaatgtaaatattccctcttccaatcttgcttccaaagatactaatacatatatactaccaaattcctactatccaacctcctcctctaaattcatatatga

SEQ ID NO: 93545 - DNA, 766 bp, Homo sapiens
atttttatgcatatagttctgtatgttgtgttaactacttctttctctcccattcaaaaaggcatctccacatgcaaattagagtgctatgatatgatgaaatacttgtgcgtttctgtatttagtaattatggaaaggcaaacaattccacatattcagttgtgaatttcttatcacatacgtgacagtgattatgttttgattttattttctcttttcctctgttttattctttttctttcatgtccattcttacgataagcaattcttcactcattaactaaaggaagggaattttcaataaaatgtgtagaccagcaactgagaaacataagaaacctaatgtatctcatctccaccctctcctggaccccagttttttacaatgtgtaaaagacttttgccatatccagtgtgtgaaggggaaattttaaggataatgtgtctgagcagaataaaagctttgaattaaatattaagttgaataacagaagaaarttatgtctttggcacagctgaaattatatactaaaatttttatcttctccacacatccaagaactgatcaagacacacaagtgggttctgactcactgctaggaagagatgttctagaaggaaatgacagcagtcaatacttgagccttgagattctccgttactaaaacatctgcttcaactgctgttctgccattcttagtggacttttccaattagagtgtttcatagtgaacgtctatacacacatactagtttaagagggtt

SEQ ID NO: 93546 - DNA, 669 bp, Homo sapiens
taaactataataaaaactgacatttcttgagcatctgctttatttcagatagtgtcattcactgtctcccctaatttatataacttcttaaagtaagccttattatttaagtatatagctagaactattttttttttaaaggtaggatttgaactcagtttcaaataactggttcttgtcactatcctttgttgctgcacttaaactttcttttttgtagtcttcaaaaagtgctggattaaaaattctccaggttttctttgaaatgtctaggatggacataccccaattaaccactgaaacaaaaattctggtagctagagtaggcaatgaagataaggcatgcctctyacagaagattaattccagagttagttcctatggcaaagcctctctgttcagctctccaaatgtatccactacttgccctatattcatattctgctatagtcaggctgtttatacaacattcccttaatatttttattgaatctgtaaaattttccccacctttctctttgtccacgatgctcattatcctgcattcttcttgatcatactcgccacagaagccctcttcaccactttcacacacagtgatcatgtacctatcggcactgtttatctgcatttgcccattggccaaaaatacaaatcccttttcattgg

SEQ ID NO: 93547 - DNA, 669 bp, Homo sapiens
taaactataataaaaactgacatttcttgagcatctgctttatttcagatagtgtcattcactgtctcccctaatttatataacttcttaaagtaagccttattatttaagtatatagctagaactattttttttttaaaggtaggatttgaactcagtttcaaataactggttcttgtcactatcctttgttgctgcacttaaactttcttttttgtagtcttcaaaaagtgctggattaaaaattctccaggttttctttgaaatgtctaggatggacataccccaattaaccactgaaacaaaaattctggtagctagagtaggcaatgaagataaggcatgcctctcacagaagattaattccagagttagttcctatggcaaagcctctctgttcagctctccaaatgtatccactacttgccctatattcatattctgctatagtcaggctgtttatacaacattcccttaatatttttattgaatctgtaaaattttccccacctttctctttgtccacgatgctcattatcctgcattcttcttgatcatactcgccacagaagccctcttcaccactttcacacacagtgatcaygtacctatcggcactgtttatctgcatttgcccattggccaaaaatacaaatcccttttcattgg

SEQ ID NO: 93548 - DNA, 569 bp, Homo sapiens
atcctgaatcaatcacatcgatcctgggaactgagtgttctgagtgaataggctgacacttatgaacaaatgtgtagccaaaaactgaaattctactaaattgcagtttagtagaatgaatatgtataaagagattacataatattttccaacctgtcttacattttcggatgacttactgaatcaccagatttgtagcagagtacatccactgctgcaaatatttattatataccaataattaaacataaaactgtaagttatagaaaaataaaattttaagaaawattgaaaattgttacagggttttacaattataatgataaagatatgtttgtatctcattaattaatcttttgaaaaattagatttttaaaaatacaacattatatttggtaaacatgctgtctcatctcttaattgaggtaacttcataagatagggatgggtaaatgttaattaacaataattgtatggtgcttaataaactttaggagtttattgtattgcttagttacagaaataagacatttgtctttacttttttaaatggttcctgctttatgaca

SEQ ID NO: 93549 - DNA, 774 bp, Homo sapiens
gataaatacctaatataaatgatgagttgacaggtgcagctcactaacatggcacatgtatacctaygtatcaaacctgcacattatgcacatgtaccctagaatttaaagtataataattttaaaaactcccatagtatttgcagtaaaaattgctatttttatgttattatggcttcaccaactttgtttttcattccacccgtgttattcaaagaggacaaaataattatggtaatttgtaacacacagcagaaatgaaaatcaaaaataacccaaatacactaaaaaatccttataaacttctattgtcagaccagtggtatttctatatgatgctgcaaattgtagttcataaatgttaaatttatggttaacatttgtcccattgttttggaaattcatcttcttctttgtcgtaatgtggtacatagattgtttgatttactttctggaataaatttgcttatatctgtttgtttagtttttaaagatggagctctcactgtgttgtccaggctggatttgatctcctggtctcaagtgatcctgagtgagtggtactacaggcatgtaccactataaccagctatatttgctcatgtctattcattggcctagatacatttaattattttgcatcttcttctttttgtggattgtatatagagttttgtttcctgacaatacatatccagtaacatactgaatttattattatgtaggatacaggcagcagaagaattttttttaattcaacgtattgacacatta

SEQ ID NO: 93550 - DNA, 774 bp, Homo sapiens
gataaatacctaatataaatgatgagttgacaggtgcagctcactaacatggcacatgtatacctacgtatcaaacctgcacattatgcacatgtaccctagaatttaaagtataataattttaaaaactcccatagtatttgcagtaaaaattgytatttttatgttattatggcttcaccaactttgtttttcattccacccgtgttattcaaagaggacaaaataattatggtaatttgtaacacacagcagaaatgaaaatcaaaaataacccaaatacactaaaaaatccttataaacttctattgtcagaccagtggtatttctatatgatgctgcaaattgtagttcataaatgttaaatttatggttaacatttgtcccattgttttggaaattcatcttcttctttgtcgtaatgtggtacatagattgtttgatttactttctggaataaatttgcttatatctgtttgtttagtttttaaagatggagctctcactgtgttgtccaggctggatttgatctcctggtctcaagtgatcctgagtgagtggtactacaggcatgtaccactataaccagctatatttgctcatgtctattcattggcctagatacatttaattattttgcatcttcttctttttgtggattgtatatagagttttgtttcctgacaatacatatccagtaacatactgaatttattattatgtaggatacaggcagcagaagaattttttttaattcaacgtattgacacatta

SEQ ID NO: 93551 - DNA, 774 bp, Homo sapiens
gataaatacctaatataaatgatgagttgacaggtgcagctcactaacatggcacatgtatacctacgtatcaaacctgcacattatgcacatgtaccctagaatttaaagtataataattttaaaaactcccatagtatttgcagtaaaaattgctatttttatgttattatggcttcaccaactttgtttttcattccacccgtgttattcaaagaggacaaaataattatggtaatttgtaacacacagcagaaatgaaaatcaaaaataacccaaatacactaaaaaatccttataaacttctattgtcagaccagtggtatttctatatgatgctgcaaattgtagttcataaatgttaaatttatggttaacatttgtcccattgttttggaaattcatcttcttctttgtcgtaatgtggtacatagattgtttgatttactttctggaataaatttgcttatatctgtttgtttagtttttaaagatggagctctcactgtgttgtccaggctggatttgatctcctggtctcaagtgatcctgagtgagtggtactacaggcatgtaccactatawccagctatatttgctcatgtctattcattggcctagatacatttaattattttgcatcttcttctttttgtggattgtatatagagttttgtttcctgacaatacatatccagtaacatactgaatttattattatgtaggatacaggcagcagaagaattttttttaattcaacgtattgacacatta

SEQ ID NO: 93552 - DNA, 660 bp, Homo sapiens
ggacacctctcataagaggtttacccaaggggggctgtggaaagggctagaaattgctcctggaggacgtggaaagccacataaggtttttgacagattagcgaaaggctgcctacactgtcatcttcagaaagagtggtatgacactaaatcaagaagggctgagagggtgagcccaggggatcccataggctccrcagcctctggccatcctctcctatacaggtcctaagtcccctgcagggggccctcagctcctctaccctacccactgtcctgtatgttatcttaatgcttattaaaggcctcagctgaatttccctggtgaactgaaagaattctgctgctcctggacacatctgcaccaagccaccactgggtcacattctccaaaactccttctggagacagaaggcacttaaaccatacatattttgcttgatagttcctaattaaaaaaatagagagagataaagagaaagagagagagagagaactacaactaagccttgaagacaaaatgattgaacagaatcagagctagaatggaacacctcaggcttggagtcccatgacaaccttgctggggaccacgagtggccctcagtccttctcaggctcatgccacctatgtgaaataagggtggtgacacccacctc

SEQ ID NO: 93553 - DNA, 660 bp, Homo sapiens
ggacacctctcataagaggtttacccaaggggggctgtggaaagggctagaaattgctcctggaggacgtggaaagccacataaggtttttgacagattagcgaaaggctgcctacactgtcatcttcagaaagagtggtatgacactaaatcaagaagggctgagagggtgagcccaggggatcccataggctccacagcctctggccatcctctcctatacaggtcctaagtcccctgcagggggccctcagctcctctaccctacccactgtcctgtatgttatcttaatgcttattaaaggcctcagctgaatttccctggtgaactgaaagaattctgctgctcctggacacatctgcaccaagccaccactgggtcacattctccaaaactccttctggagacagaaggcacttaaascatacatattttgcttgatagttcctaattaaaaaaatagagagagataaagagaaagagagagagagagaactacaactaagccttgaagacaaaatgattgaacagaatcagagctagaatggaacacctcaggcttggagtcccatgacaaccttgctggggaccacgagtggccctcagtccttctcaggctcatgccacctatgtgaaataagggtggtgacacccacctc

SEQ ID NO: 93554 - DNA, 610 bp, Homo sapiens
tgagcctgagaactgccatgtcttccactctttcagcccaagtcctctctctctgcaggtgtcccctgaagaccttgcaaaagtgtgagatcgccctggagaaactcaagaatgacatggcggtggtgagtgggatgccagacacccctaggggaaccagggctctcctaagagctcctgggagygctgctgagagggccttcaaggtcagggcatctgggcgggggccgggcctgaccttggaccctgcccacgaggcttcctggccaggtctgctgtgctgggtgggaacatgggagaagtcaccctctgtctacggcccccgtgggtgcctccttcacccatttcagaggaggcagggactgtagggaggataggctgtgggggtgggggattattcccaggatcagccaacattgtctgcacaagggtggaggctgtgagagaggcctcgggaatctgactgtgagtgaccatgggcctggggtgtgaaggccccctaaatggggaaccctcgggtcccgggctgctgaccgtgcccatcctgtctccagcccactcccccaccgcccccggtgccaccgaccaaacagcagtacctatgccagcc

SEQ ID NO: 93555 - DNA, 610 bp, Homo sapiens
tgagcctgagaactgccatgtcttccactctttcagcccaagtcctctctctctgcaggtgtcccctgaagaccttgcaaaagtgtgagatcgccctggagaaactcaagaatgacatggcggtggtgagtgggatgccagacacccctaggggaaccagggctctcctaagagctcctgggagtgcygctgagagggccttcaaggtcagggcatctgggcgggggccgggcctgaccttggaccctgcccacgaggcttcctggccaggtctgctgtgctgggtgggaacatgggagaagtcaccctctgtctacggcccccgtgggtgcctccttcacccatttcagaggaggcagggactgtagggaggataggctgtgggggtgggggattattcccaggatcagccaacattgtctgcacaagggtggaggctgtgagagaggcctcgggaatctgactgtgagtgaccatgggcctggggtgtgaaggccccctaaatggggaaccctcgggtcccgggctgctgaccgtgcccatcctgtctccagcccactcccccaccgcccccggtgccaccgaccaaacagcagtacctatgccagcc

SEQ ID NO: 93556 - DNA, 509 bp, Homo sapiens
tcttatctcccttcaagaatgtctcctaggtcattcccgggagtgagaagcttcgatcggctcacagtttctttttktaagtgtttattcatgcattaaacaaatgtttatcacacattatcctgtggtgacaaggataagcaaaacggctctgaacccgagaagcccagagtctctctaggttgagaaaaacacacataaacagaatagagtttaacaaatcctcttagtttcaaagttggggtcctacagcagggatgctcttcagatttcggctctggagacgtttgttaatatacatacttgaatcccatcctggaacctctaacacagtgttttttaaccttgactggacatgggaatcacctgaagtgttttttattttattttgtttattatgtatttatgcatgtatggtactttttgagacagggtctcattctgctgcccacgctggagtggagtggcgtggtaatagctcgctgcaactttgaactcctaggctcaag

SEQ ID NO: 93557 - DNA, 921 bp, Homo sapiens
tatgagtaattgtatctcaccagcagtaacacactgttgtacctcttgttttcacatgtgcttctccttattagactataaactccattcaccatctttctggagctgtcatctttcattaggaacatcgtaatagcctttcagctagtagccygcccccctccactgttacctgcttttgaagtgattctccccatctccagagtaagtgggctcatcaaactatgcttctctgtgtgaaaggtgtggtggtgggaactgggtgaaattagctccaggacaccattagcacttggtctaatttatttactacagtaggtatccatgtgctgagaggttctcaagaaggatggggagtggggaagagtaggagtaagtggagaaagtaggggctggaaactaggtgaagaatcagaatcaggtgtagacagccatacgagtcacagatctgaaaaggtcgagttagccagagttcaaccagggctgccagaacttgtgtggttagggtgtgccaggcagtgccgttaggagcttccatgtattcaagggttggagtggtcatgaaatgagaaaacgctgtgcagtgacaaaaagtagttgcaaaattctgagtttggagccgagaggaacatacactgtgggagatacaacgagcagcctaagtcagagtcttgtcaaaatccatttcatgaaaagctgaactttcaaaatagtgtagttatatttggtgcattgcaatgccacataatttcctccttgaccactatattaaagggttgctttcaaacgtcttccccaaatggtaaacatgattccaagtggtttaagttcacatttctgtcaacagaaatttaacttttgtggttctgatgggtgagaagtgataactcaggattactttagtttggatctttctgatta

SEQ ID NO: 93558 - DNA, 921 bp, Homo sapiens
tatgagtaattgtatctcaccagcagtaacacactgttgtacctcttgttttcacatgtgcttctccttattagactataaactccattcaccatctttctggagctgtcatctttcattaggaacatcgtaatagcctttcagctagtagcctgcccccctccactgttacctgcttttgaagtgattctccccatctccagagtaagtgggctcatcaaactatgcttctstgtgtgaaaggtgtggtggtgggaactgggtgaaattagctccaggacaccattagcacttggtctaatttatttactacagtaggtatccatgtgctgagaggttctcaagaaggatggggagtggggaagagtaggagtaagtggagaaagtaggggctggaaactaggtgaagaatcagaatcaggtgtagacagccatacgagtcacagatctgaaaaggtcgagttagccagagttcaaccagggctgccagaacttgtgtggttagggtgtgccaggcagtgccgttaggagcttccatgtattcaagggttggagtggtcatgaaatgagaaaacgctgtgcagtgacaaaaagtagttgcaaaattctgagtttggagccgagaggaacatacactgtgggagatacaacgagcagcctaagtcagagtcttgtcaaaatccatttcatgaaaagctgaactttcaaaatagtgtagttatatttggtgcattgcaatgccacataatttcctccttgaccactatattaaagggttgctttcaaacgtcttccccaaatggtaaacatgattccaagtggtttaagttcacatttctgtcaacagaaatttaacttttgtggttctgatgggtgagaagtgataactcaggattactttagtttggatctttctgatta

SEQ ID NO: 93559 - DNA, 921 bp, Homo sapiens
tatgagtaattgtatctcaccagcagtaacacactgttgtacctcttgttttcacatgtgcttctccttattagactataaactccattcaccatctttctggagctgtcatctttcattaggaacatcgtaatagcctttcagctagtagcctgcccccctccactgttacctgcttttgaagtgattctccccatctccagagtaagtgggctcatcaaactatgcttctctgtgtgaaaggtgtggtggtgggaactgggtgaaattagctccaggacaccattagcacttggtctaatttatttactacagtaggtatccatgtgctgagaggttctcaagaaggatggggagtggggaagagtaggagtaagtggagaaagtaggggctggaaactaggtgaagaatcagaatcaggtgtagacagccatacgagtcacagatctgaaaaggtcgagttagccagagttcaaccagggctgccagaacttgtgtggttagggtgtgccaggcagtgccgttaggagcttccatgtattcaagggttggagtggtcatgaaatgaraaaacgctgtgcagtgacaaaaagtagttgcaaaattctgagtttggagccgagaggaacatacactgtgggagatacaacgagcagcctaagtcagagtcttgtcaaaatccatttcatgaaaagctgaactttcaaaatagtgtagttatatttggtgcattgcaatgccacataatttcctccttgaccactatattaaagggttgctttcaaacgtcttccccaaatggtaaacatgattccaagtggtttaagttcacatttctgtcaacagaaatttaacttttgtggttctgatgggtgagaagtgataactcaggattactttagtttggatctttctgatta

SEQ ID NO: 93560 - DNA, 921 bp, Homo sapiens
tatgagtaattgtatctcaccagcagtaacacactgttgtacctcttgttttcacatgtgcttctccttattagactataaactccattcaccatctttctggagctgtcatctttcattaggaacatcgtaatagcctttcagctagtagcctgcccccctccactgttacctgcttttgaagtgattctccccatctccagagtaagtgggctcatcaaactatgcttctctgtgtgaaaggtgtggtggtgggaactgggtgaaattagctccaggacaccattagcacttggtctaatttatttactacagtaggtatccatgtgctgagaggttctcaagaaggatggggagtggggaagagtaggagtaagtggagaaagtaggggctggaaactaggtgaagaatcagaatcaggtgtagacagccatacgagtcacagatctgaaaaggtcgagttagccagagttcaaccagggctgccagaacttgtgtggttagggtgtgccaggcagtgccgttaggagcttccatgtattcaagggttggagtggtcatgaaatgagaaaacgctgtscagtgacaaaaagtagttgcaaaattctgagtttggagccgagaggaacatacactgtgggagatacaacgagcagcctaagtcagagtcttgtcaaaatccatttcatgaaaagctgaactttcaaaatagtgtagttatatttggtgcattgcaatgccacataatttcctccttgaccactatattaaagggttgctttcaaacgtcttccccaaatggtaaacatgattccaagtggtttaagttcacatttctgtcaacagaaatttaacttttgtggttctgatgggtgagaagtgataactcaggattactttagtttggatctttctgatta

SEQ ID NO: 93561 - DNA, 591 bp, Homo sapiens
tgtggttcaataacttaataagacttgtagaaaaatgcaaatacaaaatcttaaaattttctcyttatgctttacaattgttatgcccaaaccaacagcatttttttgcaacctgtctttattgaacctttctaaagcagacaacagcttccatgaaaacaaaaattcattcttatcacattattatgtgttggcttcagtagtatttgttcaagttacttggtttataataacagtacaactgtcataaaaatgtttaggagcaagcacaactagaaattggtaaacaaacaactcatctggtaaaagtggagtacatggttatgtaagcgagtagctcacaagttgagtgcattttttctgccataagcaatagtctgtaggtttcacagatgacattgagagcttgtgtaaaccccaagagttatttagatagaagcaaacgaagagaacatatggagaacaatgtacacacgtatgtatattcacatatttatgtatctttgtgtatttatcttgtgtccagccatgttaattaaacagatatgttctttttaaaagcatatcttagagcttctaagtatgttggca

SEQ ID NO: 93562 - DNA, 591 bp, Homo sapiens
tgtggttcaataacttaataagacttgtagaaaaatgcaaatacaaaatcttaaaattttctccttatgctttacaattgttatgcccaaaccaacagcatttttttgcaacctgtctttattgaacctttctaaagcagacaacagcttccatgaaaacaaaaattcattcttatcacattattatrtgttggcttcagtagtatttgttcaagttacttggtttataataacagtacaactgtcataaaaatgtttaggagcaagcacaactagaaattggtaaacaaacaactcatctggtaaaagtggagtacatggttatgtaagcgagtagctcacaagttgagtgcattttttctgccataagcaatagtctgtaggtttcacagatgacattgagagcttgtgtaaaccccaagagttatttagatagaagcaaacgaagagaacatatggagaacaatgtacacacgtatgtatattcacatatttatgtatctttgtgtatttatcttgtgtccagccatgttaattaaacagatatgttctttttaaaagcatatcttagagcttctaagtatgttggca

SEQ ID NO: 93563 - DNA, 541 bp, Homo sapiens
cactttccacagaactcagagagctgggctactatagaggctttcaaaaacccaaagaggccaggcacagtggctcacacctgtaattccagtactttgggaggccgaggtgggaggattgcttgagtccaggagtttgagaccagcctgggcaagatagatcttgtctctacaaaaaattaaaaaattagctgagcatagtggtgcatacctgtagtcccagctacttgagaggctgaggcgataggattgcttgagcccaggaggctgaggttgcaatgagctatgattgcaccactgcattccagcctggacaacagagcaaggccctgtttcaaaacacaaacaaaaatccaaagagacttgaaaggtttgttaatygtgttgaccactgctgggttttcccctccagtgtagggaatacccttcaagtttcgcaaagaaagaggcattctcatggccagggcagtcactgcaggcttaacagtgtttctacagtaaagatatggtgatttagaaacttgaagtctggcttggggtt

SEQ ID NO: 93564 - DNA, 549 bp, Homo sapiens
tccctgggtggggtggagactccagggcacctgtgctctgcttcagtgtggaggcttctgtgttgtgttctgggagcacagtggcttggcctccgccaccagcagcagcttgaagagttcctgctgttccacatgsttgccaacaattggcctcttcagttttttttttttttttttaagttttcagtgcctgcctggacttgtgttttcatttagattttggtttcttagaactttcgttattctcttcacagcttaacaatgcatttgaaaagatttgttttcatgtggagtattcagttttgtaataggagggttgttcaaggcatcagtctgccactctgctagaaacagaattctcccacgcatttctttttatataaagtagttaatgaaattttgaaccatcttacatgaatttttattaaaatacacttcaggatgtggtgcccattatccattctactcttttgtaacaagtagatttctctgaattcttgaatttgaaaacaattggggttcctaaacagagaatatggaatattattg

SEQ ID NO: 93565 - DNA, 1125 bp, Homo sapiens
acacgtgggagtccttttgtttctatgacttcttattaagccatgcccaaagtaaacctaaaagcaacatgtttacttttaatcatggatgacaatatggatattatagtcatttagtaaaatatttaatctgtaataaaacaactctttatyattgcagattgtttgggccacatcttacctgattggctgtgccattgcatcttgccgccaacaaggatcacctcgatatctctacgtttgtcactattgtcatgagtatgtattattagtttttaaaatatatatccccctaaagtaacctaatctagtttttcaaacattgtttttttgtgtgcataaatgtttgtagcaactttattcataatagacaagagctggaaataacccagatgtccttcaaagatgaatggttacacaatctgtagtttgagtcttgactacttcctagttatgtgaaaacacatatttagttatatattattttattcctttgactgtattttctcttatttaaaaaaaactccaatatattttcagagcaatttaccagcagtcttcctatgtgtcattgattcttcaggtaattattatataagagaaacaaatttgattaagcaaagaaacaaggacatttacttcaacaaaacaagagtattgttagaccaaaaggacagacatgcagtggagtcttaacaaggaaacaaatagaaagagccaagtgtctttccctgtatttagctatctagtcaaaaagttgttgcatgtcttctctttaaaaattaaatatacatgttacagattctaccacagatactagtcacaattcctagaaaatttaatctgattgtttcagtaaggttctgctgcaccttcttctcctatcaactgtgattatgaagcaagatcaagtaagacaagcatgactgcagggcccaactgtgtggctccagtgacggttatcagaaaagtgaagattattcagagctggatagaactgcctgatatttgactacaaatgccagttcaatatcacttctgcacttctgctgataaaagtcagtgacgccatcatatatctccttcagctacatgatttcttagattaacacataagtctttcct

SEQ ID NO: 93566 - DNA, 946 bp, Homo sapiens
gtatttcctttgaaatatttctcagttttactggtacacttacttttatcgtcttcttgatatttcatatctttttgtgttagtacttgaatatatgtattcttgtatttttccagtgttttttctgtatttgcctttcatctccaatctgaaatcggaggctatattttttacttttctttaactctgtttgtacctcctaggtaaacttatttgctcatctggcaaccaaggaatttggactctacttctccagctcctcagatctggcccacttgcattttaatctgggccccagtccttaagattttgaataagctactcaattttycttaggttcagtgtcataatatgtaaaatgaagacaattttattgggagaaggaagtgagttaatgtaacaaggtattagaaaaatgcctgtaaataataaacacatgtatgttggctacaacaccatgcaggaatgcctatgaaagctattgatttttatttttagttcaaatacccctttggattttaaagtgattaagagataaatctcaaaatcatttatgtatttccttgtttcatcctcttcatcatttgcaagagaaaggtgctccttagaatcaccctccagagcctgcactatttctaacccttgttgctacaggccggtccagggttcaaggaagcaggctgagggtgctcatgaaactgagtgatactgctggataacaaatgtgagggtaatcacctaaacacctgagacttccctaaatttgtcttgtagcagagcatagcaggtttataatgaaataatttctcttcctatttatgggatgcaatgaaactgggggataaatttgccaatatttatttacctggccacatcaactaactagatatctggatattttaattctaggaagagtgtcttagcctctggactactgcccaatgaa

SEQ ID NO: 93567 - DNA, 958 bp, Homo sapiens
gccgagttgtcctcttgcaatctcctgtattagaaatagggaggcatatttagagataggatgacctcagcaaaatggaatggccagatttaactatcatctctccacaaaaacactgaaaaataagtataaccagtcagatgcaacttcattagaattttaaaaaatagttccagatttacagcaagaaatgaagcaacaaagcaacaaagcaaatgctgactcaagaaaaacatagctgatataagaaataaaaatacttgtgatatttttgctttcccttgctccacccccttcacagcatggtaacagtcttgaaggtagcttatgctcccaacgtaggaccttggttcctgggactgaaaagagtagaacaaacttcatttgcaaattattgtgcatgcctgctataaactctttgaggactccttgaaggattgagataaggtgctcatcaatctttcacttaattcagaactcaggctggaaaaagaatgagcatcattcaaaaaaaccacaagatgggccaggcacggtggctcactcctgtaatcccagcactttgggaggccgaggtgggcggatcacctgaggtcaggagttcgagaccagtctgaccaacatggagaaaccgtgtctctactaaaaacacaaaattagccaggtgtggtggtgcatgcctgtaatcccagctacttgggaggctgaggcaggagaaccacatgaacccgggaggcggggttatggtgagccaagatcgcaccattgcaatccagcctgggcracaagagcgaaactccatctcaaacaaacagacaaaaacccacaagatgatctaaggaatcaaaaatgcgtgggacaaaatattatgttctagacatgtaataaactactaaggctgaggaggaatagctaggggagagtttctttgaaaaattaagacattcaaaaatatcta

SEQ ID NO: 93568 - DNA, 554 bp, Homo sapiens
tttgtctatgagattgggggataaaggtggaaaataaagtataattttgttgatgggctacacaaatttggagaccagaattatgggcaaattttccatatggatatggatctcatggaggaaaagggatagaaagaaatagtgtgaaccaagactcaagaacctcataagtagaaaaatgtcttggrtgtttgcagatgacaacaatgaaggggaaatgtgtctatttttggtcagatattcttgtcttcaaactctttgggtttataaagtttattcttatattgtattttagtccttagaaaaatgactcactttcccatcacacaattgaaacatggaaaagaaaacagactcaggaaattacataagtctgttaaataattccaacaagaagtctgttaaccaccccatccttcccatttttgagcaaacaaaatatcacgagcttcaaataagagaaatcaaactttggaattagagctggaaagttgtattgtgcatgctctccttgagtaatgacagtttatttctccctctttattttcccttga

SEQ ID NO: 93569 - DNA, 462 bp, Homo sapiens
attcagccaagccagtttagtaccttgagacttttccagacaaaaggtatgagtccgtgtttgcattgatcaaacacttcagaagggcaggcttcatgagcataaaacccatttcgacacacttctctccaatagcaacacagaacaagccaagatttgtcagctaagaaagcatcttgttggagcaatgactgatgtcagtctcgtctccgtatagamcagccttccctatctcatcaaatctcgtgaaacttcctgagctcgtcttgaaataagaaaaaaaatcccttgttcttggagagagcaaagcgatgtaaaatgcagaggactctgacaagtctttttcaagtcaaagacatcccccatctcaaatcgactgaatctctagccttttctacataaacttggagtaagtgaggagctaaggatgacagatatagtttttgaaagccttttatctaa

SEQ ID NO: 93570 - DNA, 534 bp, Homo sapiens
gatccaggaaactcattatgagttgatacgtggcaaagtcttaaatatggaagatttgttaacacctaaaaaagaaagctccagtcacttgaaactggcatgcattcattgaatcaacttatatcaaattactcttatttgtaaaatatttagaagggctctagggttaaaaaattttggcagtctctcaaattcatagaaacagtgtacatttgacccttgcacaacacaggtttgaattatatgggtccactttgcaacaattggaaaaactcaaagatgaaccatatagcctagaaatactgaaaaaaattaggtaaaargtatgtcatgaatgcataaaatatatgtagatattaatctatcattactaccatgaaatatacacaaatctattataaaaagttaacatttatcaaagcttacacaattacagaccatgcatgacaccacttacagctgatagaaatttaaacatatataagatgcagtattaagtcataactgcataaaattaactgcattacatactat

SEQ ID NO: 93571 - DNA, 1196 bp, Homo sapiens
atgtcttataaaatcacttgaaataattttctatgtgcagatttgcctccaacttgaaatataattaggtttatttgtttcagtttgcttttaatttttggagataacttttttctgtttgattaaatatatttcttaaaataagtaaaatatttgcatatttccaaatttaaaagtatactttaatatattcaaagaactccagattcctttttattagctttggtttgccctttcattatttcattttgaaaaattaacaaatatttatatgtctgcccacacatctcttagaaaaatggtaacatcctatacattcttttgtatcttgctttttttctgatttagtattatgtcttggaaawtgtgctatagcaatacatagacattttcatcttatctttttacctccttatgtggataaaccacagtttatttaaccagtcaagggcctttcaatgatctttgcatctctactgagggatatgaacatctactctgtaaatggagggttctgcttattttagtccatgttcctactcccactgcatagagaaccagcacaatcctctcaaaggaaaaagaagtcaatatggataagggcagaatttatattacctaatggcttagaaaaccattagataatagaatcttaggagattggtacgtggtggtcaaattccacagattgtttttcattgctagtagaaccaggaataaaacccacgataactgatttctatttcaagctttctttactattccacacattaccttatattttattttttgttgtttcattttgtcgtgtttttttcctacctcgtaacccattgtccctgacttagttccccagctcatactcaaatattcagaagactttgttaatcctctgtttgtaaaaagcaagagtaatacattttcaagtcaggccttctcatccctatgcaccgttccacaagctgtatttgcccaagatccagtttaaccagatgtgtattggtgccttttctctgggctacacattgctgagtgctctagcaaaaaggaggattcacaggaaataatggctcattctagagaggattctcatatctcacagttttttaaaaaaggaaacctttaaccaaaaatagacttaagcctaaattgtatatttctaatttttagtttcaaacatgataatgcctatgtac

SEQ ID NO: 93572 - DNA, 1196 bp, Homo sapiens
atgtcttataaaatcacttgaaataattttctatgtgcagatttgcctccaacttgaaatataattaggtttatttgtttcagtttgcttttaatttttggagataacttttttctgtttgattaaatatatttcttaaaataagtaaaatatttgcatatttccaaatttaaaagtatactttaatatattcaaagaactccagattcctttttattagctttggtttgccctttcattatttcattttgaaaaattaacaaatatttatatgtctgcccacacatctcttagaaaaatggtaacatcctatacattcttttgtatcttgctttttttctgatttagtattatgtcttggaaaatgtgctatagcaatacatagacattttcatcttatctttttacctccttatgtggataaaccacagtttatttaaccagtcaagggcctttcaatgatctttgcatctctactgagggatatgaacatctactctgtaaatggagggttctgcttattttagtccatgttcctactcccactgcatagagaaccagcacaatcctctcaaaggaaaaagaagtcaatayggataagggcagaatttatattacctaatggcttagaaaaccattagataatagaatcttaggagattggtacgtggtggtcaaattccacagattgtttttcattgctagtagaaccaggaataaaacccacgataactgatttctatttcaagctttctttactattccacacattaccttatattttattttttgttgtttcattttgtcgtgtttttttcctacctcgtaacccattgtccctgacttagttccccagctcatactcaaatattcagaagactttgttaatcctctgtttgtaaaaagcaagagtaatacattttcaagtcaggccttctcatccctatgcaccgttccacaagctgtatttgcccaagatccagtttaaccagatgtgtattggtgccttttctctgggctacacattgctgagtgctctagcaaaaaggaggattcacaggaaataatggctcattctagagaggattctcatatctcacagttttttaaaaaaggaaacctttaaccaaaaatagacttaagcctaaattgtatatttctaatttttagtttcaaacatgataatgcctatgtac

SEQ ID NO: 93573 - DNA, 565 bp, Homo sapiens
catatcacagtacatattacatcttctaggttcacaaaatacgttcctgcaaatattgatcatgtactaagtactatgctattgttcaggtaaggacttcccgaattaatgatcactcaagggttagggcctatcaactaatgactattgtgttacaagtaattcttaattacttaataaaaagttaaagcttatagctctcaaatgtaaaggcaacgaatgcatcttatttatgatgctataaactgaatttagacatcaaggttatctttgcaatgaaaggatgtgattgggttttaggcatacatttttaaaagactgatgactgttttttgcataaatatgctcaatgtgcttggataccctaagtcctaaatacctcactccctaaaataactacttgaatgccctctacttttctggttaccctggagaaagtcaggaggatcaataaccaacactctaggataacttgaggtcactagacacagcyatgctattattataatagcttccacaatataataatggaaaagtcatctccctccggcctgagaaagaatgg

SEQ ID NO: 93574 - DNA, 1255 bp, Homo sapiens
ctgatcacaaacttacctagaaactactggattataaatagaaggtaagagacactagtgttgacaatgtttcaatgcaaggcataatgagaaatttactacacagcattagctgaggaagttcttctaattgttggaagaaggcatagagaaatgttacctgcatttgggagttaatagctttagttaagtctttttctccaggaatgagtaaaaaaagaccatctttctttatcttttttcatgggcatagatgttccattaattataattcttatccatatttacttttattgtaataattttcatttatgtaacccccaaatatcctttgtgtctggcttttcacttactatttccagtttcattgcatgtgtatttcaacatcctctcaaaattcaatcttaaactgacccttatttgaaattatattttcttctgtgcttgctttaaaagtttcttattccatatttcctgcatcctaaataggtgttcgtgtgtgtgygtgcgtgtgtgtgtgtgtgtgtgaagataggcatagttttctccccaggcagactaaggggacagagtagcagaccaggcacataaaacataaacattattccaaaagagagaaggaaggatttaggagaagggaaatttagatttcagagatccaggaagacaaaaagatgaggaagcaagtgatcctacagttaactctagaagttatgaaactgcttgttttctttaaaagtaacttaaatatacaagaaatctccatgaacttaaatgtttctatatttgggtcatcctgatttcttcttcttacttagactgaatagaataatggtctttgtgtggcaatgtggaggaaagggactcttctggttgtacatagggcaaattatcatcccattcaatgggttttataatcagtttctgcacagaaacactggaccataagtagcagtctcatctcggccttcatgaaaacattttttctgattgaaataaatgatgaagatcattttgaagtgagttctcagtcccttatgatgcctccatgcccctagctctattattgcatcactgtcaaaaggatgcaaagcccacattagtgactcaatgtgctcatagtggtgggattgagaaatgggttgcagttgttggtccattctaaatcttttttcttgttcttaaaaaaatgctgaaaaactcgaattgacaagatattggttttcagataatgggaattaaccttgatgcataa

SEQ ID NO: 93575 - DNA, 606 bp, Homo sapiens
atgctgatctagaaagttctctctgatgttcatactaagtaagcacttactacatgctgggcactgttttaagccctttgtacttattatctaatttattgcccatgacaacctaaggcacaggtactgttattttaactatcatctctacgtcctagtgaggaaactgtgatatagagggtttaagtaacttgctcaggcccacacatgtgataagtggcatgcagggatttggccctacaccctcaaccatcacgctgttagcaaagcgtgggagcagaacgggaggaggggtagctgctgtcctgaagggcctggttctttgcttcttcccaggaaacctgtttcggagccccccctgtttcggagacyctgtgctctgggcagcttcagaacctccagagagacataactcaaggagcagtgagggcaggcgaggggctgggcaggtcgattgagaagtgccatggagacagcaccaggctgggagtctggacacttgcatggccacaccagctccgccaccaacttgttgtggggccctcaaaggctcttccccctttcctgtctctgatttggatggaggtggggcatcacatgatttgg

SEQ ID NO: 93576 - DNA, 606 bp, Homo sapiens
atgctgatctagaaagttctctctgatgttcatactaagtaagcacttactacatgctgggcactgttttaagccctttgtacttattatctaatttattgcccatgacaacctaaggcacaggtactgttattttaactatcatctctacgtcctagtgaggaaactgtgatatagagggtttaagtaacttgctcaggcccacacatgtgataagtggcatgcagggatttggccctacaccctcaaccatcacgctgttagcaaagcgtgggagcagaacgggaggaggggtagctgctgtcctgaagggcctggttctttgcttcttcccaggaaacctgtttcggagccccccctgtttcggagaccctgtgctctgggcagcttcagaacctccagagagacataactcaaggagcagtgagggcaggcraggggctgggcaggtcgattgagaagtgccatggagacagcaccaggctgggagtctggacacttgcatggccacaccagctccgccaccaacttgttgtggggccctcaaaggctcttccccctttcctgtctctgatttggatggaggtggggcatcacatgatttgg

SEQ ID NO: 93577 - DNA, 407 bp, Homo sapiens
tctcttctgtggccgggcgtggtggcgcacgcctgtaatcccagcactttgggaagctgaggtgggtggatcacctgaggtcaggagttcgagacaagcctgaccaacatggtgaaactcctgtctcaatgaaatacaaaaaaaaaaaaaaaaaaaattagccaggtgtggtggtgcatgcctgtaatcccagctacatgggaggctgaggcaggagaatcgcttgaacctgggaggcagaggttgcagtgagctgmgatcgcaccattgcactccagcctgggcgacaagagtgaaactctgtctgaaaaaataataataataattctctcttccattaataaaacagtttccaaagtatgttcctcaaaacatttccatggtttaataggtatcactcaaaaaag

SEQ ID NO: 93578 - DNA, 407 bp, Homo sapiens
tctcttctgtggccgggcgtggtggcgcacgcctgtaatcccagcactttgggaagctgaggtgggtggatcacctgaggtcaggagttcgagacaagcctgaccaacatggtgaaactcctgtctcaatgaaatacaaaaaaaaaaaaaaaaaaaattagccaggtgtggtggtgcatgcctgtaatcccagctacatgggaggctgaggcaggagaatcgcttgaacctgggaggcagaggttgcagtgagctgakatcgcaccattgcactccagcctgggcgacaagagtgaaactctgtctgaaaaaataataataataattctctcttccattaataaaacagtttccaaagtatgttcctcaaaacatttccatggtttaataggtatcactcaaaaaag

SEQ ID NO: 93579 - DNA, 826 bp, Homo sapiens
tcctgagtgttgttgccttaacgtgccattgtcttgacccaattccaaaaagagatatgtgttaaatggagaatttttaagagaaataaagtctgtaactcaatttttgcaaccatgtttacaaaaaaaagagcttaattatattttatattagaaatacaggcaaatcctcacttagaagcatattttttattatgaaattttaaatacacatttatgcctagaggacctgactttattccttttcaatgttaattatacctaataaactgtttctttataacacatgaataaattgtgtttctagtaataaggctaattacatggacaaggcttctgtatctgttttttttgtaagactggagccatctgctggtaacttcttagggagcaaaatatctaagtattatataatatacatagaaggtgacaatcaagattcagaagcacagccactcccattttatgaaccactcttataacaagtcatattttgctataaccttcacctgaattgaacaaaagatggatttgatgagataagtgaaaaggggtttaagataacacacattagggcactatatgcttttattgkgcctttgctgtttattctctaccatttgttccttgtagtagagtctggggtattttttaaagactgtgatctttgagtaatagtggttttagtaaaaattgttcttgaaaaaaactaaattaagagatgccttgattatatacataatttttcctcctcctttctaggatttggtaaaactgggcttttttttttttttaacttttaagttcaaggctacaagtgcaggtt

SEQ ID NO: 93580 - DNA, 505 bp, Homo sapiens
atcccacacctccccttgcagccacatacttagggctggtgaagtagccgttcagtcatctcactggctccagattgttctccaggcatccagggggcatttatgctcatgcccagcgctggtggctgcctcgatgctattgtagatgtccaagtcctgagccctcggactgctttcaaagccccagctgccctaccctgtcctcccatctctcrttcctataatccgctctatccgaaagagtcgacttgccatttgtacaactccatacttcacatttttcttttctctgcctttgtacactctgtttattcaacgtacatagtacaaataccttcttaatctaccccctttaaactcctaaccattgttcaaaactcctcctcctatgaaacttttcttagtccttggatttggatgttgtcatcttcagggcatcttctctgggtttctttgagatcaacacaatatagtcagggctgtgggccctgagcccatctgaata

SEQ ID NO: 93581 - DNA, 666 bp, Homo sapiens
caaacataaaagccctacactccyatacaaagtaacgtagcaaaactattattaatggcaacttctggtaactcttacaatattcctcattgccttttgcatttcgaaaacagtagctttttagaaatccaagctgcatgggagaaataatcaagatcatttcctaaaaacatgaagaaaaacagagtatggatctatcaacaaagcagacagcacaattcagcaaagagctcaaagataatatgacctgcatgccccaccttgatgacagtttgaaatgcacttaggaaaaatgaaaaccttttaacagcagtactgattattagtgaaagcatatagatagtgtctgttttgagtggtgcaacattttctttttgttttctggatcaagcacaagtagtttcatgttactgctacaagttgttttcagcaagagaggaaaaagcttccatggaataggagtcagcaagacaattctcttccccattctaccacttactattacataatatctcctctacttttctttttttttttttccttttattgctctgaagaagtagcaagatgctaattccaacagcacaaggaaaacgacctataatcttaaaaattaaataccaggaagtaatgactaacgattatctttacagagaagaatctgga

SEQ ID NO: 93582 - DNA, 666 bp, Homo sapiens
caaacataaaagccctacactcctatacaaagtaacgtagcaaaactattattaatggcaacttctggtaactcttacaatattcctcattgccttttgcatttcgaaaacagtagctttttagaaatccaagctgcatgggagaaataatcaagatcatttcctaaaaacatgaagaaaaacagagtatggatctatcaacaaagcagacagcacaattcagcaaagagctcaaagataatatgacctgcatgccccaccttgatgacagtttgaaatgcacttaggaaaaatgaaaaccttttaacagcagtactgattattagtgaaagcatatagatagtgtctgttttgagtggtgcaacattttctttttgttttctggatcaagcacaagtagtttcatgttactgctacaagttgttttcagcaagagaggaaaaagcttccatggaataggagtcagcaagacrattctcttccccattctaccacttactattacataatatctcctctacttttctttttttttttttccttttattgctctgaagaagtagcaagatgctaattccaacagcacaaggaaaacgacctataatcttaaaaattaaataccaggaagtaatgactaacgattatctttacagagaagaatctgga

SEQ ID NO: 93583 - DNA, 666 bp, Homo sapiens
caaacataaaagccctacactcctatacaaagtaacgtagcaaaactattattaatggcaacttctggtaactcttacaatattcctcattgccttttgcatttcgaaaacagtagctttttagaaatccaagctgcatgggagaaataatcaagatcatttcctaaaaacatgaagaaaaacagagtatggatctatcaacaaagcagacagcacaattcagcaaagagctcaaagataatatgacctgcatgccccaccttgatgacagtttgaaatgcacttaggaaaaatgaaaaccttttaacagcagtactgattattagtgaaagcatatagatagtgtctgttttgagtggtgcaacattttctttttgttttctggatcaagcacaagtagtttcatgttactgctacaagttgttttcagcaagagaggaaaaagcttccatggaataggagtcagcaagacaattctcttccccattctaccacttactattacatartatctcctctacttttctttttttttttttccttttattgctctgaagaagtagcaagatgctaattccaacagcacaaggaaaacgacctataatcttaaaaattaaataccaggaagtaatgactaacgattatctttacagagaagaatctgga

SEQ ID NO: 93584 - DNA, 1543 bp, Homo sapiens
ggagagcaaaatctgagagcatctggagaagaagggacctcaggccagagactggggcctttacttcaagaccatcgggggcctgagggctcagatcttcacaaatactgtggacaatgccagcatcattctgcagatcgacaatgcccgtcttgctgctggttactttagagtcaaatatgagacagagctggccatacgccagtctgtgcagagtgacatccatgggctccacaaggtcactgatgacaccagtgtcactcagctgcagctggagacagagatcgaggctctcaaggaggagctgctcttcatgaagaaccacaaagagaaagtaaaaggcctgcaagcccaggttgcagctctgggttgactgtggaggtagatgcccccaaatctctgaacctcaccaagatcatggcagacatctgggcccaatacagtgaacggcctcagaagaaccaaaaggagctagacaagtagtggtcccagcagattgaggagagcaccacagtggtcatgatgcagtccgccgaggtcggagctgctgagatgacactcacggagctgagatgtacagtccagtccttggagatcaacctggactcaatgagaaatctgaaggccaggttggagaacagcctgagggaggtggagggccactatgccctgcagatggagcagctcaacgggatcctgctgcacctggagtcagagctggcacagggtataggggcagtgccaggcccaggagtacgaagccctgctgaacatcaaggtcaagctggaggctgagattgccacctactgccgcctgctggaagatggcaaggacttcaatcttggtgatgccctggacagcaggaattccatgcaaaacatccaaaagaccaccaccccccagattgtggatggcaaagtggtgtctgagaccaatgacaccaaaattctgagacattaagccagcagaagcagggtactctttggggagcaggagggcaataaaaagttcagaggtcaaaaaatacacacagacacacagacacacacacacacacacacacaaacacacaaatccctgactccatgtcttccatcctggacacactggtgcaagatgtgggctctcaaggccttgactagcttcatccctgtggctttgcagggtgcagcccctgtggctactcccctaccagctggagatgggcacctgtgacttttccaggctcaggttgcaagttgcaggtagctctaccattctcaggtctacagaatggcagtcacttcccatagctccacaagacagtgacccagtggggactctgtgtggggcctccaacctcacatttycccttggcattgacgtagtgagtaactctttggggactctgccctgcagctggtttctgtctgggcacctaggcttttccataaatcctctgaaacctagggggaagctgccaagcttcgttcactcttgattccatgtgcctgcagacttaacacttagaagctaccaaggcttagggcaacttgcactctc

SEQ ID NO: 93585 - DNA, 2815 bp, Homo sapiens
  misc_feature (1)...(2815): n = A,T,C or G
caggtggctgctggctgtccctgcaaatatttggtttcagagaatgagtcggattacacagtttcatatttggaggctgagagagctgcggccgtaagcctccatcctggcttgtctgcagcagccagtagacagcccataaaaacacggggcttatgttcacacagatggctgttggttttatcgacttggggagaggagcagaagatggtcacggtgcagctgcctgagactctgtcaaatgggtctcaactgctggggacacagtgaccatcgagggccacctgggtcctagaggccccatgaggtctggacattctcagaaggctccctccacacccctgaaatgtgtacaggactctgtcactacccacctcccagagccaccacccyacctcctcccagtcccaccaaatgaatgactagggcccgggcttgaaggatggccacagcgctggttcctgtccctctgggtctcaggctgggcctccttcctttctctaggagcccactcaatccttgggaaacaataatacactgtttcaccctaaaatcggtgcctaaattttatctcttcaagggtatcttctgtttaattgggagctaagccttgaatcaaagaaacggatccgtcattgcagaatgtcttacttagtagatggcatgaagggagagcgtctggtgccctgtgtgttaacctcattgcagggaggagaagaaagtgggcagagaccatcccagccccactaaatccacgctaccgcccgggaggatcccagaaaaggcaggggaaggggcttggagagggaggctggccacacggtggtgctattgcccacggcggtctagttggcctccgaactgggggtggagggtgggaagtggttagaaccatccccagcaaagagagaagagagtgctgacttcaactcagtggcaaccagggggcatagatgaaaaaaacaaattgcaaattcttccacctcggcctcaatctctgtgataaaaccctgcggttctctgatgatttctggggtgatggggtggggctgggttaagcacccccccaaactgtgattcctgggttaaaaaacggcgctccgactctaaggttttaagcagtgatcccagcaggttaactggggcagtaagtgctgtctttctcggggagggagggagttcagctccaaaggcggcctggttcgcaggctcctttccctaagatcctttagaaatcgttcccatcccagaaaggaagctggggcgcagctgtnnnnnnnnnnnnnnnnnnnnnnnnnnnnnnnnnnnnnnnnnnnnnnnnnnnnnnnnnnnnnnnnnnnnnnnnnnnnnnnnnnnnnnnnnnnnnnnnnnnntaaccactatttataacattgtttttgtgnaaaaatatattctgcattccaaacaacagaactagacatgaacttttggaatacagtgcatttcttgggtcaggaactgnctgtatcttgttaactgcactaaggtcagtattttcctaggagaagatggcaaccaggagtgcagaacaaaaatggttgccaagaatatggaacatatgcatttataaggatgaaagacaaaccctctccccccgcctgcccccaccccctctgagctccccgctttgctctgaaaaaaaccaaaagcatctctcgatgctggggtttcttcacataaagtgattaccacgtgtcagaaataaactgcagtcccctttggagaacagtgaggttggatcaaaaaggagaactatttcaaaacatgctgccagctcgtcttttcaaaaatttttcttttttttttttttttttggatgtggggaggaggatttcaaaaacaaaaaaaagtaagtcagtatcttctcacaactgcagctgatttcctgtgtaaacgaaaaccatgtgatattccataaatgcttccagctctaaattacaggaaatgaaaaccatcatggaaaaggaaagctttcagaataaatccccacttcggatcccgccgcggcgaagctgcgctgggccgcccgcacacacctgcgggtccccgagctcgcccgggcgcccccgccaccgtccccagagcgcgcagggagcggggcgcgcgatcacaccctccgcgctgcgcccgaccactcgggctttcaattaggagccaagctgagaaaagtaggcttttctttatgcacgcctcgccgaggtcaggttacgacctctcaaccgtcttcaatcggcggtggcatccatattcatgaaggctaattaactctgaaaggctcggcggggctggccctccccgggccgcccagcgccgccccccgcggtgcaggggtgggtgagtgggggccccgagcccagtaccctctcctccctcccccgacaacccgccaggcatcttcccagggccgcccggcctccgcagctgctcctgggccggactcccgagcacgcacttgtgcgcggggacacggggtcccagggcgcggggaccagtcaggcgaggagaattagctgcgtcatttgtcgccatcctagcaactcgagcttacttctcccgatagctccctcctggccgctgctcccaggggccgaatgtgggaaagggatgctaattccaagtgagagttcatgcttggggtttcaggcagccttgcagatgggcggccctgggacctaggttatagccccaagccaatggactgtgggggcgcgcggggaagtcactccacctctctgggctctttgcgtttgctctgagatgacaagaggctgttaggctggagaaactcctttcc

SEQ ID NO: 93586 - DNA, 723 bp, Homo sapiens
atttttaatcaaataattcatgcacataattattaatagtatcagaggattcttttgaaatcagtgtcctctgcattgctcttctctaaattgcttagaaggagtattaatacttttagttgtatcttccggcattagccataatttcttcacttttcaaaacctaagtaacatggctgtatttctttcccttgatttattaattataaatatatagtaaatttattattttgaaaaagaaggtaaactcgttcatgccaactcttatcttcaaatacatagtatatcttatattgtatgtactttatcataattattagttgatkatgtagtttcattacagtgaatatataaatattgtttgctaaataagaaagcagtgtaatatgttgcatttcctgttttttgaaacctcattgttttctctagagttaattattgtcttagttttttcacttatataatttcttctatttacaaatgttaacaaatattctatcagatctttcattatcttgtagtaccaaatgttgctgtggaaaaatatgatgttattctgattgctccttcctatgaagtgtttttctctctagaagttagtgaatcctctctctatcactggtattatgatattgcataataatgtgcattggtgtggtaactttcggtatttcctgtgccagtagaaactagaaattatttgctgatttgtttaagttacct

SEQ ID NO: 93587 - DNA, 852 bp, Homo sapiens
ctcattcctacagatctgccccagttacacagcatgtgtgctaagagcatgcattcaagtcgcaactttgggaaggtccctgggaccttcaggctttctgtaagcaaatctcctagcccagcctctgagcattgcaagtcaaggatgatgcaacgccaggcagagctgatggagcccacagcccactgcttttctatttcacaattttgcatgcaatttctgggtaaccagaggtgctgaatgtaaaatatgagctcagccaggcgagggctgacaaggagaagcgggaaagaaggggctgaatgagtgagtcattggtccagaaggaatgctcctgcatcttaacgaaatcccgagcctgcggctcattttctgcagagaggctgaagatcccagtcgctggtctggccaaagagatacacacagttctttaaaaacccactgagctccgagctgggggaaaggccacactccattcttttctttgcaatgcgtctaaataaatggacttttttttcccttaaaggaaggaaattaagyttttctgcttcacctcctttgtatcattattcctttagtccggcactccacttcctgcttaatctgctataattaaagtgcttaggagataccacttgtgatcaagaaagtccctcggacttgttgccaggagttcttgcttttgtcactaacacccttaggttcttggcaacatctcctccagccccgcctctccctgctgctctccagagagggtccaggcagctgttaacaggcacggccttctccccagctctcgggctcaaagggacggtcactatttcactcccaagggtagacctgcagggaatg

SEQ ID NO: 93588 - DNA, 852 bp, Homo sapiens
ctcattcctacagatctgccccagttacacagcatgtgtgctaagagcatgcattcaagtcgcaactttgggaaggtccctgggaccttcaggctttctgtaagcaaatctcctagcccagcctctgagcattgcaagtcaaggatgatgcaacgccaggcagagctgatggagcccacagcccactgcttttctatttcacaattttgcatgcaatttctgggtaaccagaggtgctgaatgtaaaatatgagctcagccaggcgagggctgacaaggagaagcgggaaagaaggggctgaatgagtgagtcattggtccagaaggaatgctcctgcatcttaacgaaatcccgagcctgcggctcattttctgcagagaggctgaagatcccagtcgctggtctggccaaagagatacacacagttctttaaaaacccactgagctccgagctgggggaaaggccacactccattcttttctttgcaatgcgtctaaataaatggacttttttttcccttaaaggaaggaaattaagtttttctgcttcacctcctttgtatcattaytcctttagtccggcactccacttcctgcttaatctgctataattaaagtgcttaggagataccacttgtgatcaagaaagtccctcggacttgttgccaggagttcttgcttttgtcactaacacccttaggttcttggcaacatctcctccagccccgcctctccctgctgctctccagagagggtccaggcagctgttaacaggcacggccttctccccagctctcgggctcaaagggacggtcactatttcactcccaagggtagacctgcagggaatg

SEQ ID NO: 93589 - DNA, 852 bp, Homo sapiens
ctcattcctacagatctgccccagttacacagcatgtgtgctaagagcatgcattcaagtcgcaactttgggaaggtccctgggaccttcaggctttctgtaagcaaatctcctagcccagcctctgagcattgcaagtcaaggatgatgcaacgccaggcagagctgatggagcccacagcccactgcttttctatttcacaattttgcatgcaatttctgggtaaccagaggtgctgaatgtaaaatatgagctcagccaggcgagggctgacaaggagaagcgggaaagaaggggctgaatgagtgagtcattggtccagaaggaatgctcctgcatcttaacgaaatcccgagcctgcggctcattttctgcagagaggctgaagatcccagtcgctggtctggccaaagagatacacacagttctttaaaaacccactgagctccgagctgggggaaaggccacactccattcttttctttgcaatgcgtctaaataaatggacttttttttcccttaaaggaaggaaattaagtttttctgcttcacctcctttgtatcattattcctttagtccrgcactccacttcctgcttaatctgctataattaaagtgcttaggagataccacttgtgatcaagaaagtccctcggacttgttgccaggagttcttgcttttgtcactaacacccttaggttcttggcaacatctcctccagccccgcctctccctgctgctctccagagagggtccaggcagctgttaacaggcacggccttctccccagctctcgggctcaaagggacggtcactatttcactcccaagggtagacctgcagggaatg

SEQ ID NO: 93590 - DNA, 1186 bp, Homo sapiens
acttagatcctcacgacaccagcgccaaatccatgtgataaatgactattactaacaggcagtttcagtaattcaagctttggggtaaattctaagacctatttgcttccaccaaattctagacatgtggagagttgtagtcataaataggaatctatacctgcatcttgtgtttattattattgccatagaaaaaatattcacagctgacttgctggaactttttttttctgagatggagtctcgccctgttgcccaggctggagtgcaatggcgtgatctcggctcactgcaacctccacctcccggggttcaagcgattcgcctgcctcaggctcctgagtagctgagattacaggcatgttccaccacgcctggcttttttttttttttcttgtatttttagtagatattgggttttgccatgttggtcagtctggtcttaaactcctcacctcaaatgatccgccctccttgggctctcaaagtgctgggattacaggtgtgagccaccgcgcccggcctacttgctggaactgcttacctctttccttgaatgtacttgataatgtgacttttaactgctttatgccttgtactctaatttgtgcacattttttcctctgtcctactggtgcaaaagctctctgcattagccctaatgcttagactagtactgtataytttgaagatgcttgataaatttgtcaaaataacccggtagagcaaatatatgtttgctattttatctggctcagaaaatagggttatagcttcagtgcctcttctcatcctaaacaggtgacaataccacaaaacatatactttatcctagtttagattggggatccgatggccacaggaagcctgcgggcacaaaggtgtcctctgggaagctgggcaggctaccacaaagttgaaggtgggtgtcagactcatatctgtcactaaagatgcaaggtttagatcaggctggtttcattcagattagtgcaaaatcgtaaggaagctgaagaacaagattccatcattattatttttttgagacagggtcttgctctgttgcccaggctggggtgtagtggcatgatcatagctgactgcagcctcaacctcccaggctcacgcaatcctcccacctcagcctgccgagtagctgggactacaggcacacgccactatgcat

SEQ ID NO: 93591 - DNA, 531 bp, Homo sapiens
ttgactgtatagtgtcttccaaaattctttcttataatgtttcaccttgttaataaactcctgagcctaagaatggaaagaaacatgttttatactcacagtttcttaatttcgaaaactatcctgcatggactgatcactcaatttaggaagctggcgtaaggagcatttattagcattctgaacagggacctctgatctaagactctaagtactacagtcatttagtagtgaaattccattctgtgattggttcttagagaactagttttacaaaagcccaaagatacaagaaagttcacagaaaactgtttgtaatacttagaaattggaaccaataaaaaaaggtaatcagttggggatagatcattataaagcctccatatgaatgaattattcatgattatttaaaattgaaatatgtctgcagttacagaataagttgcatagtatgatccratatgtatataaacaacatcatatatgtatgtgtgtgtgtatatatatatgtatatgggtgtatgtgtatat

SEQ ID NO: 93592 - DNA, 898 bp, Homo sapiens
ctggagcctcagaatgcctgcagccactccagtgatactcatatgaggcaaaatgtgaaagtgaaaatggaaagagacagtggtctcaacagactgaagcraaaatacattacttacaaaaatttacaaaaaaaccataggtccatgggaacacattgctaggcctttttttccacaggaccatggaaaacacctgtgcaagtggatcattggcgctgaagctccattaacatgatggtaaatctgcccctgcagacatgtgagagaatatgagagtgaggtctaaagagaacttaaaagaagtataattactctaattaccctttggtaatttctcatgggcgtgaatcaaatctcccttgcttctaattatatttttatgcccaactggtgtttctttgagtgtgagtccatgagactggattacaggtagctccagaaacgtataagttacaaggtaattaggtaatagtaaacagatgattgatttgggtacatggtaatggtaaagactgaatggttttcaagaaacttgtgaaaacttgtatttgcacatcaggaaaaaaaaaaaaatctggcctgaagaaagatgagttgtaatcatcagaaatgatgggacaactctctatctttcacgaagctccatcttcccttgaaaattaagcttattctagtactggtcagatgttaattgacatacagacttagcaaagaaaaagctgtatgtgtgtgtgtgtgtgtgtgtgtgtgtgtgtgtgtgtgtgtgagtttgcttaaaagatataaaaaggaaatttcttgagagttttccgttgacagatcaaagtgagtgactgaagcataagtctcagatcattgatgtttattgagccagcctgagggttcacctggttaaaat

SEQ ID NO: 93593 - DNA, 1350 bp, Homo sapiens
atagtccactctgcatacatcatatttctatcgaatttaatatgcaacttgctcacctgattattttattattggcttacaaaataacaccctaaaaagcctattgcttcttagccagtcctttccaatctctccttggcaggtgctatctgctctactcatctcagatttcaccccgcttggattttctgtcttaccaggcacatgactrtttgctcctacctctaagccttcacacatgcaatttcttctggctggaatgccctccctgctggatctcttctgctaagctagttattctctgcctgtttaagatgtacatcctcaatgtggcctgcctcagatgactcaattctggtcctattcattctgggttttttttttttccagcatcttttcagggttatatattagcatatctatagccctacttccttgcatttcagtttatttttcatacttcaattgaattttcatttgtgatgcctcttagtcacactaccatggtttctaacttcatatcttcttccgcctctagaaccattgactctgtgtacccacattggcatttctgcctgctggagaaaataaactaaaattgcagcaggagagattaaactggaggaccagaaagtagatggaaattttccatttttggaaaataccaacagttcccatctgttttggatggttttctaggatgagaatgattcagatatagagatgatgtcccaattgtggtaataatcacatttgggtttctttcacctttttgctctttcttagtcctgtccatttcagtttcaggttcactttcctgctcttttgccatactgtctccctcctttcccaggaaaccccatttaggtcccttagcacttagagagctcaggtaggacaaaacctaacggaagcacctgacagttactttctccactttctatcccctagagagagcataaattttctgcctctgggggtcaccctcctctttttcatcctgaagagatattcctacacaaaaaccctgtcagccctcctcaggaaggggcatttatgcatgtttttcaccactggaatacctaaatatctcagctttgcaggcccatatcaaagatctctctacttagagagggtcctgcaagtttcccaccactcaaaaacaaggagatgccaagaccccacatacgagcaggggctcttttctttcttttttttttttccctttagtctcctaaagaattatagcagtgtttgattcgggcagagggggaggcattggtgttctctcctttttggggaggggtggtggttgaaaatagatactggtgtgcgtttgtttcatctcct

SEQ ID NO: 93594 - DNA, 590 bp, Homo sapiens
cctcctctctccttctctcttctcttttactcttgcttgaatttgtgcaaaagctgctttattctgctttcttctttcttccctcctcctcctcctttctcctttctcctttttccttctctttattcttctgtcagctgtacttaagatatgtgtatcaagatcagaagctttcgtctgccactgtggtttcgtttatgtcttcagtctcttctgtgaaggttctcttggctttctagcactaaatcaaaatctggtgctcctggatgacacaacttcccgtaatgccccggtgaacggttgctaattttattctcaaaaccttttcaccatagggcctctgttggtgggataggtgyctccattgtccttcactgctattctcctttcctcctccctaaaaatatctaagttgaaatctcattttgtcacaatatcccatcctctacctctcctgattcctggatcactctctttcacttttctttttttcttttagagatggggtcttgttctcttgcccaggttggagctggagtatgcggtggagcaatcacagctcactgcatcttcagacccctggggtcaaa

SEQ ID NO: 93595 - DNA, 950 bp, Homo sapiens
caagaatcctgtcagccctccctcttatgttctcccttcatctatccaaatccttctcagccttcagcttccaatccctcccccatcagctcccttctcctgatcacccagtcaacagggcttcaccaattgtccatatcactcattccctccatcactcattcccccctaagtattgttaacacccagcactgttaattattttctgtggtggatatgaattgtttccagtttatactacacagaagtttcctgaggtccttataattcctaaaacaatcstagtttacagtatatcagagaagaaattaaaatacacattggccagacaatattcatttttaaatatgaaatcttaaacatgcagtttaagaaaacatgatactcagtttttttcctggagcagtggctcatgcctgtaatcccagcactttgggaggcggaggtgggtggatcacttgaggtcaggagttcaagaccagcctgggcaacatggcgaggccccatctctactaaaaatacaaaaattagcctggcgtggtggtgcacacctgtaatcccagctactcgggaggctgaggcaggagaatcactggaacctgggagacggaggttgcagtgagccgagaccacaccactgcactccagtctgggtgacagagcaagactcttgtctcaaaaaaacaacaaaaaaaaaagacacgtgggcttgggcaggtcacttggctgccccgtaccccaataattctaaggtctcctgaagggaaaatgctgggacctcgagaatgctgcagggaatgcaccaaatagcaagagaagaacacgactttacaaaacatgacttgcatataaatttatagtggaagcataaaggaatatattcttttcagggaaggaattttaatcccatctgtcatggttggggtgtaagatcttaatacattcaggct

SEQ ID NO: 93596 - DNA, 950 bp, Homo sapiens
caagaatcctgtcagccctccctcttatgttctcccttcatctatccaaatccttctcagccttcagcttccaatccctcccccatcagctcccttctcctgatcacccagtcaacagggcttcaccaattgtccatatcactcattccctccatcactcattcccccctaagtattgttaacacccagcactgttaattattttctgtggtggatatgaattgtttccagtttatactacacagaagtttcctgaggtccttataattcctaaaacaatcctagtttacagtatatcagagaagaaattaaaatacacattggccagacaatattcatttttaaatatgaaatcttaaacatgcagtttaagaaaacatgatactcagtttttttcctggagcagtggctcatgcctgtaatcccagcactttgggaggckgaggtgggtggatcacttgaggtcaggagttcaagaccagcctgggcaacatggcgaggccccatctctactaaaaatacaaaaattagcctggcgtggtggtgcacacctgtaatcccagctactcgggaggctgaggcaggagaatcactggaacctgggagacggaggttgcagtgagccgagaccacaccactgcactccagtctgggtgacagagcaagactcttgtctcaaaaaaacaacaaaaaaaaaagacacgtgggcttgggcaggtcacttggctgccccgtaccccaataattctaaggtctcctgaagggaaaatgctgggacctcgagaatgctgcagggaatgcaccaaatagcaagagaagaacacgactttacaaaacatgacttgcatataaatttatagtggaagcataaaggaatatattcttttcagggaaggaattttaatcccatctgtcatggttggggtgtaagatcttaatacattcaggct

SEQ ID NO: 93597 - DNA, 950 bp, Homo sapiens
caagaatcctgtcagccctccctcttatgttctcccttcatctatccaaatccttctcagccttcagcttccaatccctcccccatcagctcccttctcctgatcacccagtcaacagggcttcaccaattgtccatatcactcattccctccatcactcattcccccctaagtattgttaacacccagcactgttaattattttctgtggtggatatgaattgtttccagtttatactacacagaagtttcctgaggtccttataattcctaaaacaatcctagtttacagtatatcagagaagaaattaaaatacacattggccagacaatattcatttttaaatatgaaatcttaaacatgcagtttaagaaaacatgatactcagtttttttcctggagcagtggctcatgcctgtaatcccagcactttgggaggcggaggtgggtggatcacttgaggtcaggagttcaagaccagcctgggcaacatggygaggccccatctctactaaaaatacaaaaattagcctggcgtggtggtgcacacctgtaatcccagctactcgggaggctgaggcaggagaatcactggaacctgggagacggaggttgcagtgagccgagaccacaccactgcactccagtctgggtgacagagcaagactcttgtctcaaaaaaacaacaaaaaaaaaagacacgtgggcttgggcaggtcacttggctgccccgtaccccaataattctaaggtctcctgaagggaaaatgctgggacctcgagaatgctgcagggaatgcaccaaatagcaagagaagaacacgactttacaaaacatgacttgcatataaatttatagtggaagcataaaggaatatattcttttcagggaaggaattttaatcccatctgtcatggttggggtgtaagatcttaatacattcaggct

SEQ ID NO: 93598 - DNA, 950 bp, Homo sapiens
caagaatcctgtcagccctccctcttatgttctcccttcatctatccaaatccttctcagccttcagcttccaatccctcccccatcagctcccttctcctgatcacccagtcaacagggcttcaccaattgtccatatcactcattccctccatcactcattcccccctaagtattgttaacacccagcactgttaattattttctgtggtggatatgaattgtttccagtttatactacacagaagtttcctgaggtccttataattcctaaaacaatcctagtttacagtatatcagagaagaaattaaaatacacattggccagacaatattcatttttaaatatgaaatcttaaacatgcagtttaagaaaacatgatactcagtttttttcctggagcagtggctcatgcctgtaatcccagcactttgggaggcggaggtgggtggatcacttgaggtcaggagttcaagaccagcctgggcaacatggcgaggccccatctctactaaaaatacaaaaattagcctggcgtggyggtgcacacctgtaatcccagctactcgggaggctgaggcaggagaatcactggaacctgggagacggaggttgcagtgagccgagaccacaccactgcactccagtctgggtgacagagcaagactcttgtctcaaaaaaacaacaaaaaaaaaagacacgtgggcttgggcaggtcacttggctgccccgtaccccaataattctaaggtctcctgaagggaaaatgctgggacctcgagaatgctgcagggaatgcaccaaatagcaagagaagaacacgactttacaaaacatgacttgcatataaatttatagtggaagcataaaggaatatattcttttcagggaaggaattttaatcccatctgtcatggttggggtgtaagatcttaatacattcaggct

SEQ ID NO: 93599 - DNA, 950 bp, Homo sapiens
caagaatcctgtcagccctccctcttatgttctcccttcatctatccaaatccttctcagccttcagcttccaatccctcccccatcagctcccttctcctgatcacccagtcaacagggcttcaccaattgtccatatcactcattccctccatcactcattcccccctaagtattgttaacacccagcactgttaattattttctgtggtggatatgaattgtttccagtttatactacacagaagtttcctgaggtccttataattcctaaaacaatcctagtttacagtatatcagagaagaaattaaaatacacattggccagacaatattcatttttaaatatgaaatcttaaacatgcagtttaagaaaacatgatactcagtttttttcctggagcagtggctcatgcctgtaatcccagcactttgggaggcggaggtgggtggatcacttgaggtcaggagttcaagaccagcctgggcaacatggcgaggccccatctctactaaaaatacaaaaattagcctggcgtggtggtgcacacctgtaatcccagctactcgggaggctgaggcaggagaatcactggaacctgggagacggaggttgcagtgagccragaccacaccactgcactccagtctgggtgacagagcaagactcttgtctcaaaaaaacaacaaaaaaaaaagacacgtgggcttgggcaggtcacttggctgccccgtaccccaataattctaaggtctcctgaagggaaaatgctgggacctcgagaatgctgcagggaatgcaccaaatagcaagagaagaacacgactttacaaaacatgacttgcatataaatttatagtggaagcataaaggaatatattcttttcagggaaggaattttaatcccatctgtcatggttggggtgtaagatcttaatacattcaggct

SEQ ID NO: 93600 - DNA, 950 bp, Homo sapiens
caagaatcctgtcagccctccctcttatgttctcccttcatctatccaaatccttctcagccttcagcttccaatccctcccccatcagctcccttctcctgatcacccagtcaacagggcttcaccaattgtccatatcactcattccctccatcactcattcccccctaagtattgttaacacccagcactgttaattattttctgtggtggatatgaattgtttccagtttatactacacagaagtttcctgaggtccttataattcctaaaacaatcctagtttacagtatatcagagaagaaattaaaatacacattggccagacaatattcatttttaaatatgaaatcttaaacatgcagtttaagaaaacatgatactcagtttttttcctggagcagtggctcatgcctgtaatcccagcactttgggaggcggaggtgggtggatcacttgaggtcaggagttcaagaccagcctgggcaacatggcgaggccccatctctactaaaaatacaaaaattagcctggcgtggtggtgcacacctgtaatcccagctactcgggaggctgaggcaggagaatcactggaacctgggagacggaggttgcagtgagccgagaccacaccactgcactccagtctgggtgacagagcaagactcttgtctcaaaaaaacaacaaaaaaaaawgacacgtgggcttgggcaggtcacttggctgccccgtaccccaataattctaaggtctcctgaagggaaaatgctgggacctcgagaatgctgcagggaatgcaccaaatagcaagagaagaacacgactttacaaaacatgacttgcatataaatttatagtggaagcataaaggaatatattcttttcagggaaggaattttaatcccatctgtcatggttggggtgtaagatcttaatacattcaggct

SEQ ID NO: 93601 - DNA, 861 bp, Homo sapiens
caactaaatgttaaaagacagagcaggccgggtgtgatggctcacacctgtaatcccagcactttgggaggccgaggccggtagatcacgaggtcaacagattgagaccatcctggccaacatggtgaaaccctgtctctactaaaaatacaaaaaattagctgggcatggtggcgggtgcctgtactcccagctacttgggaggctgaggcaggagaatcacttgaacccgggaggtggaggttgcagtgaaccgagattgcaccactgcactccagcctggcaacagagcaagactctatctcaaaaaaaaaaaaaaaagacatcaaatttggaaaaagaaacttatgctgtaattttaaattggattataattttgtttttcagattaaattttcacaatttggaatttacagtcttgtcaacattcatttgtaaagaaagtataattttgaactttttcaatgaccacttcactgtcttaaaatatatgaaaatatgggccaggcatggtggctcaagcctgtaatcccagcactttgggaggccgaggcgggtggatcatgaggtcaggagatcgagaccatcctggctaacacagtgaaaccccgtctctactaaaaatacaaaaaattagccaggcctggtggcgggcgcctgtagtcccagctactcgggaggctgaggcaggagaatggtgtgaacccgggaggcagagcttgcagtgagctgagatcatgccactgcactccagcctgggcaacagagcgagactccgtctcaaaaaaaaaagaaaaaaaaaagwtatatatatgaaaatattaattttgacataatcactaaattcttggattttcaaag

SEQ ID NO: 93602 - DNA, 861 bp, Homo sapiens
caactaaatgttaaaagacagagcaggccgggtgtgatggctcacacctgtaatcccagcactttgggaggccgaggccggtagatcacgaggtcaacagattgagaccatcctggccaacatggtgaaaccctgtctctactaaaaatacaaaaaattagctgggcatggtggcgggtgcctgtactcccagctacttgggaggctgaggcaggagaatcacttgaacccgggaggtggaggttgcagtgaaccgagattgcaccactgcactccagcctggcaacagagcaagactctatctcaaaaaaaaaaaaaaaagacatcaaatttggaaaaagaaacttatgctgtaattttaaattggattataattttgtttttcagattaaattttcacaatttggaatttacagtcttgtcaacattcatttgtaaagaaagtataattttgaactttttcaatgaccacttcactgtcttaaaatatatgaaaatatgggccaggcatggtggctcaagcctgtaatcccagcactttgggaggccgaggcgggtggatcatgaggtcaggagatcgagaccatcctggctaacacagtgaaaccccgtctctactaaaaatacaaaaaattagccaggcctggtggcgggcgcctgtagtcccagctactcgggaggctgaggcaggagaatggtgtgaacccgggaggcagagcttgcagtgagctgagatcatgccactgcactccagcctgggcaacagagcgagactccgtctcaaaaaaaaaagaaaaaaaaaagatatatatatgaaawtattaattttgacataatcactaaattcttggattttcaaag

SEQ ID NO: 93603 - DNA, 1148 bp, Homo sapiens
atgtatagtcctctaaccaaggagggagtagttaatgacaaataatataatttaccatactcacaaaaagtagttaaatataaatggaaaataaagccctcttcccaacagccaagaaaaaaarctctaaaaaaatttaataaaaaattacagtgtctatatgcaaatcttttttcttgaagaatataaagtaaaccttaatagatgaaaacttatgccatgttactggatggaaatatagtatgataaaaaacttctctattttaatgcaaattaaatcagaatcttagtttatggtgttctttaaaatgaaaatgagttatatatccatctatggaccagctagatcatctatgagaaactgttaagtgataaagcaagttgcaagaaaatgtgcaatataataccattttattttataagataaaaacattgcatgtttgtgtgtatgttaatgtaagtatgaatacatttataggtacatgaagaatagggtagatggataacttgatttacatcagagggattagtttgtagagaggctgggggaatgattcttttttctttatgtatctttatattgtttaacaatggagttcagtccaacagtaaatttaaaaatcacactttgggaggctgagacgggctgatcacctgaggtcaggagttcaagaccagtctggccaacatgatgaaaccccgtctctacaaaaatacaaaaattagtctggcatgatggcgggtggctgtaatcccagctactggggagactgaggcgaaagaactgtttgaacctgggaggtggaggttgcagtaagctgagatcgtgccattgcactccagcctgggtgacagagcgagactccatctgaataaacaacaacaacaaaaatcagagaatcataaaaaatattttaaacctagcctaagtctctattagaaggtagcatcttactttattttattttattttattttattttattttattttattttattttattttattttattttttgagacagggcctcattctgttacccaggctggaatgcagtggtgcaatcatagttcactgcagcctcaaattcctggatgcaagcaatcctcttacctaagcctcccaagtagctgggactacaggca

SEQ ID NO: 93604 - DNA, 1148 bp, Homo sapiens
atgtatagtcctctaaccaaggagggagtagttaatgacaaataatataatttaccatactcacaaaaagtagttaaatataaatggaaaataaagccctcttcccaacagccaagaaaaaaaactctaaaaaaatttaataaaaaattacagtgtctatatgcaaatcttttttcttgaagaatataaagtaaaccttaatagatgaaaacttatgccatgttactggatggaaatatagtatgataaaaaacttctctattttaatgcaaattaaatcagaatcttagtttatggtgttctttaaaatgaaaatgagttatatatccatctatggaccagctagatcatctatgagaaactgttaagtgataaagcaagttgcaagaaaatgtgcaatataataccattttattttataagataaaaacattgcatgtttgtgtgtatgttaatgtaagtatgaatacatttataggtacatgaagaatagggtagatggataacttgatttacatcagagggattagtttgtagagaggctgggggaatgattcttttttctttatgtatctttatattgtttaacaatggagttcagtccaacagtaaatttaaaaatcacactttgggaggctgagaygggctgatcacctgaggtcaggagttcaagaccagtctggccaacatgatgaaaccccgtctctacaaaaatacaaaaattagtctggcatgatggcgggtggctgtaatcccagctactggggagactgaggcgaaagaactgtttgaacctgggaggtggaggttgcagtaagctgagatcgtgccattgcactccagcctgggtgacagagcgagactccatctgaataaacaacaacaacaaaaatcagagaatcataaaaaatattttaaacctagcctaagtctctattagaaggtagcatcttactttattttattttattttattttattttattttattttattttattttattttattttattttttgagacagggcctcattctgttacccaggctggaatgcagtggtgcaatcatagttcactgcagcctcaaattcctggatgcaagcaatcctcttacctaagcctcccaagtagctgggactacaggca

SEQ ID NO: 93605 - DNA, 1148 bp, Homo sapiens
atgtatagtcctctaaccaaggagggagtagttaatgacaaataatataatttaccatactcacaaaaagtagttaaatataaatggaaaataaagccctcttcccaacagccaagaaaaaaaactctaaaaaaatttaataaaaaattacagtgtctatatgcaaatcttttttcttgaagaatataaagtaaaccttaatagatgaaaacttatgccatgttactggatggaaatatagtatgataaaaaacttctctattttaatgcaaattaaatcagaatcttagtttatggtgttctttaaaatgaaaatgagttatatatccatctatggaccagctagatcatctatgagaaactgttaagtgataaagcaagttgcaagaaaatgtgcaatataataccattttattttataagataaaaacattgcatgtttgtgtgtatgttaatgtaagtatgaatacatttataggtacatgaagaatagggtagatggataacttgatttacatcagagggattagtttgtagagaggctgggggaatgattcttttttctttatgtatctttatattgtttaacaatggagttcagtccaacagtaaatttaaaaatcacactttgggaggctgagacgggctgatcacctgaggtcaggagttcaagaccagtctggccaacatgatgaaaccccgtctctacaaaaatacaaaaattagyctggcatgatggcgggtggctgtaatcccagctactggggagactgaggcgaaagaactgtttgaacctgggaggtggaggttgcagtaagctgagatcgtgccattgcactccagcctgggtgacagagcgagactccatctgaataaacaacaacaacaaaaatcagagaatcataaaaaatattttaaacctagcctaagtctctattagaaggtagcatcttactttattttattttattttattttattttattttattttattttattttattttattttattttttgagacagggcctcattctgttacccaggctggaatgcagtggtgcaatcatagttcactgcagcctcaaattcctggatgcaagcaatcctcttacctaagcctcccaagtagctgggactacaggca

SEQ ID NO: 93606 - DNA, 768 bp, Homo sapiens
tctagattttcttgtggcttatttttgttagatattatttttaattcagataaagctggttaaacacattagtttcaattttaaagaaaatacatataatggaaaagattttattttgatgaataaaattcaaaatattacctcaaatttcagaagaaatattttcactaggctttgaaataaacattttcactagcttttacttttttcccaagatcaatcatgctaattctatgtgatcaatgaaaagctatgtctcttatgcaaaaagcaaagcctcagcaacaaatgctaaaataattgtgtcaagcatctagtacttctacaaaatactacattttgaaactctgacatttctcacatctcccctttatactccagcaaatcaaattactctgtctgagtgcttwttcatttgagacaaccaaggacaaggaatttaataaagattcttcttatatccgcttttccccccacagaacctaaaccatcaacatgtatgttttgaacatgctctaaatctgcagtccccaactccagagccatggactggtcctggtccgaggcctgttaggaactgggccatgcagcaggaggttagcggtgcctgagctctgcctcctgtcagatcagcagcagcattagagtctcataggagcgggaatcctattgtgaactgcatatgcaagggatccaggttggacactccttataagaatctaatgcctgatgatctgaggtggaacagtttcatcctgaaaccatccc

SEQ ID NO: 93607 - DNA, 673 bp, Homo sapiens
ccaaaaccccttataaatatggcaaagcagacacacactaaattagcaatgctagatcatatcaaactctttgggtttttcttggcccttgtcactggaaaagaatgtcctccttgaacatttaaaggaatgggaaagtattaaaagttaataattccattatatatttatgaaaatgtaactttttctttcataggcctgagccatctagcttcctgggatggggaatgttgaagggccaataatgagaaattgttaggataattacaatgggaagggcaaagggaaaaaggtaatatagcttctaatatccaaaattggatttttgttttttaaacatccacagcaagacaattggccttgaaattttgttagaagagaaaataactttctaagttactttatcttatttatttaccaatcaagaggactattatctagactagactttaagttttaaatctgtgcagaggagcaagcagaagggtgatattaaaaaggtgaaaaacctagtggatagtgttgagggagtatagaaagaaggtacgcagaggaaaagcgaggagrtaaaatgccctggttcctgtcccacatttgtctaaacttgaggtgggaggaaggtcaaaactatgaagtgttttgaaacattgaaccaaccctgttgatttatttc

SEQ ID NO: 93608 - DNA, 1365 bp, Homo sapiens
tcctctgtggtgccttttcggcttaccagtcctggcaatggaaaagtaaacgtggcgtacgcctgactgcaacagtcttttgttggtttgctactgagcttcaagattaagggtttgggcttcggatacaagaggactcgtcttggtcctgccagtcagttctgtgaacctgtataggcgactgtccctctcaaatccwcgcatttgggcaggagatgctccctaagcattgatcacctgcccaaatgtgaggatttgagtttaggatttaggtctctgctaagagcaattcatcctattttgcactccaaagccacttagctggcatggcaatgtctccattaatcaactagctagagtgcttggggccagaagtgtcctggttaatctaacttcctggctacggatcaattaactacgacatccttgttaaaaatatgaagagtatatgaattcattttccagctctagaaggccacttcactgaacaaaattctcattcttagaaagtattataaggtggcattgttatttccctcccaaaattaaaactgagcacacaggggctgagtcagagggacctttggggttttccagctgttaagcacagctgtgtaactttaggcaaggcatggctttaaccctccagtgtatccattgtcttatgtaggacatgggggagatattactccacttccagagaagttgctaggatgaaaggacataacaaatacaaggtgcttagcaaagtgccgtgcgtgtacaagtgctcaatatttatattattgttgcaatgtctctgaccctgcgatatgcccacccacctaattaaaggagggcaagtgctgggacagagctgtcctctggttctggcctgcctctaacaccctctggggtcctgggcaagctccatcactttctggcctcagttttctcttgggcaatatggggtaatctggttgatctctgattttcatgcaggtgctgaaagccactgggctctgggtgccctgagatcttttcctctgttgagctcgaccctgaagggccaggtccctcctctcctggtgaggctggccccttccagggacctccctaggtgctggcttccagcccagccaaacttgtcaaccagtatcccggtgcaggagctgcacatactagcccctgtctaggaaaagctgtcctgcgacgccctctggaggaagcagggcttcctttcctctgccatcacgtgctcagtctgggccccaaggattgacccaggccagggctggagaagcagaaaaaaagcatcaagcctacaaatgcatgcttacttgcagcagaaatagactaattgcatgggcgtttccctgggatccc

SEQ ID NO: 93609 - DNA, 1365 bp, Homo sapiens
tcctctgtggtgccttttcggcttaccagtcctggcaatggaaaagtaaacgtggcgtacgcctgactgcaacagtcttttgttggtttgctactgagcttcaagattaagggtttgggcttcggatacaagaggactcgtcttggtcctgccagtcagttctgtgaacctgtataggcgactgtccctctcaaatcctcgcatttgggcaggagatgctccctaagcattgatcacctgcccaaatgtgaggatttgagtttaggatttaggtctctgctaagagcaattcatcctattttgcactccaaagccacttagctggcatggcaatgtctccattaatcaactagctagagtgcttggggccagaagtgtcctggttaatctaacttcctggctacggatcaattaactacgacatccttgttaaaaatatgaagagtatatgaattcattttccagctctagaaggccacttcactgaacaaaattctcattcttagaaagtattataaggtggcattgttatttccctcccaaaattaaaactgagcacacaggggctgagtcagagggacctttggggttttccagctgttaagcacagctgtgtaactttaggcaaggcatggctttaaccctccagtgtatccattgtcttatgtaggacatgggggagatattactccacttccagagaagttgctaggatgaaaggacataacaaatacaaggtgcttagcaaagtgccgtgcgtgtacaagtgctcaatatttatattattgttgcaatgtctctgaccctgcgatatgcccacccacctaattaaaggagggcaagtgctgggacagagctgtcctctggttctggcctgcctctaacaccctctggggtcctgggcaagctccatcactttctggcctcagttttctcttgggcaatatggggtaatctggttgatctctgattttcatgcaggtgctgaaagccactgggytctgggtgccctgagatcttttcctctgttgagctcgaccctgaagggccaggtccctcctctcctggtgaggctggccccttccagggacctccctaggtgctggcttccagcccagccaaacttgtcaaccagtatcccggtgcaggagctgcacatactagcccctgtctaggaaaagctgtcctgcgacgccctctggaggaagcagggcttcctttcctctgccatcacgtgctcagtctgggccccaaggattgacccaggccagggctggagaagcagaaaaaaagcatcaagcctacaaatgcatgcttacttgcagcagaaatagactaattgcatgggcgtttccctgggatccc

SEQ ID NO: 93610 - DNA, 1365 bp, Homo sapiens
tcctctgtggtgccttttcggcttaccagtcctggcaatggaaaagtaaacgtggcgtacgcctgactgcaacagtcttttgttggtttgctactgagcttcaagattaagggtttgggcttcggatacaagaggactcgtcttggtcctgccagtcagttctgtgaacctgtataggcgactgtccctctcaaatcctcgcatttgggcaggagatgctccctaagcattgatcacctgcccaaatgtgaggatttgagtttaggatttaggtctctgctaagagcaattcatcctattttgcactccaaagccacttagctggcatggcaatgtctccattaatcaactagctagagtgcttggggccagaagtgtcctggttaatctaacttcctggctacggatcaattaactacgacatccttgttaaaaatatgaagagtatatgaattcattttccagctctagaaggccacttcactgaacaaaattctcattcttagaaagtattataaggtggcattgttatttccctcccaaaattaaaactgagcacacaggggctgagtcagagggacctttggggttttccagctgttaagcacagctgtgtaactttaggcaaggcatggctttaaccctccagtgtatccattgtcttatgtaggacatgggggagatattactccacttccagagaagttgctaggatgaaaggacataacaaatacaaggtgcttagcaaagtgccgtgcgtgtacaagtgctcaatatttatattattgttgcaatgtctctgaccctgcgatatgcccacccacctaattaaaggagggcaagtgctgggacagagctgtcctctggttctggcctgcctctaacaccctctggggtcctgggcaagctccatcactttctggcctcagttttctcttgggcaatatggggtaatctggttgatctctgattttcatgcaggtgctgaaagccactgggctctgggtgccctgagatcttttcctctgttgagctcgaccctgaagggccaggtccctcctctcctggtgaggctggccccttccagggacctccctaggtgctggcttccagcccagccaaacttgtcaaccagtatcccggtgcaggagctgcacatactagcccctgtctaggaaaagctgtcctgcgacgccctctggaggaagcagggcttcctttcctytgccatcacgtgctcagtctgggccccaaggattgacccaggccagggctggagaagcagaaaaaaagcatcaagcctacaaatgcatgcttacttgcagcagaaatagactaattgcatgggcgtttccctgggatccc

SEQ ID NO: 93611 - DNA, 641 bp, Homo sapiens
gaagaactcatatattgcaggctgcctgtcaatgagattttcctctcttttttcctaatcctcatgctgccagagccgaagctgaagccagtgggagacacaggcaggatgaatgtcagcaggctggggctggcaggactcttgggccagtttgccggacaaggccaagtgcacagaatgtgctggaaagtagaacccctccaaattaggcctgcttcccttggggaattatcctgaccagctggactgccttccataaggaactgccatctatarcaatcattatatcaccttagtcttttgaaatgctttaaagcttgctaataatatccagacttacagctaactgcactatgaatatctttcagattattttgatgctctcaaggaagatctctagaaaattgtctccaaatctctttaatagaatatattacttgaggaagatatatccattcattcattcaatcaacaaatatttattgaatatttactgtgtgtcagaccctattaaaaatgctggagatacagcttttcttccaatttggagggtagaaggagacaggctttaaataaagtaagtcagtcaatgttatagtactttaaaagttgataagtggcatggagaaaaattaagcaga

SEQ ID NO: 93612 - DNA, 929 bp, Homo sapiens
ataactaatcaaactgtcctgaaacatgacttctaaaagttcagggctgtggaccccaggaaaatcacattgtcacttaaattaaaaactacatttatctggaaagcaagatttggggcttaagcttggtattctgagttagtcccatgaagggactttttctcgctctgagctaccagaagccaacctaagtagctcttctctgggtgaaaatccctagatcttgttacttcagaaaaagttccagtgttcctgtactctctttcccagactgaytggcttaactcagttggtatgtcctccaagttccttcttctttcaagacttatatgtcttagaatctaagactaagattgagttttgattccccaatcattcaagaaattctacttagtctgtactagatacttggtacaatgttgagttctagagatacaatgtgaacaaggtagacaatctgcatttgcaggttggaaagagaggcagctacacaattacagtacagcaattgtgtctttctccattatgatggagaaagacagcatcatgggggatttatcctggagttaaacatcttcactgtcctctccgttgcctggctgagcacaggggaatgggatgcggagagtcacagagagatttgacagagattaaactaacacaggcactacaaagggactattgctcaactttattagtcttagttgggtacctaaatatagcgatatgttacagaccattgctattaaaaggaagtcccaatacatccatctttagaatttatatgtgtgcttttatgtcaggaaacaatctgtagccttttgaatatgggtttccattacattgtttggagtttgggatatattttcctaggaagcatcatgaattatgaccagatccccaagctggcccaaaagcctgttatatgc

SEQ ID NO: 93613 - DNA, 929 bp, Homo sapiens
ataactaatcaaactgtcctgaaacatgacttctaaaagttcagggctgtggaccccaggaaaatcacattgtcacttaaattaaaaactacatttatctggaaagcaagatttggggcttaagcttggtattctgagttagtcccatgaagggactttttctcgctctgagctaccagaagccaacctaagtagctcttctctgggtgaaaatccctagatcttgttacttcagaaaaagttccagtgttcctgtactctctttcccagactgactggcttaactcagttggtaygtcctccaagttccttcttctttcaagacttatatgtcttagaatctaagactaagattgagttttgattccccaatcattcaagaaattctacttagtctgtactagatacttggtacaatgttgagttctagagatacaatgtgaacaaggtagacaatctgcatttgcaggttggaaagagaggcagctacacaattacagtacagcaattgtgtctttctccattatgatggagaaagacagcatcatgggggatttatcctggagttaaacatcttcactgtcctctccgttgcctggctgagcacaggggaatgggatgcggagagtcacagagagatttgacagagattaaactaacacaggcactacaaagggactattgctcaactttattagtcttagttgggtacctaaatatagcgatatgttacagaccattgctattaaaaggaagtcccaatacatccatctttagaatttatatgtgtgcttttatgtcaggaaacaatctgtagccttttgaatatgggtttccattacattgtttggagtttgggatatattttcctaggaagcatcatgaattatgaccagatccccaagctggcccaaaagcctgttatatgc

SEQ ID NO: 93614 - DNA, 929 bp, Homo sapiens
ataactaatcaaactgtcctgaaacatgacttctaaaagttcagggctgtggaccccaggaaaatcacattgtcacttaaattaaaaactacatttatctggaaagcaagatttggggcttaagcttggtattctgagttagtcccatgaagggactttttctcgctctgagctaccagaagccaacctaagtagctcttctctgggtgaaaatccctagatcttgttacttcagaaaaagttccagtgttcctgtactctctttcccagactgactggcttaactcagttggtatgtcctccaagttccttcttctttcaagacttatatgtcttagaatctaagactaagattgagttttgattccccaatcattcaagaaattctacttagtctgtactagatacttggtacaatgttgagttctagagatacaatgtgaacaaggtagacaatctgcatttgcaggttggaaagagaggcagctacacaattacagtacagcaattgtgtctttctccattatgatggagaaagacagcatcatgggggatttatcctggagttaaacatcttcactgtcctctccgttgcctggctgagcacaggggaatgggatgcggagagtcacagagagatttgacagagattaaactaacacaggcactacaaagggactattgctcaactttattartcttagttgggtacctaaatatagcgatatgttacagaccattgctattaaaaggaagtcccaatacatccatctttagaatttatatgtgtgcttttatgtcaggaaacaatctgtagccttttgaatatgggtttccattacattgtttggagtttgggatatattttcctaggaagcatcatgaattatgaccagatccccaagctggcccaaaagcctgttatatgc

SEQ ID NO: 93615 - DNA, 1463 bp, Homo sapiens
  misc_feature (1)...(1463): n = A,T,C or G
agtttgctacccctgataatcaccaaagtgtcagctgtagayctctctgaatagtgtgattattgctgatttttaaaaatatttacttaactacattttctaaatttcctacaattactgtggattgcttttataatatgaaaaaatgtgaatgttattttttaaactatcaattccacaaatattgagggaggagctgtggcttggcaggagtcctgtgaaaagatccaggggttttattgaaggcaggctcaatgtgagccaagatcatgacacagcagctagaaaacaaaacaaaacaaaacctcaacagatcactggaagcaatggcctcagtgttctgcatgggtcaggcctctgctggaacataagccacattttattggagaaaataataaactagaaagtgtttgctgctgggaaaccaagatagaaggagtctagaagtcaagttatatgaggaacagttaggagaaaatggacatttttagcttggacttctttagaaaaaccagaaacctgtgatagctatcttcagcattgggaaatgtgaaatgtggtcaannnnnnnnnnnnnnnnnnnnnnnnnnnnnnnnnnnnnnnnnnnnnnnnnnnnnnnnnnnnnnnnnnnnnnnnnnnnnnnnnnnnnnnnnnnnnnnnnnnngaaacctgtgatagctatcttcacccttgggaaatgtgaaatgtggtcaagacagcatcgatttacccatttttcttgtagaaagccagaaagcaccattcatagcaacatggaaggagaccccactttcatataaaacagggatttaataatactaattcatgcaatagttattagtgggttaccttgtgcatgggaaagttctactttatgagaaatctttgggcagagactgttggcagcctgtttcaggtggatgtttaggtcagacaaacctgaatgtgccctccaaaacctgggcttctctcttcctttgactgggttcaggatactgacaactatccaaatgcagaccattgggatgtagccaggaaacgtcagctcctgtcaactttcacgaagacgtgaagcacgactgccaatggttactctgcctcactctccccaaagtcattttcagtggtaaggccaaacccagagcgttttccagaaatccacataagtgcaaggaacatcagctatatttgtgtggaagcgtggaagtgctgtcaacactcctgtggggaaagggctcaggaactcacattccgttaagccagggtttatattagccatactgccaagaaagcaatagtccccaggtttagacagcattcgatatttgcttcggtgatcagaattcagacttaatttaaacctatatcttcaaatcttatatttttaagtttctgggtcctgtagccaagtagtctgtccttgaatgaggacagatctcaaagctccctgacggattaccaat

SEQ ID NO: 93616 - DNA, 973 bp, Homo sapiens
acgcaaatttgtgtatcagcaaaagtagttcctattgcatagacctattgcatagttttactatggaccaaggtcttatttgtaaaaaaaaaaaaaaaaaaaaagcaaaacagaattaaaaggcgtatctctgggcattcaattgagactaccaaaatgacaaaaagaaaggctagattctatagaaagggagatttgtttacaactaaagtatttcaaaagtttaccaaataaaaatagtaacttttaaggttaatatgggttaaagaattattgggacaagtagcctgagtgataagacataatttaatttgcaaatgtttctatcaaataatgatctcactccactacttccttctaaatcacaggaggaattaaggaacaatgtgagatctaattacaatgcccaatatttgtataacagtttatggtttacaaagttctttttcttttctttttttttttttttttgagatggcgtctcactctatcgcccagggtggagttcagtggtgtgatctcggctcacttccacctctgtcgcccaggttcaagcaattcccctgcctcagcctcccgagtagctgggattacaggcacctggcactgcacccagctgatttttgtatctttagtagagacggggtttcaccatcttggctaggctggtcttgaactactgacctcgtgatccacccgcctygtcctcccaaagtgctgggattacaggcatgagccaccgtgcccagcgatttacaaagctcttgacatacctgttctcatttgattcttaccacaatttggtgaaataggcagagtgtgtattcttactcccagtttgcagatgaacaaattgatttagagagagtcaatgactttctcaagaaaacctagctaataattgtcaggtgttaacaacaactcaggcttcctacttctcaattcagtacactctcaagataagaataaccgt

SEQ ID NO: 93617 - DNA, 1340 bp, Homo sapiens
atgattatttctaatttattcattgtttatagacccctaatctttttttaagacataacactttatttattaaaaaactcttccatgtaaacaattactccaaaagacaacaaaacaagttattttgagtgatttttcaaaggacrtacccacatattttatcatgatatatatgtactattctagaaggtggggagggtggtactgttgaaagtccaggtaaataaatcataatacgaagtaagcaacaagatagaaaatctttcttatggtttcagatccatacataattgctctgatctttttttgtttgtttgtttgtttgagacagagtctcgctctgttgccaaggctggagtgcagtggtgagatctcggcacactgtaacctccgcctcctgggttcaagcgattcttccagctaattttttatttttagtagagacggagtttcaccatgttggtcaggctggtctcgaactcctgacctcatgatccacccgcctcagcctcccagagtgctggggttacaggtgtgagccactgcacccagcctaattgctctgatctttttaaagtttaagataagtgtaagatatttaattctatgtttgaatatcaatgtgtagcgcgaaaacatatatatattcctccaggctcaaccacacatgtgacaatgtctcttggggacgcagcggtgaattcctctcacagtatgtctaaggagcattggctcagtgagatttcacattcagtggatttcagccatctcatcaatttctccatgctactgaaatctcattgttccactcagaatttgtcttttccccaggatggctttcaaagcattttactgactgtgtcaagccagagtaagtaaaatgctgatgagtttggatttcctcctccagtctctcggcctttgtgttttattgttttgtatctcatttctatatgacatcagatgctgtattagaaattcctgcttgatcttgaaatatatcaaaggtactgactgatgaggcattaaacacaacttaaattcagtctttaatcactaccacttttaaaacatttaatagtgtaattacgaaaaattcataaagacttggaaacttcacatcataataaattcagatattagcgaggctgtcagatgctgttactctattctaaataccagtaccagaaggacgagacaatttctcaacatatttggaaataatacttcaggttaagatatgagctggatgtcttattttggtctattctttttcatgtttccatgttcctttctctttttcttgaaagattagacctagaatctatcataaccaacta

SEQ ID NO: 93618 - DNA, 1340 bp, Homo sapiens
atgattatttctaatttattcattgtttatagacccctaatctttttttaagacataacactttatttattaaaaaactcttccatgtaaacaattactccaaaagacaacaaaacaagttattttgagtgatttttcaaaggacatrcccacatattttatcatgatatatatgtactattctagaaggtggggagggtggtactgttgaaagtccaggtaaataaatcataatacgaagtaagcaacaagatagaaaatctttcttatggtttcagatccatacataattgctctgatctttttttgtttgtttgtttgtttgagacagagtctcgctctgttgccaaggctggagtgcagtggtgagatctcggcacactgtaacctccgcctcctgggttcaagcgattcttccagctaattttttatttttagtagagacggagtttcaccatgttggtcaggctggtctcgaactcctgacctcatgatccacccgcctcagcctcccagagtgctggggttacaggtgtgagccactgcacccagcctaattgctctgatctttttaaagtttaagataagtgtaagatatttaattctatgtttgaatatcaatgtgtagcgcgaaaacatatatatattcctccaggctcaaccacacatgtgacaatgtctcttggggacgcagcggtgaattcctctcacagtatgtctaaggagcattggctcagtgagatttcacattcagtggatttcagccatctcatcaatttctccatgctactgaaatctcattgttccactcagaatttgtcttttccccaggatggctttcaaagcattttactgactgtgtcaagccagagtaagtaaaatgctgatgagtttggatttcctcctccagtctctcggcctttgtgttttattgttttgtatctcatttctatatgacatcagatgctgtattagaaattcctgcttgatcttgaaatatatcaaaggtactgactgatgaggcattaaacacaacttaaattcagtctttaatcactaccacttttaaaacatttaatagtgtaattacgaaaaattcataaagacttggaaacttcacatcataataaattcagatattagcgaggctgtcagatgctgttactctattctaaataccagtaccagaaggacgagacaatttctcaacatatttggaaataatacttcaggttaagatatgagctggatgtcttattttggtctattctttttcatgtttccatgttcctttctctttttcttgaaagattagacctagaatctatcataaccaacta

SEQ ID NO: 93619 - DNA, 1340 bp, Homo sapiens
atgattatttctaatttattcattgtttatagacccctaatctttttttaagacataacactttatttattaaaaaactcttccatgtaaacaattactccaaaagacaacaaaacaagttattttgagtgatttttcaaaggacatacccacayattttatcatgatatatatgtactattctagaaggtggggagggtggtactgttgaaagtccaggtaaataaatcataatacgaagtaagcaacaagatagaaaatctttcttatggtttcagatccatacataattgctctgatctttttttgtttgtttgtttgtttgagacagagtctcgctctgttgccaaggctggagtgcagtggtgagatctcggcacactgtaacctccgcctcctgggttcaagcgattcttccagctaattttttatttttagtagagacggagtttcaccatgttggtcaggctggtctcgaactcctgacctcatgatccacccgcctcagcctcccagagtgctggggttacaggtgtgagccactgcacccagcctaattgctctgatctttttaaagtttaagataagtgtaagatatttaattctatgtttgaatatcaatgtgtagcgcgaaaacatatatatattcctccaggctcaaccacacatgtgacaatgtctcttggggacgcagcggtgaattcctctcacagtatgtctaaggagcattggctcagtgagatttcacattcagtggatttcagccatctcatcaatttctccatgctactgaaatctcattgttccactcagaatttgtcttttccccaggatggctttcaaagcattttactgactgtgtcaagccagagtaagtaaaatgctgatgagtttggatttcctcctccagtctctcggcctttgtgttttattgttttgtatctcatttctatatgacatcagatgctgtattagaaattcctgcttgatcttgaaatatatcaaaggtactgactgatgaggcattaaacacaacttaaattcagtctttaatcactaccacttttaaaacatttaatagtgtaattacgaaaaattcataaagacttggaaacttcacatcataataaattcagatattagcgaggctgtcagatgctgttactctattctaaataccagtaccagaaggacgagacaatttctcaacatatttggaaataatacttcaggttaagatatgagctggatgtcttattttggtctattctttttcatgtttccatgttcctttctctttttcttgaaagattagacctagaatctatcataaccaacta

SEQ ID NO: 93620 - DNA, 1340 bp, Homo sapiens
atgattatttctaatttattcattgtttatagacccctaatctttttttaagacataacactttatttattaaaaaactcttccatgtaaacaattactccaaaagacaacaaaacaagttattttgagtgatttttcaaaggacatacccacatattttatcatgatatatatgtactattctagaaggtggggagggtggtactgttgaaagtccaggtaaataaatcataatacgaagtaagcaacaagatagaaaatctttcttatggtttcagatccatacataattgctctgatctttttytgtttgtttgtttgtttgagacagagtctcgctctgttgccaaggctggagtgcagtggtgagatctcggcacactgtaacctccgcctcctgggttcaagcgattcttccagctaattttttatttttagtagagacggagtttcaccatgttggtcaggctggtctcgaactcctgacctcatgatccacccgcctcagcctcccagagtgctggggttacaggtgtgagccactgcacccagcctaattgctctgatctttttaaagtttaagataagtgtaagatatttaattctatgtttgaatatcaatgtgtagcgcgaaaacatatatatattcctccaggctcaaccacacatgtgacaatgtctcttggggacgcagcggtgaattcctctcacagtatgtctaaggagcattggctcagtgagatttcacattcagtggatttcagccatctcatcaatttctccatgctactgaaatctcattgttccactcagaatttgtcttttccccaggatggctttcaaagcattttactgactgtgtcaagccagagtaagtaaaatgctgatgagtttggatttcctcctccagtctctcggcctttgtgttttattgttttgtatctcatttctatatgacatcagatgctgtattagaaattcctgcttgatcttgaaatatatcaaaggtactgactgatgaggcattaaacacaacttaaattcagtctttaatcactaccacttttaaaacatttaatagtgtaattacgaaaaattcataaagacttggaaacttcacatcataataaattcagatattagcgaggctgtcagatgctgttactctattctaaataccagtaccagaaggacgagacaatttctcaacatatttggaaataatacttcaggttaagatatgagctggatgtcttattttggtctattctttttcatgtttccatgttcctttctctttttcttgaaagattagacctagaatctatcataaccaacta

SEQ ID NO: 93621 - DNA, 1340 bp, Homo sapiens
atgattatttctaatttattcattgtttatagacccctaatctttttttaagacataacactttatttattaaaaaactcttccatgtaaacaattactccaaaagacaacaaaacaagttattttgagtgatttttcaaaggacatacccacatattttatcatgatatatatgtactattctagaaggtggggagggtggtactgttgaaagtccaggtaaataaatcataatacgaagtaagcaacaagatagaaaatctttcttatggtttcagatccatacataattgctctgatctttttttgtttgtttgtttgtttgagacagagtctcgctctgttgccaaggctggagtgcagtggtgagatctcggcacactgtaacctccgcctccygggttcaagcgattcttccagctaattttttatttttagtagagacggagtttcaccatgttggtcaggctggtctcgaactcctgacctcatgatccacccgcctcagcctcccagagtgctggggttacaggtgtgagccactgcacccagcctaattgctctgatctttttaaagtttaagataagtgtaagatatttaattctatgtttgaatatcaatgtgtagcgcgaaaacatatatatattcctccaggctcaaccacacatgtgacaatgtctcttggggacgcagcggtgaattcctctcacagtatgtctaaggagcattggctcagtgagatttcacattcagtggatttcagccatctcatcaatttctccatgctactgaaatctcattgttccactcagaatttgtcttttccccaggatggctttcaaagcattttactgactgtgtcaagccagagtaagtaaaatgctgatgagtttggatttcctcctccagtctctcggcctttgtgttttattgttttgtatctcatttctatatgacatcagatgctgtattagaaattcctgcttgatcttgaaatatatcaaaggtactgactgatgaggcattaaacacaacttaaattcagtctttaatcactaccacttttaaaacatttaatagtgtaattacgaaaaattcataaagacttggaaacttcacatcataataaattcagatattagcgaggctgtcagatgctgttactctattctaaataccagtaccagaaggacgagacaatttctcaacatatttggaaataatacttcaggttaagatatgagctggatgtcttattttggtctattctttttcatgtttccatgttcctttctctttttcttgaaagattagacctagaatctatcataaccaacta

SEQ ID NO: 93622 - DNA, 592 bp, Homo sapiens
tagtaatttgagggtacaaacccatggctgggctcagcttttaaaaaatcttatctgagattccttatgaaacagagttccatcaaagccaatttaaaatgcctatgtgggaataattattcttgctgcattttatgcaaataatcaggccaaatataataagactaaagtttattttgcaaacaaatcagttctatcatgatttgtttttaataacaatgggaactgatgacagaaaaattatgtttaaaaaaaaaactacagtacacctgttgttatctgttcttgagttttttctgcagtctggactagatcctaaagtctttgtgggctacaagtctccaaactaatgctttcaaatctttacttttaaaactgggaattgcactccttaccctagtacttattatttaccttatagtatgttgttcccttaaatgcagtactaaaactatagatgacaatgctaatgycttttccatgcaaaccttggaaccccagccagacctgcatgagtatgctcagacaattgcaaagtggttccactcctctcaccttgggatcaacacctaccctcactacgccctatcag

SEQ ID NO: 93623 - DNA, 709 bp, Homo sapiens
gtatccttctaaacaaccctattgtttttagaacaggatgagacagaaaaagaaaagaaagagaaggaaggaagaaaggaaaggagagagcaaataaggaaaggaaggaggagcggaggaaagaaacccagccagtcaagcacttggcttgttttttttttcatgtgaatctggagcatctcagaatgcaacttccaggaatcccaaagtatagattaacagaaagtctagtgtctctcctgaacaagcccttgtctcatttgatacgtacagagatacttgagtatgcttcccagtatccatagggccaggatttcattttccctctttgaccaaaagacagaggtgctccatagaagacagatgactccatgcccagtaacagaggctacaagaattaaagaaagaagaaagaaacacaaaaagtggctcaacagtcaaagagaggtttattttggagaataaacctgagaggggcttctggccaagttaggtcagaggcattctctcttacagactgagagkttttaagggttcaaggcagaagagcttatcacgggcttggaatgtttgtctgtcttgcttatctgggagggagggtttttgtgtctgttcccacacatcttcctgcagctgcaggcataccccctgagtctgcttttagcttccctatcttcgtgcacctaaagggaaaggaatgtacttatta

SEQ ID NO: 93624 - DNA, 709 bp, Homo sapiens
gtatccttctaaacaaccctattgtttttagaacaggatgagacagaaaaagaaaagaaagagaaggaaggaagaaaggaaaggagagagcaaataaggaaaggaaggaggagcggaggaaagaaacccagccagtcaagcacttggcttgttttttttttcatgtgaatctggagcatctcagaatgcaacttccaggaatcccaaagtatagattaacagaaagtctagtgtctctcctgaacaagcccttgtctcatttgatacgtacagagatacttgagtatgcttcccagtatccatagggccaggatttcattttccctctttgaccaaaagacagaggtgctccatagaagacagatgactccatgcccagtaacagaggctacaagaattaaagaaagaagaaagaaacacaaaaagtggctcaacagtcaaagagaggtttattttggagaataaacctgagaggggcttctggccaagttaggtcagaggcattctctcttacagactgagaggttttaagggttcaaggcagaagagcttatcacgggyttggaatgtttgtctgtcttgcttatctgggagggagggtttttgtgtctgttcccacacatcttcctgcagctgcaggcataccccctgagtctgcttttagcttccctatcttcgtgcacctaaagggaaaggaatgtacttatta

SEQ ID NO: 93625 - DNA, 1312 bp, Homo sapiens
aagttcataaaaggtgaaatgcttcaatattataaaggtataatcaaggctatggataaaaagtatgctctggtagaacaatctttccacagtgcattcccaggagatgaagacctaaaacaccataatctgcaatcaggagattttgtctatttgaaaagacatttaaaaaaagactccctctgacctcattgagaggcccatttccagtcctgttaaccaacctttgtgctgccaaccttaaaggaattgattcttggatatatgtatcttatctaaggaaaacatcagctcctgagtggatctgcactcctgtcaacgaattaatactaaaaatttctaagaactgaacttagtttataaaactaaaaatttctaagatttgaagcaggtggcatctgtttctcccaagatgtttggatgacttctatataccctttccttatttctaattcttactttatcttatccatttcttttccctggaagacgatattcctgtccacatttcccagtctgttggtacaggggaaaacttactgattgttggatctgtcataaaaaatcctgacctgttaatgactctagttttcttttagtacaatctgtaacaaatttagtacaatctgtaacaaacatctcagctccaaccctctgtacaaagtgtatcatgggaccatcctataaggttaagctttctcattcaccttctattcctgtctcctgtctcatctactcaaaacaatgatctcctagtagggccctagagacstgcaatggatcatctctctaaaagtattccttgggtctctttaccatatgtaagaaaacttgttgggactgattttaagaggaagggccattagcagtttatagtaatataactgacccctggtttaatcctgccagacacagaaaatttacagatggaagaattctttgttttcctattggatatatttacttttgtgggtgggatatgtcaatatgggcctccagatatttagacacttggacaacaggaggctaatgtgtgttgggatgttttgtttctctgttgtcaatgcataatagatctgaaactggtcacgggactgtcattggactagtcccgtcttactatatcaaagggttaaacatgagttaccaggtgggcatgggactctggattgcttcctttgtcagatcttttgtataatggtatgatatagccactaatgaagaaatggtaaaagatttatttgctaccctaggaattcttgcagacttcactgcaagtatacaatagcattcattggcctctcttgccagg

SEQ ID NO: 93626 - DNA, 689 bp, Homo sapiens
tccgctagaggttctagatagaaacacagtcctgctgacacatcaatcttagtccaactagacccatttcagacacatatatatacacatactgaaaggatactcactaaaatgaaataacagttacctctgtttggtgtggttatagaagtgtatgttgctctttatttttcttttttcaattacaaaatatttcaggtacaaaatagatttaggtatagatatatagatagtatatatttgtatgtgtatgcatatatataaatacacacacacacacacacacaaagttttaccaaccaccccttggatacattttcttaatccattgctcctttcctccctgcccctccaaatcttagctatttattatctttattttggtgtctaatatttccatgtgtgcttttaaatrtctactaaatggacatgtagtattatccgggaacaatattcagtattttcatttgtttaactttatataaatgacataacagtctacatattattttaccacttgcattttttattcaaagtgttttgtcaggcttactcgttttcatacacatagttctggagtatccactttcagtgacatttcacttttggtgccatgaccacaccacaccattgtgtaattatatcgggatttatttaatcattctcttgtccatgtacatttaggatgt

SEQ ID NO: 93627 - DNA, 2080 bp, Homo sapiens
  misc_feature (1)...(2080): n = A,T,C or G
ccaaccaacatttaccaagagtcaactttacacaaagttctgatcttatacattcatgcaatttctaataaaaaagacatagtaataacagctaatctctattgagaatttactgtatcaagcactgtaataaatattttaagtatagaagcttatcttaccctcatgagtataattaaattttcagatacgaaaaaataggccctaaaatatttatgtaattttcagtagaccacatgatgagaactagatttgagtgtgtagatttgactggcaaaactttcatttcttagcacaatattattgtccttttgaggttccatacttgtttttaagaatgaattacatatctgtgtgtattatgtattagcccatttttgttctgtttttgctttttttttcactctgtattctttttttaagaacaatccatattgctggaatacattggttctaactgtgggctgaagtaaattcaacaatatttatttattacaatcttacaacatcagaaaggcctaattcttctctaatagccattccttcttcttcctttaatagtgatgggcagctgagcacatggccatttagttaggaatttcacttcccagcatctgttgaagctaggtgtggccatgtgacnttcgntctgaataatgagatacgagtgttagacaggtgtcagacttctaggaatactcttaaatataagtggtatgccctccactttttctttcccctcctcccaccagctgcagccagagcaatcattttagactaggaggcagagtaagtgctaagttggcagagaaccagaagagagggaatgttagccacagaaaccatgcagctgccatattagccttggacttccgacactcagatctctgttacatggagatctatacatctctgtcttgtttaagtcaccgtaattccggcttttcttagagcagtcgcactgtattcaaatcaagatatttatccattcctctggtgaaagacactgagtttcctctaactctctccaccacactaacagtgcttaaataatatctacacattccctttgtggagctgtatgagatgccatctaagctagggacttgagagtaggagttatgggtcatagcttataagaatatttaatttgaccaaaaactgctagactgctttgcagaaagagattttgttcttattcgttagtgtatgcatcctccccctgaaatgttccttaaactcaactgtttttgtttttgtttttgtttgagacagagtctcactttgttgcccaggctggagtgcggtggtacgatcttggctcactgcaacctccacctyctgggttcaagtgattcttctacctcagcctcctgagtagctgggattgcaggtgcccaccaccacacccggctaatttttgtatttttagtagacatggggtttcaacatgttgaccaggctggtctcaaacttctgacctcaagtgatctgcctgccttggccttccaaagtgctgagatttgtgagccaccgcgcccaacctaaactctactcttataatgtacagctttagtgattctaatcctaacttggtttaaatataagttatttcaaggggtaacaaaagaagatggagtaaaattagtggaaacacaaggagaagtgaaaattttccaaactcattagatcagaagtgaaatattctgcagtagcttggacttcaggtttgcgtcttataatgaaagaatatatactatgctatttatggataacaacagattaattctataattctttatagtttaatcacttgacttcatgctgagaggctaatacgtctttgatagtcttggattattaaaaaataatgctcaatctctaccacaaagacttaactctaggaagaagcatcatggcctgatgatctgtgaccttggggtcacactgacttggggtcttgcctttgccaccatgtggatgcaggaacctataaaagtccctcaccatcattagtctttgtttctctcctcatccataagagacagacccaaaaggtctctaattatatttgcatgca

SEQ ID NO: 93628 - DNA, 809 bp, Homo sapiens
gctccaccacctcccagtgggcctcacagccattgggcagcacctcatactcatttagggatgatggcrcagagttcttgtgtggggagctcatctggaggagaagaggaggagcccatcaagaaagacaatgctggggtcagtggctcatgcctgaaatcccagcactttgggaggctgaggtgggagctgagccccagtggtcgaggctgcagtgagccgtgattacaccattgcattccagcctgggtgatagagcaagaccctgtctcaggagaaaaaaacaaaaacaaaaaaagagacaacatgggcgggccacaatagctcatgcctgtattcccagcacttttggaggccaaggcaggaggatcacttgagcctaagagttcaagaccagcctgggcaacatagggagatcccgtctctacaaaaaatgtaaatgttagccgagtgtgaaggcacgcacctgtggtcccagcgacttgcgaggctggggcaagaggatcacttgagaccacgaggctgaggctgcagtgagctatgatcacatcactgcactccaacctgggtgacaacaagacactgtctcaaaaaaaaaaaaaaaaatggacaatgtgaaggaggacaatgtgttcttgccagaaatgtaaatgtttacttttaagcctggacctatctagcatatgggacatacactggcacagaggaacaagtcaaacgccaccatgaggaaacaaggagacaaacctagaatatgggacattctgcaatacaacaaatggtcctaaaacctaacttatggtgctaaa

SEQ ID NO: 93629 - DNA, 809 bp, Homo sapiens
gctccaccacctcccagtgggcctcacagccattgggcagcacctcatactcatttagggatgatggcacagagttcttgtgtggggagctcatctggaggagaagaggaggagcccatcaagaaagacaatgctggggtcagtggctcatgcctgaaatcccagcactttgggaggctgaggtgggagctgagccccagtggtcgaggctgcagtgagccgtgattacaccattgcattccagcctgggtgatagagcaagaccctgtctcaggagaaaaaaacaaaaacaaaaaaagagacaacatgggcrggccacaatagctcatgcctgtattcccagcacttttggaggccaaggcaggaggatcacttgagcctaagagttcaagaccagcctgggcaacatagggagatcccgtctctacaaaaaatgtaaatgttagccgagtgtgaaggcacgcacctgtggtcccagcgacttgcgaggctggggcaagaggatcacttgagaccacgaggctgaggctgcagtgagctatgatcacatcactgcactccaacctgggtgacaacaagacactgtctcaaaaaaaaaaaaaaaaatggacaatgtgaaggaggacaatgtgttcttgccagaaatgtaaatgtttacttttaagcctggacctatctagcatatgggacatacactggcacagaggaacaagtcaaacgccaccatgaggaaacaaggagacaaacctagaatatgggacattctgcaatacaacaaatggtcctaaaacctaacttatggtgctaaa

SEQ ID NO: 93630 - DNA, 756 bp, Homo sapiens
actggtggaaggcgttggcgtgctgggcaaactcctggcgcagcttgtcgttctcctcctgccgccgctgttccttctgcagctccagctccctctcctgagggccaaaggggggcagatgctgtgcgctgctgtggcagtgacaccagcccctccttcacagatgggctcagggtggtggtggcctccccacaaggaacctccccaaagatgagagraggaggctgggagacatgaggccggctcagagcacttggtagttctttctctgttcccaccccccaggggcttcaaggaagaggcggacctggagggaagcgactggtcagtcaagcagggagttgctggactgtcagaaatggaaacttctggctgggtacagtggctcacacctgtaatcccagcactttgggaggcctgggcaggaggactgcttgaggccaggagttgaagaccagcctgggcaacatagcaacaccctgtctacaaaaattaaaataattagccaggcgtggtggcacgtgcttgtagtcccagttattcaagaggctcaggcaagaggatcacctgagcctgggaggttgaggctacagggagccatggtagcaccactgcactgaagcctgggtgacagagaccctgcctcaagaacacaaaaagaaatgaaacttctgatgaaaccatgctcctccatcctgctcgtcttgtcgtgactcagttaagtgtgggctctgagcagggcccagagagggctct

SEQ ID NO: 93631 - DNA, 651 bp, Homo sapiens
gggaggcgctggggcgcgggacctcgggcgtggggtcccgggcgctggatcggcgcggacgggaggcggcgctggtcccgcgggccagcgggtctcgggagggggcgcccgatcccgcgtctccggcgccgcttcccgggaagtttcaagtttgaaagtcctggcggagggtctgcggcttccgggaccggagtggctgagagragggccccaagcggccggagcggcgccatggaggagggggcgccgcggcaggtgaacggcgtgggaggggcgcgcgggcccggggggtgcgagaaagcctctgtcatcgccccggagccccgaaccgcggccgcttcccccgatcctcccctcacccgcgccccttccctgcccctgccctggccccggccccgcgacgccctcgcagagcagacctgatctccgggttcggtggttcctggaccttgcacagtctccaaatcagtccgcggctgacccggagactgaaccccaaccagcccgtgagcgaggacggctgagtccgcagtgtgcgccaccagggtggtccccagagtgtccttaagtcggttctcctcggtggggctccaaggccgacgggaattagccgggatagaaaggcggggcacaggggcctgggggggttag

SEQ ID NO: 93632 - DNA, 672 bp, Homo sapiens
gccacagaccgccgccacttgggccatgtgcagcagctgctgcggtcctccaaccgccgcctggagcagctgcatggcgagctgcgggagctgcacgcccgaatcctgctgcccggccctgggcctggcccagctggtgagtgaggagctgagaccccctcaggacagaaggctctaggcccatctggcccctggccttggccctggccactgtggcgagaccacctcatttcctgcctatagatcagtaggggaaggaggaaaggccacagtgggggtctcggctctgggtgagggactcctgtgctcgatacccccgtgcacagagcctgtggcctcaggaccccggccgtgggcagagcagctcagggctcggcacctagaggctctccggaggcagctgcatgtggagctgaaggtgaagcagggggctgagaacatgacccacacgtgcgccagtggcacccccaaggtaaggccccacagtctgatggcaggagcaccctggcccctggtctgacagggaaatgcacctcagccattgggctcataaggagacaccatyccagcctgcagcctgatggggaaaatacagccccaaaccccagctgggtgaggaaggcatggctgtagtctctagtgtgacagagaaggccttgccctggtctaatg

SEQ ID NO: 93633 - DNA, 545 bp, Homo sapiens
aaatgagactccatctcaaaaaaaaaatttttttttaattggccagatgtggtgatgtgcgcctgtagtcccagctactcaggaggctgaagtaggaggattgcttcagcccaggattttgaggctgcaatgagctatggtccagcctgggcaacagaatsagacactgtctcaaaaaaaaaaaaaaaaaaacccaaacaaatcaataagcaaataaacctgcagacagtacaaagaaaactgaggatgtagagcaactggagagctcctacactgctggtaggagtgtaaactgctaaagccactgcggaaaacagtctagtgttacctaaaaaggttgaagacatgtacatcttgtgacccagaagtcataccaggcatgtgtgccctaaagaaacccatgcttatggtcaccaggatgcaggtataatacatggctcacagtagccaactcttagagtcacccagacatccatcagcagtagaatggatgaaaaaattggggtgtcatgatggaatactatactgtaatgaaaaatgaatgc

SEQ ID NO: 93634 - DNA, 719 bp, Homo sapiens
aaagatgtaagtaaactgaaatttacccttatgtgtaatagccatctaattttagaacaatgatgtttaatatgtaatttaaaggtttttttttttcatgttgttttcatctgctgtcccatacctgcaataaaagtcatttgagtaagtggctttgctttgatgatacttaaggggaagaaatggagaattaattgggctaagcatgatagtaaagaggagaatgggatttcaaaaggggatttaaggtgggtggcatttgagaagaaagcttaaaaatgaaaattattagaatatgtcctagtaacacccaactttccctaaattcaaaaaatattacaaagttggaaaatattaaagttcatcatagtttaaattttcctatttaaacaaagtaaagggcatctgcagaatgttgaaagtttgaaacttcatggacttatttatttcataaagggctctctaacttctacacaaattagagttttagttaattgctcctaatttggtttactgaataaattgatctgaaataaagtatgcttttcaattatgtttagcaagtttcattcatctcttcagaaacttctgtttcatttcctccatttatacaaacctacatgttaacatattcacaatatctattttcctaaacccaggacaaagaatatcaattggwccctctgtaacttttcctagatatagttggtaactttttc

SEQ ID NO: 93635 - DNA, 645 bp, Homo sapiens
caaagccaaagatgtggcaggtgctggatggagagcctgggatcaaatcccacctccaccactccctccctccctgctcctccttccccttctgcaggtccccactccctgtcctccccaccaccagactgcaagctgcacgagggcagggacctgcctgccgactcttcctgtgtgtgcacagtgctacaagctaggtgccttccaaatggcttcaagctaaagaatgaataaatggatggatggatgratggatgaacggatgggtggatggatggatgcatggatggatgcatggatggatggatggctacatggatgaatggatggatggatggatggatggatggatggatggatgcatggatggatggatggatggatggatggatggatggatggatggatagatggatggatggatggatacagggatgaatggatggatggatggatggatggatggatggatggacggacggatagacgtgagctgtgagaactcaacatctctgaacatcattttctcatctgcaaagtgaggagaataaagtattagggttgctgtgagggttaaattcaagaaggcacacatgcccagcacaatgcagcacatagcaggccctccatacacagtcctcataa

SEQ ID NO: 93636 - DNA, 645 bp, Homo sapiens
caaagccaaagatgtggcaggtgctggatggagagcctgggatcaaatcccacctccaccactccctccctccctgctcctccttccccttctgcaggtccccactccctgtcctccccaccaccagactgcaagctgcacgagggcagggacctgcctgccgactcttcctgtgtgtgcacagtgctacaagctaggtgccttccaaatggcttcaagctaaagaatgaataaatggatggatggatggatggatgaacggatgggtggatggatggatgcatggatggatgcatggatggatggatggctacatggatgaatggatggatggatggatggatggatggatggatggatgcatggatggatggatggatggatggatggatggatggatggatggatagatggatggatggatggatacagggatgaatggatggatggatggatggatggatggatggayggacggacggatagacgtgagctgtgagaactcaacatctctgaacatcattttctcatctgcaaagtgaggagaataaagtattagggttgctgtgagggttaaattcaagaaggcacacatgcccagcacaatgcagcacatagcaggccctccatacacagtcctcataa

SEQ ID NO: 93637 - DNA, 1621 bp, Homo sapiens
caacgagctccaattccagatcggggcgagaatctagctgtaatctcagaggaagaaagcagcaagcatcgctcaggaggcctcagagactaaacagacacaaaacccaaaagaaaaagaaaaaaaaaaatcttcgcaccacatcaccaaaatggcagaaaaattaagtcttggggctgagacgaagggaacctgactcagctcctccgcctctgacagctgcctcctgcccttggagyggccaagtgcaaacaaaaatgagacctttcttctctaaacctgcttgctacgtgtccctgtgctgtaggggggacgatgtcgcttttttcccccttccctaagtgcattttaatacccttattctacatcctaatttctttgaaaaaaacatcagtgtcactaaaaaaaacgtcactctgttttgcaaaatccagcagcttccttggcagcgagaaaggctggctggcattatcccctcatttgacaaaactactatttctgggcatgtggtcaaaagcaggtaggaagcaaatgctgagaaataaggaagtaaaaacagccaacagatttttcactaccgaagacgccaagcgtaaacatgatttatttagctgtgtttaacgtgtctgtcctccactcgactacaagcccacttgggtttaaggaaagggtgggtagaaggggacaggaaaaggggagtggggaggacatcagggagagggagcaggggcaggcggcgctgaaggaagactttctgagcggttcggttcagagttttaggagaacaagaatcctctaccccaaaatacatgcatgtgtcaaaagaaggcagcactaatctgctggttaattaacgagctgccactaacaaaagatggaagacccagttcatacagacaatatttacatgggcgttgcatgatcttgtccccctgcttccctaccttttctcgcaaaccatgtgggctgggtacagcgacaggcggagaggcccgtcaggttgggagggttacgagtccagccgtggagaggggaatatcacggccttccttgcccagccttgcatgcccacgtggaatttacttagatctgtattcaattaagaagcaccagacagctcctggctccaagcctgcaccatcgcagactccaggtatctgccgttccccactccagccccagtgccagtgaacaggggctgggtcaaggcccccatggggaaaggagaggaccacactctcccacccctaccccacaactccagcccaaagtcttggcccagccagggtgaacaaaccaaatacataaagaaagcttctgtatttcctaactaacaagactaatccagaggttttggaccctgccagaggttattttatgaaaaatctaattcaagtaatccagcttttgctggaaaaaagaaatcaagacacttccaaagaaaagcaacaaccaaaaagtaaaatggagccccaataggacacttaggccctctggcttccctagtgaaggtaccatttcatagcagacagctgtgtgctccatggggataagtgccaatttttgttagctctgagaggcggtgagaatttcctcactggtccgctttgagttccttcct

SEQ ID NO: 93638 - DNA, 1621 bp, Homo sapiens
caacgagctccaattccagatcggggcgagaatctagctgtaatctcagaggaagaaagcagcaagcatcgctcaggaggcctcagagactaaacagacacaaaacccaaaagaaaaagaaaaaaaaaaatcttcgcaccacatcaccaaaatggcagaaaaattaagtcttggggctgagacgaagggaacctgactcagctcctccgcctctgacagctgcctcctgcccttggagcggccaagtgcaaacaaaaatgagacctttcttctctaaacctgcttgctacgtgtccctgtgctgtaggggggacgatgtcgcttttttcccccttccctaagtgcattttaatacccttattctacatcctaatttctttgaaaaaaacatcagtgtcactaaaaaaaacgtcactctgttttgcaaaatccagcagcttccttggcagcgagaaaggctggctggcattatcccctcatttgacaaaactactatttctgggcatgtggtcaaaagcaggtaggaagcaaatgctgagaaataaggaagtaaaaacagccaacagatttttcactaccgaagacgccaagcgtaaacatgatttatttagctgtgtttaacgtgtctgtcctccactcgactacaagcccacttgggtttaaggaaagggtgggtagaaggggacaggaaaaggggagtggggaggacatcagggagagggagcaggggcaggcggcgctgaaggaagactttctgagcggttcggttcagagttttaggagaacaagaatcctctaccccaaaatacatgcatgtgtcaaaagaaggcagcactaatctgctggttaattaacgagctgccactaacaaaagatggaagacccagttcatacagacaatatttacatgggcgttgcatgatcttgtccccctgcttccctaccttttctcgcaaaccatgtgggctgggtacagcgacaggcggagaggcccgtcaggttgggagggttacgagtccagccgtggagaggggaatatcacggccttccttgcccagccttgcatgcccacgtggaatttacttagatctgtattcaattaagaagcaccagacagctcctggctccaagcctgcaccatcgcagactccaggtatctgccgttccccactccagccccartgccagtgaacaggggctgggtcaaggcccccatggggaaaggagaggaccacactctcccacccctaccccacaactccagcccaaagtcttggcccagccagggtgaacaaaccaaatacataaagaaagcttctgtatttcctaactaacaagactaatccagaggttttggaccctgccagaggttattttatgaaaaatctaattcaagtaatccagcttttgctggaaaaaagaaatcaagacacttccaaagaaaagcaacaaccaaaaagtaaaatggagccccaataggacacttaggccctctggcttccctagtgaaggtaccatttcatagcagacagctgtgtgctccatggggataagtgccaatttttgttagctctgagaggcggtgagaatttcctcactggtccgctttgagttccttcct

SEQ ID NO: 93639 - DNA, 713 bp, Homo sapiens
gccataaaaaaggatgagttcatgtcttttgtagggacatgaatgaagctggaaatcatcattctcagcaaactatcacaaggacaaaaaactaaacaccacatgttctcactcataggtgggaattgaacaatgagaacacttggacacagaaaggggaacaccacactccagggtctattgtggggtgggaggagaggggagggacagcataggagatatacctaatgtaaatgacgagttaatgggtgcagaacaccaacatggcacatgtatatatatgtaacaaacctgcacattgtgcacatgtaccctgaaacttaaagtataactacaaaaaaagaaagagcagttttccataagaacattgtgyttccagaccaaaagaaaagtgtactgttataggttgaattgcaccacccatcagaaaaagggatgttgaagttctaacccacagtacctcagaatgtgatgctatatgaaaatatgattgtgttgaatgtaattagttcaaatgaggtcatactggagtagtgtgggcccataatcaaatatgactgatgtccttataacaaaacaaccatgtgaagacagaaagacacacaaacagaaagccatgatgaatgcggagattggagctaagcagctgtaagccagtgatcactaaatattgctgacagacaccaaaagctaggaatagtcaaggaaggatc

SEQ ID NO: 93640 - DNA, 713 bp, Homo sapiens
gccataaaaaaggatgagttcatgtcttttgtagggacatgaatgaagctggaaatcatcattctcagcaaactatcacaaggacaaaaaactaaacaccacatgttctcactcataggtgggaattgaacaatgagaacacttggacacagaaaggggaacaccacactccagggtctattgtggggtgggaggagaggggagggacagcataggagatatacctaatgtaaatgacgagttaatgggtgcagaacaccaacatggcacatgtatatatatgtaacaaacctgcacattgtgcacatgtaccctgaaacttaaagtataactacaaaaaaagaaagagcagttttccataagaacattgtgcttccagaccaaaagaaaagtgtactgttataggttgaattgcaccacccatcagaaaaagggatgttgaagttctaacccacagtacctcagaatgtgatgctatatgaaaatatgattgtgttgaatgtaattagttcaaatgaggtcatactggagtartgtgggcccataatcaaatatgactgatgtccttataacaaaacaaccatgtgaagacagaaagacacacaaacagaaagccatgatgaatgcggagattggagctaagcagctgtaagccagtgatcactaaatattgctgacagacaccaaaagctaggaatagtcaaggaaggatc

SEQ ID NO: 93641 - DNA, 1007 bp, Homo sapiens
aaagatatactgcctccccagttaatcagcaggaatgactcccagacatgaaaacagagtgccattttaagaagtgataagcctggcaaactctgtctagctggacacatccagaatattctactctattcattcagtgtgaacatgagcattttcctggaattaatgagacacatggtaagattccaatcttaagggaataaatttagacctgttttcagaaaaaaaaatgctgaaattagaaacacttcaagctagtttggttgaaaaaaaagagtctacattagtataaagttcttcccccagaatggtcttggagaatcagtgtggaatattgaccaacactcaawacttcatgtttagatcaaattgacatgttagactcaattttcatgtttagattcaaaatgacacatgtaaagtgcccctcaattttgaaatctttatcatctgcaccaattttgggtcactagactaacctgtaagccactaaagtttctcaaatgctttgttcacaatccacatgtagactccatgaaattcttacttcctactagaattagatgctagcatgacttgtgtagtccaccttatatgtgtgaatggttcaacaaatctgtgtttaaatattttagtgacttttctgttatttctcttcaatgggaaaataaatgtcaatctttcaggtgaataaatttaataactgattggatgctggttaccagataaatttcaaatcaactaaactaatattaaatgctgcatatattttaggctctgcgctaagtgctgaaatgatttaggaaaactaataaaaatgtctcatatttcagctattgttttgcgtttgattcagactcgtacaaatcttcttttattcaaaaggcttttgtagcatataacctggaagattcttcatgaagattctttatagtacattcgtcccacagactttagccttatcaaccttggtggtctagcaacagtaggagaagatgttatttgat

SEQ ID NO: 93642 - DNA, 677 bp, Homo sapiens
tccagatttatctagctgaaggcaaatgctgaggtaaatttggaacaaaaaaatatagggaaaaaggaaacccaggatcttggcactgcattttttcccccttctgctctgttaccaagctattagcactcaaagcaagtgttttttctcaggaacatagggatgagatggcggctaattgtaatctaactgaaaagtaatttgttatgatttcccttgactctagtctccacagtgattctacaccatttcttattccascttctctaagtcctggagaatgaatgtgctttggtttcctttcaaaccattctatcttctctgcaatttaccctgaaccattaattcatctactagatatacagcaaccatgcaaacacagatgtctaagaattggaagcattgattaaaaatttttttatggcttttcattttacattatacaaatgataaaggtatttttttgcaaaagagaaagggcaccatttgttatggtttggttctatgtccccacccaaatctcatctcgaattgtaatccccataatctccacgtgttgagggagggacctggtgagaggtgattgaattatggaggtgattccccccatgctgttctcataatagtgagtgacttttcatgagatctaatggttttataagtgtttgacagttcct

SEQ ID NO: 93643 - DNA, 1117 bp, Homo sapiens
aagggtccttgatggtgaaactccagcaggcaggaaaccagtggctccaagatccttttcatctctaagcctcagtggctcttacatctttccaccactttggcacacagctcaatgccagacacataggagctattcagtatgttttggatttaattgaagctgattaagcttcagcactcagacactacacattatggagcactccttaaaataccatcaaaactacctatctccagcctcttaactctagaggtctcacagcactttgctcacaaatccttaaaacaggaatgtgaagtaagaagatgaaatgtaatatactgtcctcttaatgggtactcattaccaaataaggatatattttcaccctcacttgctctcactttctctttgtctgtcaaaactttaaacctaaagaacaattcaattttatggagagaggtcaagtgttcttattttccccagtcccacattttaaagctatcacttcaaatgcctgagtaatttctattaaaccgatctctttaaataaaaagcaccatataataaaatatgactcctctgggactagagattcagttaaggattttctgtaaattgatgtgggtgctttctaacacgtacctaaagcaacaaaaccatagtggttgctgggtagagttttgtatcagaagtatagactgaattagacagttctggctgactgtttcaggagtaagatgaaatcgaagtggtggaaagattcctaaaatcaagagtgagttccttgaaggctggatcaggtcacagttgtatatgagcttagaatatgtgatgaataaacacgcaagcctggctgaggtcacaaaacaaaaaaacaaaaaaacaaaaaaacagctggcacgttcgggtttaagaaaaatgctaagtcaggaatgtttatttgccaaagagcacccaactcttccctgcatttgggttctagtgaccttaagttatccccccagtaacccgaattccctagtgaccttaagttatccccccagtaaccygaattccctagtgactttaagttatcccccagtaacctgaattctctagattttcagcattcagatctttatcttttcttaga

SEQ ID NO: 93644 - DNA, 1117 bp, Homo sapiens
aagggtccttgatggtgaaactccagcaggcaggaaaccagtggctccaagatccttttcatctctaagcctcagtggctcttacatctttccaccactttggcacacagctcaatgccagacacataggagctattcagtatgttttggatttaattgaagctgattaagcttcagcactcagacactacacattatggagcactccttaaaataccatcaaaactacctatctccagcctcttaactctagaggtctcacagcactttgctcacaaatccttaaaacaggaatgtgaagtaagaagatgaaatgtaatatactgtcctcttaatgggtactcattaccaaataaggatatattttcaccctcacttgctctcactttctctttgtctgtcaaaactttaaacctaaagaacaattcaattttatggagagaggtcaagtgttcttattttccccagtcccacattttaaagctatcacttcaaatgcctgagtaatttctattaaaccgatctctttaaataaaaagcaccatataataaaatatgactcctctgggactagagattcagttaaggattttctgtaaattgatgtgggtgctttctaacacgtacctaaagcaacaaaaccatagtggttgctgggtagagttttgtatcagaagtatagactgaattagacagttctggctgactgtttcaggagtaagatgaaatcgaagtggtggaaagattcctaaaatcaagagtgagttccttgaaggctggatcaggtcacagttgtatatgagcttagaatatgtgatgaataaacacgcaagcctggctgaggtcacaaaacaaaaaaacaaaaaaacaaaaaaacagctggcacgttcgggtttaagaaaaatgctaagtcaggaatgtttatttgccaaagagcacccaactcttccctgcatttgggttctagtgaccttaagttatccccccagtaacccgaattccctagtgaccttaagttatccccccagtaacccgaattcyctagtgactttaagttatcccccagtaacctgaattctctagattttcagcattcagatctttatcttttcttaga

SEQ ID NO: 93645 - DNA, 2047 bp, Homo sapiens
tgcatttgttaattagctagatttaaccattctgcaatgtctatatatgtcaaaacatcatgttgtacatgataaaaacatacaattttttctgtcgatttaaaaaaagaaataaaacattaaaataaatttttttaatgtaaattggtttctcactcttcagaaattagcagcctgagccctcaccacaagacttccacatatgtgaagggagccaagtcgcttgttcagttcctctctttttaaaaataatccctgttctcagtattcctccctgggagcactttgaaatctgtccatcattttatctgggcatttttacacactattcacgacacctccaagcaacattgaacttccctgaaattgagaaaggcatggggagtgctgggtgggtccttgtgctgggaggaaccttgtttgggggcttctctctttgctcctggtgttggaaagatgaaaggccttatttcctgatcagcactggggacaggaaccacagatcaagtggacaagctccacctgcatcaggcatggaggcttgtccataacagaacctcagaattaggagctacagcatcagaggggccttagcaacatccattttacagatgagaaaactgagacccaaaaaagggagcgggtgcctgtggtttcctgggaagttaatgacagaaggagactggaatctagggctctgagctcaaagagctaaaatgactgatgaatggagagatggacagatgcctggatggcacagagacagacagactcaggggatgactaattggcatcttggtataaaatgatgaatgaggagaaagtcttctcccaaggctgtgttggcccatggttccaaaacctgtcctgagaccccaccccaccatcttaaaatttcctgccatggtttacaatggacaaagagagtgaatggttggatcaaacccaatgctgacttggatggaggagggaggattaaagcctacatactctttatacagcaagagtgccaggatctcatcagttcctcttcagtcattgatcatccaatggaaaaatttgctacagctacactggagtgtctgagatcattgagagacaccagccacaagggcttccctgcctggcttgcagtgagagctctttgttgaacattttgagattcaaggaggggtacacccacattaatcagctccttggtcagggttcaggcagagatggtagctggatgtgatgcatcagttgtcagaagccttctgccccttcatccatgcattcaacacctacttgctgaatccctatcacatgccactgttttaagccattgggacacagcaattaaaaaaaaagacacaggctgggcacggtggctcactcctatcatcccagcactttgggaggccaaggcgggaggatcgcttgagcccaggagtttgagaccaggctgggcaacatggcaaaacactgtctctctactaaaaatacaaaaaaaaaaaatagccaggcatggtggtacacacctgtagtcccagctacttggggagggggtggaggcaggaggatcacttgagcctgagaggtcaaggctgtggtgagtcctgatgatgccactgcactctagcctgggtggcagagtgagaccgtgtctcaaacaaacaaaagatacaaatccctgccctcttggrtttacatcttactggggatgggaagcagaaacagacaattacgagaaatataataaagtacactgtaaaggtagaaccttaactgactccctctgcaagccaacccatagctgattatggtgggagggagtgggcactttgcagtattaaactaagtagttggtgggggaaggagactcactaattttcccaggacagtcactcctggcttattccagttgtagaccaattaatgtcaattagtttcttttagtgctacctttgtatctcaaaagtgtcctggtttggatggcaagttatatatcggtcatcttattgagaagtatgctttcagactccaaggaggcaagggagttagccaa

SEQ ID NO: 93646 - DNA, 591 bp, Homo sapiens
catatgtcaggaccaccgcctgtgatccttcacagtgtgccctgcaaaggagcaccaagccasgaggacaagagtcgaattgacaggcccctctccccacatttagctaccaggggctgcatccgtgaagagggagtacttttttccagtttgtgcacatcgcgtggctagtgagctctgcctgccacaccctttctgagcccacaatttttatactctgatgaaaaaagtgactgatgtgtgatcctctgtcaagttcctctcttccccttcttaccaaacagaacgctgcctttagactcagctgctcctccagctccactcccctccccgactccaaagagttctttttttttttttttttttttttgagacggagtctcgctctgtcgcccaggctggagtgcagtggcgggatctcggctcactgcaagctccgcctcccgggttcacgccattctcctgcctcagcctcccaagtagctgggactacaggcgcccgccactatgcccggctaattttttgtatttttagtagagacggggtttcaccgttttagccgggatggtctcgatctcctgacctcgtga

SEQ ID NO: 93647 - DNA, 591 bp, Homo sapiens
catatgtcaggaccaccgcctgtgatccttcacagtgtgccctgcaaaggagcaccaagccacgaggacaagagtcgaattgacaggcccctctccccacatttagctaccargggctgcatccgtgaagagggagtacttttttccagtttgtgcacatcgcgtggctagtgagctctgcctgccacaccctttctgagcccacaatttttatactctgatgaaaaaagtgactgatgtgtgatcctctgtcaagttcctctcttccccttcttaccaaacagaacgctgcctttagactcagctgctcctccagctccactcccctccccgactccaaagagttctttttttttttttttttttttttgagacggagtctcgctctgtcgcccaggctggagtgcagtggcgggatctcggctcactgcaagctccgcctcccgggttcacgccattctcctgcctcagcctcccaagtagctgggactacaggcgcccgccactatgcccggctaattttttgtatttttagtagagacggggtttcaccgttttagccgggatggtctcgatctcctgacctcgtga

SEQ ID NO: 93648 - DNA, 591 bp, Homo sapiens
catatgtcaggaccaccgcctgtgatccttcacagtgtgccctgcaaaggagcaccaagccacgaggacaagagtcgaattgacaggcccctctccccacatttagctaccaggggctgcatcygtgaagagggagtacttttttccagtttgtgcacatcgcgtggctagtgagctctgcctgccacaccctttctgagcccacaatttttatactctgatgaaaaaagtgactgatgtgtgatcctctgtcaagttcctctcttccccttcttaccaaacagaacgctgcctttagactcagctgctcctccagctccactcccctccccgactccaaagagttctttttttttttttttttttttttgagacggagtctcgctctgtcgcccaggctggagtgcagtggcgggatctcggctcactgcaagctccgcctcccgggttcacgccattctcctgcctcagcctcccaagtagctgggactacaggcgcccgccactatgcccggctaattttttgtatttttagtagagacggggtttcaccgttttagccgggatggtctcgatctcctgacctcgtga

SEQ ID NO: 93649 - DNA, 645 bp, Homo sapiens
gcatgaagataccctgcaggtatatgcctctgaaaataatctacagaatccagaagaaaatttcaaaaatctgttcgtcatgctgaaaaagaggccaagggctctgagagtcagtgcagagagtcactgggagacataaggcaaacacgaaaatgtaacaagatttggtgaaataaggaaggattttcaaaaaaaaaaaaaaaggaaaaagtatgtatggtactaaaagcaatatctttttaaaaaatcaatgaaacggaataaagctcagaaasaagccaaagtataacaagatcaagtcttcagcaactggtgcagagacagctggctaagcatctaaatacaaatgaagccaggatctccacctgacgcctacaacagtttgaccatgtgtcaccagtctgcacctatcaggacgcaggtagaaacacattaacagtagcaattcaataacactggcttctgtcctattgctgatttagcacctccagcctctaacaagtactcccaagtatgcctgggcatccccaggaggtgtttcatacaaccacacatgcatccaccctccacagcttcccatcagacttggtccccacaccactgtgctgagccctgacacagcttcagggaagcacaggtgtcctc

SEQ ID NO: 93650 - DNA, 645 bp, Homo sapiens
gcatgaagataccctgcaggtatatgcctctgaaaataatctacagaatccagaagaaaatttcaaaaatctgttcgtcatgctgaaaaagaggccaagggctctgagagtcagtgcagagagtcactgggagacataaggcaaacacgaaaatgtaacaagatttggtgaaataaggaaggattttcaaaaaaaaaaaaaaaggaaaaagtatgtatggtactaaaagcaatatctttttaaaaaatcaatgaaacggaataaagctcagaaacaagccaaagtataacaagatcaagtcttcagcaactggtgcagagacagctggctaagcatctaaatacaaatgaagycaggatctccacctgacgcctacaacagtttgaccatgtgtcaccagtctgcacctatcaggacgcaggtagaaacacattaacagtagcaattcaataacactggcttctgtcctattgctgatttagcacctccagcctctaacaagtactcccaagtatgcctgggcatccccaggaggtgtttcatacaaccacacatgcatccaccctccacagcttcccatcagacttggtccccacaccactgtgctgagccctgacacagcttcagggaagcacaggtgtcctc

SEQ ID NO: 93651 - DNA, 750 bp, Homo sapiens
ggatccacataaaagcaacacctggagagacttctagtgcccrtggttgagtatccacagaaccattccaagccatcctacaagttagcattcaggcacccttgatcagatgtggtgagcctccgagcagctttccttaagaccacagacacacagaagaaaaagcatgcgacgtggagtacagaagactcaagtctaacctcaactctcaaagcaaattacttcagctcttctacatgccatctgctccctcatttgccagcaggaacagcaggaacaatctaagaattgctaagaggactcaaaggaatcatcctatatgcccatgccctaggcacctggaagtgcctggaacagcacagcaaagaccttgaaacagtgaatcatgcccaacgttctaaacggacttgaatgctcaaataaaaatgacagatgtgagcaggaggctccaaggaaagacaaggttgtgagccagcacacagaagtgggagacagaaccagcctggccacagggcacacgactgtcccccgggcaggatttgaaagttgaagatggcagaactgcatgttctctgtaccctctgtggaagcagccaggtcttggatctgcacaaaacattctctcccctcaaagaagagtgagtcccaggcatgtctttcctggggaaacagccctgcctgacctaagaaaggcatgtgaatctatagggccctattaagggcctgaagaatcgtgctgcttgctgtcta

SEQ ID NO: 93652 - DNA, 750 bp, Homo sapiens
ggatccacataaaagcaacacctggagagacttctagtgcccgtggttgagtatccacagaaccattccaagccrtcctacaagttagcattcaggcacccttgatcagatgtggtgagcctccgagcagctttccttaagaccacagacacacagaagaaaaagcatgcgacgtggagtacagaagactcaagtctaacctcaactctcaaagcaaattacttcagctcttctacatgccatctgctccctcatttgccagcaggaacagcaggaacaatctaagaattgctaagaggactcaaaggaatcatcctatatgcccatgccctaggcacctggaagtgcctggaacagcacagcaaagaccttgaaacagtgaatcatgcccaacgttctaaacggacttgaatgctcaaataaaaatgacagatgtgagcaggaggctccaaggaaagacaaggttgtgagccagcacacagaagtgggagacagaaccagcctggccacagggcacacgactgtcccccgggcaggatttgaaagttgaagatggcagaactgcatgttctctgtaccctctgtggaagcagccaggtcttggatctgcacaaaacattctctcccctcaaagaagagtgagtcccaggcatgtctttcctggggaaacagccctgcctgacctaagaaaggcatgtgaatctatagggccctattaagggcctgaagaatcgtgctgcttgctgtcta

SEQ ID NO: 93653 - DNA, 765 bp, Homo sapiens
ttgtggtggtatggaaaagaacccatgctgggccaggtgcagcggctcacacctgtaatcctagcactttaggagactgaggtgggaggactgcttgagcccaggaattcaagaccagcctgggttcctaaaacaaaaccaaaccataatgtctccaaggtatggctgtacttgattttggtttctccatctaaaaaaatctaattcatccaaggaaggagttgtaagatacacattttaaaacaagaattttgcattctcagagtagttgacagcactttaaagcaccaatgcactctaatttgttaaaatttggataataatatatacgaatacatataattaacgagatgtagttcttaaaagttcaaagacactttaaaaatacgtaactaaaatttgccaacttcctgaagacctctctggaagttagttttgtggaaggtaatatgaaattctggcccacaggatgtctaaggtttcttccagctctaagtttgaggggaaaaaaaagaacaatggagacacccccacactaatctttataccggaaagaaagaggcagagagcttatttgaagaaataatggccaaaactccccaactttgagggaagacatggatatataaaaaggtcaacaaactccacgtaggataaactcaaaagagtcctatgctgagttacattataatcaaactgctgaaagacagaaacaaagatagcactgtgaaagtagtgagagaaaactgactcatcatgcasaag

SEQ ID NO: 93654 - DNA, 868 bp, Homo sapiens
  misc_feature (1)...(868): n = A,T,C or G
tttgggatactgataatagtggtgtagcaattcctctacaacacttatataccctgacagtaatttttggtactgttcaggaaataaaagtcctcacctcctaggcagtaaggactggagctgtagaaacattttctgccctggaccttaccccacagtccagccctatactttgccctataccaaccacaaatgtcaatgggagcttttctgccaaagagtttcttctatgtagccctggctccaaagtactgtgccaagaatttattcttgttttgttttgttttgtttttgagacagagtttcactctcacccagactcaagtgcagtggtgtgatcttgactcactgcaagctccgccgggcagttttttagncngcccccggagccaggcttcnnttntctccaggggnnnnnnnnnnnnnnnnnnnnnnnnnnnnnnnnnnnnnnnnnnnnnnnnnnnnnnnnnnnnnnnnnnnnnnnnnnnnnnnnnnnnnnnnnnnnnnnnnnnntaatagctgggaatacaggtgcccgccaccacgcccrgctaattttttgtactttttagtagagacggggtttcactgtgttagccaggatggtcttgatctcctgacctcgtgatccgcctgcattggcctcccatagtgctgagattacaggcgtgagccactgtgcacagccaagtatattcttaacccctccatcagattactcatgccaatattttcacagcttaatttttttaagccataaaaattgctactggctaccttgattttgttgttgttggtgttggtggtggtggtggttgtggtggtgttatgttagggagaaaaatgacatgcaagtgaaaaagcaaat

SEQ ID NO: 93655 - DNA, 868 bp, Homo sapiens
  misc_feature (1)...(868): n = A,T,C or G
tttgggatactgataatagtggtgtagcaattcctctacaacacttatataccctgacagtaatttttggtactgttcaggaaataaaagtcctcacctcctaggcagtaaggactggagctgtagaaacattttctgccctggaccttaccccacagtccagccctatactttgccctataccaaccacaaatgtcaatgggagcttttctgccaaagagtttcttctatgtagccctggctccaaagtactgtgccaagaatttattcttgttttgttttgttttgtttttgagacagagtttcactctcacccagactcaagtgcagtggtgtgatcttgactcactgcaagctccgccgggcagttttttagncngcccccggagccaggcttcnnttntctccaggggnnnnnnnnnnnnnnnnnnnnnnnnnnnnnnnnnnnnnnnnnnnnnnnnnnnnnnnnnnnnnnnnnnnnnnnnnnnnnnnnnnnnnnnnnnnnnnnnnnnntaatagctgggaatacaggtgcccgccaccacgcccagctaattttttgtactttttagtagagayggggtttcactgtgttagccaggatggtcttgatctcctgacctcgtgatccgcctgcattggcctcccatagtgctgagattacaggcgtgagccactgtgcacagccaagtatattcttaacccctccatcagattactcatgccaatattttcacagcttaatttttttaagccataaaaattgctactggctaccttgattttgttgttgttggtgttggtggtggtggtggttgtggtggtgttatgttagggagaaaaatgacatgcaagtgaaaaagcaaat

SEQ ID NO: 93656 - DNA, 868 bp, Homo sapiens
  misc_feature (1)...(868): n = A,T,C or G
tttgggatactgataatagtggtgtagcaattcctctacaacacttatataccctgacagtaatttttggtactgttcaggaaataaaagtcctcacctcctaggcagtaaggactggagctgtagaaacattttctgccctggaccttaccccacagtccagccctatactttgccctataccaaccacaaatgtcaatgggagcttttctgccaaagagtttcttctatgtagccctggctccaaagtactgtgccaagaatttattcttgttttgttttgttttgtttttgagacagagtttcactctcacccagactcaagtgcagtggtgtgatcttgactcactgcaagctccgccgggcagttttttagncngcccccggagccaggcttcnnttntctccaggggnnnnnnnnnnnnnnnnnnnnnnnnnnnnnnnnnnnnnnnnnnnnnnnnnnnnnnnnnnnnnnnnnnnnnnnnnnnnnnnnnnnnnnnnnnnnnnnnnnnntaatagctgggaatacaggtgcccgccaccacgcccagctaattttttgtactttttagtagagacggggtttcactgtgttagccaggatggtcttgatctcctgacctcgtgatccgcctgcattggcctcccatagtgctgagattacaggcgtgagccactgtgcacagccaagtatattcttaacccctccatcagattactcatgccaatattttcacagcttaatttttttaagccataaaaattgcyactggctaccttgattttgttgttgttggtgttggtggtggtggtggttgtggtggtgttatgttagggagaaaaatgacatgcaagtgaaaaagcaaat

SEQ ID NO: 93657 - DNA, 868 bp, Homo sapiens
  misc_feature (1)...(868): n = A,T,C or G
tttgggatactgataatagtggtgtagcaattcctctacaacacttatataccctgacagtaatttttggtactgttcaggaaataaaagtcctcacctcctaggcagtaaggactggagctgtagaaacattttctgccctggaccttaccccacagtccagccctatactttgccctataccaaccacaaatgtcaatgggagcttttctgccaaagagtttcttctatgtagccctggctccaaagtactgtgccaagaatttattcttgttttgttttgttttgtttttgagacagagtttcactctcacccagactcaagtgcagtggtgtgatcttgactcactgcaagctccgccgggcagttttttagncngcccccggagccaggcttcnnttntctccaggggnnnnnnnnnnnnnnnnnnnnnnnnnnnnnnnnnnnnnnnnnnnnnnnnnnnnnnnnnnnnnnnnnnnnnnnnnnnnnnnnnnnnnnnnnnnnnnnnnnnntaatagctgggaatacaggtgcccgccaccacgcccagctaattttttgtactttttagtagagacggggtttcactgtgttagccaggatggtcttgatctcctgacctcgtgatccgcctgcattggcctcccatagtgctgagattacaggcgtgagccactgtgcacagccaagtatattcttaacccctccatcagattactcatgccaatattttcacagcttaatttttttaagccataaaaattgctactggctaccttgattttgttgttgttggtgktggtggtggtggtggttgtggtggtgttatgttagggagaaaaatgacatgcaagtgaaaaagcaaat

SEQ ID NO: 93658 - DNA, 1093 bp, Homo sapiens
tgatatttaaaaaaaataaaatgggagaagaagatgctcacctgggtgtactaactttgtagccataaaagttacacaactgctgctttgaaatgcataccatctcaaggaggcctataggaagtcctgccccacattttgcttgcctacagggtctgctattatagatgcagttaggagattagagctggccatttctggccacatccgttattgccaaccactatgagaacatttataattctgaatcaggatataagaatgagacaggctctagaacacagtttctatctttggcactattgacattttgggtctgataattctttttatggagaattttcctgtgcattgtagggtatttagcagcattcctggcctctgcctgttaaacaccataagtagctccccaatggtgacaaacagaagatgtcttcaaatattgtcaaatgccctttgggaagcaaaatcatccccagttgagaaccactgccctaaaacactgtaggcaatctttgtcacatcttccacacatagaaaaactttttgttttgtacaaatgttttctctacaaaacctggagggtgatctgggaatagctcaacaaagttcagtgaaaaaaattgtcactctttatatttatatccttataggaaaaataaaatacaagatgtttagaaaaatatcaaatattaaatttatataaaggttccaaataaaataattttaaaaaattagaaatttgaacttattaccattgacatatctttttaccaacagataccatattcaaaatagctatgcaaaactctgagtaagacttcttaatgatgattgtttcaaattcctagtggtgtgtatcaacaagaaccttcattcccacaataagataatttaaaaaattaaaaccattgtttacaactatttgaagatttgcaacatttgaaattaaagaacctaatagcttatccttttcttatactgacaagttaatgtttaattttttaygatagagcaaaggtactttaaattcagacttttatgctatctagcattccaaaataataacgaaggtctaatttgtatattgcat

SEQ ID NO: 93659 - DNA, 1438 bp, Homo sapiens
ggaccctcttcaaactgaagtgaggcattcccacccaccgcctgtctgggctgytctgacgagaaagcaaaaaaggaaactttgcactcaacctatacgcgcttcctccccgggcggccgcaacctgggtggggcgcagggcgcgagctccgagcccccggctgttcgcaccttccccaccccctcctggcctgactgccgagaaactggaccaggcgccgcggaacctcacccaccgggacttcccccgagcggctccaagtcagtgactgaatcccagtcagctccttacaccactggggccagatgatggggaccctccccttgcagcacaaaccaaattgtgaggaaggagcagccggcacctcgattccctagacgacctcccgcgcgcctctctctccccttcctccgcaagcgtcacgtgcagggttgcctgtggcactacatttcccagctttcctcgcggtaaagagaaccagccgagtgcggaggctcaccgcgaagcctcctgggaaatgtagtatattcgttattttgttttaagcaaacctacaccaagtttcaaggcttcaaactccctcgacagtttggaatcttattttgaaacaattctaggtcagtaaagatcccttaaggggagatttgtgcaacgtgatctcactggcctgaatccatccccagatagttttctcctgtctttaaaggtttaactgagttaagattgaaacttatttcattagtaaaagcccaagcctcatccatcatgctccaagtgaagtccatttcctattccttcaagtagatagacaagcccaggactttgtgaaatgactcatattttctgtgtgaacttgcccaataccaggcaagttcaggaaaacttgacccaagagaccagtctttggaaaaaacctatgccaaaaattacagcatttaatatccagcaataacaataaagatggacagaaaacaagagacagttctccattcatacttctacaatgcctattctagccatactactcatgtatcacttgagctagaagctaattgaaatacactgggactccttcttgatttgttgtggctgttgttaatagataatcataaaactagtgtttggcaaataattttaatttctcagcctgtaactttactgacctacctgtcacttgggtagaagttggcaggacatgagctcaatggcaagcaaagagagctccattttctatacttttctaggaatagaggaagagaaccagcggggccatgggaaaacagcccaggaccagacactaggaaatctaggtctcttgatagagaggctatcacttatgttttgtggcgaaagaacatcagcatggttcacaatatattttgcccagaatgttcgttacccaggtacaggaggttagttcaagctactcatctttaa

SEQ ID NO: 93660 - DNA, 1438 bp, Homo sapiens
ggaccctcttcaaactgaagtgaggcattcccacccaccgcctgtctgggctgctctgacgagaaagcaaaaaaggaaactttgcactcaacctatacgcgcttcctccccgggcggccgcaacctgggtggggcgcagggcgcgagctccgagcccccggctgttcgcaccttccccaccccctcctggcctgactgccgagaaactggaccaggcgccgcggaacctcacccaccgggacttcccccgagcggctccaagtcagtgactgaatcccagtcagctccttacaccactggggccagatgatggggaccctccccttgcagcacaaaccaaattgtgaggaaggagcagccggcacctcgattccctagacgmcctcccgcgcgcctctctctccccttcctccgcaagcgtcacgtgcagggttgcctgtggcactacatttcccagctttcctcgcggtaaagagaaccagccgagtgcggaggctcaccgcgaagcctcctgggaaatgtagtatattcgttattttgttttaagcaaacctacaccaagtttcaaggcttcaaactccctcgacagtttggaatcttattttgaaacaattctaggtcagtaaagatcccttaaggggagatttgtgcaacgtgatctcactggcctgaatccatccccagatagttttctcctgtctttaaaggtttaactgagttaagattgaaacttatttcattagtaaaagcccaagcctcatccatcatgctccaagtgaagtccatttcctattccttcaagtagatagacaagcccaggactttgtgaaatgactcatattttctgtgtgaacttgcccaataccaggcaagttcaggaaaacttgacccaagagaccagtctttggaaaaaacctatgccaaaaattacagcatttaatatccagcaataacaataaagatggacagaaaacaagagacagttctccattcatacttctacaatgcctattctagccatactactcatgtatcacttgagctagaagctaattgaaatacactgggactccttcttgatttgttgtggctgttgttaatagataatcataaaactagtgtttggcaaataattttaatttctcagcctgtaactttactgacctacctgtcacttgggtagaagttggcaggacatgagctcaatggcaagcaaagagagctccattttctatacttttctaggaatagaggaagagaaccagcggggccatgggaaaacagcccaggaccagacactaggaaatctaggtctcttgatagagaggctatcacttatgttttgtggcgaaagaacatcagcatggttcacaatatattttgcccagaatgttcgttacccaggtacaggaggttagttcaagctactcatctttaa

SEQ ID NO: 93661 - DNA, 963 bp, Homo sapiens
ccaccaattgtgtataagcattcctttttctccataatcttgccagcatctgttattttttgactttttcataatagtcattttgacgggtgtgagatggtatcttattgtggttttgacttgcatttctctaatgatcagtgataccaagctttttttcatatgcttgttgaccacatatatatattcttttgcaaagtgtctgttcatgtgctttacccccatttttatagagctgtttgtttttttcccgtaaatttgtttatgttcctatagatactggatattagacctctgttggatgcatagtttgcaaaacatgtctcccattctgtaggttgtctgtttaccttgttaatagtttctattgctgtgcagaagctctttggtttaactagatcccatttgtcaattttcatttttgtttcaattgcttttggcatcttcgtcatgaaatctttgcctgtgcccatgttctgaagtaatgmcttggttgtcttccagggtttcatattacgtattaatattgccatgtagcctcaacataaattgacttctcagtggctacatttttcctatagttaaaatgggaaacctttgagaatgagttactgtgttgcaggttagctcctacaactcaggtaataaaaaagtctctaaaaatcatggagaagagggacaagatgtttgactagatgcagtcacaaagcactgctgccatcaagggagtccaaattatccagcaaatcaccataatttggagaaattatgctcagagtggaggttgaggcaacgctgaagctgagactctttagtctcagtttcacagcagggacaaagctgtgaaccctgcacagtgtggccaaattacagggcttatccttggcctcaaaaggttcctggtaaaggaaggagctgaggaatagctcactctcactatggtcctctgagagcctagctaca

SEQ ID NO: 93662 - DNA, 755 bp, Homo sapiens
attctgaaactaactttattacagtaatgatttcaaaataaataacacagtgttctataatgcaaattgtataatatcctaacatacctataggattaaattctatatgatggttagaaatctagactacacaaattattaaataaataatgagcaatagctatgtgacaaatgggaacattgttacagaacacctcttttttgccacatgaattacacaccrtttagcttcctaatgttatgtttacctagcaattagttaagctcacaaatcatcattaataaatatttaaagaaagcaagacccactttccctagctgtatagaatagaaatttagatgataaaatagcatttcattataaaataaaaaaaactttttgaaaagatttgatttaacattcaactccatttttctcttgcatttgtgaggatgattgtaaccttgtatcttgaagcataattctttgtattccctctccattcacttgattattttgcctgagcaaatctatttgcattggtgcctacctatttatgttctaaagttatatgctgtgtgtataaaattttgttctaaatttggactaaaaaagacagtggctagagtactaagtcagttggaatttgctagtgtatatggagaagtgattagtagctaaatacttatcccgccttccttttaaataggtaatctatttcataagggtttgttattggcattgatgatacaagactatatccaaattgacaggg

SEQ ID NO: 93663 - DNA, 711 bp, Homo sapiens
  misc_feature (1)...(711): n = A,T,C or G
aggagctgtgagggcatggngaggtctncacagaccccacccagcactgctcctcccttgcagcatcctgnngagggccctcaggcgggctggcctcatgtactgctcacacagcagcgggcgtctcccaggcgctcagcagctcagctcagcgcccagtgaagagggcggaggaaggaatgaaggcagccacgggtgaggacgagggcncagggctccactgagcanagctcctggcaccaacccagacagaagacgtcctggagaggccagggctgtgctggtactggccgcgtccacccaggctgggcgctcttctctttcccacgtcatcacggcgttttactcaactacaggtcggcctcactgaaataacgtggaacaggtgatggcgacagccccggtgcatggtccagcgaaagcaaccccgtcccagcaataaagcccagggcctgttggggaaggagaccctgcgggagaattggaggaagtgcggctctcaaggctcccaacctcagccttttagtcgtcccaacgcaaaacattcaaaggggcctaaaaattttgctaggcacacagcgtcttctaacaacataaagtatttaccrgaacaatagtcttgtgactaaaatatctgaataaaggatgaagagccccgtctactttgggctatttagaagcctggaacagcgatcccagccctggcccctg

SEQ ID NO: 93664 - DNA, 551 bp, Homo sapiens
gggttaaatttggagaatatctttagagcctcaatctggctattttggaagattattttgaaaataatttcaaggaaaatactagatgtcttttagataaggcttttcaatttgaactcgttatacatgtaaatgctttttcttcatctagatgaatttaaaggccactcgttgctgcaagctgcacgagaagctgatgttactcgaatcaaaaaacatctctctctggaaatggtgaatttcaagcatcctcaaacacatgaaacagcattggtaatgtttcagatttaagtttttaaaatacaataacsaagaacgtgctaaactaatcataatatcctacttttaacactagcatttttttgagtctatagttttaaaaaattactgcctatgcaaatattttttaaaaatttacacagtaccaaaaaatagacaacctccccctgcagaagccaatgctattatcagttcgagaatcctcagaaaaaaaaaattattcatattctgacatgtattatatgtaatgcttttattatcataagtgatac

SEQ ID NO: 93665 - DNA, 551 bp, Homo sapiens
gggttaaatttggagaatatctttagagcctcaatctggctattttggaagattattttgaaaataatttcaaggaaaatactagatgtcttttagataaggcttttcaatttgaactcgttatacatgtaaatgctttttcttcatctagatgaatttaaaggccactcgttgctgcaagctgcacgagaagctgatgttactcgaatcaaaaaacatctctctctggaaatggtgaatttcaagcatcctcaaacacatgaaacagcattggtaatgtttcagatttaagtttttaaaatacaataacgaagaacrtgctaaactaatcataatatcctacttttaacactagcatttttttgagtctatagttttaaaaaattactgcctatgcaaatattttttaaaaatttacacagtaccaaaaaatagacaacctccccctgcagaagccaatgctattatcagttcgagaatcctcagaaaaaaaaaattattcatattctgacatgtattatatgtaatgcttttattatcataagtgatac

SEQ ID NO: 93666 - DNA, 648 bp, Homo sapiens
aactattaacaagaaacaatacaatgaaatgcatagctcccataacatccaaacattggctttactttcagaatcctgaagacaaatgagaagctccatgcattagtgtgatgtgccaccaggtggccatcacctacactgcaggggaagcctgctacttcaaacagaaaagatgtatcaaaaccacctgtatccaggttaacactacaagaaaacaacagaaatctataaatgcttcaagtttcatatatatatttattttatgaggtagcatttaatgatttttaagaaaacttatcacttttcttcacagcrtattttgatgtgagttttaggctttgggtcagaaatagaaaagagtcagttataacagagagtggaattataataggaagaaaaacttcagctttgaggtaagaaaatttaggtctgagtctagtctctaccactcaatagctgactgacatgtggaagtatgtttcacatcactgagcccagatcctttatctgcaaaataaggatatgcagaccccttttctattgaggataagatgagagaatgtatataaatatacctaaaaacaatgaaaaggcagagtgtggagactcatgcctgtaattccaggactttgggaggccagggtgggt

SEQ ID NO: 93667 - DNA, 440 bp, Homo sapiens
gcagtgagccaagattgtaccactgccttccagcctgggcaacggagactccatctaaaaaaaaaaaaraaagaaagaaagaaagaaaaaaatagtggggatttaaatgtacatcttttgactcagaatccagggagagttcttcctactttttgacactgctggtactgtctggagcatcacatgaaatgattaaattctcagctttcctcctgaatacaaatattgtttctctaaaaagcacaaatgagaaaatctggtcatgataattggaagcaactgctggggctaatggaaggacatggcagccttatttgatttcaagttatatttcagggtttttttcttatattgaaattgttcatttcagtgaaagaccgcataagaatgccatacagggaagaaaacccaactaagagctcattgttccctaggcctgt

SEQ ID NO: 93668 - DNA, 804 bp, Homo sapiens
aaaaacttaaacatccatggattttggtatctgcaaggagtcctgaaaacaatcccccatggatactgagggaggactatatatacaaacgattatataaatagtctgtatatacaaaatatattacatcatatattacttatattcataccccctcctagtttaaaagcaaggttatatcaatttatacattacaacagggtaaaaaacagacaaaaagtttgggcaaggggaattgaggttaatttaatacacaaaatacagatcttaaacagctacagataggccaccaaatctgtcctgaatctcctagtggcaaaacagaggraaactgttacaattttcttttcttttttttttttttttttttttttgagacagagtttcgttcttgttgcccaggctggagtgcaatggcctagtctcggatcactgcaatctccacctcccagatttaagcaattctcctgccgcagcctcccaagtagctgggattacaggtgcctgccacctcacccggctaatttttttttgtatctttagtagagacggggtttcaccatgttggccaggccagtctcaaactcctgacctcaggtgatccacccgcctcggcctccgaaagtgctgggattacaggcgtgagccactgcgcccagccctgttatgatttttactgttacggtttccattttggtcttaaagtttctctggcaacagtggccatataagtcaagttagctgcactctaggagggtcgaaagttagcttccagtgtgatggtcaggtgagacgcaatggtga

SEQ ID NO: 93669 - DNA, 804 bp, Homo sapiens
aaaaacttaaacatccatggattttggtatctgcaaggagtcctgaaaacaatcccccatggatactgagggaggactatatatacaaacgattatataaatagtctgtatatacaaaatatattacatcatatattacttatattcataccccctcctagtttaaaagcaaggttatatcaatttatacattacaacagggtaaaaaacagacaaaaagtttgggcaaggggaattgaggttaatttaatacacaaaatacagatcttaaacagctacagataggccaccaaatctgtcctgaatctcctagtggcaaaacagaggaaaactgttacaattttcttttcttttttttttttttttttttttttgagacagagtttcgttcttgttgcscaggctggagtgcaatggcctagtctcggatcactgcaatctccacctcccagatttaagcaattctcctgccgcagcctcccaagtagctgggattacaggtgcctgccacctcacccggctaatttttttttgtatctttagtagagacggggtttcaccatgttggccaggccagtctcaaactcctgacctcaggtgatccacccgcctcggcctccgaaagtgctgggattacaggcgtgagccactgcgcccagccctgttatgatttttactgttacggtttccattttggtcttaaagtttctctggcaacagtggccatataagtcaagttagctgcactctaggagggtcgaaagttagcttccagtgtgatggtcaggtgagacgcaatggtga

SEQ ID NO: 93670 - DNA, 716 bp, Homo sapiens
agtggctggggcaggctgagctgtgaggcaaaaatgctcttcctgagagagttgctcagtgctggtagcccatggcacatgccgtctgtgacagactggtaggcaggaacatttccagctgccaaaaatgttcttctaccaaaacatgggggggcatttcattaaaagcagttacttacacttctaaagttcaaaactttcctcaaagttagagaagcaagaaaacattttgatatattaacaggttccttcttcagccacatcaacccccatgccccttgccctcgactttcacagttcgtagccctcacggggagggttggcatactctcgactagcaatgtctgccagaagagtctgcaatggtggaaatgtcctatatttgcactgtccagtagagtagcctctggccacgtgtggcagttgtacrcttgaaatgtgactactgtgactgagggaatgaatttttaattttctttttcttctttttcttttttttaagggctagtcaagtgaagcagtgtgagtggagaaagaataaagcaatctgtaactggttgtgatcaattagttgtaaacacgactgcactcagaccagcttgaatttttaattttctttcatttaaattaataataattttaattaaagtaaattaaatagccacatgtggctactgaactgaatagtgaagctgtagctctagaaaaaagctatc

SEQ ID NO: 93671 - DNA, 748 bp, Homo sapiens
attatatattttctaatcatcaaaacagtgtcctgaagtggcattactatagtcccaatttactaaagaaactggagcttgattaattaattggyctaaaatcacacataataagtggtagagttttagtgaacctatgtctatgagcccctactatttgctacgcactttgctagttatcttaaaaatcaaatagtagccctagatcatttatgggactccattcttggtagaattatgccatctctgagagaaacaagaatgaatattttttctgtgactctcaagtgcctaaaacagtgcttggcaatgcctacgagttgcacaataaatgtttgttaaaatgtcatactctagagtacaatttttaaaatttaatcatagtaactttttttcattttaagcacacaggttcttagccctacactaacacctagcatcacattaagtgacgctgactttttaaaaaatgtttaacagggctgggtgtgttggctcacgcctgtaatcccaacactttgggaggctgaggcaggtggatctcctaaggtcaggagttggagaccagcctggccaacatggtgaaaccctatctctactgaaaatacaaaacttagctgagtgtggtggtgtgcgcctgtagttccagctactcagaaggctgaagcatgagaattgcttgaaaccgggaggcagaggttgcaatgatctgagatggcaccattgcactccagcctgggcaacaaag

SEQ ID NO: 93672 - DNA, 1663 bp, Homo sapiens
  misc_feature (1)...(1663): n = A,T,C or G
aatacaatttatttgtcttccctggctagacattactattgatttagacacatttttctattatttataccatatggaaatatactttcatcaagacgagttcctctgatttcaccagaaaactcaataagctcattctaataattatcctgaaatataaatctaaacattgattttctcacaagtgcacaagtatctaaactgccatcaaccaaaagcttgatataccttggcagaatttcagatcatgcactgtactacacagtcctaaatttcaccttctgtatttctgaatctcatgcaatataagaacaagctcctctcagttcaataggtgttgctgttcaattgccaaaaggatcttattttggtcagaatttaaaagaaaatctgtattgagaatagtttgatatttcaactaagtggtattttatttatttttaattgacaaaattgtatgtatttatggagtacaacataattttttgatatatgggcacgctgtgggatgattaaatcaagctagttaacatatctatcacctcacatatttatcactttttgtagtaggcacatttaaaaactcatttagcaattttcaaatatacggtattattggtatatgttaannnnnnnnnnnnnnnnnnnnnnnnnnnnnnnnnnnnnnnnnnnnnnnnnnnnnnnnnnnnnnnnnnnnnnnnnnnnnnnnnnnnnnnnnnnnnnnnnnnnccagcatttccagtaagtatacccatgataaaagaacaataccttttgttttttcatttgactctttatgtacaaccttcagaatagaatgatactttgtccaatgttagttccagctagtttccagtgaagacattatcagggactatggaattatttaaaaacaaattccactaatcatgcttcagaattactgtactccaattagcaataactacaaactagaagccggttttgtttgcaagggctatcttccctgctctatacctgactttcctcctatgttccttctcctctcttcacttcccactatccattccagttttgagagtcataaaccttccttattctcactgcttaatcatgcccatcagttataactcctgtttctgaaattcaccctcttctctccacttctgccacctctaccatcataacccaagctactgtacaccttgcctgatttgcctcagtagtctcctactgtgtctccttgcacccattcagcttttgcattctgttttatattttatttcatccagaatatggaaacactaatctgatcctgttaccattgagtttaaaactcatcagtgacttcctgttactcttagcataaagataaatgccttaaacttagcctgcaagactttacatcaatgttttttggacttcagttcatgaatcttcagtacgttgaaaatcaatttaggtagttgtgacaaatgtatacaaacataaaatagaacatatcaggctgcmctagagatagcaaagataagtactgttttgtgaaattgtgattttggttgcgtgtgtgtgtgtgaattggattggattgcaacataagacgtatttcttactttgagttctggtcaatagaagtctgaaagatactatgtgtgttctggggtcgtcatacctttcaggatcc

SEQ ID NO: 93673 - DNA, 551 bp, Homo sapiens
gcacatacagaggatgctctgctgttatctcttcaatatgtgactctctaaccatacccattcttgatggtttaaaatcttgttgggttattgaattaaaggcaaaagttaatatgttatatcaataagtaactttaaaaatcttgttgcattgtctaaaacatgctgttttgctttagagcacagatagctataaacaatatattgaaattcataaaaatacatgattgttgaaataattatgtaatttgattctgagtatgtaaattattacttgaattcaatcaaaccatctgttttaaataataattgttttcctcattcggcatggcaaaagtgttccccaaatgttcatgattaaccagttgaattgaaaactaatcttaaagttatatttccttgagttacataattaaaataactaaattactgttttcagatacactaaaaatctgaaaaactactcaaagtagtatacctgaattgtaaaagaaacaaaaasataattataaaaaatgattcatactttttaaaaacaataccagttttta

SEQ ID NO: 93674 - DNA, 490 bp, Homo sapiens
ggaattactcatttactaaatttgcctggtataaggcttcactctgatttgtcagagtctagtcatctttccagatgcagctccgggcccatgatctctgcaggcccttccctgactccaccagcagagacttctgctgcagttgctgtctgacctcgtttggctcttggtcatcatacaccaamctggatggtcttgtgggcctgctgtattttcccacctagactacaagcacctggggctgggaccatgtctcaggtttctttgtctatctcacaggtgcttgatacaacactgctcactatacactaagttactgctctgctgaggctcctgagctgatggaaggcagccccatgagaagtttctgaaatacagagacagtgagagcactacttacttaagtagacgccggatcctaattctagtttgttacgactaatttcattactgaatgctcttatgccacagaaaggaaggaatcttcaga

SEQ ID NO: 93675 - DNA, 681 bp, Homo sapiens
aggttgcaatgagccgagatcgtgccattgcactgcagcctaggtgacagagcaagactccgtctcaaaaaaaaaaaaaaaatcagtatgcttgcaaagcagtttccccaccagctgatacctgttgctaaattttttcataatctggaaagaattgaagccttttactcctaccatagagctctgatattataggaartatgttttataaggataggcttttaagccttagaaatgtgtttactaaaagattttgtgaaatgaaggttttctaaaactttctgtgttgctccttcagccttctgacgttaaaattttgtggtcttttaacctgtgattaacatgactatattcttcaactcagttttacggggggttgttttctcagtcgtaaccagtttattcctctttctcttcaacagctcaaaaatgcagaaaaatgattttcacagaaatttgactacatccctaactgaaagtgttgacaggaatataaactatactgaaagaggagtgttctttagtgtaaattcctggaccccggtaagaattttctgctctaagttgagaaagaggaatgctgcttcttgagataccttgtttcgctgagtccctgggtatttatttgtccattgaaatttacctgtggtgggatgtggtggctgggaggctgagttgaga

SEQ ID NO: 93676 - DNA, 666 bp, Homo sapiens
tcctgccttggcctcccaacatgtgaggattacagatgtgagccaccatgcctggccatgatgttttaaatgttaactaagtgatataatttggccatgttcccacccaaatctcattttgaactgtagttctcataatccccatktgtcctgggaggggccaggtggagataattgtagcatgggagtggttcaccccatcttgttctcgtgataattaattggttctcatgagatctgatgattttataaaggacttccccattcactgggcattcatttctctctctgctgccacgtgaagaaggacatgcatgtttgcttccctttctgccatgattgtaagtttcctgaagcttccatggccctgcagaactgacagtcaattaaacctcttttctttataaattacccagtgtcaggcagttctttattgcaacacgagaacagcctaatacactaagatatcgtgtgtaaagcatttggccaaatgctgtgctaggaacagtgcctagcacagaggaggcatttggtaaatactgttgaatgaagtaagaaatgaatgaagattaccagactcatacaagcgttcaatagatgttagctatccttcccttcccttccagatgcctttagtattttacaaggtacttagcattgctatgt

SEQ ID NO: 93677 - DNA, 660 bp, Homo sapiens
aaaaaaattccatgacaaatcgagagaaagtgcaaaagaaacagaattatattgagtaactttaacagtaatttttcttgcttttcaaacaagggaactcaaattttcattttgctttgggccccacaaattatggagccaagcctgagaggatcaataaatggaaggggaaccaggataatatgagtcatgaaagtcacaggataagtgtttaagagagagtatttttggttatttgtttaaatgcagtcctgttgctgggctgggggttagcagcaagactttgcatggctgccttcccagctggcatagagccagggctccaggaacatggctcacctcctaattctgccagatgtctgttgagaatagacactaagcatgaaggttaagtggtttctgataacctttgagagagtagtgtggggaaagtagctagactgtaggctagattccaaaggagtaaggagtgaaaaaagaatattaatgcagcaaggataaattacactctcagaaagtgtgttggaagtctagatggatgaatggatggatagaggaactggcttgtgtaccttgttttctactctctgtacgttgggcactacactatgaartgagaaaatgggagatttttatggcataataaaagtgagaacaaca

SEQ ID NO: 93678 - DNA, 947 bp, Homo sapiens
tgcatttaaaaaattataaattgaatggcaaaaaagactagaaaaatgtttttaaaaattatagaacagtgctaytattcttatatgtcaggaactcataaatcagtaaaataaatatttaacattctttagataatatggtaaagaacaagaaaaaaacaatttactacagaaaaaagaaaacagaacatatgggaaatagttgaccacatattaaatcgaagatatgcaaccctaagtaaaaaagatgacatttttagtatgtcaagttggctaaaacttgcctttacattgctcttttccccctgccacaagaccaaaataggagcttttccttcagcctgaccccaaaatgcagaacatgtggaacagagccaaagctggtcttcagccaacatgtacatgagagagaaataaaggctggttattaccggccactgtgatttcagtggttatatatattcacagtatgacttagcaaaagcttactaatgcagtaaccataaatgcaaagataacaaatgactgaaatgagttataatattgaagaaaagaatttgctaactgctacaaataaaaacaggcaatataaactcatgaacaaagaaaatgtaataatgcaattttattagtaagaattatttgattatatttcatttattggcacattggttctttggatttcaagtgaaggactatttcaaatggaaatgaatatatatatatatatcaagacagggaagacgtccagggaagtgtgggagaaaagagagaactgggaagaatataatcaatcccctgcagagtgcaataaacattagggtagttataggaggtgcaggttagggcacaaaggttgaatgctgaactgaagcatctgtggaggtccaatgcaaacccaaggaatgaacatctaactgatgtcacataacatgttttacacaggg

SEQ ID NO: 93679 - DNA, 947 bp, Homo sapiens
tgcatttaaaaaattataaattgaatggcaaaaaagactagaaaaatgtttttaaaaattatagaacagtgctattattcttatatgtcaggaactcataaatcagtaaaataaatatttaacattctttagataatatggtaaagaacaagaaaaaaacaatttactacagaaaaaagaaaacagaacatatgggaaatagttgaccacatattaaatcgaagatatgcaaccctaagtaaaaaagatgacatttttagtatgtcaagttggctaaaacttgcctttacattgctcttttccccctgccacaagaccaaaataggagcttttccttcagcctgaccccaaaatgcagaacatgtggaacagagccaaagctggtcttcagccaacatgtacatgagagagaaataaaggctggttattaccggccactgtgatttcagtggttatatatattcacagtatgacttagcaaaagcttactaatgcagtaaccataaatgcaaagataacaaatgactgaaatgagttataatattgaagaaaagaatttgctaactgctacaaataaaaacaggcaatataaactcatgaacaaagaaaatgtaataatgcaattttattagtaagaattatttgattatatttcatttattggcacattggttctttggatttcaagtgaaggactatttcaaatggaaatgaatatatatatatatatcaagacagggaagacgtccagggaagtgtgggagaaaagagagaaytgggaagaatataatcaatcccctgcagagtgcaataaacattagggtagttataggaggtgcaggttagggcacaaaggttgaatgctgaactgaagcatctgtggaggtccaatgcaaacccaaggaatgaacatctaactgatgtcacataacatgttttacacaggg

SEQ ID NO: 93680 - DNA, 947 bp, Homo sapiens
tgcatttaaaaaattataaattgaatggcaaaaaagactagaaaaatgtttttaaaaattatagaacagtgctattattcttatatgtcaggaactcataaatcagtaaaataaatatttaacattctttagataatatggtaaagaacaagaaaaaaacaatttactacagaaaaaagaaaacagaacatatgggaaatagttgaccacatattaaatcgaagatatgcaaccctaagtaaaaaagatgacatttttagtatgtcaagttggctaaaacttgcctttacattgctcttttccccctgccacaagaccaaaataggagcttttccttcagcctgaccccaaaatgcagaacatgtggaacagagccaaagctggtcttcagccaacatgtacatgagagagaaataaaggctggttattaccggccactgtgatttcagtggttatatatattcacagtatgacttagcaaaagcttactaatgcagtaaccataaatgcaaagataacaaatgactgaaatgagttataatattgaagaaaagaatttgctaactgctacaaataaaaacaggcaatataaactcatgaacaaagaaaatgtaataatgcaattttattagtaagaattatttgattatatttcatttattggcacattggttctttggatttcaagtgaaggactatttcaaatggaaatgaatatatatatatatatcaagacagggaagacgtccagggaagtgtgggagaaaagagagaactgggaagaatataatcaatcccctgcagagtgcaataaacattagggtagttatasgaggtgcaggttagggcacaaaggttgaatgctgaactgaagcatctgtggaggtccaatgcaaacccaaggaatgaacatctaactgatgtcacataacatgttttacacaggg

SEQ ID NO: 93681 - DNA, 632 bp, Homo sapiens
taaactatagacgttatttggatttcaccagttttccactcatgtcctttttctgttccagaatccaaaccaggataccacattgcatttatttccttatatttttatgtgcatatttgtttgttaaaaagtaaatacgttcacaatagtttcagtcaactscctgtctctggggttcttctgaagagactcgaatgaagtgagaccactgtggtttggtaacatcagctgtcaactttgcttaaagttctcagtacctactatcttagcagaaaataagttctgcaactgatcctttattccataagtgaaattactaaattaagccaagctgcagttttaaaaggatttcctttagaagaattaaatatctcaatttagtagttctaaagagattcaaattaaaagaagctttaaattttaggtactcttttaaagaaagaaacttaaaaaaaattaacccagattataaaaaattgttgagccagttcacccaatacacatgcttaatgttcttaagatagtacttcagttgggtaactgttgtctatgcctttcagctgtggtcacccatctcattgtaagcagagaagccagtcatagataactggctgcctggggtcttggccttg

SEQ ID NO: 93682 - DNA, 983 bp, Homo sapiens
tattgtgtacattcaatttatattctacttttctatttaagatatcataagcaatcctccacattgtgtctaatatttcatgtaatatgtgttcaaatagaccttaattttcttctatcttgagttacttcctgaaaaacacttacacaagtatggtaggctctctgtgctctcttttgtgttgaagtaagacagggtagtacatttgaaagactgtaaacgtgagcaagttattaacctctctagatctcaatatctttatctataaaatggggataataaaatccaccatgcttaatttattggcttgtgcaagaatccagtcaagtattgaggcaaacatctcattaaatattggggtgaatgtcatttttaaaaccacagcattgtgcaaatggaataagatttataggagggaatacaataagtaatttgtaaaacaatttgaaatttgtgaataaaaagctattggcaatttttctatgctgagtgagacatgtcctaatgtttgtatttaatatgctaaacagttgccaatgcctaattctaggttcataccctgcaatagcttttcttgktttttttttttttttttttttttttcacaactttcagctgtaaaactggggtcaattatttttagctgtttcttcagcctgtctcattagaaaagtacttcgaggtaatgacttgggcatatttatttgatgattcttcattttgaaagatgtcattttaagacttttctggaagtttcaaatttgcctttgggagatctgttttataccaaaatgtcatttcaaattcaggcctacatactgtcttacacttggtccatataaatgtttcacagcacctgcattttttatcatcgctctttcatgcgaacttagatttcgtgtggctcacctctgctctctgtctgaaggggaaaaagtaatatttttaaatggcctttttcccctttgtcagaggagataaaa

SEQ ID NO: 93683 - DNA, 510 bp, Homo sapiens
tgccttttaccccttcctattttgtatcagtttctgaagcttcattctccattaagatcaagtttacacaagaggctcgaagcaaagcaaactcaagtcagatgtttttggatggtacccaaaggccctgaaaattcacaggtgaagaggattaatttcattgccatgcttctgacacacccctttcaaagtggtttagcactgctgtttagtaaatgytattcgcctcctgcttctggtaccagccacatttgcatattcatcagaagtgtgcacacagtattaaacccgaccgttaccacacttctcattcccaaatccctctatgaatgctgatacctgtttctctagctgcagccataattttctcaaggtcagcacatgctggcgtttccctggggagctgggggcctccactgccctgaagaagccatgcgctgctgcttcctgtcacctcaatgggtatgactccataagacttcagtgtgtctgatgggaggtggtgtttgt

SEQ ID NO: 93684 - DNA, 714 bp, Homo sapiens
cccacctcagcccccggattagctgggactattaagcgtgtaccatcctgcctggctaatttttttaaaaatctttgtagagacaaggtctcactatgttgcccaggctggtctcgaattcctgagctcaaatgatcctcccgctttggcctcccaaagtgctaggattacaggcgtgagccaccatgcctagctgaacttcatcctttcatcaggggtctactcctgcaataacaagcccactcctgtgataatagcattaatctgtgcctgaaggcagagacctcatgacctaatcatctcctaayggtcccacctcttaataccatcacaatggcaatgaaatttcactatgaattttgaagggtgcatccaaaccatagcaggtgttagctttctccctatatacctacttatttttgcaagttcaatttgtctataataaacatattattacttataatactaaatgggatttttttttaacagaagaaatagatgtttaacggtttggtcttttttcctgagaaactgtaaaacttctctaagtctaaggaaactagtaacaaaatccccatgtggggccttgtttgaatgctggaaatcatatggctagcaatattgtttcactagacagaaaattagaatgaagaaagatgagaaagcatgagtttagatgccagtaaacgccttcttcctgaagctggcacgaat

SEQ ID NO: 93685 - DNA, 714 bp, Homo sapiens
cccacctcagcccccggattagctgggactattaagcgtgtaccatcctgcctggctaatttttttaaaaatctttgtagagacaaggtctcactatgttgcccaggctggtctcgaattcctgagctcaaatgatcctcccgctttggcctcccaaagtgctaggattacaggcgtgagccaccatgcctagctgaacttcatcctttcatcaggggtctactcctgcaataacaagcccactcctgtgataatagcattaatctgtgcctgaaggcagagacctcatgacctaatcatctcctaacggtcccacctcttaataccatcacaatggcaatgaaatttcactatgaattttgaagggtgcatccaaaccatagcaggtgttagctttctccctatatacctacttatttttgcaagttcaatttgtctataataaacatattattacttataatactaaatgggatttttttttaacagaagaaatagatgtttarcggtttggtcttttttcctgagaaactgtaaaacttctctaagtctaaggaaactagtaacaaaatccccatgtggggccttgtttgaatgctggaaatcatatggctagcaatattgtttcactagacagaaaattagaatgaagaaagatgagaaagcatgagtttagatgccagtaaacgccttcttcctgaagctggcacgaat

SEQ ID NO: 93686 - DNA, 1358 bp, Homo sapiens
gttttgaaacttgcttttctcccctcaataaatcactgaaacatatatttaggtaatactgtaaaacccatacacatgagaatattcagatgtttgtgggaaagaaaagaaacaaaatatatatggaaaaatactaaaaaccaatctacagaaagtgcctatgtaagctgggaaaataagttcagaggtttatgaagttagtttcctttaattcaaacttttttgctctggtaaactttgaaaaatattttcacagcatatattctttataagaatacagctgggaaattcttccactgtcatgcagtcttaagcttaaagtttgcaaaatatagtttttgcttcttctttttcttcttcttctttataaaaaggcttttaattcaacttattgaccccagtatttttgctacatccattgctaggatcaaatcattatacttttcaaaagcgttcctttaacctgaggtcaaacgaatgtgaaataggaggaagttataaaaagactgaaatctagaacacccataaccctgatgtactttatccaaatttttatgactttgaagtgcactgaatacagaaagaatgcagagcttttattttccaaccagagaaaccacacacaaaaaaagaataaaaaagtatttctttctcatttctgtagccaacctctcaatccaaaaaaaggaagtgggggaggatccaagtcaagccaacaaaaataaactgttgccattgtttatagagaaaataattcctagagatatttttccccaaaaagccaaaaaaaaaaaaaaaatcacaaagagactccctggctcagtttatttgctagaggagaaattgtttaacatttgcttattttgtaaaaactaccaataacaagtgggcccagaaaatccctccctcttcctcgtgtggtgggaaagcagagaccaggcgaaactgggcctactgttggaacattgctcactgtctggaactgcccaatcctgcccggcttctgtaagattcccaagatccatgacaacctgaagtccccaagggaggggtttgagttggatggatgtggcgaggccagacaatggtcagccttgactttccctgtggtggattggattgaacgctccaattcttgcctcttstctgcctccacatccttgtcacgatctcattgtgggaagaatataccttttttgtcccttaactttgagctctgccagtgactgtgtgccatctccagctgcagccttgccctcttgccctgcagccatcgctgtgagaagagcacatcctagcagaacccgtgatggagaggaggttgccctgcagtgaaacagagctgccccagctgccca

SEQ ID NO: 93687 - DNA, 713 bp, Homo sapiens
ttggccaggctggtctcgaattcctgacctcaagtgatccacccgctttggccacccaaagtgctgggattgcagcagtgagccactgcacctggccagttcttttaacacttgtactgtagggagtttaatatgtggctatgtataggatagactgaagtagggaacagataggatcatgatccagatgtcaggtaatgaacccacaaacaagtgtggagattgtggatttgggaaagaacgggaagaggaaagagatagacaaaaggttggctgcaagaaagaaggaaaaggctaaattttcacacttgggagaagaaggaaatggtgataacttttggagaatttgaactttggagatgattttaggaaaaataataagtttagtttgtgccatcccgggtttgaagtgacaacaatttaatctaatggtagtgtggtgtagtggaaagggctgtagttttcaaatagacctggctgctgattctggcttgacatcttacagggtgaggggcttttctgagtaacttaaactctctaagcctcagtgtcyacccctgtatcagccctcaggattgtgaggactgtgtaggtgggtagtgaggtaggcatcggtgggcatttggtcttcttagcatctttcctgttgagaatgccactctgctggttggtgggtctgtaatttacatgaccaacttctgtgccaccatgac

SEQ ID NO: 93688 - DNA, 713 bp, Homo sapiens
ttggccaggctggtctcgaattcctgacctcaagtgatccacccgctttggccacccaaagtgctgggattgcagcagtgagccactgcacctggccagttcttttaacacttgtactgtagggagtttaatatgtggctatgtataggatagactgaagtagggaacagataggatcatgatccagatgtcaggtaatgaacccacaaacaagtgtggagattgtggatttgggaaagaacgggaagaggaaagagatagacaaaaggttggctgcaagaaagaaggaaaaggctaaattttcacacttgggagaagaaggaaatggtgataacttttggagaatttgaactttggagatgattttaggaaaaataataagtttagtttgtgccatcccgggtttgaagtgacaacaatttaatctaatggtagtgtggtgtagtggaaagggctgtagttttcaaatagacctggctgctgattctggcttgacatcttacagggtgaggggcttttctgagtaacttaaactctctaagcctcagtgtctacccctgtatcagccctcaggrttgtgaggactgtgtaggtgggtagtgaggtaggcatcggtgggcatttggtcttcttagcatctttcctgttgagaatgccactctgctggttggtgggtctgtaatttacatgaccaacttctgtgccaccatgac

SEQ ID NO: 93689 - DNA, 725 bp, Homo sapiens
ggatccagtatctgtcgctcccctcttgtgtccatgtgttcttatcatttatctcccacttacaagtgagaacatgtggtatttggttttctgttcctgctttagtttgctaaggatgatggcatccagctccatccatgttcctgcaaaagatatgatcttgttcttttttatggttacatgatatttcgtggtgtatgtgtgctgcagtttctttatccagtctgccattgatggacatttagcttgattccatgtctttgctattgtgaatagtgctacagtgaacatatgcatacatatgtctttatggtagaacgacttatattcctttgggtatatacccagtaatgggatggctgggttgaatggtagttctatttttagctctttgaggaatcttcacactgctttccacaatggttggactaatttacactcccaccaacagtgtctaagcattcccttttctccacaaccttgccagcacctgytattttttgactttttagtaatagccattctgactggtgtgagatatctcactgtggttttgatttgcatttctttaatgatcaaaatgactaaaattcctaacctccaattacaacaggtagaggctcccagacgtaacactaggtggagaccccctgagctgggccatttctgtaagaagccaggccactggaaaagagatgggtgcaaaagaaaaatggaatctcttt

SEQ ID NO: 93690 - DNA, 651 bp, Homo sapiens
ctatctcagtgagtagaggaatgrctttgaatagaatgggaggcaggtttgccctaagcagttcccggcttgagttttccttagtgattttggagtcccaagatattttcctttcacatggacttcccagcctttagaactgtcagagataaatgtctgttgtttataagccacccagtttatggcattttgttatagcagcccaaaccaaataagaagaccgccagccagttctacctaaacagtccctccatgtgtccaccatcctgagtccccattaccacgccttgtccagaccccagcatttctgtgacttgatgcaatataagtttactgcctaaataacaggtacaggactttgtgtggacaaatgtgctcttttctcctggggtaatatctacgtacaaatgactgggtcacgtggtaggtatttttaactttttaaaaaactaccaaactgttttccatagtctttgcaccatttcactttcccaccagcaatgaatgagtgttccagtaactctgcattctcaacagcacttgttatcatcagcacttgttatcatcaccttaaagagtttcagccattctaaaggtgtgtagtggttttctccccaccttttaattaaattaccacgtgcccttcaaaaa

SEQ ID NO: 93691 - DNA, 734 bp, Homo sapiens
attgtaactggcatgaatccatccatgagagtgtagcccttacaccctaaacacctcccattaggccccacctcccaacactgttgcattggagattaagcttctaacacatgctttcttgggggacatattcaaaccatagcaccaaggaaaacaaaaagaactaaatgcaaatacaaacagattaagatcctgcaaggcacaagagcatggtgataaaggatggcactgcctgggtttgaatcctggtctggtacttgctagctgtgtgggcttttaggggaagccacttcacgtcagtgcctcgattttctcatctgtggaatgaagagactattcrtaacccccttatgggttgtgaagattgaatgagttgatacaggtaaagtgcttggaagagtgtctggcaccatcaaagtcttagctactattggttttattaaggcagatgatttcaggttgtaaggagaggtcccagaaaaagcagtgagcagtttattcagtacaagatgtgctcatgccctgggcagtcctctgtagcagcaccctcttgagcttctttgcattgtgcctactctgtctcctccgactcttgtctccatcctaggctgtatcttttttccaggtctagacttctgagataggctgtaaggtgtaccttctttccagttgtagatcagcacttctgaaactgttatgtgcttatgaaccatctggagattttactgaatgca

SEQ ID NO: 93692 - DNA, 3278 bp, Homo sapiens
tgcatatgttaactctaagtaaagcttattatatgttttttagcccataaatatggagatgttttaaaatttcttccagtgccccagtggatgrtcttacacctcccgtgcttctgggatacacacacctaattttgcagaccactggtccagaatgtaaattgaagagtttaatgtctaagatatttgttcttttgtttgtagcttatcttttactccccacgtttcaaatatccgtttgcaaaataatttttgagttaaaattttcaattaaaaaactgtatccttgaggtagaaaagataaagatagaagatatatgtgaattaggttgtatctctccttaagagggaatactgttttttatctaaggagaactaacaaccctccctttcattgtctgggttggtataagtaaaaatccttgtttgaagttattaagccttcccacccatatgatgattagtttggttcataagctagagttagggcttggtaaaggctccttttttttttttttttttttttaaagtctttccaccttaactagcaagtaagctagaaatgacagagcagtagaagggggaatctaccagagtgtcctacaggaccttgttgaatgctactgctgcatgcaagggttgtggatttggtgtgggccttctgcagtatcacccaaatttgagcagtacatgtaactaaaagtaagaaaaataaattagacagtttatttcatttcagactttggaagcccaggactgtggggattagctattagctaagacaatgattcactgagcaaatgcagtgaaagattcttttgttacactgatcatcatttgtggagagactctgaagaaggataaagctctggctgcatagtcaaaccagacctactactcaaggacatgcatactagatatgtaggtgtttccaaatatttttttcagttgtgggggtgcaaatcatttcaatagtagagtaactcagttcattactgttactggaaaaacaagtttaaccaagcacatatcctactgagggtgagtcaacagtgtcattttaacataagaaggacagtacatgaagtgagttattccaagtcctgtggttttcctacagctgagcaaagacagctgttctttcggaagtggggctctaaaaagaagttgcccatctcctttctttcttgattatagccttttagttttcttttggcctgagacatttcaaaaattcatttcctccttagatttctatcaccaaataccctgaattttgataatttatttatagagtatattatttattatagacttattatagcttaaaactttattttaatttatctcccatttcaagatccacgtttgctatatgttgtgtcagataataaaaatgccataaggaaaacagaggagtgatcttttttaatatgtcattattttctatagttctttagtggtatggacatggaataaggtggcattttgtgggacagtataccaaacttagtgataaaatttatacttttaattttggaggacaaaagtcttgtattctcagccttgtggataagacagtgctctgagctgtctgaggtttcctaaattgggattcaacatcatgaagggtatgtgtctggatagtttatttgttggtttgggaaggtgagtttttgtcttttttccccctctgagttgatttctttagttggagagaagcagaccagatgaagaaaatactttatctcttatggcatttttggtttaccacattagtgatgacccgtcttctctgagcagcaggccatgcttctctgttcagtagttcagttttcactaacttaactgcagatgtgttcttggagggatttatttctaatcaattgaattatgggtacttggataaaatgatgatgggttacctacttttaatagggccatcatttttaagagtaaaatcttgtcaagatagggtatatcatacttatgatctggttccatctctaactccataatttccttgtgctcctgtgttgctactctattattgagaagagatggtatcttgtcagtgtcaattttacaaagaaaaaattctaaacaatttcagtcatagggtagtttttttttttcctggagaaataatgcatagtgtagtatgttgaatcctagagttggcaggttttcaaaagtggggttcttttgttgtgtaggtaggggtgatgctagtcaatgggtgttagtcattagggcatgtgtatgagtggtagttctgagatacagcattggcagcccctcttgtccctggttttgtttttgataagcaagtcctggttttgttttaataagcaggtcattagctgatctttcgtgtaaatgtttttgatgtgcatagctggtatgtgggtggttacctacctgagaatgttgtagtcacaaatgtatattatggaagtttgcagattatggtggatatcaggtttttctaactgcgtatttacagatgtagtgagtgaaaggaatgttgggtcagtaggtaaaagacttgtgctctggtcctggttcagacatcttgatttgtgtgactttgggcaagccccttatttctttgagttgcagtttcttgtgtaaaatggtgctaataccaatttacatgcctcatagtgttgttgtggggatcaaatgagatcactgtttatgagcagccttctcaggagtgagaaatagagggttgtgagctgactttctgatttgtttggctgaggtgttcacacaagccatagaatgctttgtaggcttgggtggaggaatgtagatggaaatcagctgaaaatccctgcctattagaagctgagatgttaatcctaaatatattctatggagtactatcagatgccttgcttttcttcatgatgccctattagcttcatcttcaggtagcataggtgcctgttactctcattttacttgaagaaactgaccagccaactgatttaggatatggctggctatcttctggaactcacattagagttactccttgagagtaaagtcttgtattttctgaaggttgctgcttttggggtattttccgtggaggtgggtgggcacacacaaaaactcactgtgctcaaatttataaacttgttcttcttaacaattttaaagccagattacattggattgggggaggggaggatactagatttagtgttttttaatataaaactttgtatttgaaactttatgtggtaacatatatttaggctcatagc

SEQ ID NO: 93693 - DNA, 3278 bp, Homo sapiens
tgcatatgttaactctaagtaaagcttattatatgttttttagcccataaatatggagatgttttaaaatttcttccagtgccccagtggatgatcttacacctcccstgcttctgggatacacacacctaattttgcagaccactggtccagaatgtaaattgaagagtttaatgtctaagatatttgttcttttgtttgtagcttatcttttactccccacgtttcaaatatccgtttgcaaaataatttttgagttaaaattttcaattaaaaaactgtatccttgaggtagaaaagataaagatagaagatatatgtgaattaggttgtatctctccttaagagggaatactgttttttatctaaggagaactaacaaccctccctttcattgtctgggttggtataagtaaaaatccttgtttgaagttattaagccttcccacccatatgatgattagtttggttcataagctagagttagggcttggtaaaggctccttttttttttttttttttttttaaagtctttccaccttaactagcaagtaagctagaaatgacagagcagtagaagggggaatctaccagagtgtcctacaggaccttgttgaatgctactgctgcatgcaagggttgtggatttggtgtgggccttctgcagtatcacccaaatttgagcagtacatgtaactaaaagtaagaaaaataaattagacagtttatttcatttcagactttggaagcccaggactgtggggattagctattagctaagacaatgattcactgagcaaatgcagtgaaagattcttttgttacactgatcatcatttgtggagagactctgaagaaggataaagctctggctgcatagtcaaaccagacctactactcaaggacatgcatactagatatgtaggtgtttccaaatatttttttcagttgtgggggtgcaaatcatttcaatagtagagtaactcagttcattactgttactggaaaaacaagtttaaccaagcacatatcctactgagggtgagtcaacagtgtcattttaacataagaaggacagtacatgaagtgagttattccaagtcctgtggttttcctacagctgagcaaagacagctgttctttcggaagtggggctctaaaaagaagttgcccatctcctttctttcttgattatagccttttagttttcttttggcctgagacatttcaaaaattcatttcctccttagatttctatcaccaaataccctgaattttgataatttatttatagagtatattatttattatagacttattatagcttaaaactttattttaatttatctcccatttcaagatccacgtttgctatatgttgtgtcagataataaaaatgccataaggaaaacagaggagtgatcttttttaatatgtcattattttctatagttctttagtggtatggacatggaataaggtggcattttgtgggacagtataccaaacttagtgataaaatttatacttttaattttggaggacaaaagtcttgtattctcagccttgtggataagacagtgctctgagctgtctgaggtttcctaaattgggattcaacatcatgaagggtatgtgtctggatagtttatttgttggtttgggaaggtgagtttttgtcttttttccccctctgagttgatttctttagttggagagaagcagaccagatgaagaaaatactttatctcttatggcatttttggtttaccacattagtgatgacccgtcttctctgagcagcaggccatgcttctctgttcagtagttcagttttcactaacttaactgcagatgtgttcttggagggatttatttctaatcaattgaattatgggtacttggataaaatgatgatgggttacctacttttaatagggccatcatttttaagagtaaaatcttgtcaagatagggtatatcatacttatgatctggttccatctctaactccataatttccttgtgctcctgtgttgctactctattattgagaagagatggtatcttgtcagtgtcaattttacaaagaaaaaattctaaacaatttcagtcatagggtagtttttttttttcctggagaaataatgcatagtgtagtatgttgaatcctagagttggcaggttttcaaaagtggggttcttttgttgtgtaggtaggggtgatgctagtcaatgggtgttagtcattagggcatgtgtatgagtggtagttctgagatacagcattggcagcccctcttgtccctggttttgtttttgataagcaagtcctggttttgttttaataagcaggtcattagctgatctttcgtgtaaatgtttttgatgtgcatagctggtatgtgggtggttacctacctgagaatgttgtagtcacaaatgtatattatggaagtttgcagattatggtggatatcaggtttttctaactgcgtatttacagatgtagtgagtgaaaggaatgttgggtcagtaggtaaaagacttgtgctctggtcctggttcagacatcttgatttgtgtgactttgggcaagccccttatttctttgagttgcagtttcttgtgtaaaatggtgctaataccaatttacatgcctcatagtgttgttgtggggatcaaatgagatcactgtttatgagcagccttctcaggagtgagaaatagagggttgtgagctgactttctgatttgtttggctgaggtgttcacacaagccatagaatgctttgtaggcttgggtggaggaatgtagatggaaatcagctgaaaatccctgcctattagaagctgagatgttaatcctaaatatattctatggagtactatcagatgccttgcttttcttcatgatgccctattagcttcatcttcaggtagcataggtgcctgttactctcattttacttgaagaaactgaccagccaactgatttaggatatggctggctatcttctggaactcacattagagttactccttgagagtaaagtcttgtattttctgaaggttgctgcttttggggtattttccgtggaggtgggtgggcacacacaaaaactcactgtgctcaaatttataaacttgttcttcttaacaattttaaagccagattacattggattgggggaggggaggatactagatttagtgttttttaatataaaactttgtatttgaaactttatgtggtaacatatatttaggctcatagc

SEQ ID NO: 93694 - DNA, 3278 bp, Homo sapiens
tgcatatgttaactctaagtaaagcttattatatgttttttagcccataaatatggagatgttttaaaatttcttccagtgccccagtggatgatcttacacctcccgtrcttctgggatacacacacctaattttgcagaccactggtccagaatgtaaattgaagagtttaatgtctaagatatttgttcttttgtttgtagcttatcttttactccccacgtttcaaatatccgtttgcaaaataatttttgagttaaaattttcaattaaaaaactgtatccttgaggtagaaaagataaagatagaagatatatgtgaattaggttgtatctctccttaagagggaatactgttttttatctaaggagaactaacaaccctccctttcattgtctgggttggtataagtaaaaatccttgtttgaagttattaagccttcccacccatatgatgattagtttggttcataagctagagttagggcttggtaaaggctccttttttttttttttttttttttaaagtctttccaccttaactagcaagtaagctagaaatgacagagcagtagaagggggaatctaccagagtgtcctacaggaccttgttgaatgctactgctgcatgcaagggttgtggatttggtgtgggccttctgcagtatcacccaaatttgagcagtacatgtaactaaaagtaagaaaaataaattagacagtttatttcatttcagactttggaagcccaggactgtggggattagctattagctaagacaatgattcactgagcaaatgcagtgaaagattcttttgttacactgatcatcatttgtggagagactctgaagaaggataaagctctggctgcatagtcaaaccagacctactactcaaggacatgcatactagatatgtaggtgtttccaaatatttttttcagttgtgggggtgcaaatcatttcaatagtagagtaactcagttcattactgttactggaaaaacaagtttaaccaagcacatatcctactgagggtgagtcaacagtgtcattttaacataagaaggacagtacatgaagtgagttattccaagtcctgtggttttcctacagctgagcaaagacagctgttctttcggaagtggggctctaaaaagaagttgcccatctcctttctttcttgattatagccttttagttttcttttggcctgagacatttcaaaaattcatttcctccttagatttctatcaccaaataccctgaattttgataatttatttatagagtatattatttattatagacttattatagcttaaaactttattttaatttatctcccatttcaagatccacgtttgctatatgttgtgtcagataataaaaatgccataaggaaaacagaggagtgatcttttttaatatgtcattattttctatagttctttagtggtatggacatggaataaggtggcattttgtgggacagtataccaaacttagtgataaaatttatacttttaattttggaggacaaaagtcttgtattctcagccttgtggataagacagtgctctgagctgtctgaggtttcctaaattgggattcaacatcatgaagggtatgtgtctggatagtttatttgttggtttgggaaggtgagtttttgtcttttttccccctctgagttgatttctttagttggagagaagcagaccagatgaagaaaatactttatctcttatggcatttttggtttaccacattagtgatgacccgtcttctctgagcagcaggccatgcttctctgttcagtagttcagttttcactaacttaactgcagatgtgttcttggagggatttatttctaatcaattgaattatgggtacttggataaaatgatgatgggttacctacttttaatagggccatcatttttaagagtaaaatcttgtcaagatagggtatatcatacttatgatctggttccatctctaactccataatttccttgtgctcctgtgttgctactctattattgagaagagatggtatcttgtcagtgtcaattttacaaagaaaaaattctaaacaatttcagtcatagggtagtttttttttttcctggagaaataatgcatagtgtagtatgttgaatcctagagttggcaggttttcaaaagtggggttcttttgttgtgtaggtaggggtgatgctagtcaatgggtgttagtcattagggcatgtgtatgagtggtagttctgagatacagcattggcagcccctcttgtccctggttttgtttttgataagcaagtcctggttttgttttaataagcaggtcattagctgatctttcgtgtaaatgtttttgatgtgcatagctggtatgtgggtggttacctacctgagaatgttgtagtcacaaatgtatattatggaagtttgcagattatggtggatatcaggtttttctaactgcgtatttacagatgtagtgagtgaaaggaatgttgggtcagtaggtaaaagacttgtgctctggtcctggttcagacatcttgatttgtgtgactttgggcaagccccttatttctttgagttgcagtttcttgtgtaaaatggtgctaataccaatttacatgcctcatagtgttgttgtggggatcaaatgagatcactgtttatgagcagccttctcaggagtgagaaatagagggttgtgagctgactttctgatttgtttggctgaggtgttcacacaagccatagaatgctttgtaggcttgggtggaggaatgtagatggaaatcagctgaaaatccctgcctattagaagctgagatgttaatcctaaatatattctatggagtactatcagatgccttgcttttcttcatgatgccctattagcttcatcttcaggtagcataggtgcctgttactctcattttacttgaagaaactgaccagccaactgatttaggatatggctggctatcttctggaactcacattagagttactccttgagagtaaagtcttgtattttctgaaggttgctgcttttggggtattttccgtggaggtgggtgggcacacacaaaaactcactgtgctcaaatttataaacttgttcttcttaacaattttaaagccagattacattggattgggggaggggaggatactagatttagtgttttttaatataaaactttgtatttgaaactttatgtggtaacatatatttaggctcatagc

SEQ ID NO: 93695 - DNA, 3278 bp, Homo sapiens
tgcatatgttaactctaagtaaagcttattatatgttttttagcccataaatatggagatgttttaaaatttcttccagtgccccagtggatgatcttacacctcccgtgcttctgggrtacacacacctaattttgcagaccactggtccagaatgtaaattgaagagtttaatgtctaagatatttgttcttttgtttgtagcttatcttttactccccacgtttcaaatatccgtttgcaaaataatttttgagttaaaattttcaattaaaaaactgtatccttgaggtagaaaagataaagatagaagatatatgtgaattaggttgtatctctccttaagagggaatactgttttttatctaaggagaactaacaaccctccctttcattgtctgggttggtataagtaaaaatccttgtttgaagttattaagccttcccacccatatgatgattagtttggttcataagctagagttagggcttggtaaaggctccttttttttttttttttttttttaaagtctttccaccttaactagcaagtaagctagaaatgacagagcagtagaagggggaatctaccagagtgtcctacaggaccttgttgaatgctactgctgcatgcaagggttgtggatttggtgtgggccttctgcagtatcacccaaatttgagcagtacatgtaactaaaagtaagaaaaataaattagacagtttatttcatttcagactttggaagcccaggactgtggggattagctattagctaagacaatgattcactgagcaaatgcagtgaaagattcttttgttacactgatcatcatttgtggagagactctgaagaaggataaagctctggctgcatagtcaaaccagacctactactcaaggacatgcatactagatatgtaggtgtttccaaatatttttttcagttgtgggggtgcaaatcatttcaatagtagagtaactcagttcattactgttactggaaaaacaagtttaaccaagcacatatcctactgagggtgagtcaacagtgtcattttaacataagaaggacagtacatgaagtgagttattccaagtcctgtggttttcctacagctgagcaaagacagctgttctttcggaagtggggctctaaaaagaagttgcccatctcctttctttcttgattatagccttttagttttcttttggcctgagacatttcaaaaattcatttcctccttagatttctatcaccaaataccctgaattttgataatttatttatagagtatattatttattatagacttattatagcttaaaactttattttaatttatctcccatttcaagatccacgtttgctatatgttgtgtcagataataaaaatgccataaggaaaacagaggagtgatcttttttaatatgtcattattttctatagttctttagtggtatggacatggaataaggtggcattttgtgggacagtataccaaacttagtgataaaatttatacttttaattttggaggacaaaagtcttgtattctcagccttgtggataagacagtgctctgagctgtctgaggtttcctaaattgggattcaacatcatgaagggtatgtgtctggatagtttatttgttggtttgggaaggtgagtttttgtcttttttccccctctgagttgatttctttagttggagagaagcagaccagatgaagaaaatactttatctcttatggcatttttggtttaccacattagtgatgacccgtcttctctgagcagcaggccatgcttctctgttcagtagttcagttttcactaacttaactgcagatgtgttcttggagggatttatttctaatcaattgaattatgggtacttggataaaatgatgatgggttacctacttttaatagggccatcatttttaagagtaaaatcttgtcaagatagggtatatcatacttatgatctggttccatctctaactccataatttccttgtgctcctgtgttgctactctattattgagaagagatggtatcttgtcagtgtcaattttacaaagaaaaaattctaaacaatttcagtcatagggtagtttttttttttcctggagaaataatgcatagtgtagtatgttgaatcctagagttggcaggttttcaaaagtggggttcttttgttgtgtaggtaggggtgatgctagtcaatgggtgttagtcattagggcatgtgtatgagtggtagttctgagatacagcattggcagcccctcttgtccctggttttgtttttgataagcaagtcctggttttgttttaataagcaggtcattagctgatctttcgtgtaaatgtttttgatgtgcatagctggtatgtgggtggttacctacctgagaatgttgtagtcacaaatgtatattatggaagtttgcagattatggtggatatcaggtttttctaactgcgtatttacagatgtagtgagtgaaaggaatgttgggtcagtaggtaaaagacttgtgctctggtcctggttcagacatcttgatttgtgtgactttgggcaagccccttatttctttgagttgcagtttcttgtgtaaaatggtgctaataccaatttacatgcctcatagtgttgttgtggggatcaaatgagatcactgtttatgagcagccttctcaggagtgagaaatagagggttgtgagctgactttctgatttgtttggctgaggtgttcacacaagccatagaatgctttgtaggcttgggtggaggaatgtagatggaaatcagctgaaaatccctgcctattagaagctgagatgttaatcctaaatatattctatggagtactatcagatgccttgcttttcttcatgatgccctattagcttcatcttcaggtagcataggtgcctgttactctcattttacttgaagaaactgaccagccaactgatttaggatatggctggctatcttctggaactcacattagagttactccttgagagtaaagtcttgtattttctgaaggttgctgcttttggggtattttccgtggaggtgggtgggcacacacaaaaactcactgtgctcaaatttataaacttgttcttcttaacaattttaaagccagattacattggattgggggaggggaggatactagatttagtgttttttaatataaaactttgtatttgaaactttatgtggtaacatatatttaggctcatagc

SEQ ID NO: 93696 - DNA, 3278 bp, Homo sapiens
tgcatatgttaactctaagtaaagcttattatatgttttttagcccataaatatggagatgttttaaaatttcttccagtgccccagtggatgatcttacacctcccgtgcttctgggatacacacacctaattttgcagaccactggtccagaatgtaaattgaagagtttaatgtctaagatatttgttcttttgtttgtagcttatcttttactccccacgtttcaaatatccgtttgcaaaataatttttgagttaaaattttcaattaaaaaactgtatccttgaggtagaaaagataaagatagaagatatatgtgaattaggttgtatctctccttaagagggaatactgttttttatctaaggagaactaacaaccctccctttcattgtctgggttggtataagtaaaaatccttgtttgaagttattaagccttcccacccatatgatgattagtttggttcataagctagagttagggcttggtaaaggctccttttttttttttttttttttttraagtctttccaccttaactagcaagtaagctagaaatgacagagcagtagaagggggaatctaccagagtgtcctacaggaccttgttgaatgctactgctgcatgcaagggttgtggatttggtgtgggccttctgcagtatcacccaaatttgagcagtacatgtaactaaaagtaagaaaaataaattagacagtttatttcatttcagactttggaagcccaggactgtggggattagctattagctaagacaatgattcactgagcaaatgcagtgaaagattcttttgttacactgatcatcatttgtggagagactctgaagaaggataaagctctggctgcatagtcaaaccagacctactactcaaggacatgcatactagatatgtaggtgtttccaaatatttttttcagttgtgggggtgcaaatcatttcaatagtagagtaactcagttcattactgttactggaaaaacaagtttaaccaagcacatatcctactgagggtgagtcaacagtgtcattttaacataagaaggacagtacatgaagtgagttattccaagtcctgtggttttcctacagctgagcaaagacagctgttctttcggaagtggggctctaaaaagaagttgcccatctcctttctttcttgattatagccttttagttttcttttggcctgagacatttcaaaaattcatttcctccttagatttctatcaccaaataccctgaattttgataatttatttatagagtatattatttattatagacttattatagcttaaaactttattttaatttatctcccatttcaagatccacgtttgctatatgttgtgtcagataataaaaatgccataaggaaaacagaggagtgatcttttttaatatgtcattattttctatagttctttagtggtatggacatggaataaggtggcattttgtgggacagtataccaaacttagtgataaaatttatacttttaattttggaggacaaaagtcttgtattctcagccttgtggataagacagtgctctgagctgtctgaggtttcctaaattgggattcaacatcatgaagggtatgtgtctggatagtttatttgttggtttgggaaggtgagtttttgtcttttttccccctctgagttgatttctttagttggagagaagcagaccagatgaagaaaatactttatctcttatggcatttttggtttaccacattagtgatgacccgtcttctctgagcagcaggccatgcttctctgttcagtagttcagttttcactaacttaactgcagatgtgttcttggagggatttatttctaatcaattgaattatgggtacttggataaaatgatgatgggttacctacttttaatagggccatcatttttaagagtaaaatcttgtcaagatagggtatatcatacttatgatctggttccatctctaactccataatttccttgtgctcctgtgttgctactctattattgagaagagatggtatcttgtcagtgtcaattttacaaagaaaaaattctaaacaatttcagtcatagggtagtttttttttttcctggagaaataatgcatagtgtagtatgttgaatcctagagttggcaggttttcaaaagtggggttcttttgttgtgtaggtaggggtgatgctagtcaatgggtgttagtcattagggcatgtgtatgagtggtagttctgagatacagcattggcagcccctcttgtccctggttttgtttttgataagcaagtcctggttttgttttaataagcaggtcattagctgatctttcgtgtaaatgtttttgatgtgcatagctggtatgtgggtggttacctacctgagaatgttgtagtcacaaatgtatattatggaagtttgcagattatggtggatatcaggtttttctaactgcgtatttacagatgtagtgagtgaaaggaatgttgggtcagtaggtaaaagacttgtgctctggtcctggttcagacatcttgatttgtgtgactttgggcaagccccttatttctttgagttgcagtttcttgtgtaaaatggtgctaataccaatttacatgcctcatagtgttgttgtggggatcaaatgagatcactgtttatgagcagccttctcaggagtgagaaatagagggttgtgagctgactttctgatttgtttggctgaggtgttcacacaagccatagaatgctttgtaggcttgggtggaggaatgtagatggaaatcagctgaaaatccctgcctattagaagctgagatgttaatcctaaatatattctatggagtactatcagatgccttgcttttcttcatgatgccctattagcttcatcttcaggtagcataggtgcctgttactctcattttacttgaagaaactgaccagccaactgatttaggatatggctggctatcttctggaactcacattagagttactccttgagagtaaagtcttgtattttctgaaggttgctgcttttggggtattttccgtggaggtgggtgggcacacacaaaaactcactgtgctcaaatttataaacttgttcttcttaacaattttaaagccagattacattggattgggggaggggaggatactagatttagtgttttttaatataaaactttgtatttgaaactttatgtggtaacatatatttaggctcatagc

SEQ ID NO: 93697 - DNA, 713 bp, Homo sapiens
aggtactactatcagatgaggaaatggaagcttacagagacagaccaatatgcccaaaatctcacagaaaaatgaatgtagctatcacgacgtgaaaagatgtagaggaaccttaactgcagattattaagttaaagaagctaatctaaaaagccttcatactgtatgattccaactatgtgacattctggaaacagcagaactatagagacagtagaaaggtcaatagttgctgggggttgtcctcgggagggatgaagaggcagagcacagaggattttaaggaacgaaaatactctgtatgatatataatagtggatacgtgtcatacatttgtccaaacccatagaatgcacgatgccaagagtgaatcctaattgacactacrgacttggatggtgatgatgggttgatgtaggttcatcagctgtaaaaaatgtaccactctgtgtggggatgttgataatggagagggcctttgcatgtgtggggacagggagtatatgagaaatttctattctttctgctcaattttgctgtgaatctaaaactgctccaaaaaataaaatattttaaaaatgagtgtcagaggtaggatatgaaaacatttgtttgactctatgtagggcttaattataatattatactgcgttccagttgacaaatctaatactttcaccgtccaaaacttccctcacacttacttcctgttg

SEQ ID NO: 93698 - DNA, 696 bp, Homo sapiens
aagtcacactttctctttgctctttcccacaaagccagtctactaacccaactagtctaggctgttgtgccaatcaacagccattttgtttaagattcacactttgctttaagcctctcccctgcattggtctatattgcatgaacattccctagctccatttccctctggactcttgacagaagaagacaatgagaagctctgacagaagtttagggaaggagaagaagggagaactgtggttgtcccatcacttttactttctgttacatctgttacaagttgccactagatagccccttcctccattgttctagtttccatgaggtaggccttgctgtggttccagctctcattgtatgggtttggcttctgagttaataccgtcttctcccattgtccttctctttcaagggtagcagcttcttgtggctaatctctgggttgcctwactgtcttgtttgctttgtctagtctgtgtatccaatttccttcctttgtctagtctgtgtaaccagtttcctaccttaaattcactcagttcaaacaatctaaactgctttgtggtgagtccttggcagataaaattatgctgtaataatcaatgtgctctcaaatctcagtagtttaacacataaatgcatgttttgtacacagtgctgttgcaaggcagctcccatccaagcagtggtttag

SEQ ID NO: 93699 - DNA, 716 bp, Homo sapiens
aaatatttgattgattcattgaaactgctgaaccagaaaactgtttctatggaggcaggaagttgaaatagggagagaaatataaagttatctttgaattaatgaggaagtgtagaggatacagggaggtataccaggtaagtgatgtggtgctaatggtggtaatagtagtgtgataattttgatagagagacaggatgagattccatggaatgtctgacatttgagatgaatctaataagcagagttgtgaaatataaggtctgttccagaacagctgaataaagtgtggcacagctggagaatagaagatgtgaagaaagagaggcggcgctgagtagggaagtcagaccagattttatggagggccttgaactcctttctaacgtatttagattgcttttccaggcactatggagtcattcaaggtttttaagcaggacggtgaaatgaacagattgtgttttagaaaaccctggtcacacatagagaaagcattagcttagagagaccagagagaggaagctactgcaggaatccaggtgagaaatggtaagtctgacagagcggtggtggctgtgggacgtgtaaagacattttgagggttgaatttgcaggatttggtgaytggctctgtatgagaaggggtaaagagaccagaagatgagctcttacctccaacatgctgggcattctagagtgaggtgataggtctt

SEQ ID NO: 93700 - DNA, 2083 bp, Homo sapiens
atttgaaactgaaaaaaaaaataatatggtggttgggaggaggtaaggaagagggcagaaagagattaaagattaaaaaagagattaaaaaagagagaagccacatgaaatcaggagaaattcctgaaagcagcaaccctttgaggaatttacagctctactgatgcctatttagccacccatctgaaagatcctggcaggttaatatgctttgacaactggtggctctatctcatttttttttcacagctttatgaaatactctacagaccccagcttattgataattgatattaatgttgtaacagctgccctggctcacctggtgtgttatcaaatgctgtgtgctcagccctgccatgtgccatgccctggagctgcttcctattctgcacacaggcctgactagcaggagccatcccacaccttttgcaggtgtctagggcaaagctgtcagcacaggtaccctcatgtcacttccaaattgggatcctggtgattcgttcagatttgacacaatttggtagatttcaaggtgtaaaatgtcctgaaacacaggtgctggggaaaagatgtgctttgttttagtcccaggcagcttttggctacattctcatgaaggaaataactcatgggaaagtagttaaatgggtttgcctcattcagaaagggagaggtgagaatatcttcttttagcaagttcagtaggcacagttgggacgcacaaagtaatgcttcacactgtaaacacagccctgagaagtacattgacttacttctaaattttaagcattctccaagactgagtttatgactgagttcttatgaaacagcaaattatattagatttactaaaaatcacttaacaaagagtagctgtggggaggagacagwcctactagtgaatgatctcaatattgatttctgtttgtgtttcctaatggaaaatagctgcaatgaaatgcaataaacattgatggagaaagatcattataactagagggtgttacggtaataaattggtgattatcctatgatatcaacagcagctgatagaaggtgggcaggcaaagagcaatggccagtggattacaactattagtgatcccagatggggtaccggcaagtttggaatcatcttaatctttcttggtgacctttctttactatgtggcttttgttatggaaatttggtgctttgacatagaagtatgaagacatttatatgatacacagaagtctgtactgtggtacagtgaataaaagagaatctagaggctgaagcatactctgaaggaagatggcaaaatgatgatataatgcatttgctactagggagagctatgcctcaggagaaatttctctccacgaataggcctctgttctttcttgctcatgtgctatagttcactctctcatggtggaacatgaggcagttcatctcatagttgatttcctcatctgtagaatggaaataaccacatttgcctaactcttagggtaattatgcagttcaggtgaggtaataggagaaaatgcctttgaaaaattatagagcctcctataaataacagggactgccttagtccttttggccactatgacaaaaatatcttagactaggtaatttataagcaatggtaatttattgctctcaattctggaggctcccaaagtccaagatcaagtctcccaaatattcagtgtctggtgagggcctgttcctcataaatggcaccttctctgtgtccccacatggctaagggcaagaaagctttcttggacctttcttataagggcagtaatccccttcatgagggagagtcctcttgacttaagtgcctcccaaagtccccaccttcctgataccatcaccttggtgattaggtttcaatatatgaattttggagagacacaaatattcagaccacagcagtgacctgagtttgaagatctgtaatgtgtacattaccttgaatgtgcccatctgaaatggggtgaggcaatatgagaatgggtgatggatgtttgtttccattctcagcccatagcaaagacaaagagtcatgaataacaacatgct

SEQ ID NO: 93701 - DNA, 549 bp, Homo sapiens
gccagggaaattgcatacatcatcctttttacagagaaaacagctcagagcggctagataactgaacccatgttcaccttgccagttacagcatcagaattgggataaggacccagagctaagtctttttcacaaaatcaatagatacatcccaatgactctgttgaatttgaaatactgaaatgggaaataaatatgaatgtaaactaaagatgtattgaaatacccattaaaatcccatkaatttgatctgaagtttagggattgcaggaaatagtgtaattaattcaacataaatcaacgatacaatataatgtgataggtttttaataaacatttattcagtttcaaatatacagttatatagtttgagcatccaaataggtgttactgcttctaaattatgattacttgcttcattgttgtttggaatagtcttagaggattttatctaaagccaacaacacatttaaaaaaatgtaccagtcttgatgaaaaattctcatcttttgaagatgacttatattttgatattggtgaaatgttgat

SEQ ID NO: 93702 - DNA, 685 bp, Homo sapiens
agggtgttttaaagacaagggtctttaatgtctattcatccccagcacttcctaggacctaaaatattctctccacaggatcaggggtttttgttcaccgttattactacaaagtcagtgcattccmttccaatagctataacttcacctattttttagtcatctcttattcatacccaaactttcagtttgaaattgccaagtgctagattgccaagaccatttttataaatttacgtataactattgtaccctcactttggccggtgttgggtactttagggagaatgagagagcagtttactaaagcaagtggtcattatgcttaggatctaggaccatatcaatccaacaagagaaaccaggtagctaaagctgatttctgtgtgtctgctgcagctctttgggaaaactagcaccttgatgtacactaagaaggtagcatgatgtccagtaatgatcagggtagaatcccaaattttcaaaataggtttatacagccatctatcaatttcatcctgagtgtgacccaggacaaggcagtgatagaggattccttactgtgaacatacattcagtatgtttatttccttggtggcttccattgcaatggcagatggtttctgcagagatcattttacaagagaggcataaaatgagtataatggtcatttgtaagtcaggg

SEQ ID NO: 93703 - DNA, 1184 bp, Homo sapiens
ttagtgagcatggtgttagttacatataaaagttaaaccatccattcctttagaaagtatgacaagtatgacatgatctatattatatgtcaagattctctgatagtggtttggccacgttttatgacttgcttcctcttatattttcaatatataagtcctatttgatactcagtgtgctgctggaagtggaatgtatgggtaaggaaaatatacttttaccctttttgtttttcactaaagcaaaattggtagttcatggagacagccctccaaatgaggttttcaaaatgcagaaataatattatttgccttatttacaacatattatgaagattaaaacctggataaaataatccacaagggtatctataattaaggaaaagccacacacatgtagtcccaaagctgctagttaaataaaaggaaggaaagggaaaggaaattaaatgaagaatgaaatactgaaacaaaagacagtccacatgggtctaaggaaaagagaaagattgcttgtaaaatgtgttagacatggtgatcaaggaagaaagtacctatagacagggcaataccctgagtggttaggatcatgaagggkaagtgctatagagatctgtgaggggattggcaagaagtagcactgagtggctggtataattaaataaaaagtaaagacaaaaatgctaaagtaattgtttagctagggaatcattttttaaacaaatctgatcatctggatcctttaattaaaacaactacaatactaacactacaatactaacaaccacaacaataaaaacctctgtcaattcctcgttgcaaaccactcattactctctggtctgtaatgcccgtgctgtgttaacaatacttacaaatatcctttgtgcatactggtttctttctgttaaagacctccaccttttgcacttggaaaacttctaatttcattcgtgatcgctttcacagaaaactcctcaaattccttcaatcaaagttaattgtttttgtccctttagtaaaagtttgagctgtttgagcactaaccatatggtactgtaatttttttggcgcttctccttcacccctcacggcaagctcctctaggccagagatcgtgaacacttcatgtttcattcttttattttgtaactcagtgcttagtgtatcacaagtaattgtta

SEQ ID NO: 93704 - DNA, 1184 bp, Homo sapiens
ttagtgagcatggtgttagttacatataaaagttaaaccatccattcctttagaaagtatgacaagtatgacatgatctatattatatgtcaagattctctgatagtggtttggccacgttttatgacttgcttcctcttatattttcaatatataagtcctatttgatactcagtgtgctgctggaagtggaatgtatgggtaaggaaaatatacttttaccctttttgtttttcactaaagcaaaattggtagttcatggagacagccctccaaatgaggttttcaaaatgcagaaataatattatttgccttatttacaacatattatgaagattaaaacctggataaaataatccacaagggtatctataattaaggaaaagccacacacatgtagtcccaaagctgctagttaaataaaaggaaggaaagggaaaggaaattaaatgaagaatgaaatactgaaacaaaagacagtccacatgggtctaaggaaaagagaaagattgcttgtaaaatgtgttagacatggtgatcaaggaagaaagtacctatagacagggcaataccctgagtggttaggatcatgaagggtaagtgctatagagatctgtgaggggattggcaagaagtagcactgagtggctggtataattaartaaaaagtaaagacaaaaatgctaaagtaattgtttagctagggaatcattttttaaacaaatctgatcatctggatcctttaattaaaacaactacaatactaacactacaatactaacaaccacaacaataaaaacctctgtcaattcctcgttgcaaaccactcattactctctggtctgtaatgcccgtgctgtgttaacaatacttacaaatatcctttgtgcatactggtttctttctgttaaagacctccaccttttgcacttggaaaacttctaatttcattcgtgatcgctttcacagaaaactcctcaaattccttcaatcaaagttaattgtttttgtccctttagtaaaagtttgagctgtttgagcactaaccatatggtactgtaatttttttggcgcttctccttcacccctcacggcaagctcctctaggccagagatcgtgaacacttcatgtttcattcttttattttgtaactcagtgcttagtgtatcacaagtaattgtta

SEQ ID NO: 93705 - DNA, 775 bp, Homo sapiens
atgaatggtttggtgccctccccgtggtaatgagttacccaagatctgcatgttaataagactctgagacctcccccaacccactgcagcctctctcatcatgtgacatacctgccaccccttcttttgccatgattgggagcttcctgaggcctcaccagaagcagctgctggcaccatgcttcttgtatagtctgcagaatcctgagccacataaatctcttttttaaatataaactacccagtctcaggtattyctttatatcattgtaaaatagactaacacaattttgttttacacctgctttctttcttttccaataacaatgtaacagagggcacaatacctagtaagaaggcatggctagtattttaaaattttgttttcttggaaggtgcatatggatagttcttctggtatatacatgggaggaaattttatattaatttgctttattgcaattttacctaaattcagtgtggacccatgaggacctactactactccaagatattctgaaataaaatttatttataggaaatttaactaataattttctatttgtaaaacaattaccctatcttgtaatcaactctcataatatatttacaagttattttctattttgcaaagaataaagatgtatttgttaaaatatggaaacttgaacatccaaaatagtccaaataaatgaagcttactacttgtagcctaaaggacaatcttttatcaaatatgtattagagtactggttttcagccaggggaacttttg

SEQ ID NO: 93706 - DNA, 639 bp, Homo sapiens
ttgagctgaatagaatttaattttgttgctactcattatgaaaggattaaaccttttattttcctatggaaaataagttgacaagtttattttaaagcatgacttttctcttttaattatccttgaaacttatttagcacctgaacatttgcttgcttgacagttcagaaaaaattaacatagcatctaaattgtgtaaaatctaacatcttttacatgttttaccatttaacccaragcttcaatgtctgggtggctattgacattaagtctaagaataggccaggcacagtgactcatgcctgaaatcccagcactttgggaggcctaggtgggcggataacaaggtcaggagatcgagaccatcctggctaacatggtgaaaccctgtctctactaaaaatattaaaaaattagccaggcgtggtggcaggcgcctgtagacccagctacttgggaggctgaggcaggagaatggcttgaacccgggaggcggagcttgcagtgagccgggatcgcgccactgcactccagcctgggtgacagagcgagactctgtctcaaaaaaaaaaaaaaaaaaaaaagagtctaggaataacggcaatattattctcattccatattaattttaatattgct

SEQ ID NO: 93707 - DNA, 1149 bp, Homo sapiens
catttctcttattctcattcttttaaaattttatagcatactgggttgaaaataaaactctaatcaaaatattttctctctctccggttgtgtatatgtccctgattttttgtttgctttatagtttcagcttttcatttcaggtcataaatttttgaactttttcytgtgtctgtgttagaagtcagacttttttctccccttagatgaagccagttttctcatcattaccattaatttgtccttgctccaccctgatcagtgatcttatacaaatctccatgcataccattctgttctaggctttctcttcagctccattatctgtatgtttcttcctttgtttatctaacactgtttttattccacagctatgcatcatgtctcctatctggaaggaaagttcttctgatttgttcttatttccagcttatgtgtctgttatttttttataaaacttcaaattcagtttgccaagatctctaaaataccttgctagatttggaatagatttgattgactaaataaattaaaatagacaaaattaacactttaaaattaataccatctgttaacatttgtcttttataagagttttaaatgtttctcaataaaggtcttgtgtcttccttctttgtttaattcataaatataacctacagtaggaatccaaactgttaaattatattttctaatgttcatggtatataaaaactgtgccaacataatttaatcttctgtccagcaagtttcctgtactggcttatttgaaacattttttgcgtcaggtctcttagaggcgtgagtggttatatcacttaaaagaataactctttgatcttcgtctttatattttggtatctctttattcttggaataactccaggacaatgatcatcagatcattttaaatctaatttgatagtactttatttagaattttcacatctattatagtaaatgggactatagccttatactatctttatccaatattcgaatgaaggtcataaaaccacatataatgtatatgagattatcttagcttgggtttccccaaaagcagagcttgagacaaggaggggatttaggtggcatgctgaagtgacctcagggtggggagagtgagagaagaggaagaaaagccaa

SEQ ID NO: 93708 - DNA, 1175 bp, Homo sapiens
taaaaggaaataaacacatcatgaaataaaaaaggaggcaatttctagtggcaagagaccttgtaaaatttctggaacagaaagtgtctggaagtatttgaaagatgaagtgttttgttagtttttttttgagacagggtctcatcctctcccaggctggagttcagtggtattatcatggctgactgtagcctctaccatttaggcttaaatgatcttcctgcctcagcctcccaagtaactgggactacaggagtgtgccaccacacccagctaattttttatttcattttaatcttttttgtagtgatgggccctcactttgttgcccaggctggtttcaaactcctggactcaagcaaccctcctgcctcagcctcccgaagtgctgggattacacatgtcagccaccgcaccaggtgagggatgaaattgactgtagtgatgagcagttatggtctgaattttccaggaagtasacagaccaagattaggcatgctggaagtttattagagaatgtgcttagcattgatacctgagaggggaagaaaagaaagcaagtttgggcacacagagaaactcgagttgcaatacaaatgcagcagaggcttcagctggccccagacaaaagtctgaagctgtcatggaccttcagatttgtctcgttttagggctagaggatgggcttttataaatatcaaccagtcattggcgtgggctgcctgggaaggaccctgatcttagacaagacagcttagagtagctgagtgcaggataaagtttaagggaattgctgaggtgcttccctttgagagatcaggatctctaacacttcagagtacagagttgtgggaaaaagaaacatattctccaggaagtttactaggagtgatggtagatgaagaattccctattttgactcctgagttcctagacctatgtagtctatctactgggtacaactccatatgataattgcagatatgggaattgtactgtttcctggcagaaagtgaatctcttcaaagggaattatctccaaggtggcaccccagctgtgccatcaatggctccatcattcccacaggccagcagcttctgatgggtgtggtttaggataggaccagtgaatgccttggtcatggggcaatttatgcttctgttcttgtcatga

SEQ ID NO: 93709 - DNA, 1175 bp, Homo sapiens
taaaaggaaataaacacatcatgaaataaaaaaggaggcaatttctagtggcaagagaccttgtaaaatttctggaacagaaagtgtctggaagtatttgaaagatgaagtgttttgttagtttttttttgagacagggtctcatcctctcccaggctggagttcagtggtattatcatggctgactgtagcctctaccatttaggcttaaatgatcttcctgcctcagcctcccaagtaactgggactacaggagtgtgccaccacacccagctaattttttatttcattttaatcttttttgtagtgatgggccctcactttgttgcccaggctggtttcaaactcctggactcaagcaaccctcctgcctcagcctcccgaagtgctgggattacacatgtcagccaccgcaccaggtgagggatgaaattgactgtagtgatgagcagttatggtctgaattttccaggaagtacacagaccaagattaggcatgctggaagtttattagagaatgtgcttagcattgatacctgagaggggaagaaaagaaagcaagtttgggcacacagagaaactcgagttgcaatacaaatgcagcagaggcttcagctggccccagacaaaagtctgaagctgtcatggaccttcagatttgtctcgttttagggctagaggatgggcttttataaatatcaaccagtcattggcgtgggctgcctgggaaggaccctgatcttagacaagacagcttagagtagctgagtgcaggataaagtttaagggaattgctgaggtgcttccctttgagagatcaggatctctaacacttcagagtacagagttgtgggaaaaagaaacatattctccaggaagkttactaggagtgatggtagatgaagaattccctattttgactcctgagttcctagacctatgtagtctatctactgggtacaactccatatgataattgcagatatgggaattgtactgtttcctggcagaaagtgaatctcttcaaagggaattatctccaaggtggcaccccagctgtgccatcaatggctccatcattcccacaggccagcagcttctgatgggtgtggtttaggataggaccagtgaatgccttggtcatggggcaatttatgcttctgttcttgtcatga

SEQ ID NO: 93710 - DNA, 742 bp, Homo sapiens
tatctacattggaaaatagtaatttccagacatatctctgcacactctcccattctgctactttttggcccctctttttaacttcttaggccaacagaacactgtcattttattgtttctctccaccactgtgtgcattttttattgcctcatttgcataaggttgattctccagtttttgatagagggaatggggactctgagttctcatatatctgaaaatgttgctgttttaccctcacacttgattgaaaggtgatctgcrtatgattcagtgatgaacagcagttgccccgagaattttgaaggcattactccactatctctagcatctaatgttactactgataatttaaatgatatttcaatggtattcatttatatggtcaattttgaagttgatttttgtataaaaattttccaacgtacacaaaagttgcacaaacagcagaaagaatttttcctgaactatctgagaataaattatcaacctaaagcctcaacaccctgactactttagtgtgtatttcctatgaacaaagacatttaacattctttcacgataatgaaatgcagccatcaaaatcagaagattaacactgatgcaatactatcacttaagtcttttaactctttaggccacctctttgaatcctattcaagtttgacccgttgttccaacaagacttatatttaaaagctccagttcagaatcaccccttgaaggtctctttagttttct

SEQ ID NO: 93711 - DNA, 713 bp, Homo sapiens
ttgaacccaggaggtggaggttgcaatgacctgagatcgcgccactgcactccagcctgggtgagagtgagaccctgtttcaaaaaaaaaaaaaaaaaaaaggccgggagtggtggatcacgcctgtaattccagcactttaggaggtcgaggtgggcggatcatgaggtcaggagttcgagaccagcctgaccaacatagtgaaacactgtctctactaaaaatataaaaattagcygggcgtggtggcgcacacctgtaatcccagctactcaggaggctgagacaggagaatcgcttgaacccgggaggcggaggttgcagtgagccgagattgtggcactgcactccagcctgggcgacagagcgagattccttctcaaaaaaaaaaaaaaaaaaaaaaaggaagttgggaaaaagtgggctaagtgggctgcgatttaaaggtttcagaaaaggctggtggtgcgagatgagatgctgcccactagtggctagaaggcagaactgtgagcctgcatgtaaggcaggccctgggacatggggtttgggacggtggtaattaagtttcttcgtacttgggtctgaaataagagaacaaagcctactgcctttgacccctgcctactgcatcagcgtgatcaactgaaactctctccctttctctctgtgctgcagccattttcgctgtctagagcctcagaagcttcctt

SEQ ID NO: 93712 - DNA, 713 bp, Homo sapiens
ttgaacccaggaggtggaggttgcaatgacctgagatcgcgccactgcactccagcctgggtgagagtgagaccctgtttcaaaaaaaaaaaaaaaaaaaaggccgggagtggtggatcacgcctgtaattccagcactttaggaggtcgaggtgggcggatcatgaggtcaggagttcgagaccagcctgaccaacatagtgaaacactgtctctactaaaaatataaaaattagccgggcgtggtggcgcacacctgtaatcccagctactcaggaggctgagacaggagaatcgcttgaacccgggaggcggaggttgcagtgagccgagattgtggcactgcactccagcctgggcgacagagcgagattccttctcaaaaaaaaaaaaaaaaaaaaaaaggaagttgggaaaaagtgggctaagtgggctgcgatttaaaggtttcagaaaaggctggtggtgcgagatgagatgctgcccactagtggctagaaggcagaactgtgagcctgcatgtaaggcaggccctgggacatggggtttgggacggtggtaattaagtttcttygtacttgggtctgaaataagagaacaaagcctactgcctttgacccctgcctactgcatcagcgtgatcaactgaaactctctccctttctctctgtgctgcagccattttcgctgtctagagcctcagaagcttcctt

SEQ ID NO: 93713 - DNA, 667 bp, Homo sapiens
tccatcgtgctatttcacgagccacagccataaaaagtctttatcctttactatgtacctttggggtcagacagtcgttatgggtcctggtgccctcagatcatcctgtctgcttccgtattgctcatttgaggctgtgagtaagcttttagcgcagaagcaagcatgccttgctccatggagcactttgactagyccccaggcccctgctaccctctctgggcaccgacctgggagggagaacaaggataaagccaagcgtggccccactttcccacaccatcagctgggagactcccttctcttggcactcttgggaaatgccaggctgaccagggatacacagcccctctgcctgaggcatattccacagaaaggcagagccaggctttgtaaagcgtgggcgtaggggttcagggaaaatccataagtgagtgtgtgcgagtggaaggcagagtaagcataggaacagaggggtctgctcaggtgggctgcctgccagggaagaatgccagcctaggatggctcaggcagtagacaggtagggaacatggctggtgacatcctgcagtagcagttccaagcctgggaggctggggagggagtacatggactgagcatgttcttggtattggtctttgcctctggctgggtcatttgcttgtgg

SEQ ID NO: 93714 - DNA, 667 bp, Homo sapiens
tccatcgtgctatttcacgagccacagccataaaaagtctttatcctttactatgtacctttggggtcagacagtcgttatgggtcctggtgccctcagatcatcctgtctgcttccgtattgctcatttgaggctgtgagtaagcttttagcgcagaagcaagcatgccttgctccatggagcactttgactagcccccaggcccctgctaccctctctgggcaccgacctgggagggagaacaaggataaagccaagcgtggccccactttcccacaccatcagctgggagactcccttctcttggcactcttgggaaatgccaggctgaccagggatacacagcccctctgcctgaggcatattccacagaaaggcagagccaggctttgtaaagcgtgggcgtaggggttcagggaaaatccataagtgagtgtgtgcgagtggaaggcagagtaagcataggaacagaggggtctgctcaggtgggctgcctgccagggaagaatgccagcctaggakggctcaggcagtagacaggtagggaacatggctggtgacatcctgcagtagcagttccaagcctgggaggctggggagggagtacatggactgagcatgttcttggtattggtctttgcctctggctgggtcatttgcttgtgg

SEQ ID NO: 93715 - DNA, 693 bp, Homo sapiens
tgagcgcctactctgtgttagaaccatgtaggtcttgggactccaagtaggaatccggtttggcacaggcccatgggagcttgtggataaggcagacaggagagcagagaagggcgaggaagtggcacggttcctgggagggccatccactgggggactgctgcagcaaacggagagaccaggggtcaaagaggagagtgctgtcgggagagcatcctagaagatgtaacacctgggggggtgaagggctttctttttttcttttttctttatttctttctttyttttttttttttttttttgagatggagtcttactgtgtcacccaggctggagtgcaatggtgtggtctcagctcactgcaacctccacctcccgggttcaagccattctcccgtctcagcctcccgaatagctgggactacaggcacatgccaccacaccctgctaatttttgtatttttagtagagacagggtttcactatgttgatcacgctggtctcaaactcctgacctcgtgatccacccgcctcggcctcccaaagtgctgggattacaggtataagtgaagaagggctttctacatggaaggagcagtgggcaaaggcatgcagaggtgaaatctcttggagtactctggctgctgtgagacagtcacatgcttggagtctagactttgagaaacagggctg

SEQ ID NO: 93716 - DNA, 1501 bp, Homo sapiens
gatttaggggttctccagtccggctgtgctcactgtgtggtcgacagataagttttatttcttcctccgctgcctttgccctgtcccttcctctcatcgaaacaagcagatcagatctgtggggaggcaggaagcagaagccgcccgcatgtgcctttggcttcattttccataagcctaggttcttgggggcttctgggcatagacacagtgtcttggccagaagaaaggggaacatggaaacttctttccccagaaaataaaagggcccctggctttaatgtgcatgtaaaaggagttgagctggaggagaatgagagccctgagagagggaatcggggagcctgcccctggcagagtgccaggcagccagcatgtttccagagaggawagttcctgcagaaagttcttgtcccctacatgtagcctaggaaatgtcagagggctgctcggccagaaggggcctggtgggatggagggtgtgccccacagcagcatcagccaggagccatgtacgtcccctccccacagacaccctccatccccgttggagctgccactgcataaacctgcctcaagctgctgggtggccccccacgggtaccaaggactgagatggagtatttcacgatcctggtgaaatgagcacttggatccagaaattagagaagtgaaatgataggataaagttgtgtttctgtcactactgagctgatggactgccttgaatacctgagacataaaaggagaaaactgaggctcaggaagggctgcgtagcccaaggccgccccgttagcatggagaggaggcagagccaggcctgcaaccaagtttgtgagactccaactccagcactgcctaccttaaaaatgaggaggtctccatcctggctaacatggtgaaaccccgtctctactaaaaaatacaaaaaattagccaggcgtggtggcgggcgcctgtagtcccagctacttgggaggctaagccggagaatggcgtgaatccaggaggcggagctcgaagtgagccaagattgtgccactgcactctagcctgggcgacagagtgagactccatctcaaaaaaaaaaaaaaaaaaaaaaaatgaggagcccaggccggtgaggtggctcactcctgtaatcccagcactttgggaggccaagggaggaagattacctgaggtcaggagttcgaggccaagaccagcctggtcaacatggtgaagccccttctctactaaaaatacaaaaattagccgggtttggtggcgggcacctgtaatcccagctactcgggaggctgagacaggagaatcacttgaaccctggagacagagattgcagtgagccgagattgcaccattgcacaccagcctggcgacaagagggagactctgtcacaaaaaaaaaaaaaaaaaaaaaaagaggagcccaaatgttcaccaagagagactgtcaactaaataaatattggggggtgggggcagagaaagaatcac

SEQ ID NO: 93717 - DNA, 656 bp, Homo sapiens
ctgtgcagtttggcaacaacactgacccaggaggctgaattcaaccatatgtagtggagcatggctgcaatatgcttgtgtgggaaagttaaggcaagctgcccccattccttctcattttagaggaatgagttagctggcagttatttatttgtaaataatcaaaaaccaaaaaagccagacaagctgcagagggtgctccacatggaaactgtgctcctgagccatgactttaaacagtgcgcaaacttccacagagacagatgtttctatcttttattgaggtgaaatccacataacatacaattagcagttttagagtgtacaattcagtggtatttagtgtattcccaatgttgtgcagccaccaccactctctattttcaagtcttttttgtaactccagaagtacaccctatgattctctggcaatcattaatctattctgtctctatggatttacctattctgaatatcttatataaaataagtcataaaacatgggattccgtgtctggcttctttcacttagcataatgtctttaagggacatgcaggttgtagcatgtatcagtactccattcctttttatggctgagtaatattccattgtccrtatatactatggcttgtttatacagtcatggacatttggg

SEQ ID NO: 93718 - DNA, 1195 bp, Homo sapiens
gaagaacagacaagtaaacagaaccttctagcacagcggcttcttaccagtgcgagccccctgctcctgtgtttgagaaacaatgggcatgtcctctctgcccaagagctcttgtcagaattgtttaaaaaaagaaaagatagaggtggtcagagggaagaacaattgacagcttctctaatctgattttgattgttgctctgtttaaaaaataatactagcctaaatcctcacgccttgactcaggtttctgcaaatgcaagtaggaaattcacatgtgtcagtggaagttcaaacacattgcaccgactcatggagagttattatgttttgttacacagttactgaggccagttttcgccctgacacatgtacttagtgataagagagaggctgtgtgagccgaggttgctctgggagggcagtggacagtgtctgaccccacagcaagccccacacagttttgtgtcatttggttgctgtttctccctttgcagcaaggtttcgataggaacatgctgggaaccttagctggggccaacagcctcaggaacttcacctcccgattctaagaagagactgtccaagcaagttaggcttgcaggtaagaatcaccccaccctcagggatgcctctgggaccactgcaacagcctcagccagtctcagagacaagggctaggcctgtgctcccagggacacagaagcatccttttgcctggctctggacaacacaagcagttgtgtagactgcttggctgggggcgtagtttgtcccaccctcaggacgttaggggtgtataatgtcctgggagtttcagaggggtcagagggtctgggcaggactgctaggtacaaatgtgtgggttgtacactgaacaacacaggtggtgcccttcacatggactacagtgagttctacaatatggataactggagttctagaatatgtcattctggrcttggccatacacagctcacttttttatccttttataattcactttccactctctgcacatgcccagtgtggacaagtttatttccagctgatgattctaggcccccaaaactcagaaccaatcctatgatgaaggcttgccaacctcagtgttcattggaattatatgggttgcttgctaaaatgcacacacttggcccagccccagctattctgactcaatagccctggagtg

SEQ ID NO: 93719 - DNA, 1195 bp, Homo sapiens
gaagaacagacaagtaaacagaaccttctagcacagcggcttcttaccagtgcgagccccctgctcctgtgtttgagaaacaatgggcatgtcctctctgcccaagagctcttgtcagaattgtttaaaaaaagaaaagatagaggtggtcagagggaagaacaattgacagcttctctaatctgattttgattgttgctctgtttaaaaaataatactagcctaaatcctcacgccttgactcaggtttctgcaaatgcaagtaggaaattcacatgtgtcagtggaagttcaaacacattgcaccgactcatggagagttattatgttttgttacacagttactgaggccagttttcgccctgacacatgtacttagtgataagagagaggctgtgtgagccgaggttgctctgggagggcagtggacagtgtctgaccccacagcaagccccacacagttttgtgtcatttggttgctgtttctccctttgcagcaaggtttcgataggaacatgctgggaaccttagctggggccaacagcctcaggaacttcacctcccgattctaagaagagactgtccaagcaagttaggcttgcaggtaagaatcaccccaccctcagggatgcctctgggaccactgcaacagcctcagccagtctcagagacaagggctaggcctgtgctcccagggacacagaagcatccttttgcctggctctggacaacacaagcagttgtgtagactgcttggctgggggcgtagtttgtcccaccctcaggacgttaggggtgtataatgtcctgggagtttcagaggggtcagagggtctgggcaggactgctaggtacaaatgtgtgggttgtacactgaacaacacaggtggtgcccttcacatggactacagtgagttctacaatatggataactggagttctagaatatgtcattctgggcttggccatacacagctcacttttttatccttttataattcactttccactctctgcacatgcccagtgtggacaagtttatttccagctgatgattctaggcccccaaaactcagaaccaatcctatgaygaaggcttgccaacctcagtgttcattggaattatatgggttgcttgctaaaatgcacacacttggcccagccccagctattctgactcaatagccctggagtg

SEQ ID NO: 93720 - DNA, 738 bp, Homo sapiens
aagcatagtgctggcatctgcttctaacaagggcctcagaaagcttacaatcatggtggaaggcgaaggggtgtcagtgtgtcacatggcgagagcagggaccagagagggaagagagagatcacagggtcttttaaacaaccagatcttatatgaccaaactgagcgaactcactcatcacttaggggatggcactaaatcactcatgggggatctgcccccattatccaaacatctcccaccaggccccacctccaacattgggaaccatatttcaacatgagattttgaagtgacaaacatccaaaccatttcagggaatcatttcaaaggrgagttgaaagaggccgaacctgactggaaattcatagtattacctaagtccatcagccaacttgcaaagattcctagggagcctaagtgtggccaggtagggagaaaggagacaaacagaatgcacccctcacactgtatttgaataaatagtgagactgaaaagtactaaaatataaaagaaaattatctaaagcatgcaaaagatttatgtcaaaaaattttaaagattaatcacaggaaaatttagaaaactttagacagtaactgcattaaacttttaagtaaattgaagaaaagagaattaatgaaaaatagttggaaaaaaacatactaaatctaagaaagaatttaaggaaactcaaaaagcatcacagaattttcaatggcattagaaaaagtaa

SEQ ID NO: 93721 - DNA, 608 bp, Homo sapiens
ccacctccgtccccacccccacccagcatcttcatcattctgggctctccattctctctcctcttttctccttgttgaaatatgtttccaatcttccaggcctctcaaacgcatcggtgtttcctgcttcagtagtcccggtggagtcactcattctttatttaatgtattccacactttaaatgggcctgttaattactccctcctcactctgaatttactaatttattgatcaaatttctttttgtgcatgtgagttttattttgtatgtgcaaagaatttatttggatcaattttattgaccccctcccacccccacttcctgggatattttcccaaactttaattaagtctctgggaagtctccttgcttaaaagggagcttcttgcttcctcctttgtgatagcatcaacgctccaggctaaggtcggtctaaccacattctcaagcagggggataatttaaagggcaactcgggggaagaactagggcaggggttctcaaaagtatgctcctcagaacatcagccctggtgtcacctgggaacttgttagaaatgcagattctcagactctacccctrtctactgaattggaaagtggagtg

SEQ ID NO: 93722 - DNA, 530 bp, Homo sapiens
catagcaacttctatatttacatatcaacaatctatttaatgaggaacatcaaaaatagcagatcaagtaagtccagaagctgcaaacagaacgcatcctgccaaaattccaaacaccaatagcagttgagcaagcctgcacctgtgtttaaatattggcacaaatacaatgttgctttaaagcaaaacaaagcaaaacaaatctcctggcttgccytcttcaaactagaagaactgtatgctgatcacatgggatgtggtccttatctgcaaatctcagctatgctagtgaactcagttctcttctgaagtactgtcctggtcctgtcagtgagtcaattagtcatcagtgaacaagtacccactgtgagctgaacacagaaataaacattattgaggggcaacaaaagaaacaagacccaatttctgtccttgaagagtgaggacctggttgcttacatagaacacacattttaaaataataataataacccttaaaaatgcttacaaagaaacatcaagcagtgcca

SEQ ID NO: 93723 - DNA, 2042 bp, Homo sapiens
cccccctccccccaaccttggctctagactgttactcccagctttaggaaattttactttttttttttttccttgagatggagtctcgctgtttcgcccaggctggagtgcggtggtgcaaacttggctcactgcaagcgccgcctcccgggttcatgccattctcctgcctcagcctcctgagtagctgggactacaggtgcccgccaccactcccggctactttttttgttcttttttttagtagagacagggtttcaccgtgttagccaggatggtctccatctcctgacctcgtgatccacccacctcggcctctcaaagtgctgggattacaggtgtgagccaccgtgcctggccgaaattttcacattgatgactattttaaaatcaaactattttgctggtttaaaaaattagccgggcatggtggtgcatgcctgtaatcccagctactcaggagtctgaggcagaagaattgcttgaacccaggagacggaggttgcctcccacaggtgggatccacgttgctgcactttctacctgactcacagatacaaatggctccgggagagagatgctggctgctgttgtgctggtaataccctaaggcaagaagtgtaatatgctgtcacttcctctttttcactcaccctcctcggactccatattgtatttgatatttgtttcccccttcaaggatgcccttaaaattcatttgtgtttgcattcacctagatacaaagactggtggtggtggtgtgtgtgtgtgcacacatgcacatgtatgttggaagaatgatgtggagtttgagcagattgttttcattactgtgggcatttctcaagcatgcccatgaactttacccctggatgatagtgccctggtatgagctgaagggtaaagttagaatcagcataattcaggcttcacagggcgggcttgggaagaaacaatgatcacaaatgaagagactgagcacaactaagaacactacccagtaattttagagctggtcaccaacactatagtgatgcataagaagcaggagacatggtccatgccctcacaaaccatctggtataattgctaagacacagcacacaacggaaataacatcaggtagcaggatcagcagacatattccatgtagctccacaggaaacattgggaggcagatggagattaggtaaaaggatgggcttttaattattagatctgttcaacagtggaagaggctgcctcgtggggtgctgagcttcctcccagtagaggtgttccaaggtgggatgcctctttatctgggatgctgcagtctaaatggagtttagactgcatggcctgctccctcttagagtctgagactttgcagctttatgccttttaactgacctcacattttgagaggtatgtaagccacacgtggtgacagcaaaggctcgaccaacaggttggaagtgcttactagactaagaattcatcctcgggctgtgcatcgggatctgtgtctgactaggaagaaagcctgctaaagacttcactgacttgactgcttcagggctgctctgggaaagtggtttcagacgtctctcttcataggcaggtgtcagccaaatgtgtggcaagtcacctcaccctgggaggcgcttttatgcctaaagcctggggaagcactagaactaaaacaccgcctgagggaatctgctgcaggtttggctctgcaaactttcccatccagctaatgaggaaggcctgattgaaaatggcagcgggaaattaaaaaacagaggaagcagctttaaacatagcaacctctcaccygcttcactaaggctaagctgggtcctaatatacctgtgaggaaaatgaggctcagagatatttgaagacacctgctttaaggttttctgaattgcactgtgggcttggtactagagttatgttccccaggcttggaaagagtcttcttaatggtctcaggggaccacggctctaatgaaagcaaaaatcaccttccagcccttcacaaatccagagtgaa

SEQ ID NO: 93724 - DNA, 891 bp, Homo sapiens
ctctccctctctttctatctctcgtgtgtccccctgtgtttatcttattgactttcaaattcaaaaacaacaaacatttactgggcacttgctttaggccagtcactctgctaggtgttttatttatttagcaaacacttaggtagcatttacaatatgctagaaattgctctaagtacatttcaaacattaaatcaattctcctgatttaatcgcttgaggtagttgctgctgctattttcatttttacagataaactgaggggcagagaggtttaagaaacttgctcagtgtcacttagcaaataagtagtggaactgggattccatcccagggacctggcttcacctcctgtgctcctaaccactgtgtcttactgccgctgtgcctgtagagcrttataacattcacatcagaacatgtgaatgttggggtatttttgtacttaggaaaagagggactccaagaaatgatgacttgtccaaggtcacacagcagcgaagaaatggcagaataataaatccgagcctaggtcttttgtttcaagttcagggctaattcctctccacaggctggctcatgtcttctggcatagtcccgtatctaagagggaagttgtgtggggagaagcaggttctgctgaagttaaggtgcagccccagaggctccacttccagagtggaactgcactgctcaagctagtgagatgagggagaaggggtggttcaggcaggtggcagctggggtgatgccagcccaggagctctgtgtgctgaaatttgctggtgggcacagagaactcctgttcaagctctctccaccctgctgggagggcagaggagaagacagcctgaagtctgagaaagggaatccatctggaaacccatttga

SEQ ID NO: 93725 - DNA, 891 bp, Homo sapiens
ctctccctctctttctatctctcgtgtgtccccctgtgtttatcttattgactttcaaattcaaaaacaacaaacatttactgggcacttgctttaggccagtcactctgctaggtgttttatttatttagcaaacacttaggtagcatttacaatatgctagaaattgctctaagtacatttcaaacattaaatcaattctcctgatttaatcgcttgaggtagttgctgctgctattttcatttttacagataaactgaggggcagagaggtttaagaaacttgctcagtgtcacttagcaaataagtagtggaactgggattccatcccagggacctggcttcacctcctgtgctcctaaccactgtgtcttactgccgctgtgcctgtagagcattataacattcacatcagaacatgtgaatgttggggtatttttgtacttaggaaaagagggactccaagaaatgatgacttgtccaaggtcacacagcagcgaagaaatggcagaataataaatccgagcctaggtcttttgtttcaagttcagggctaattcctctccacaggctggctcatgtcttctggcatagtcccgtatctaagagggaagttgtgtggggagaagcaggttctgctgaagttaaggtgcagccccagaggctccacttccagagtggaactgcactgctcaagctagtgagatgagggagaaggggtggttcaggcaggtggcagctggggtgatgycagcccaggagctctgtgtgctgaaatttgctggtgggcacagagaactcctgttcaagctctctccaccctgctgggagggcagaggagaagacagcctgaagtctgagaaagggaatccatctggaaacccatttga

SEQ ID NO: 93726 - DNA, 1309 bp, Homo sapiens
aacataatcctttgttaatggatgattttaaaaaaacattttagattagcaggtacatgggcatgtttgctacatggctgtgttgyataatggtggggattgggcttctagtgtacccaacacccaaatataacgtaatcattcttacagctgtatattattttactctattaactgcaacaaaatttttttaaaaagtccattgttggttatttctaaaataaacatggaagttaaaacctgtacatatatttttatatatttgactgattatttcctctaggtatagtcctgtttgctgaactgataagtgaggtagtatttacatttaaatttctgaaaaatgttgccaggtcgccctcctgaaaggttgaaccaatttacacttcttgagtcacgtgtgatctctcccacccctgccactggccctgggcactatcagactttaaaatctttaccaacctatttggtggaaagtggtatctagttgttttaatttgtgtgagttgattatatgtaagctgtacctgtttccctacgtttataggtcatatatactgcttctttagtgaactgagatgtaagcagcatggtagatttgaaacatcacgggatccacattcagccctatttggactatgagatcccacattcctgaacagaggtgactgcattaggagtaagcacttgatacagactgaggtaagcagtttcccttttccaagaatttggagttgcgaccaaggcaaaggtgtcagtccttggaatgacctagaactgcaatatgtcaatttaggagctgagaggaaaatgcatttcatcattggacataagaaatgcaaacatctgacttggggagggaatgttaaaggaaaaatggtaaggcatactattcagggccatcactataagtgtagggaccactgcagggggttctgcagttggggagagagattgggctcaactgagaattcaacaaggaaaagtggggatttatagccaaagaaaagggtagagggtcagtggatggaaacttactaagaggaaacatcaggggtaaggaggcattcttgctgaactgacttaacaggattcttgctgaagacaggtcagggtgctcacacatcacctagtgggtggtgggggatgaggagcctgttcagatatagagggtgggggattctggttaaaatgacttagcaggactcttgctaaaattggacaatgcagagataaacacagaagcctaaaatcagggcttagttgagaagagagttcagggaagtctgagtagagtttggtcaaggag

SEQ ID NO: 93727 - DNA, 649 bp, Homo sapiens
attgagtctgtgaggtggaggttgcagtgagctcagatggtgcctctgcactccagccaggggacaaagtgaaactccgttttttttttttttwaaaaaaagtcccaaatctcattgtctaaattaggtatgggtgagattctgggtacaaaccatcctggggcacggccgggtgcggtggctcacgcctgtaatcccagtactttgggaggccgaggcaggcatattacaaggtcaggagatcgagatcatcctggctaacgcggtgaaaccccgtctctactaaaaattaaaaaaaaattagccgggcgtggtggcgggtacctgtagtcccagctactcgggaggctgaggtaggagaatggcgtgaacctgggaggcagagcttgcagcgagcggagatcatgccactgcactccagcctgggcaacagagcgagactccatctcaaaaaaaaaaaaaaaagaacaaaccatccctgggcaggattcttctccatccatgactgtgaaactaggatacaagtccattgtacctcccgtctcctcctctcttgccatgtctggctcaagtatctcaattcctgttgcataaactttctcaaactgacacctgggatgaactgaatgctaaaatggcttaaggagag

SEQ ID NO: 93728 - DNA, 649 bp, Homo sapiens
attgagtctgtgaggtggaggttgcagtgagctcagatggtgcctctgcactccagccaggggacaaagtgaaactccgtttttttttttttttaaaaaaagtcccaaatctcattgtctaaattaggtatgggtgagattctgggtacaaaccatcctggggcacggccgggtgcggtggctcacgcctgtaatcccagtactttgggaggccgaggcaggcatattacaaggtcaggagatcgagatcatcctggctaacgcggtgaaaccccgtctctactaaaaattaaaaaaaaattagccgggcgtgktggcgggtacctgtagtcccagctactcgggaggctgaggtaggagaatggcgtgaacctgggaggcagagcttgcagcgagcggagatcatgccactgcactccagcctgggcaacagagcgagactccatctcaaaaaaaaaaaaaaaagaacaaaccatccctgggcaggattcttctccatccatgactgtgaaactaggatacaagtccattgtacctcccgtctcctcctctcttgccatgtctggctcaagtatctcaattcctgttgcataaactttctcaaactgacacctgggatgaactgaatgctaaaatggcttaaggagag

SEQ ID NO: 93729 - DNA, 2513 bp, Homo sapiens
  misc_feature (1)...(2513): n = A,T,C or G
catgtgtttgtacgtgtgtgcacgtgtgtgtgtgtgcatgtgcgtgtgcctgtgcatgtgtgtgtgaaagctggcttaaaaatcaaagttcacaaatgtgggccccagctaacaagtctgacatcaagggtctgattgctggaggttcattagtgcctcttactgaatggggttgggcagcgggcttgttttccatgggcacgagagagttaagaaagaaactgccaacaagtttttcagccaaccagattataatcagctggctccacctgaacctggtgcccatacagtcatttcagttaacacctggaagtctccagaagttggtgggaagcagatgaaaagattcagagttggggaaaacatgttaaggggctgggccttgagctcacaaatagacttgggttgcagccctgtgagatgaagaaaacccatgtgtgatgaaatacaggagtgcgccctggaggtataactcacactgacaaatatagacattctatggcctacagatcctcctaaccaggggagaaggcagggacctttccaggcatcttggatgtttctgcgtctcagggaagtttctctggtggccccccttagggatccctctgcgctcttgtcttccttccttccctttgctgtctcctggcctcccttcaggcacatatttactcagtacaagttttcctgcccagcacaagatgccctcttgctccctctccacgccctgttaaaacccacccccagaaatggatctaatgtcagccatttcttcctggctcatctcgagcccagtcacatccagtcagaagaggtgtctatctaacataacatgctcctaggacggtgacaagggggtgttnnnnnnnnnnnnnnnnnnnnnnnnnnnnnnnnnnnnnnnnnnnnnnnnnnnnnnnnnnnnnnnnnnnnnnnnnnnnnnnnnnnnnnnnnnnnnnnnnnnnaacaccactgtgaacacaggtcagccctcaggggatgctttgcaacccaaggaatgcccagcattgctgcagcatcaggagcccagagagaggcccagcacagaggatccctcagggcctctggaaggaacagaccagcaaacacctggatcaagacttctggcctcaagaacagtgagaggatacattaccattactttaagccacacagtttgaggtgatttgttacggcagccttaggggttagaactgtgaataaatgttagtagctcttattaaattatctatactataaaatgaaacaatactgctagacactagttagggaagttatcggtggtatttaatgtatcttacattggtagtagtggggaccccacaattatttcccacttctcattccttattcgatggagacatttcaggattttcctctccatcccttccagtgagatgcctgtgtcattattttcctttgtggcccataatgccaagggggaggtgtttttctcctgggtctgcttgatgtggagcaacccccctggggtcccccactccccacacacaaggccgcacgcccgaagagcaggatggttttcaggtctgggttaaccctgccccttggattgctctcaaatcctcgctggaaattgacaccacatctttgttgtgtactttatctccatttctcttcccaaaccccagtctcctcttttctgtctgtcctgaacagcgctggccaggagggaacatgggtcagaagggcaggcagggaggagctggtacaaatcacggcaccaagaccctggtttttggtgtactgatgcaaattctgccaaagagttttcaccagtctgcctgggggcctaaaaacatcttcatcagggccttaaaccagagcctttcattggtccagaatcccaataggagaggtgccaacatgcatacacactcaggaaatgatcaaaaagataagtctacccagaatgaaaattaatacaatcactccagaaaactatttagcaatcatctcctaaagctaaacatacacattatctaagattcaatgatccaacatacatgcacacagaaatgcatacaccatgttcagcaaaagacacgtgtatgttcacggtggcaccattttcatagcccccgatgtggaaacaacctaagcgttcttctagagtagaatgaataaatgctgtgatgtgtccacagtgaaaaactgtgcgtcaatgagaatgaacatatgcaacagcctagataaatgccaaaacrtaatctaaagcaaaaggaggtcgacacaaaaaggtacatataacacggttccacttacgtaacattcaaaaacagcacaaatgggacgatggcattaaaagtttgtgtgaaagctaccactggaggtggagtggctggggccgggagggagcttggaggatgctggtcatgcctgtttcttgatcccagtgctgctggcgtaagtgtgcttcctttgggaagatccatccccgtgttcaactgtgggttgtgcatgtctagcaatattca

SEQ ID NO: 93730 - DNA, 2513 bp, Homo sapiens
  misc_feature (1)...(2513): n = A,T,C or G
catgtgtttgtacgtgtgtgcacgtgtgtgtgtgtgcatgtgcgtgtgcctgtgcatgtgtgtgtgaaagctggcttaaaaatcaaagttcacaaatgtgggccccagctaacaagtctgacatcaagggtctgattgctggaggttcattagtgcctcttactgaatggggttgggcagcgggcttgttttccatgggcacgagagagttaagaaagaaactgccaacaagtttttcagccaaccagattataatcagctggctccacctgaacctggtgcccatacagtcatttcagttaacacctggaagtctccagaagttggtgggaagcagatgaaaagattcagagttggggaaaacatgttaaggggctgggccttgagctcacaaatagacttgggttgcagccctgtgagatgaagaaaacccatgtgtgatgaaatacaggagtgcgccctggaggtataactcacactgacaaatatagacattctatggcctacagatcctcctaaccaggggagaaggcagggacctttccaggcatcttggatgtttctgcgtctcagggaagtttctctggtggccccccttagggatccctctgcgctcttgtcttccttccttccctttgctgtctcctggcctcccttcaggcacatatttactcagtacaagttttcctgcccagcacaagatgccctcttgctccctctccacgccctgttaaaacccacccccagaaatggatctaatgtcagccatttcttcctggctcatctcgagcccagtcacatccagtcagaagaggtgtctatctaacataacatgctcctaggacggtgacaagggggtgttnnnnnnnnnnnnnnnnnnnnnnnnnnnnnnnnnnnnnnnnnnnnnnnnnnnnnnnnnnnnnnnnnnnnnnnnnnnnnnnnnnnnnnnnnnnnnnnnnnnnaacaccactgtgaacacaggtcagccctcaggggatgctttgcaacccaaggaatgcccagcattgctgcagcatcaggagcccagagagaggcccagcacagaggatccctcagggcctctggaaggaacagaccagcaaacacctggatcaagacttctggcctcaagaacagtgagaggatacattaccattactttaagccacacagtttgaggtgatttgttacggcagccttaggggttagaactgtgaataaatgttagtagctcttattaaattatctatactataaaatgaaacaatactgctagacactagttagggaagttatcggtggtatttaatgtatcttacattggtagtagtggggaccccacaattatttcccacttctcattccttattcgatggagacatttcaggattttcctctccatcccttccagtgagatgcctgtgtcattattttcctttgtggcccataatgccaagggggaggtgtttttctcctgggtctgcttgatgtggagcaacccccctggggtcccccactccccacacacaaggccgcacgcccgaagagcaggatggttttcaggtctgggttaaccctgccccttggattgctctcaaatcctcgctggaaattgacaccacatctttgttgtgtactttatctccatttctcttcccaaaccccagtctcctcttttctgtctgtcctgaacagcgctggccaggagggaacatgggtcagaagggcaggcagggaggagctggtacaaatcacggcaccaagaccctggtttttggtgtactgatgcaaattctgccaaagagttttcaccagtctgcctgggggcctaaaaacatcttcatcagggccttaaaccagagcctttcattggtccagaatcccaataggagaggtgccaacatgcatacacactcaggaaatgatcaaaaagataagtctacccagaatgaaaattaatacaatcactccagaaaactatttagcaatcatctcctaaagctaaacatacacattatctaagattcaatgatccaacatacatgcacacagaaatgcatacaccatgttcagcaaaagacacgtgtatgttcacggtggcaccattttcatagcccccgatgtggaaacaacctaagcgttcttctagagtagaatgaataaatgctgtgatgtgtccacagtgaaaaactgtgcgtcaatgagaatgaacatatgcaacagcctagataaatgccaaaacataatctaaagcaaaaggaggtcgacacaaaaaggtacatataacacggttccacttacrtaacattcaaaaacagcacaaatgggacgatggcattaaaagtttgtgtgaaagctaccactggaggtggagtggctggggccgggagggagcttggaggatgctggtcatgcctgtttcttgatcccagtgctgctggcgtaagtgtgcttcctttgggaagatccatccccgtgttcaactgtgggttgtgcatgtctagcaatattca

SEQ ID NO: 93731 - DNA, 852 bp, Homo sapiens
gcttcccttccctaaggatgaatagaaatctttagtaacttcatttggatagaaacaatatgtaaatgatatgtaaaagcaaatttctcaaaatttatgagggctgtattgcataattctatacaaacagtctggtgtgtgggatcctatttccctgaaaagatgaaaagataagctatcctatggtgaaaaattgaaggctgtatgaattgcaagggggggaaattatagttgaaatgctattatgaatctttttgaccagacctgccgaatataatattaaaatttaaacacactgtctcaaacattgctcaagaacttcacgaaaccccttcatgtggtcatgccctgttctcatggctgagtgcgcgctctgatgaatgttcccagaggacagggacaaagtragtgtctcagctctctctgcatgatccttttaggaactcttctcacaggccccaagagcagaaatgtaacaaacatttattggccaaaaggcactcagttcgtgactaccacttgataaaatgttcgtctgtgcattaaagcttgccttcagtaccaaagagcgaatgaagctccacaaggtcttcatctaataagcaccccgggaagacctggcctcaggagagtctgactgcatggagtaagagggctatgcccaggcagtgccaacagcagagggctaggagccggtggcgagaggagcaacagaggaggtcagggtggagtgaggagggctaccaagaactctgagcacctgggggcagcccagaactggaagagcaggggaagtgaggctggggaggtggaatcataaaacagaaagggttgaaagccccttagactggc

SEQ ID NO: 93732 - DNA, 717 bp, Homo sapiens
tgccaagagatgtgatggacttctcttcatgagcccagagaaacttgggttccagcmtatgctccggtgaggacccagcactcagcatatagtgccactgatgtcagtctggcatcatgcgccagggcctgcaccagctgctgggcacacagtggtatatgacagagtccctgctctcctagagcatggggtccagttggggagacagacacacaaccaatcatgatttgctgtctgctaagataccgccatgcacagggggctacatacaggtgttcagagaaggaatcccaaaccagaggattggaggagaatagatgcctcatgaatctcaaaagactggcagaggctaaccaagcaaagagagtggaaagagcactgaggcatggggatggcaggtgtgggcaaaggtgcagcacatgtgaggaggagtgtctcagtctgctctggctgtgtaacaaagcactgcagactggggggtggtaaaccatagagatgtaccatcttacagttctagaggttggaagtccaaaatcaaggtgttggcaggcttggttcctcctgaggcctctctccttggcttgtagggagacagcactctgccatcttgctgagtcctcacatggtcttccctctgtgcatgtccgtgtcctcatctcctcttcttataaggacactggtcatattagtctagggcccaccctcattacctcattt

SEQ ID NO: 93733 - DNA, 1425 bp, Homo sapiens
ttgtcatatgttgcccacttgaagaaaacttaatagcattgaatctgattttcccctatcaagccagttagtcatattctgaattaatcaggctacacagtggagaaaatttttttccaagctttacaagaagttgtaccatttattatcaaaattctcattttattaaatgaaaaaacatgacatattggcttttcacttctgaaatcatgtatctatgtttatctgtatagacatccacatactcagtatatgtatatacatacactctacagtttatgtaaataaattatgtatttcacatatatgtctatatacaatataaaataaaatttatatactacacatttttacaaataattatacatttacatatgtattaattttatatgttaatatatatgtgtatatatatgtctgtcacgatgtttattgttagaaatatattctgtgatgtgttttgggtgtggtttttgtcatttgcgtgttcagtcttctattggtgctttgcttttaggtccctttcaacagttagtggtatgctgcccccaggtgttggcaagtactttgattcacatgatctcctggtctgaatttacaaagcctgttttaactaaggtctrgattatgactttcacagaattccttttgtagttaaaaaacatcttttattaaaatagatgaacagaacaacgtatatacaggaagctggctaatttctatcctgcgaactctttaagaaacaagtatctttgaataatgtggtacctttctattaatcttttactgttgtccatccctagatttatcatagtactttgattagaatggtctcttctgatttactctgacagcctctggtggtcaagtagttgcctggattccaacgtggttcatggtactattatgaaggggtcattatctacatggctttagatgtcaggccagtttgctgttaaaatggttcctttcctcttggattctcagacttggatgatggtgatgcatttattttacctagagaagtaatattattgaagagatggaaggagtttttacttttctcctgctctaactctcccaaagttcctcttgtggtatggaagcaggatagaaaaaaagagagtcaacttcaaattttcttcttcatccacctatgactgaatttcagatgagaatatttttctagtttacactattagaaatagaacctattaatttgccttgtgtttgtggaatttagattgctatagtctcctgcattaaagacaccaaccacatgattgataactaaaaatatagacaaggagcaggtgagatcagacaatgcatagatcaatattagttcagagaatgtttctttgataatgtaggtagaagggaaatagggctatcacatctttggattctcatgaggatcctgag

SEQ ID NO: 93734 - DNA, 1425 bp, Homo sapiens
ttgtcatatgttgcccacttgaagaaaacttaatagcattgaatctgattttcccctatcaagccagttagtcatattctgaattaatcaggctacacagtggagaaaatttttttccaagctttacaagaagttgtaccatttattatcaaaattctcattttattaaatgaaaaaacatgacatattggcttttcacttctgaaatcatgtatctatgtttatctgtatagacatccacatactcagtatatgtatatacatacactctacagtttatgtaaataaattatgtatttcacatatatgtctatatacaatataaaataaaatttatatactacacatttttacaaataattatacatttacatatgtattaattttatatgttaatatatatgtgtatatatatgtctgtcacgatgtttattgttagaaatatattctgtgatgtgttttgggtgtggtttttgtcatttgcgtgttcagtcttctattggtgctttgcttttaggtccctttcaacagttagtggtatgctgcccccaggtgttggcaagtactttgattcacatgatctcctggtctgaatttacaaagcctgttttaactaaggtctggattatgactttcacagaattccttttgtagttaaaaaacatcttttattaaaatagatgaacagaacaacgtatatacaggaagctggctaatttctwtcctgcgaactctttaagaaacaagtatctttgaataatgtggtacctttctattaatcttttactgttgtccatccctagatttatcatagtactttgattagaatggtctcttctgatttactctgacagcctctggtggtcaagtagttgcctggattccaacgtggttcatggtactattatgaaggggtcattatctacatggctttagatgtcaggccagtttgctgttaaaatggttcctttcctcttggattctcagacttggatgatggtgatgcatttattttacctagagaagtaatattattgaagagatggaaggagtttttacttttctcctgctctaactctcccaaagttcctcttgtggtatggaagcaggatagaaaaaaagagagtcaacttcaaattttcttcttcatccacctatgactgaatttcagatgagaatatttttctagtttacactattagaaatagaacctattaatttgccttgtgtttgtggaatttagattgctatagtctcctgcattaaagacaccaaccacatgattgataactaaaaatatagacaaggagcaggtgagatcagacaatgcatagatcaatattagttcagagaatgtttctttgataatgtaggtagaagggaaatagggctatcacatctttggattctcatgaggatcctgag

SEQ ID NO: 93735 - DNA, 808 bp, Homo sapiens
aaaagaggaaaaagcagaaaggctttttttttccttccaaaaaaacaatagccaaagtatcagctttttatacttctgaccgtagaactctgaaaaagaatgttttcaaatcttatyatcagatttcagcacaaacataaagtacgtttcccatttagtttctctggttctaaagccaacttttcccccaattaggtacacagattaattattttagacacttaaaggatgctcattttggctactgctgctcacaactgtcctgtgttaggcggctccactttctaaatgtaagagagtgccccctaagtgcacacacatccagctgatgtttccacaaagactgctcagattgtaaagtccaattttgtataatttactaacttctgaaaagtgacaaatggctgggaatgtgtttagggtctaagtgtgatgtgacttggactgtccctaactgccaggggacgggagtgctcaagcagggtacgggggaccagaccctcacacccatctggaggagcaaaagggctgtgtgcttttcagtaggaaactaacaggagttggtcacaaatgaaaggctaagcccagattttcaaatgatagaaaacagctgcaatcttaaaagcatgctctataaaacgtaaccaccagtatctgccagtcctttatcccaaacctctgccatgagcagaggtggaaaaaccttgacccaaaatcctggccctgaggcagaggcagaaagaaggcagttgtctgcggaactcttcaccccagtctcttgtccaaagacagcaaagccctcactctt

SEQ ID NO: 93736 - DNA, 659 bp, Homo sapiens
ggtaagagaggaaattagtggtccagtgaagaaaattgtgatggtattgctgacaatcacttcattttgaactgtgccagggacataattggtataactcaatttcctatctgttgggagtgtggtgtgagcttcagatgaaacgagggctcatattgacaacagagaatgagaaggcatttggaagaataaaaagaatgcagacctgagctgtctcaccctccaccccctgcctcagtcttctcttctacaaaatggggagaagaactagataatccgaaaagccccttctggatataaaactctgcatatcaagaagaaacataatggtgggctgagttcagtggacttgaactagaaacttttctattcttttggcagatgaaactgtgtgttggtttaaataccattgagaggttaactaacatcactgagagcctgttttctcatttgtaacaggggaatattactgcctagcttkcaggattgctgcaagggttaaatgaggtgataggcatctaatgatgggcacaagataggctcttattgaatactcaaaatattattattctctatctttttctcactacctttcccaaattcagctaggtctttcagcctctctgttatatggccattgtaataggcttctaactggc

SEQ ID NO: 93737 - DNA, 669 bp, Homo sapiens
caaaaaaagctagctgggtgtggtggtgtatgcctgtagtcccagctactcaggaggctgatacaggaaaatcgcttgaactcaggaggtggaggttacagtgagccgagatggcaccactgcactccagcctgggtgacagagtgagactctgtctcaaaaaaaaaaraaaaaaaaagattcctcatattaatttctaataaactacttccaggaacaacaatgcaagaaagatacttcctcttttaaagcgaaaaataacgtcttccttccaattgcacaactatggatggacagacacaggcaaacttggaggatcctgccactaagtgtctcactcagtggcaacttcccacagggaggtaactctgaatacacactgtgtggggtaacctgcacacggccgttctcatcctgtgaccaccagcagaaaacacaagatgactacagaggttgcgctggtgtctttactccagatgccatgcctctttgttagaaatctgaaatcttgcagatcacaggtctcttccatgtgaagcctaagaagttgactcttcagttagagttcagttccaagcagcatggcagttgccctttgcaggatattataaactcctctgcttattcctgatgctgctaagccagacaaccattgatctcggaacctac

SEQ ID NO: 93738 - DNA, 697 bp, Homo sapiens
agtgtcctcattattcctgttctacagatgtagagactgaagcatagagaggttaagggtcacccatctagtaagtagcagtgccaagattccgcgattcaaactccacaatgcaagttcttcactgctaactctactatcagaggagctggtgcctttagaggtagtttgctttcccatagacactggtgtaaacactgcccatgtactgtctcaagtaaccttcctgacagtctttgagggaagcactgttagtttgctcgttttacagatggggaaactgagcgccagagaagctcagtgggccaagggtacacagcagagactgcctcacgcagtgggaagtgtgtggaatagagctggagggctgggctcttatcccaaccctgctggtgggcatctgcataccgtgggttcagtcatgtaaacacctcatctcctcatcagccaagtggacatgataatggacttttccggggttggcaggaggtgtccctggaggagtacgtaagaaagcacygcatcagtgtaacccatgcgatacagggtcccggatgacaaactctgtaggggctgaggaaagatgcttgaatgccaagactctcttcccgtttgctcccaggttttcactggtgcctacctagcagctattgacttagtgaactttatgttcattctcttcccagtctgtggatcc

SEQ ID NO: 93739 - DNA, 436 bp, Homo sapiens
accaggagtgcttgtgagttttgcaacttgcaataaattagcaaggctcaccttgaggatatgaaagcaatagtatagcttcataggattccacgaagattaaattaaytattatatgaaaaatgcttccaatggtgtgtggcacatagtaaatgcttaatagctgttggtttaaaaaataggagtgtcatttaaggagattttaagaaaagttttcatttgctctacagtaacatttctttatttgctatggccatttttatttggaattgagaatgaaattgtatttggaattgagaatgaaattgtatttgaattctgtataaaaagatcaaaaaactaatttgtgaactggataaaatgtaaaaaccacgaaaccaaagtcttcatgcttcatggataaattatccacaatttgtctctgtcttaatggaga

SEQ ID NO: 93740 - DNA, 694 bp, Homo sapiens
gtgggtactgacaagggacctaacacacagggttgtgcctggagacatgcctatggctgcacagataagagaacctacaacccactgaaataaaaacttgcacaaacctctggctcactcagataagggaaaagacccaacatagaaatgcttttgtcctttgtataatcagtgggctcccaagaaaaagtttcttctccttttgtgggcatgaacatggtgggctccagtgggttctggtggacactttccttctttttttggactgtgagcctggcctctatgagtcattacttcagctcttgattgattggtcctgggcgaagktccatggctgagttccaacttcagctcctgattggtcctagaccaaaatctccaaccaagctgaatcacactatctatctccaagacagcccacagaataagcacattcttttccctttccagtccataaaaaccttggaccccagcctcatagtgggcaacacatttgggccaccctctccactgcagagagctttcttctttcagttattaaacttttgatccaacctcacccttgtctgcactcctcaattctcttggatgcgagacaaagaactcctggtactatctatctcagacaatgagagactactctagtgtggttcattggtgagactacaacaatgtagccaacgaaagggtgata

SEQ ID NO: 93741 - DNA, 694 bp, Homo sapiens
gtgggtactgacaagggacctaacacacagggttgtgcctggagacatgcctatggctgcacagataagagaacctacaacccactgaaataaaaacttgcacaaacctctggctcactcagataagggaaaagacccaacatagaaatgcttttgtcctttgtataatcagtgggctcccaagaaaaagtttcttctccttttgtgggcatgaacatggtgggctccagtgggttctggtggacactttccttctttttttggactgtgagcctggcctctatgagtcattacttcagctcttgattgattggtcctgggcgaaggtccrtggctgagttccaacttcagctcctgattggtcctagaccaaaatctccaaccaagctgaatcacactatctatctccaagacagcccacagaataagcacattcttttccctttccagtccataaaaaccttggaccccagcctcatagtgggcaacacatttgggccaccctctccactgcagagagctttcttctttcagttattaaacttttgatccaacctcacccttgtctgcactcctcaattctcttggatgcgagacaaagaactcctggtactatctatctcagacaatgagagactactctagtgtggttcattggtgagactacaacaatgtagccaacgaaagggtgata

SEQ ID NO: 93742 - DNA, 615 bp, Homo sapiens
gttcttgaaatccaatagtgcccaggtctaaattgagatgggtgaatgaggaaaataaggaagagagaagaggcaagatgrtgcctaggtttgtgatgcctctttcctgggtctcttgtctccacaggaggagccatggggcactacgtcttagctgaacgtgagtgacacgcagcctgcagactcactgtgggaaggagacaaaactagagactcaaagagggagtgcatttatgagctcttcatgtttcaggagagagttgaacctaaacatagaaattgcctgacgaactccttgattttagccttctctgttcatttcctcaaaaagatttccccatttaggtttctgagttcctgcatgccggtgatccctagctgtgacctctcccctggaactgtctctcatgaacctcaagctgcatctagaggcttccttcatttcctccgtcacctcagagacatacacctatgtcatttcatttcctatttttggaagaggactccttaaatttgggggacttacatgattcattttaacatctgagaaaagctttgaaccctgggacgtggctagtcataaccttaccagatttttacacatgtatctatgca

SEQ ID NO: 93743 - DNA, 895 bp, Homo sapiens
atgcatttaaggtggaaaaacaataataacaataaccagagtaattctacaagctattcaagctaaatttctagacggataatgtatttaaagtggaaaaacaagaataacaataagcagagtaattctactcacctggagggagaaagagagctcctcgaaggcggccttctcgaaccttaattcgtgtgacaccaggtgccacataccacctctccaaagtcaggctggcctttggagcactggcaactttattgttcactattaactctaagtcataaagttttacttggacctggaaaggcctattcatcacatctcttttcaacagtcttgttaatagcttttcaggtttcagagaccagaagagacccatggggtggactcccatataatcccctccaagtgaagaagcatgattcaggtccacctcaccgaattcattggccctatagtgggcttgagaataaaacatgtctccgttttcatcttccagtgatgcctgaaaactcaccatctgaaagggaatcaggcctgtagctyggatatgcactggctcatcaacaagtgcactcacaggggtagctgtcaactggatcatttttttagtgtggcacctgggatgattcttcaggaatatcttcagcaaaacctcaaaacctcaaaaaagaaagaaagaggagcagtaaaataaagtagagataagggttgatgaaaggtgaattgaatcagcagtcagaccacttaggagtcagttctaaccctctagttctttagaaacttcctgatatagtcttctagtacaagacacctgagagctttcaatgaatttccagaagacagtaagcaagctgacaaattttataacaataatgaaccactgttaaagaagcag

SEQ ID NO: 93744 - DNA, 541 bp, Homo sapiens
tagccaatgaatatttggaaaggtgcccaatattattaatcaataaaaaattgaaactgaagtaaaatgattaatcaaaagcatgtacaattaaaaatgattgacagaaaatttcagattttagattaaaacatttagattttagattaaataatattcgttactaataacaaaataaaggtagcaagtataggtaaactggactgtagatgggctggcaatcattacagacattttataaggcaatttggcagtaagtatcatgcctttaaacacttaactctcaacctattaataggaattctgtaaatctaccatatagaaatatgtgctaattttactattgtttgaaatagcacaatattgaaaactgtccaccaatagggaagtgggcaactcttttaagaatgtttgcagtggatagcagagaaatagattatatatacggaagacatccraagttgtttgctattaatagaaaattcttgtagaagttaaaatgaggaaggaaggaacaagaaaatagagagatgttggagat

SEQ ID NO: 93745 - DNA, 1880 bp, Homo sapiens
ttggcagcagcttaaaataacaattttattatgctcccacattctgtgagtcaagaatttggaaagggaacgaggggggtgggcaatggcatgtatttgttccaccagggaacttcagctaagatgaccaaaggctggggttgacttgattgctgggggcaggatcatctggagatgtcctcactcacatgtctggcagtcattcaggacctcagcctgggccattggctggaatacctacatatgacctgtccatgtggcctgggcttgctcatagcatgactaccttggactccttgcaaggaagctcaagactccaaggcttgtacatcaaaataactagctaaagcctcctggcctttgatgtcctagcattcaaagtcacatagcatcacttttccagcactccagtggacatttagtcactaaggtcactgcagattcagtgggagaagacggagaccctattttttgctgaaaggagcatcaaagatcaacttgcgggcctatttttaaataccccaggattccagcaaaaagaggacaataagcaacaatgcaaccctgcccacccagagatcatcacaatcaacatcttcatgtaaacttttctggatactgctttgtcgttgatttttataaagctgaaatagttttagtggagactcttttacttgaaagtgagagaaacccaattcaaactaatgtaagcaataaaggaaatatattggctcatagaactgaaaaatctcaaggggctgtcttcaggaacaggtggatccaggagctcaataatatcatggatctgtcccattctccctcttggctttactttcccttggtttgtttcatctgaagcaggttctcccacatggtggcaaagagggatctgacagctcttagcatgcatggtttttagaacttatgcctgcagaaagagaggtgtttccctcctgagaggtttaccatcatcctaggatccttcattgacctagcttgagtcataagcccagggggtaccctaatgacatggcttgcccaggaatatcttgaagagatgaaaagctcatatccacacacagtttggttccttgcttttttcaattaactttatatttaggccagtagatacgcttccaacaatatcatttagaatgattgctttttagtcctatgtgtggatgtaccattattcatttagttaaatacctattgttgaacagttagctagttccgatttttcactgcarcaatcagcacagtatgcctttcaactaaacctttgccaacatctactacatattatttctagacatggaattgtaaagtcaaaagacaagtgtgtttttaatgcttataatgctgtttgtcaagttgtcttcaagaaaagttgtaagaatttatactcccacctacgtgatttaagatggctgatctccacttgtccatacctatactaggtattaacacttgaaaaacaaaatatgtgccaaacaaactaaataatattgtgtggttttgatttgcctcttttttttttttttttttttttgagactgagtcttgctctgtcacacaggctggaatgcagtggcgtgatctcagctccctgcaacttctgcctcctgggttcaagcgattctcctgcctcagcctcccgagtagctgggactacaggtgcatgctaccactcctggctaattttttgtatttttagtagagatggggtttcaccatgttagccaggatggtctcaatctcctgaccttgtgatctgcctgccttggcctccaaaagtgctgggattacaggtgtgagccaccgtactcggccacttttcttttattgctagtgaggctcaatgaatttcaattccttcc

SEQ ID NO: 93746 - DNA, 816 bp, Homo sapiens
ttccattttctcagctcaggcagctcctaatgcaaagctgaaaattctcctctgcctcattgtgtgcctgctcttggaggcggggtctttgggtaggtttctgaagagcaattatgcttattactggttaggatttcagaaaccttctctgtttgctgagtgcattaattctcagctctttccatcactcatttttcctgacagccccattttgcaggtgtaaatgtgcagatggagagcaatggagaaagcctgtacaaaaaaaccaaagatggggaagagagagtcaaggatggaaagagagattcctaaggacattattggtgtccgtggcgttcccaaggcatcactgtggacgcctcaattacgtgaaccaatacatttcctcctttccttaaaccaatttgaggcgaatwtctctcatatgcaatcataaggcttctgactactatgcctcttagatgtggcatgtttaaaaacaaaacaaaaatgtttttattgcattttaatttgtttttacaaaatatagactcattttaaaactgaaaccctgtaaaactgtatatgctatggatttacagctaagcataaccagtgaaacacagttacctctgtgcccctccacactctcactataatttaagagatcaaagagatgacccacaggataaggagaaggatagagaaggcaacagcaatgaaaccttagtgatgctatgcagcaaatggaccaatggaaactgacttagcagatctaagaaagctgaaacctatgcaggcagtatagaaccagaaaattcatctaatttatgctat

SEQ ID NO: 93747 - DNA, 565 bp, Homo sapiens
tgaccataaagagtgactgctggccgagcacggtggctcatgcctgtcatcccagcactttgggaggccaaggcgggcggatcacgaggtcaggagttcgagaccagcctggccaacatggtgaaaccccgtctgtaccaaaaaaaaaaaaaaaaaattagctgggtgtggtggcgggtgcctrtaatcccagctattcgggaggctgaggcaggagaatcgcttgaacccaggaggcggaggttgcagtgagccaagatcgcgccgttgcactccagcctgggtgaaagagcgaaactccatctcaaaaaaaaaaaaaaaaaaaaaagaaaagaaaaaaacaaaaccaaaaacagtgactgctgtaccttgtgtccagggtctggtctgcatgccagtcaggggtgcaacgcgacagtcaggagatataaactctcgtcttcaccttgccaacaaccacttgcattatgggctttgaatttctcatctgaaaggtgcagaggatggatgagattagtggtttttcaggctctgattcatggagcatgaggaattccttgaaggc

SEQ ID NO: 93748 - DNA, 565 bp, Homo sapiens
tgaccataaagagtgactgctggccgagcacggtggctcatgcctgtcatcccagcactttgggaggccaaggcgggcggatcacgaggtcaggagttcgagaccagcctggccaacatggtgaaaccccgtctgtaccaaaaaaaaaaaaaaaaaattagctgggtgtggtggcgggtgcctataatcccagctattcgggaggctgaggcaggagaatcgcttgaacccaggaggcggaggttgcagtgagccaagatcgcgccgttgcactccagcctgggtgaaagagcgaaactccatctcaaaaaaaaaaaaaaaaaaaaaagaaaagaaaaaaacaaaaccaaaaacagtgactgctgtaycttgtgtccagggtctggtctgcatgccagtcaggggtgcaacgcgacagtcaggagatataaactctcgtcttcaccttgccaacaaccacttgcattatgggctttgaatttctcatctgaaaggtgcagaggatggatgagattagtggtttttcaggctctgattcatggagcatgaggaattccttgaaggc

SEQ ID NO: 93749 - DNA, 565 bp, Homo sapiens
tgaccataaagagtgactgctggccgagcacggtggctcatgcctgtcatcccagcactttgggaggccaaggcgggcggatcacgaggtcaggagttcgagaccagcctggccaacatggtgaaaccccgtctgtaccaaaaaaaaaaaaaaaaaattagctgggtgtggtggcgggtgcctataatcccagctattcgggaggctgaggcaggagaatcgcttgaacccaggaggcggaggttgcagtgagccaagatcgcgccgttgcactccagcctgggtgaaagagcgaaactccatctcaaaaaaaaaaaaaaaaaaaaaagaaaagaaaaaaacaaaaccaaaaacagtgactgctgtaccttgtgtccagggtctggtctgcatgccagtcaggggtgcaacgcgacagtcaggagatataaactctcgtcytcaccttgccaacaaccacttgcattatgggctttgaatttctcatctgaaaggtgcagaggatggatgagattagtggtttttcaggctctgattcatggagcatgaggaattccttgaaggc

SEQ ID NO: 93750 - DNA, 565 bp, Homo sapiens
actaaaaatacagaaattagctkggtgtggtggcaggtgcctgtaatcccagctagtggggaggctgaggcaggaaaatcgcttgaacccaggaggcagaggttgcagtgagctgagattgcccattgcactccagcctgggtgacagtgtgaaactctgtctcaaaaaaaaaaattttttttttctttttttttaactattgatattggggcagataatggaactcataatagtcttcagtacatatcacattatcataatggattcatgcaaagttttatgactttttatttttttctatctaatgtgtttgctttatattcttacatatatgtatttatatttatgtattcttaaatatatattcttataaaatatatggtattgattttttcttaatttacataattttgcactataaatcacactctgctcacttcttacaatgtttttaagatctgtcaacattattgtatatgcatctactttgttgcttgttagagctgcatagtactccatggcatacaattccattttacaaatctttcaccctaaaaataaata

SEQ ID NO: 93751 - DNA, 565 bp, Homo sapiens
actaaaaatacagaaattagctgggtgtggtggcaggtgcctgtaatcccagctagtggggaggctgaggcaggaaaatcgcttgaacccaggaggcagaggttgcagtgagctgagattgcccattgcactccagcctgggtgacagtgtgaaactctgtctcaaaaaaaaaaawtttttttttctttttttttaactattgatattggggcagataatggaactcataatagtcttcagtacatatcacattatcataatggattcatgcaaagttttatgactttttatttttttctatctaatgtgtttgctttatattcttacatatatgtatttatatttatgtattcttaaatatatattcttataaaatatatggtattgattttttcttaatttacataattttgcactataaatcacactctgctcacttcttacaatgtttttaagatctgtcaacattattgtatatgcatctactttgttgcttgttagagctgcatagtactccatggcatacaattccattttacaaatctttcaccctaaaaataaata

SEQ ID NO: 93752 - DNA, 565 bp, Homo sapiens
actaaaaatacagaaattagctgggtgtggtggcaggtgcctgtaatcccagctagtggggaggctgaggcaggaaaatcgcttgaacccaggaggcagaggttgcagtgagctgagattgcccattgcactccagcctgggtgacagtgtgaaactctgtctcaaaaaaaaaaattttttttttctttttttttaactattgatattggggcagataatggaactcataatagtcttcagtacatatcacattatcataatggattcatgcaaagttttatgactttttatttttttctatctaatgtgtttgctttatattcttacatatatgtatttatatttatgtattcttaaatatatattcttrtaaaatatatggtattgattttttcttaatttacataattttgcactataaatcacactctgctcacttcttacaatgtttttaagatctgtcaacattattgtatatgcatctactttgttgcttgttagagctgcatagtactccatggcatacaattccattttacaaatctttcaccctaaaaataaata

SEQ ID NO: 93753 - DNA, 1098 bp, Homo sapiens
tccaattccatcacacaggacattaaaaagaagtaaattcaagcaccaatatttattaaattattgctttttatggcttcatcaaagayatttttgagtgaaatggtattctttcttactccaagtgcatgacaaaggaaaatatgagaactactaataaagtatggtacatctgcttctaaaaaatttatttgtaaataatttttactgaaacatagccatatttatttcttttatatattgctataaaagcagagtagttgcaacagagattatatggcctacaaatgtctttattaaaatattttattatagaaatagttgccaacactttttgtagcattagcatcgttttgggtcttttttttggttaatggaaaatttcaaaagatctttaagaattgaaccccttcttttttttgtggctcttttaaaacagtatttgctggttcaagtctgaacagtcatttctgtgattgtcatcttcaaatattactgttgcttacactgaactcacaaccaccttagtttttgtttgtagctgacatgatcttccaactcctatgcaaaattcttgtgtcatttgttgttgcatcttttcttatgccaatttgggagccaggaggcttgatggggaaaacaatcaccttcgtgtctggagacaactcttgtgcctctcctttgactcatgctaagataaagtagttttattcaccattgcttttacacaatcagtgtgaataacaacacagtaaaaagacaaatcccatgttagcattattatgaaactgttttgacctcataaatttcctgaaagggcctgttgattttctagacacccagtcaccacacattgaaaactgctgttctaagttcttattctcattgtcaattttgatttgggaatggatatgtgatgcaatcctggctagtgagacctgaaggaaaaaagtatgctgtggggcttccaattaagtcgggaagtgggcatcttctttctgccgtgactctaagttttgtcttgtctgaatgttacttctgggaatgctacggtcagatgaccacaaaagaaatcaatcataaaatgaagtaaatgca

SEQ ID NO: 93754 - DNA, 1054 bp, Homo sapiens
ttcagagcaaatatatgttaatcactagatttcccaagaagtaactcagctggttaaatttaacatagtgttactctctctgtgtacaaaaaaatgcccatatttgctcaattattcaagcaaattttctagaaatttaaaataacacaatccaataggcctggtctaggtgtccacgtgaactgattaaatttcagatttcacccgtttagaccttgtctttgtctgtttggctgccataataaaataccataaatggggtggcttaaataaaaaaaatttattttcttaacagttctggaggccgggagtccaaggtcaagatcccagtataatcagtgtctggtgagggctcttttcctggcttgttgatagccaccttttcactgtttcctcacatggcagtgggtatgggagagagagagagagaaaactctctgatatctcttcttgtaagggcactaattttgtcatgagggtgaagctttcatgaccttatccaaacctaataatctcccaaaggccccatcttcaaataccataatattaggggttagggcttcaacatgtgaatttgtaacctgtaagatcagttcatagcagatcttacaggttacaaagagaaggtctgaggggaaaaaagagataactttcaacaattggtgttgaggaaagagatattagtttttctcccaaggtgtttatagaaaccagaaaatagaatattatcttttgcttatctctatctagcttaccatatgttaaaacaattttgctatctttattatttttaactcattgaattacttccttctagtcagatattcaggataagttgtttttrggtaacattacttgaaaggccaaaataaaaattagatgttggaaatgtcactgctatacttggaatggacacattaataggaaacattatcttcaatttcaaaaaaaaattataaatattattttaattgacaaatcataattgtatatactcatgagatataatgtgatgttctgatatatgtatacagtgtagaatgattaagatgga

SEQ ID NO: 93755 - DNA, 587 bp, Homo sapiens
gggcacctcagggctcaaaaatactctctttaccaggccctgacctgggccacctgttattggagctgtggaagttggaattcagttttgattagggcagaatcccaaagaggtctttaagataaagtggctgcaaaaggaaccccgaaagaaccatagaagttaaactacagaaaccagtatttagtaccatcaagctggttatcacacggcttcagccacaagcaaagatttggcaggaatgtgaactcaaaaatcaggactgtcaggcagcaggcttgataaatcagttacttcttctggtctcctctatcatcctcccctccctgcttccaagatgtaggctgagggggaacacaagatgtagcactggtttctgcctgacatacattctctgggcctactggtctgagagcattagaaggacacagggataaatcaagaggacccagcatgctgagaaagatgtgagcagaattagttaattctactcccttggactagatagcacgttgagaggctctgtgatttctgaaatcctgtatgaaaatkatacaagatctaatgtttcaaggttcctttagtca

SEQ ID NO: 93756 - DNA, 867 bp, Homo sapiens
aggttgtagtccacaatgactgatggcagaactgtattctgttttttggcctggcagtaacactacaactgatcagacaaggatgactaaggacagaagagatgtgaaggcagctaaaccctcactgcatgaaccatggtcagagagacactgtttgaaaaggagcaagcattggaagggccacatttggggtgggcagtggaaagcatgcaacacagaaggagtcctaagacctaccttcaaaatccctacactgtaaaaaattagaccaatcttcctagttctaagattgtatgattaccaaatttatctacctatctactaatcaccagggtacaaggaattcaaagacgaaaacctcatctattaacaaattcttttgtcaaaccactttttttgtttggtgtttttygtttttgtttttttttttttggccaaagggggataggagtaacctatgctaaagagtaggcactggccaggcatggtggttcatgcctgtaatcccagcactttgggaggtcagggtgggaggatggcttgagtctaggagttcaagaacagcctgggcaacacagcaagaccctgtctctaaaatagaaaaactaactggctgtagtgttgtgagcttgtagttccagctgctcgggaggatgaagtgggagaattgcttgagcctgggaggtggaggttgcagtgagcagtaattgtgtcactgcactccagcctgggcaacaaaacaagatcctgtctcaaaaaataaaaacaaaatataaagagtaagcaaagagtaagcactgcagtaagtcctttacacatcttatctcataaaatactcataaactctctggaaagtaaattctatca

SEQ ID NO: 93757 - DNA, 1324 bp, Homo sapiens
ctgacttctagtggttcaatttaagactgtttaaccttaccatggcgtggaagtgatacacatttagtagaaaccatacttcaagtacccatataatgattctgcctttcactttcattacagtattcaacaaattatatgagatgttcaacgtgtgtaaaacaggcttgttattagatgattttgcctagctgtaggctaagggagttgttctgagcatgtttaaggtaggccaggcgaagctgtgatgtttggtaggttaggggtatatggtgcatttttaacttacatttttaacttacggtgggtttactgagatgcaaccccatcataagttgaggaaggggtgtctgtaacatttacttgggagagcatatgcaaggtttaataacaaaggaatttatcagtatcattttcaaatactctagtgtaattatgctggaaacctcagagtttgcaaaaacagtatgatgggctctgtgtgtgcaaagatcatataacctacttttaccatttagctaatacagtgttaatgaatctggctgagtcagaagtgtcattccagcggaaggctgttgaagagtccaccatctttgttcagtgaatatcctttaggcactacaaacttaggagagacagaaccagtgacgaaaatatggtaaaagtatagcagaagggtgaagagggcaataagactgtggctgggcgtggtggctcacgcctgtaatcccagcactttgggaggccaaggtgggtcaggagatgaaggtcaggagatcgagaccatcctggctaacatggtgaaaccctgtctctgctaaaaatacaaaaaattagctgagcgtggtggcgagcacctgtagtcccagctgcttgggaggctgaggcaggagaatggcgtgaacctgggaggtggagcttgcagtgagctgagatcgtgccactgcactccagcctgggtgatagagtgagactctaagactatatatttaagggacgaccaggcagagtgaatcattgcttttgtgccacctactgtataaagtactgaaggaaatctaaatttatttcatttgtaattttgttattgatttcaagacacaaaataataaaaaaagtcagtttttctttttttaaagagttcttgctgattacttaaaatcagtttgtaaggtattgagaatatcagaaatttyttattatcaaatggaaccagaacagaaaatattccctgtaaaccatctcaaaatatttaccaaatgctgtattcccaccaagattttctctagctctctctaataggttccaaacatgtgtccctgaa

SEQ ID NO: 93758 - DNA, 777 bp, Homo sapiens
tgagaaacatctaatctagtcttctgcaagcaagctcatgtacaagtcactctagcaggaggctgttgcattttacaagcttgcatgtcctcaggtcacctattgtcttattaaaccttagtcagtactctacctgaaatctcaggctgcaggaacatttattttgttgtcgttctatccctcaaacaaattctgcctgcccagtggttaggttttcctggggctcagttttccctggctaaaaacccttcgtgggtctcccaggaggtctgccttcctcccctttttagtggacctcattagcattaaggtacttacttgtgagtaactatcgttggcctgaagcaagtttagtggctgtagcctctagcttcactggttaggtcctatgccaaaccagctcctccctcggcccagcaactggacacctgtcccctgcttcccctgaygcagcccgaggcaatgaggaacgaattggataaaacttggaaggaggttttgttcagcatcccctttctgatagagaaccaggcacaggccaagtcgtggccagaggggggccaggagggatgctaggccaagtttggactccctgtcagggagaatggtcgtatagctgagcccctagcacccttgcttgtaagggttgggaagaggtgaggaggctttcattagccagctccaggaaagctgacctgggctaggggtgggtgggtagggtgcagtgggggtttggctgtggcagggaaaaggcatgtgagcttatatttttaaaaa

SEQ ID NO: 93759 - DNA, 627 bp, Homo sapiens
ctacaaaaagggcactgtttaaagtaggtatttaaaaccagccactctctggcacagtgtcaggccaccttggcagcaggaaggggctggctgtgtccgtcggaggtggcgtccagctgcggcgcagagggaggggttccaggatcagagctccagggagcctatgaggatcagcatcgccacggagtgggaaatgacggtgccagggtgtggtgctgggcggactgccatgttctccaccatcatgcttgtgcctgaaaccagcacaagctgagtcagctgggcctgggactaccctagccccacccttgtggcaagattgagacctttcctaaggagactcacagggccagctgcaggcctgggagcggacggctgggtggtcttctcagtccgactcctacggtgctttgtaggccgtttgctattgctggttggtcctcagcctccccctrcaccctgcgcccttccctggccctcggggatgttctgggggctgggtagaaaggtggcggcgaggcagttctaagactactttgcacttggttcctgcctgccttccactttcctttgcgggtagagattggagttggcctgggtgggaatgatcctctcaggtatctgggt

SEQ ID NO: 93760 - DNA, 971 bp, Homo sapiens
tgcatcattgtcctgctgcagggcagggcaggggatgaagagccacagattggccggacatcacacctgcccttcgacagggctggggtgggctctctgctgactggtggggccagtccgttttgcttctgcggtgtcaggtgggagccaggctatccctaattggcttctacctcttaacgcagctgatttcaggccttccttggtgggtcatggggaaagggatccccattaactaattagttcctttcccagcgcatccagccatcagtcctcttccaggggtagggggtggccccatgctgcagctgaggcccagccttggccccctgggagtgagggcagctgctaagcagctctcagaatgaggtaggaggcagggctccmaggaatggcccggtgcaggcatcccttgtgccattctccctcactgccgccccaggcctcagaggcggaggcggcgggcggtgacggcatcatctcggctggaaagtccagcttaatcccaagttaatgatggtggtgtacggtaggaatcctgccccagctggcactgctgggaggggaggcaaaggaggcgctgggaggcagccggactgctgggaaccacctagtacaatagcagcttccaggaacgctgggtgatggggtggctgagtgggctcagggcatgttgatacattcagactctttcttcccgagaaacctttctcctctgctctcagctgtccactcacccaaatattcacatacacaccccttcgcatctctcacctacacacattttcttatatgcacgctcatgtcatacacacattcgtacatatgcacctccctaagctgctcaaatggcaagatacatacatttacacacacatccattcccccctgacacacagctatagatggccatggagacttttatatataatccatgcattcataataataaaaataggtgctatagacgg

SEQ ID NO: 93761 - DNA, 703 bp, Homo sapiens
cagggaggctgggatatgagagctggtcacactgtgctgtgagactttctggacacattcattatccccagcgtagtaccacctccatgcaggcacctcactcatacctccagcctctcagccatccatatccacagacaccctcacacacccacacttgcctcttcagctacatacacacccacccacacatgagcctccccgtgtgtgtgcttacacatgcacatgcaaaaacacactctctgcctgtaatcccagcactttgagaggcggaggcaggaggatcacctgagctcgagagttcgagaccagcctggccaacatggtgaaaccccgtctctaccaaaaatacaaaaattagccgagcgtggtggcgagtgtctgtaatcccagctactcgggaggttgaggcaggagaatcgcttgaacccaggagtcagaggttgcagagagccaagatcacaccactgcactccagcctgggcaacagagtaagactccatctcaaaaacaaaaacaaaacccgcaaacaacaacaacaacaacaaaacacactctcccaggcgaggccagcccttccttattcttgttcctcatcctctctgattcttttctgatgccctgtcctggtaacttttcccccaaacacaggcrtcagaaaccttgcagaggaacggagttaaagagatgagaaggtggagag

SEQ ID NO: 93762 - DNA, 1073 bp, Homo sapiens
aatttttatgattataagtgacagatgtctgtagcttgaaatcattttaacttgacattttcaattatatagctatattgatgaaagaagactaagaagctctcagatgacaaatcccattatatcaactttatgtatagctgtcaagatctaataattccaaagggatataactgttcttgactaaaaatgcacagggaaggtcctcttggcawtttgaaatgcaatataatcgctcagatataaatgataaaaaagattacgagtctatattttaactttcagttatccttgaaaaatgatactttgaacttgaagcaataattaaccagtaagattatattgcttagcaaatttatgtaatctgtttatttgccacaaatgtttaaataaatgtgtgatttggagtttataatcagtgttggagacattagattgcttagattttaagattccttctgtctaatatttctttcagcaccttgcaactcagtccttttcaatcaatatttgaagggcaattttcacacaaagcatcatgtttagttctaatactttcacagaaacctctttgtatcacagcacaattctgatctattaaaaattatcatgaattgtttctattaaggttataataaaacccctcttaatttatcctgttttaatttttctttagtttttgaaaatgttatattttaattgttaagccttaaataaatataagggtcttctgtttattactgaacagattaaaaattcacatatatacatatattttgaatattgaatataaaacgggatggtggttaggattgaagaactaataattattttaaaaaatattttaaaatattgacataatcttctaatttctctttgatacttgccctgtgatttccacgtaaatgttttgcagaaactatgatgtctcacaaactatttatcaatgattaactgaacccaataattccttctccactcttgaactccctgctacattttgaaacatgtaaatcattttttgagatataattgatgaaaataaactgcacgtggttaaagtttataaaatt

SEQ ID NO: 93763 - DNA, 1073 bp, Homo sapiens
aatttttatgattataagtgacagatgtctgtagcttgaaatcattttaacttgacattttcaattatatagctatattgatgaaagaagactaagaagctctcagatgacaaatcccattatatcaactttatgtatagctgtcaagatctaataattccaaagggatataactgttcttgactaaaaatgcacagggaaggtcctcttggcaatttgaaatgcaatataatcgctcagatataaatgataaaaaagattacgagtctatattttaactttcagttatccttgaaaaatgatactttgaacttgaagcaataattaaccagtaagattatattgcttagcaaatttatgtaatctgtttatttgccacaaatgtttaaataaatgtgtgatttggagtttataatcagtgttggagacattagattgyttagattttaagattccttctgtctaatatttctttcagcaccttgcaactcagtccttttcaatcaatatttgaagggcaattttcacacaaagcatcatgtttagttctaatactttcacagaaacctctttgtatcacagcacaattctgatctattaaaaattatcatgaattgtttctattaaggttataataaaacccctcttaatttatcctgttttaatttttctttagtttttgaaaatgttatattttaattgttaagccttaaataaatataagggtcttctgtttattactgaacagattaaaaattcacatatatacatatattttgaatattgaatataaaacgggatggtggttaggattgaagaactaataattattttaaaaaatattttaaaatattgacataatcttctaatttctctttgatacttgccctgtgatttccacgtaaatgttttgcagaaactatgatgtctcacaaactatttatcaatgattaactgaacccaataattccttctccactcttgaactccctgctacattttgaaacatgtaaatcattttttgagatataattgatgaaaataaactgcacgtggttaaagtttataaaatt

SEQ ID NO: 93764 - DNA, 1073 bp, Homo sapiens
aatttttatgattataagtgacagatgtctgtagcttgaaatcattttaacttgacattttcaattatatagctatattgatgaaagaagactaagaagctctcagatgacaaatcccattatatcaactttatgtatagctgtcaagatctaataattccaaagggatataactgttcttgactaaaaatgcacagggaaggtcctcttggcaatttgaaatgcaatataatcgctcagatataaatgataaaaaagattacgagtctatattttaactttcagttatccttgaaaaatgatactttgaacttgaagcaataattaaccagtaagattatattgcttagcaaatttatgtaatctgtttatttgccacaaatgtttaaataaatgtgtgatttggagtttataatcagtgttggagacattagattgcttagattttaagattccttctgtctaatatttctttcagcaccttgcaactcagtccttttcaatcaatatttgaagggcaattttcacacaaagcatcatgtttagttctaatactttcacagaaacctctttgtatcacagcacaattctgatctattaaaaattatcatgaattgtttctattaaggttataataaaacccctcttaatttatcctgttttaatttttctttagtttttgaaaatgttatattttaattgttaagccttaaataaatataagggtcttctgtttattactgaacagattaaaaattcacatatatacatatattttgaatattgaatataaaacgggatggtggttaggattgaagaactaataattattttwaaaaatattttaaaatattgacataatcttctaatttctctttgatacttgccctgtgatttccacgtaaatgttttgcagaaactatgatgtctcacaaactatttatcaatgattaactgaacccaataattccttctccactcttgaactccctgctacattttgaaacatgtaaatcattttttgagatataattgatgaaaataaactgcacgtggttaaagtttataaaatt

SEQ ID NO: 93765 - DNA, 749 bp, Homo sapiens
gtagaaagcaagcaagcaagctattagattaaattaaagatcacttatgattcagtttggagacaatgaactgttatgttttattatatattattataaaataactttatcttattattttgggattactatatttaccttaaaattataaatttcaataagatatattaagttggtaacagtttttttcttccttttgaatttagtacattgcctcttaagaataaaaatacaaatatgtaaaagtgaaatcatcagagccattattctaatttcaaatacttatagaatctccttttaacttctttgcatattagtcttagcaccaacrctttctaataaatgtgaaaataaaatgtttactgtaattactttcatgctgtgtgaaaaattactttgcatcaagcaaacatgtagatatattacaattatcaaaaaagattcagtaagtgaaaactacttaccaaaaataatattttcttagtttctcctcttatgaagctttatctttgctatccatagctggcttccagtgcttttttttttctgtagtattcacttaaatgtatatctctcatgaggatcaggtaatggttcttcaaaagtccccatgaggtctttcacactgcaagtccctgacatgagcacaatctatgttctccatctgtcctcctgaaattctttttcagcctgactcctctcatctctctagggctcaagcctggctaatgtctgctgtattcacccgg

SEQ ID NO: 93766 - DNA, 749 bp, Homo sapiens
gtagaaagcaagcaagcaagctattagattaaattaaagatcacttatgattcagtttggagacaatgaactgttatgttttattatatattattataaaataactttatcttattattttgggattactatatttaccttaaaattataaatttcaataagatatattaagttggtaacagtttttttcttccttttgaatttagtacattgcctcttaagaataaaaatacaaatatgtaaaagtgaaatcatcagagccattattctaatttcaaatacttatagaatctccttttaacttctttgcatattagtcttagcaccaacgctttctaataaatgtgaaaataaaatgyttactgtaattactttcatgctgtgtgaaaaattactttgcatcaagcaaacatgtagatatattacaattatcaaaaaagattcagtaagtgaaaactacttaccaaaaataatattttcttagtttctcctcttatgaagctttatctttgctatccatagctggcttccagtgcttttttttttctgtagtattcacttaaatgtatatctctcatgaggatcaggtaatggttcttcaaaagtccccatgaggtctttcacactgcaagtccctgacatgagcacaatctatgttctccatctgtcctcctgaaattctttttcagcctgactcctctcatctctctagggctcaagcctggctaatgtctgctgtattcacccgg

SEQ ID NO: 93767 - DNA, 749 bp, Homo sapiens
gtagaaagcaagcaagcaagctattagattaaattaaagatcacttatgattcagtttggagacaatgaactgttatgttttattatatattattataaaataactttatcttattattttgggattactatatttaccttaaaattataaatttcaataagatatattaagttggtaacagtttttttcttccttttgaatttagtacattgcctcttaagaataaaaatacaaatatgtaaaagtgaaatcatcagagccattattctaatttcaaatacttatagaatctccttttaacttctttgcatattagtcttagcaccaacgctttctaataaatgtgaaaataaaatgtttactgtaattactttcatgctgtgtgaaaaattactttgcatcaagcaaacatgtagatatattacaattatcaaaaaagattcagtaagtgaaaactacttaccaaaaataatattttcttagtttctcctcttatgaagctttatctttgctatccatrgctggcttccagtgcttttttttttctgtagtattcacttaaatgtatatctctcatgaggatcaggtaatggttcttcaaaagtccccatgaggtctttcacactgcaagtccctgacatgagcacaatctatgttctccatctgtcctcctgaaattctttttcagcctgactcctctcatctctctagggctcaagcctggctaatgtctgctgtattcacccgg

SEQ ID NO: 93768 - DNA, 749 bp, Homo sapiens
gtagaaagcaagcaagcaagctattagattaaattaaagatcacttatgattcagtttggagacaatgaactgttatgttttattatatattattataaaataactttatcttattattttgggattactatatttaccttaaaattataaatttcaataagatatattaagttggtaacagtttttttcttccttttgaatttagtacattgcctcttaagaataaaaatacaaatatgtaaaagtgaaatcatcagagccattattctaatttcaaatacttatagaatctccttttaacttctttgcatattagtcttagcaccaacgctttctaataaatgtgaaaataaaatgtttactgtaattactttcatgctgtgtgaaaaattactttgcatcaagcaaacatgtagatatattacaattatcaaaaaagattcagtaagtgaaaactacttaccaaaaataatattttcttagtttctcctcttatgaagctttatctttgctatccatagctggcttccagtgcttttttttttctgtagtattcacttaaatgtatatctctcatgaggatcaggtaatggttcttcaaaagtccccatgaggtctttcacactgcaagtccctgacatgagcacartctatgttctccatctgtcctcctgaaattctttttcagcctgactcctctcatctctctagggctcaagcctggctaatgtctgctgtattcacccgg

SEQ ID NO: 93769 - DNA, 501 bp, Homo sapiens
tgacctttttgcaaactcagtatctaagaaaaatgtagttaccataatactgaatgtgaatggagatataaatattatcttgcctctctgagtcattcaggaaagatttagcattttttataatagggattctatagtattttctcartgtgtctaaatgcagcaactatgacttggcagaggcaatgataacagtctttttcctgttaacaacaataatctccaaaagctgaaacttcatatttacagttatttgatataaaggaatttatggcacattaaaaagtgcattgcttcttctctcagtacctgtatgtgaaatatagtgaaaatatatatttttatagttgttgactattttgaagtatatcatgagagcatccactataatgcctggtaattaatatcagcagcaaaacacattactgtctaaattaatgcccatattctttatttcatttcttcatttaattcagcacttcaatattagcatatatgtta

SEQ ID NO: 93770 - DNA, 1040 bp, Homo sapiens
aaataaaagcaaatttctgcctgaatgtctaactaactgttagaaaaaacagctctaaccaagctgttttcttatttcctgattcacaagtatgaagtcacatcaaatagtatcatttgttctagaggtaaagaatgatgtctctgtcctttttcagttctattttttaaactttacagtaatgttggttcaatttctgtaacagtggttcattgatgttctgttttgttcttttttgttttgttctaagccactgtgtttttgttttttgtttgttttaagccactgacttcatttttgttattgtggtaaaatacacataatataaaatttgccatctcaaatatttttaagcatatggtttagtggaattaatacattcctaatgttgtgtatccaacactgtcatccatcttcataacacttttcatcttgtagaactgaaactctcaatatattaaacaataactctccattttctctgaaaattattccaccattttctctgaaaataaatcaccattttctctgaaaataaaccaccaacgtggttaggtattagaaggttgatccttttgggaggtggttaggtcatgaggtcagagctgtaaagaatcggattagtgcctgtataaaagaggttcaagattgttgtcttgctccttccacatgcgaggacatagcaagaagccttatgtctgaaccaggaaactggcccccctcagacactgaatctgctggtttcctgatcttgaacttccctgcctttagaactctgagaaataaatatttataagccactcaatttatggtattttttaatagwaactcaaacgtactaagatatctcctcccccagcctctggcaaccactattttatttttgtctctaaaagtttaacttctctaagtactctatgtgagtgaaatcataaagtatttgtctttttgttactagtttatgtcacctagcataatgtcctcaaagttcatccatgttgtagcatatgtcagaatttcattccccttaaaagctgatt

SEQ ID NO: 93771 - DNA, 2752 bp, Homo sapiens
tgcattaaaagaaaatactcctcattttctttgtcataggtaaagttagttgtaatagttgaaatgttcatggtagtaaaaaaaagaaactggacattatgtgttatctaaaaagaagtcataaaaatgattaaaatgttccagacttaaaacttattaatagcataaattctaagtggtaatttctaactcatgagggaactctctaattatgaactgcctttcgccatttttgctttctgaaatgtaatattagctagtctaatctaggaaagcatatcagatgtctggatgaaactttgaaacaccaattagttcatttactaaaacatatcaggattagtattccttatgaatttctcatractcgaaactttgaatctaacgtaagagagtcagggaatagaagtatacaaagatccatatatttttaatgcacaaagcaaatctttcaagataatgctgtttacttctgagactcaaccaaaaacattttaaattttattttttcaattattttactcttccacttaccatgaattttgtatagtcatcccaaagtacacttgatctacctatacaccgaaatgtacggaattgaactaaaatgcaatgacgtctatacctgtattagctcacaggaaatcttaaaagattattcctcttttctttcttcttttaaaattctatgtttatgatgtatgttagagtaaggggctaagagaataccgttgtgttcacttaaatgtcagaaggggtgtgaaaatagtttcctgctaggaaaaagaacaaagtaagcaaaggtattttggaaactgtgatgagcctagcttgtagtatattatccatgttaaagataattaactataatactaaaaaatactttgcatttgcatatattttatttactcgtattttaatggtgaagtcatagcagttttatgaggtttaagtgagcttcatgagctttagtagaaacccagatgccatttttcatcttctatgatgggctattttttacaagttctaaaggttaaggtagcatattgatttattagaataagcccatttgtaaatttgaaattccaagtattatctatattacttatatattaatatgtagacataaatagttctattttaatagttctgtaatattatagcacaggatttaactggagcatgcatttcagtttatcaaagattcaaaatgtctcaatatttaactctggaaaaacatatacttcaatacttcaaaatatctgggcttattttttcatggcatgactgaatatcattctatgttataccccattatgtcccatcacatttcttgatctagaaaagaaaaccagtaaatctagagtgattaaatagatggaggatgaacaaaagagttaatgattcagtgaaagaaaatttctgaaaataatttttaaatgagaaaaaagtgaatacagagagggtaaaaggatggcttaagttgaaaataaatcatatatattttaggaagctagctagtgccctctgaaaaagataagtctatgttctaatccctggaacctgtggatattaacttatatggcaacatatgtaattaagttaaggattttgagagaaggaacttatcttgaattatctgggtgggcctcaaatgcaatagcatgtattcttataagagagaggcagggggagttttgagagagaagaggaggcaatgtgagtgtgcagtaatgcaaccacaatctgaagaacccctggagccacaagaagctggaagagccaaggaatatattctcccctggagtctctacagaagtaggaagtagggtcctgccaagaccttggtttcagactcctggccttcagacttgtgagaagatagtttttgtttgtttgtttgtttaagccacccagtttgtggctgtttgtcgtggcagtcttagataacaaatacactttacaactcactatttcaaagaaccctgctgttaaaaattatacgagatgaatagaacagttttgtcaactgtcctcagttttatcacactaagcaagctagaccctggagacatgggtgcacgtgtcttacaactcagcaaagttgtgagaaggggttgcttttgccacctaaagggctaactggaataagcttacaactgcaagaagcagtcaatgaggaaaatcaacctgcgaggtttcaggtcacctacatcagtagactgtgtaggtttaagctacacattggcttaaaccaaccccaagggatgcttcaacattgaaatgttatgcccattacacaatatagcagagaaaagatgtttccagcagcttgattatataggaaaccagatgacagaatctactggtagattcggttgacagcaccagagattaatgaagatgcacttttattctttttttgaacgtgaagatacaggcaatctgcagcaaaatgcagcatttatttataaagttttaaattatctatgtctttcaaattgttctaattgatattcctaaatatttagcaatcaagatgttagttctaagctattctaattatgttcccactaactacactttcttcatatttctttactttaacagacttgtttctgacattatgtttttactgaaatgtttatgggcatcgggagactaatatttcttgacaagtcaggcaagacaataatgtgaaaaaaagcatagtttttatatttagcttttttgttttgtctagttgcttaaa

SEQ ID NO: 93772 - DNA, 2752 bp, Homo sapiens
tgcattaaaagaaaatactcctcattttctttgtcataggtaaagttagttgtaatagttgaaatgttcatggtagtaaaaaaaagaaactggacattatgtgttatctaaaaagaagtcataaaaatgattaaaatgttccagacttaaaacttattaatagcataaattctaagtggtaatttctaactcatgagggaactctctaattatgaactgcctttcgccatttttgctttctgaaatgtaatattagctagtctaatctaggaaagcatatcagatgtctggatgaaactttgaaacaccaattagttcatttactaaaacatatcaggattagtattccttatgaatttctcatgactcgaaactttgaatctaacgtaagagagtcagggaatagaagtatacaaagatccatatatttttaatgcacaaagcaaatctttcaagataatgctgtttacttctgagactcaaccaaaaacattttaaattttattttttcaattattttactcttccacttaccatgaattttgtatagtcatcccaaagtacacttgatctamctatacaccgaaatgtacggaattgaactaaaatgcaatgacgtctatacctgtattagctcacaggaaatcttaaaagattattcctcttttctttcttcttttaaaattctatgtttatgatgtatgttagagtaaggggctaagagaataccgttgtgttcacttaaatgtcagaaggggtgtgaaaatagtttcctgctaggaaaaagaacaaagtaagcaaaggtattttggaaactgtgatgagcctagcttgtagtatattatccatgttaaagataattaactataatactaaaaaatactttgcatttgcatatattttatttactcgtattttaatggtgaagtcatagcagttttatgaggtttaagtgagcttcatgagctttagtagaaacccagatgccatttttcatcttctatgatgggctattttttacaagttctaaaggttaaggtagcatattgatttattagaataagcccatttgtaaatttgaaattccaagtattatctatattacttatatattaatatgtagacataaatagttctattttaatagttctgtaatattatagcacaggatttaactggagcatgcatttcagtttatcaaagattcaaaatgtctcaatatttaactctggaaaaacatatacttcaatacttcaaaatatctgggcttattttttcatggcatgactgaatatcattctatgttataccccattatgtcccatcacatttcttgatctagaaaagaaaaccagtaaatctagagtgattaaatagatggaggatgaacaaaagagttaatgattcagtgaaagaaaatttctgaaaataatttttaaatgagaaaaaagtgaatacagagagggtaaaaggatggcttaagttgaaaataaatcatatatattttaggaagctagctagtgccctctgaaaaagataagtctatgttctaatccctggaacctgtggatattaacttatatggcaacatatgtaattaagttaaggattttgagagaaggaacttatcttgaattatctgggtgggcctcaaatgcaatagcatgtattcttataagagagaggcagggggagttttgagagagaagaggaggcaatgtgagtgtgcagtaatgcaaccacaatctgaagaacccctggagccacaagaagctggaagagccaaggaatatattctcccctggagtctctacagaagtaggaagtagggtcctgccaagaccttggtttcagactcctggccttcagacttgtgagaagatagtttttgtttgtttgtttgtttaagccacccagtttgtggctgtttgtcgtggcagtcttagataacaaatacactttacaactcactatttcaaagaaccctgctgttaaaaattatacgagatgaatagaacagttttgtcaactgtcctcagttttatcacactaagcaagctagaccctggagacatgggtgcacgtgtcttacaactcagcaaagttgtgagaaggggttgcttttgccacctaaagggctaactggaataagcttacaactgcaagaagcagtcaatgaggaaaatcaacctgcgaggtttcaggtcacctacatcagtagactgtgtaggtttaagctacacattggcttaaaccaaccccaagggatgcttcaacattgaaatgttatgcccattacacaatatagcagagaaaagatgtttccagcagcttgattatataggaaaccagatgacagaatctactggtagattcggttgacagcaccagagattaatgaagatgcacttttattctttttttgaacgtgaagatacaggcaatctgcagcaaaatgcagcatttatttataaagttttaaattatctatgtctttcaaattgttctaattgatattcctaaatatttagcaatcaagatgttagttctaagctattctaattatgttcccactaactacactttcttcatatttctttactttaacagacttgtttctgacattatgtttttactgaaatgtttatgggcatcgggagactaatatttcttgacaagtcaggcaagacaataatgtgaaaaaaagcatagtttttatatttagcttttttgttttgtctagttgcttaaa

SEQ ID NO: 93773 - DNA, 1121 bp, Homo sapiens
attttgatgaaagttaaattcttaattattgtcacttgattgtcactcatttgcaaaaatataatcgttatacagcagtagacttaattttcaaaggcattgttgcaaaatatctcattgcttcttccagtattattccatggtagagtccttggatgctcattagcttgcacttatttctttgcatgacttgacaaacttgtaggtttatagtaaactcagaagcatctgcatcatgcctcgaaaacctaaacagtgaaactgctgatctgtggaattcccatgatgagacatctggtggacaaatatagcagaagactcaatacagattttgatgatcttttttctaccttgttagagtacatggacattttataggcagaaagtggatccaaattttgaagtttaaacaagaagctgaagcataggcataggtgcctagtggtgaccaattgagaaaatctgttcaaaattttagtttgctgccacccatctagttactataattattttagttaaccagtgtctgtacaagtattcacatctgcaaaatgaaagttgttgataacacaggactacagtacacaagaaagaagaatagttaacaaacaggagggcaacagaaaaaatgactaagtccaattaattagatttgcttccttgtcctttctccaattaaggaggaatagaaactcatgaaattctgctgattaaaactgaagttttatagaatggctatagtaaggaataggttattttatgtaagtagaagtcataagactatcacataaaataccctgacagagctttgatcagaggaagctaccctgcaatcaaaagttatgtaattagcatctgaggtactgaacagagaaatattaatttctttccttgaatccaaaattgtgaagtaaaatccatgacctctgaattaatgatggacatcwgagactggcaaacatttcgtaaagggctggatagtaaatattttcagcttttcaggccatatggtttccatcacaactattccactctgctatgataatgggcaagctgccataggcaataaataaatgggcacagctgtgttccaataatactttatttacaaaaacaggtgg

SEQ ID NO: 93774 - DNA, 1537 bp, Homo sapiens
ttgacctcaaacctacacttttgatatcctattaattcagaaataaaataattacaaagctaaacctcatgggcttactagcaaattaaactcacatgtaaccgttacttgtctatacaaacattaatacattttataagattgaggtaaaatcttattaacagatataatctagcatttgctttaataaactatagaagttataggggagcacacagaataatgttattgaatctagtcagcaagagttccatagagcagcaggtagcatctgagctggattaagaataaggcactagatcttaggaggaaatgaatctcattagatcttattagctcacattcacacaatcaagaatgaccaaagtatttatcagggaggcaatatgatctgatttgtgctttgggagccaattcagttggtgaatctgcagagttcagaaaagagacaattagagaaatgatggtggagaaataaaagagaatttcaaaagacattcttaaggcttaacaatcaatctgacaatgacagcttttcctgtttcccaaacagtgagactacctttgcattgtgacagaatagtcagtgaatcatttggagataatgtaacagagagaggcaaaacactttcattaagataaaaattgcctgggtgacagagtgagatctgttggaaaaaaaaaaaaaaaaagaaaagaaaaaaaaattggacaacggggacaagcaatattttatgaatagtggctagataagaaaaaaaagatacagaaagcttagcctagtttttcttctagggtttttatggttttagctctaacatgtaagtctttaatccatcttgaattaatttttgtataaggtgtaaggaagggatccagtttcagctttctacatatggctagccagttttcccagcaccatttattaaatagggaatcctttccccattgcttgtttttgtcaggtttgtcaaagatcagatagttgtagatatgtggcattatttctgagggctctgttctgttccattggtctatatctcygttttggtaccagtaccatgctgttttggttactgtagccttgtacatcattctcagcaaactatcgcaaggacaaaaaaccaaacacctcatgttctcactcataggtgggaattgaacaatgagaacacatggacacaggaagggaaacatcacacaccggggactgttgtggggtggggggagggatagcattaggagatatacctaatgctaaatgatgagttaatgggtgcagcacaccaacatggcacatgtacatatgtaacaaacctgcacattgtgcacatgtaccctaaaacttaaagtataataataataataataagagctttgagactcactcaggaacaacatctgagaagtcagttaacctctttgcatgttagatttcttatctctccaccacaggtttggaatatttacaaggcaaagtttgaggaaatagaatgaatgaaagggagcgtaagaaaacattctgcagattgtgtgt

SEQ ID NO: 93775 - DNA, 1537 bp, Homo sapiens
ttgacctcaaacctacacttttgatatcctattaattcagaaataaaataattacaaagctaaacctcatgggcttactagcaaattaaactcacatgtaaccgttacttgtctatacaaacattaatacattttataagattgaggtaaaatcttattaacagatataatctagcatttgctttaataaactatagaagttataggggagcacacagaataatgttattgaatctagtcagcaagagttccatagagcagcaggtagcatctgagctggattaagaataaggcactagatcttaggaggaaatgaatctcattagatcttattagctcacattcacacaatcaagaatgaccaaagtatttatcagggaggcaatatgatctgatttgtgctttgggagccaattcagttggtgaatctgcagagttcagaaaagagacaattagagaaatgatggtggagaaataaaagagaatttcaaaagacattcttaaggcttaacaatcaatctgacaatgacagcttttcctgtttcccaaacagtgagactacctttgcattgtgacagaatagtcagtgaatcatttggagataatgtaacagagagaggcaaaacactttcattaagataaaaattgcctgggtgacagagtgagatctgttggaaaaaaaaaaaaaaaaagaaaagaaaaaaaaattggacaacggggacaagcaatattttatgaatagtggctagataagaaaaaaaagatacagaaagcttagcctagtttttcttctagggtttttatggttttagctctaacatgtaagtctttaatccatcttgaattaatttttgtataaggtgtaaggaagggatccagtttcagctttctacatatggctagccagttttcccagcaccatttattaaatagggaatcctttccccattgcttgtttttgtcaggtttgtcaaagatcagatagttgtagatatgtggcattatttctgagggctctgttctgttccattggtctatatctctgttttggtaccagtaccatgctgttttggttactgtagccttgtacatcattctcagcaaactatcgcaaggacaaaaaaccaaacacctcatgttctcactcataggtgggaattgaacaatgagaacacatggacacaggaagggaaacatcacacaccggggactgttgtggggtggggggagggatagcattaggagatatacctaatgctaaatgatgagttaatgggtgcagcacaccaacatggcacatgtacatatgtaacaaacctgcacattgtgcacatgtaccctaaaacttaaagtataataataataataataaragctttgagactcactcaggaacaacatctgagaagtcagttaacctctttgcatgttagatttcttatctctccaccacaggtttggaatatttacaaggcaaagtttgaggaaatagaatgaatgaaagggagcgtaagaaaacattctgcagattgtgtgt

SEQ ID NO: 93776 - DNA, 512 bp, Homo sapiens
aggggttaaccagaaccacaaataataaatttgagtgtgcctgcccatacccatagaatacccgtagaataggcaagtatatggaaatttatctgtactactaatctgttgttgcattaataattacccaccaaatctcagtagtttgaaataccaaaatttattatctcatagtttctgtaggtcaagaatctggacatagcttacttaggtgtctctggctcaagcccttcatcaggtcataatcaaactgtctaccaggaaagcagtctcaactggaggaggatctgtatctgagctcacccttgtggttgttttcaagattcagtttctcaaaagttagaggcctcaggccctctctggatatctacytcagttccttcctgggcctctccataggataattcacaacattgtagctggcttccttcagagaaagtaaacaagagaggtagaaagagcaactacccaagacagaagacaccatcttcttataatctaatctagctact

SEQ ID NO: 93777 - DNA, 1462 bp, Homo sapiens
  misc_feature (1)...(1462): n = A,T,C or G
ttttcaagagaagtctaaaatctgtacttttatatgaaattaactgacagttaattataaataaattgtggactaacactacaggtgtcaaacaaaaacagatctatgggctgcacatgacttatactgttttgtgaccatgagactttactcaaaaactccatttccaaactactgattttaaaaaatccttctctggagtcttcaaatttatcaacatcctttttgaaatacaaaaatctaagctttannnnnnnnnnnnnnnnnnnnnnnnnnnnnnnnnnnnnnnnnnnnnnnnnnnnnnnnnnnnnnnnnnnnnnnnnnnnnnnnnnnnnnnnnnnnnnnnnnnnaagcaatttcttgtatatgtagtgcagaatcatcttactctacaaacccctatgcttattgaccagtactttttctgcccatctgcggtataaatgaaaaacagctgatcgcaaaaccagaggttactccctgttataagatttgttactctcgtttctatagttctaaaaatattgggcttttgccagaactgaagacagagttctgaggcccacctggggagagggggtggggcgcatcgcactcccagacctgtgctccattcaggcttcagtctgcttccagccgcccgcctagggggtcctgggggctttgggtttgtggtggacgccccctgagtatgtcccttgtgcttgtgtggcaggttggggtttcagaacagaagggccaaagagaaacgcctgaagaaggatgcagggcggcaccgctgggggcagttctataagagcgtcaagaggagccggggcagcagcaagcaggagaaggagagctctgcagaggactgtggggttagtgacagtgagctgagcttccgaggtgagcagggctggaggggccaggccgaggccttaggaaagtcccctgggaatctgtaatccctggcactcaggagggatctttcttgaggccttggcaactccctcctgaacacaggcttttccttaagacttgcagtgaagggtgggggaaatggtagtggccctttaccatgggacaggagtaggaaacaagattgctgaggtctggaagctgggatgggccaggccccgtcctgtggccccaaggtctcccctcccctcctgctgactggggcctccctcatcagcccacacagctatgaacagatgactgggttccagccttgtgcccctagcccctctcccatctttgtcccctttgctgggacactggcctactcccatagtcccctagagccaccccttcctccagtcctggtggtggggaggtcatgctccacaggttttttcctgggaaatcagtactgtgagtgcatgtgagatggggaactggcttcacttccgaaatccctttccccaccactcacttcattctgtcccmtgcacacaagctttgcagcatgcactatatt

SEQ ID NO: 93778 - DNA, 2229 bp, Homo sapiens
  misc_feature (1)...(2229): n = A,T,C or G
gcattggcattttccatgtcatttatctaatgtttatttgcaacttggtagaatcttcattattgaaatgtagggtatttttacaattattagatgtagagttttatgaaaacatattactttgattttagatttttatctagcttgtttggtacacagtattaatttgtataagataagtaacatttaaaaatatcaaagctaaaatatgtttatatgctataattaattgaattttttcaactcacttatattttcataattggtttaccaggatattacaccttcatacttcacaaaatcttctaagactaaatgaaatggagattgtatttcatctcttcatcttatttcaacatcctctacaagcctatttcccagcctgtggaataagcaagataagatgacagttccctctggagtgtatcaaaacatgccatagcaataaaaaccatgatagcagatattaaagtttctgaccccagttgtggattctcagcttcttagccactggagaatggccttgagcctggcctcactatctctctttctctagtcagtgtacatggtgtttcacaaacactatgaaactaagaaatctttttttcagaattgagttctagggatgatttaaatcttttaacccaatggcaaattcctccaacctgcakggttaatcaaccattcagtcaatcaacttttgaagacctgaaggaaaatgttacagaggtctacctaagacacatggggggtcacattaaagggataaaaatgtgttgttacttaaaagatgttacaactgaattatggaaataaatgatacatgtaattggaatagatatgaccaaattaaaaataaactgactgttgacatagccctttattttctactgtgtttaagacactatgttagacataaagatgaattaggcaaagagacttccctcacagatccttgcactagaaataagaaaggttaatgcatacatagagtagaatagaatatagtaaatgataagtgctgttaagaaagatatgaatcaacatcaatagaagatcccaagagaaagtgattnnnnnnnnnnnnnnnnnnnnnnnnnnnnnnnnnnnnnnnnnnnnnnnnnnnnnnnnnnnnnnnnnnnnnnnnnnnnnnnnnnnnnnnnnnnnnnnnnnnnttaatataaatttcaggatgtggtattaagaagatttttcacatatagaaaaaaatgtggcatggataaattttaaaaatgacttgtacactaaagaattttatattaattctgtagaatataattttcaaaactattttctggaacatcagtacctgttgagatgtaaatggatattccattagaaataaagattctttagaagaataaaatttgtgaaagaatgagtatcctataaatcaagagatccatagggttagtactcatgaagtagagactgttattacaattatgaatattactactacgactactaccaacaccaccattgctatttctaaatagaaactaaagccattggaatgtaaggatgagacgttatgggcttaagagtgagcaagtagcctgaatggcgctctgccttgtaaatgtaatcagctatgtttttgaatgagaacagaagagacagggtgactttgctaaaacagaggccagattttgtcacttttctaattattactttgcactggtttcttgtctcacttacagaaaaagccatgattctcattctggtcttttaaggccttctgtctagtctctactatctctccatcattatcgcctgtctctctctctaaaatactgctttagccacactactctattactaccaaactttagtataactacacaacccattatgacttttttataactttcaatccccttaacttgttaaatttttatttatcaaacttatcaccctctcatatccaaatatttttccctctgtcactaatagtcaaatgactcctctattataagattgctggaacaaattaatttatgtatttccagtgcctataacagtgccaggcatttaatagttactcaaataggtacagcaagaactcaatgaagagaaaattaaaggtgtggaatcatttaaaagtgttttgctatagcaagtgtaaaaggaaataggactttaacttaggtgagaatagagaagacattaaagagtaatatttaaacaaaatcattgttttaggca

SEQ ID NO: 93779 - DNA, 765 bp, Homo sapiens
cactccagggctattgagtcagaatagctggggctgggccaagtgtgtgcattttagcaagcaacccatataattccaatgaacactgaggttggcaagccttcrtcataggattggttctgagttttgggggcctagaatcatcagctggaaataaacttgtccacactgggcatgtgcagagagtggaaagtgaattataaaaggataaaaaagtgagctgtgtatggccaagccctagaatgacatattctagaactccagttatccatattgtagaactcactgtagtccatgtgaagggcaccacctgtgttgttcagtgtacaagccacacatttgtacctagcagtcctgcccagaccctctgacccctctgaaactcccaggacattatacacccctaacgtcctgagggtgggacaaactacgcccccagccaagcagtctacacaactgcttgtgttgtccagagccaggcaaaaggatgcttctgtgtccctgggagcacaggcctagcccttgtctctgagactggctgaggctgttgcagtggtcccagaggcatccctgagggtggggtgattcttacctgcaagcctaacttgcttggacagtctcttcttagaatcgggaggtgaagttcctgaggctgttggccccagctaaggttcccagcatgttcctatcgaaaccttgctgcaaagggagaaacagcaaccaaatgacacaaaactgtgtggggcttgctgtggggtcagacac

SEQ ID NO: 93780 - DNA, 564 bp, Homo sapiens
  misc_feature (1)...(564): n = A,T,C or G
gtaaatcanaccccaaaataagtaattgaaagggatgagattcaaatcaacattggcagaagctagtactttctttctcttctgcaggggattgtcttttgcagtcctgaggctgggtacactcccctttggatgcttgttgctctctgagagcatttttctggcttcaggaacatcctgctggaaggggcagagttggtgcctcatccaatgacagatggacttagtgtatcacaaccccagcttcctctctccctagttgtgaggcctctgaggcagttccacattgtctcctagaggtccccagtggtaagactgagctccggtcacccacagtggtaatttgcttgacaacacacctgttatgcacagccgtccttcacctttctcatttccttctcccctacctgtgtatcctgagatcacctcccaaataaactacctccacttcaatctttatctcagsttttgcctctgggaaaatccaaactaagagttttcttttgaggaaattgaggaacctctcaaggatctggttttctcactttggcaaggaggaggatc

SEQ ID NO: 93781 - DNA, 623 bp, Homo sapiens
acttaatgcatagtttgcagtgagaagctgcataaatcaggactccaaacaaaggttctctaaccaggcctgggctcccagtcatgcctgagagaggctggtgagccccttacacaggggatggggagctgggcttccatcccccagcttgtccagtttgcgccccagcttggagtgcctttgcccagggccccatgcagtgttcttcagggtagctttttcttattatctttgtggttttcgttgatttccacctttataagtggggacaggggatgacggtagttacaccgcctctcctccatcttctagagttactctccataatctctccaccctccagcacatccacaagtgttaattgagtagaatcccaggacgttagagctggcaaagcccttagagataatcgtttctggagttattcaaagtctgttcccaggggtgcctcaggggctgccttgggggcagtaaaygggtgggagagaggatcatgtgttaatcagagcggctccctttttatttatttcacacattgggcttctgtttcaataaaagggttgagccactgaaaaacttctgaaaatgcctggtctaatctaactcttttgtttcacagaatg

SEQ ID NO: 93782 - DNA, 633 bp, Homo sapiens
caaaacagaaaacttctagagtttgagagcaaacacttttttttttatatttacttaatttttttctttcttttttttttttttttttttttttgagaccgagtctcactctattgcccaggtgcccagrctggagtgcagtggtgcaatcttggctcactgcagcctccgcctcccaagcttaagcaattctcctgcctcccagattcaagcaattctccatcctcagcctcccaagtagctaggattaggtgcccaccaccatgaccagctaatctttgtatttttagcagcgatggggtttcaccatgtcggccaatggccaggctggtcttgaactcctgacgtcaagtgatctgcttgccttgacctcccaaagtgctgggattacaggcatgagtcaccatgctcggcctatttatttaatttctaacaagcctctatttccttctgctgttgctttattcttgtattgggtaacaaccatttacaataattgtccataattagaaaatatgctattcagtaatggagacaaggagctactatatgaataaaatatgctacacataaaaaaggctaagatttgaaaatgtagaggtagcgattatgcctgaaaactaagataccatt

SEQ ID NO: 93783 - DNA, 575 bp, Homo sapiens
cctgcagttcatgtggaagggtcaggaagctggctggtcagagggaaagtggagccctgatataggctgaccccacagggtgctctggagttggaatgtgccctttcaagttgtacagagttgggcctaagtggccaggtcttcatattcctgcatcagtgaatcattggatctggctctgtgcaggccaggctgtccctgaaggggctgactcccagcactgggcaaacgccgtctccttccactttcaaagccaaactgagctctgtagcaaattcctaaaggtatttatgttttctctgatatattcatgaataatatgagttgtgtgtgtttccctaggtctcctcttcttttagctatggcaaatactgagttgtgatttgttttttatatctatttctccttcactgaactaaactctttgtggatcaaggctgtgtgtgtcactgtggattccatccatcggcacaggcctgrcatagcacagtgtctgctcggtacaatatttattcccaaatctatttctttgtcaattcttccctcctgcagggctgggtgcagctgtaggcctg

SEQ ID NO: 93784 - DNA, 1140 bp, Homo sapiens
tgcatcttttttatggctgcatagtattccatggtatatatggtgccaggcactcttttaagcattttacatatactgcctcacttaatcttcataacaatcctatgtggtcagagttagtactgttactatctccattttatggatgagaaaactgcaacagaaagttttgtgtcttatatgttaataaatggtagagccaggtatggtaaagatgatgtcatgtttaactaaattgtttaattttccttccagttgccacaggaagattttatttccagctgcccttcatcagtcacgtgactgattctggccartggaatgtggccagaagtgatgaaggtcacttatctggcctaatcactgctttctgaagcatggttttttattcactctctctctttctccctctttctctctctctctctagaagcaaatggccccgagatggcaaagccataccatgaaaagcgactggacctctgaatcacctctttgagcagagagagccagaagatcctcttcactcacactgaacagtggcacgtgggtgaaatcacactgtgctgagtttctggaacctcaggaatctttggtacagcaaagatgatactttgattaatacgccaaactccaagcttagaaaatctggatgtacagcctgtgttcttaattgcaatgttattttttctcttccttcttccttttctgaataataatacttctaagattgctgaataaatccgatattgattgagataatataagtgtggtaactataatgcgtttgtagcatacctggtattgtggtgactcagacacttgcattcttagtctaggaggctggggtctaggtgtcattttcgtttccaccttctgctatactcagtgcattgtttaacatacaggaagtaaacacttgctgaattcaacgtagaaaattggaattttcaaataaattagttataaaaatctatttcaagaaaagtattcagtgtactaaaagaaaaaaggtaacctctttcaaacattaagaacgcaacctattgacactgaacgtacacacgctgaagggttcttacctgactgttgacacatgtcaggtggtaactccttgtaacaagtttattaggaaaaaac

SEQ ID NO: 93785 - DNA, 1134 bp, Homo sapiens
ttaaatcaatataccaagatgatggagaaagtgcatatttgtattatagtgtagctttcaactaatgtttggatgaattcatggaaatttactcaaacttcgatgtcagattttactttaaataaacacaagtttaatattagaataaaagagtgccttggtcaaatgggagttgaattctgccagagtgaaaactcctgattactacatagaagactgtgttatttgctaaacatccctaacatctcatctcaagcatcaaagaagaaaattcaaccataatgtcatgtatttacctatcttttctcttgtcacagtgtggttcacataaaagtcaaatagaatgatttccctgggaaatgattccttctgtaaaatgagactaacgatcattcctgccagagtcaacttatggaacaactatgaagcaaaaatgacttgtgtatgaaagctccttcaacactgctgcataaayagtattattaaagatcagttggtttgaaaaacataaattatattttgaaatagaaatagctttatttctgatgaaagtaatatgttatcattgttttaaaaagtcagtcaatgaaagagataaacattgttaacatcttgtcacattctcttattacgtatgtgtgtatatatagctatctctagtgtgaaaatgaagagttacataaatattttgaatatctggattttttaattttatatccatgctacaatttacaaaacttactgccattgaaagagtttattttctatattttataaattgcaataaaataaatatcctactgtgttaacatgtacaactattaatttaagatgatataataaatgtagattaagataatcgctctccctaaaactcttaccaatttgctctcccaccaacaatgaatttctgcttctttccacacttgacaatatatattatttgatcaatttttaaatgctttgaaagtgcaatagatttttaaaaggcatcttatatttttaatttatagtgaagtgaaacttttttcatatgtttagtgaccatttgcatttttgtctgaaatgtttctcttcccatttttttctttcccatttttttctttcccatttccctgtttctttctcattttt

SEQ ID NO: 93786 - DNA, 727 bp, Homo sapiens
tgtattcattgccacgtgcacagagcgggagctgcgaaagaggaaaaagcggaaattcagcctctgggtcagacaatgttcttccactggcttcatcatccaggtgagccctgggctgagcccggggagggtcggtgaagagggtcggggaagaaaatccgggcgacttgggctcatctgatacccaagaacttgttcacatacccttttcactgtgggtccaagtccacccagatgctcctgcggaggccagggctgggctgctccytcctcaccgaggcagcgggtagccagccctggagaggctgctgccacccctggccccgttccctgcacattcttcctccagactcaagcccatctgggtaaatgactcatcaaggctcaggccgtagcaatgttggctggaagtgtcacccaaacagtgggtcatacgaggtttctaccatctccctggaggctgtccctcaagacttttggacttgtggctttgaaacttaaggctgtcccagaaggcctccccactcccaccaggtatctgcccaaccttcctgtttccaggatgccttcttcacagacctccaccaacagcctgctggtgaaattatgaataaccttcagcaggagcacgtgcccgagtcataggaccttggagccagcatggccaacatgggtgcatgtttcacaagaggtgcctgagctctgctttttgtgatgatactcccag

SEQ ID NO: 93787 - DNA, 606 bp, Homo sapiens
ggatccagggtttgctacgtaaatctacatccatgcctgaacctggagtttggattctagctacagttacttgcaatagtaataattataggtgttaaattttaagatattttcactaagaaagtctcaagtaaggaagctcagtttaggggccagtgcgactgcccaygggcaaaatggcacgccttctctcccctttgctcaaatggctctcttgtttgagacacttttccttcctcttcacctgactagttatttgttcttcaaggtgcagctcaggggccacctcctccagaaatgccgcctcttctccaacccagctggaggaagtgaggcacctctggaatcccatagaaatccatgttttccctgatcacagcattcaccagagacacttatctcttttccttcactctgtctctcctattgaaccccaggggacatgtctaacttctcgttttatcccagcagggctcaatgtgctggctgaattaataggaggcacatctcatccattgctggtgggagtgtaaattggaaaactgcttggcagcacttcctaaagtagtggttctcaatacctggtgcttttgcccccccagggga

SEQ ID NO: 93788 - DNA, 1645 bp, Homo sapiens
tggttgaatctggaaatgccgaactcaagaatattaataaaaatcctacattaactcatttgtggtgagagtttcagtcaaatcacagctatccaactacacaatttgggtgttatttctggtaatcttggtccttctccttattactctccaacaaaacctgggcacttatcagactataattttgtttacatacctatcttctatctcccctactagattcttatctcttgaaatgtaggaactgtcttaagtcatctttttatccccagtgcacaacacagatacctgttcatatctaatgcatattcaaactactctcacaccttttgctcaagttgtttcctatgttatttccttgtttatcatcttctctgccagccaagatatttcattaactaaagccttccttaattatccctaccctctaaccctcgaaagagttacttacctgtgttttcttaggactttgtatctcaaagttcctgagatacttataaattataatgattagcacactgtgtctttatatagtctcctcaagatatgactggtgtcttgtccatttttgtagctctgtcatcttataactatatctagtgtagttaatggtaataaatgtctttcaaaggaattaaatgatgtatctttagtatatgtataaattaaatcactgtacatgcactagcaaaaattccagtttcataacaaaaaatgttgaaacatttgggcacctaataaaaatggcaataaatagaggacatcaggagaaaaagggaattttaaggaagaaagataaaagaaaaaattcaatttgctaaccaaccacattagtgatattgtaatatacatctggtgacaagtccaatagcagcaacagatactaattagcaaagaactgaattatccctggctcccttaacaagaaattagggaagagtctccactctgttatttctagtctcctgctggcttggtttccagcatgttctctctacaggttgcacatacaggatacttggcttccaagtctctctactggaacctcacaaaacaagctacgtacatgaaaactgtataaaacttctacataagtatggcagccctcaaaaaattaaatttagaattaacatatgatctaacaattccacttcygggtatatattccaaaaactaaatgaaaacagggattccaacagatatttgtatatcaacgttcatagcagcattattcacaataaccgaaaggtggaaacaacctaaatgtccattgatagatgaataaacaaaatgtggtctgtacatacaagagagtattattcagcctttgaaaggtgggaaattctgaacatgctacagtgtggatgcaccctgaagacattaatgaaataagccagacacaaagggacaaatactgtatgattctacttatatgaggtactagagtagtcaaattcatagagacagaaagtagaatggtggctgccagagctggggaatggggaaatgaggaattaaagtttaattggcaaggagtttcagtttgagaagacgaaaaagttctggagatgaatggtggtaatggacacaaagcaatttcaatgtacttaattcaacagaacaatacattttaaaattattaaaa

SEQ ID NO: 93789 - DNA, 1645 bp, Homo sapiens
tggttgaatctggaaatgccgaactcaagaatattaataaaaatcctacattaactcatttgtggtgagagtttcagtcaaatcacagctatccaactacacaatttgggtgttatttctggtaatcttggtccttctccttattactctccaacaaaacctgggcacttatcagactataattttgtttacatacctatcttctatctcccctactagattcttatctcttgaaatgtaggaactgtcttaagtcatctttttatccccagtgcacaacacagatacctgttcatatctaatgcatattcaaactactctcacaccttttgctcaagttgtttcctatgttatttccttgtttatcatcttctctgccagccaagatatttcattaactaaagccttccttaattatccctaccctctaaccctcgaaagagttacttacctgtgttttcttaggactttgtatctcaaagttcctgagatacttataaattataatgattagcacactgtgtctttatatagtctcctcaagatatgactggtgtcttgtccatttttgtagctctgtcatcttataactatatctagtgtagttaatggtaataaatgtctttcaaaggaattaaatgatgtatctttagtatatgtataaattaaatcactgtacatgcactagcaaaaattccagtttcataacaaaaaatgttgaaacatttgggcacctaataaaaatggcaataaatagaggacatcaggagaaaaagggaattttaaggaagaaagataaaagaaaaaattcaatttgctaaccaaccacattagtgatattgtaatatacatctggtgacaagtccaatagcagcaacagatactaattagcaaagaactgaattatccctggctcccttaacaagaaattagggaagagtctccactctgttatttctagtctcctgctggcttggtttccagcatgttctctctacaggttgcacatacaggatacttggcttccaagtctctctactggaacctcacaaaacaagctacgtacatgaaaactgtataaaacttctacataagtatggcagccctcaaaaaattaaatttagaattaacatatgatctaacaattccacttccgggtatatattccaaaaactaaatgaaaacagggattccaacagatatttgtatatcaacgttcatagcagcattattcacaataaccgaaaggtggaaacaacctaaatgtccattgatagatgaataaacaaaatgtggtctgtacatacaagagagtattattcagcctttgaaaggtgggaaattctgaacatgctacagtgtggatgcaccctgaagacattaatgaaataagccagacacaaagggacaaatactgtatgattctacttatatgaggtactagagtagtcaaattcayagagacagaaagtagaatggtggctgccagagctggggaatggggaaatgaggaattaaagtttaattggcaaggagtttcagtttgagaagacgaaaaagttctggagatgaatggtggtaatggacacaaagcaatttcaatgtacttaattcaacagaacaatacattttaaaattattaaaa

SEQ ID NO: 93790 - DNA, 569 bp, Homo sapiens
gaccatttgctgggctccttgtcttactctttgtcaacgaggattataactaatgctacatttatctggatatagcaagcaataagatggtccacagacatgacttttctagataatccccctttttatggaaaaatgttcaagtttattagtcatcagagaaattaattaaaaccaccgaatgggccgggtgcggtggctcacgcctgtaatcccagcactttgggaggccgaggcaggaagacgacccgaggtcgggagttcaagaccagcctgaccaacatggagaaaccccatctctactaaaaatacaaaattagccgggcktggtggcgcatgcctgtaattccagctactcgggaggctgaggcaggagaaccacttgaacccgggaggtggaggctgcagtgagccgagatcacgccactgcactccagcctgggcaacagaacaagactccatcgcaaaaaacaaacaaacaaacaaacaaacaaacaaaaaacaaaccaaaaaaacccaccaaatgatagcactacacacctaccagctaataaagaattcctttgttt

SEQ ID NO: 93791 - DNA, 570 bp, Homo sapiens
aataaagggtaggaaggtatctgtagtattgtctgattaataactggctgttactgtgttggactscagctaaactgaggcttcctaaagaatggtacattcatatacctttagtttatacttcttaaggaacactagaaagtgacttcactacatatttttttccccaatccccaaagtcccatataataaatgtatgtgcttttttcctgttgttacgtacaaaacaaacagagaaaacacaacaattctttctttccaaatgagaatctctttggtttcttattagccatgtgactctcttggctctcctttgccatgaccatttggatcttttggagtatataactttctgtgcttttctactcttaaaggaaactggtggtgacaaaagagaaagagaagaaagtggggctgtatacgatctatgtgaatcctgccaatacccaccagtttgcagtgggtggacgagatcagtttgtaaggtgagtttgtggctcttttgtgtctttgacagtttgtaagactgatgcattgtatactaccaggtgctcctttatggagagttac

SEQ ID NO: 93792 - DNA, 1318 bp, Homo sapiens
ccaccataagtcacttcactagggtaatagagacactcctatctcccaggaaattcccagggttttttaagctccatgataggaatcagggacaaagactagaaaaattatttgttayaccatagtcagtctgctggcatcatgtctatgttccaatcagcgggacagtgaaaagtgccaataaggcagtttgaagacatgaccagaaagctgcacatgtgacttctgtttcagctccttggccagagcttcaacactggccatgccaactacaagagaggctagaaaatgtggtctttattgtcagcagccacgtacctagctagaaagcagaggttttattattatagaaaagagggagaatagatattgatgtagagttaccagtctaagccatgtttatttggtaattgaaggcagtgctttttctttgatgtcttgcttcagctctatcctacaagattggcatgcagtattttcattgcttctcagttcaaaatacagagtatactgaatgcatattgcttttgcagcatcataaagtctaaaaatcgttaagtcaaactactataaattggggacttgtctgtattttgtaatttctcttgtaatttcctctgtataccatgggtcacttaagagtgctttttaactcaccaaacaatattttccatttaagtaagcattttcttgatttccaatttaattctgttgtcataatataatgtggctatatgatatcaattctttgaaatttattgtctttgtgacccactacattatcagtctttgtaagttttcaatgcatgctaaagaaagaatatagtctgtattggctgatggcagtttatgaaccctcatcactattctggtaaaaagtttatatctctatctttttctttaaaagtagaatcatattgtatatagtatcttgcagatttatttaaacatgtaataatgtattttaaacatatttccatataactacatgtgacttggagcacatctttatttatcaggataaactccagtgggagactgtccttcaatggtatgctttttaaaaagggttcctctaaattattgccatgattatcaattcgtcctcctcccaccaacccctgagaagggttaaaccaattttcgctcccttcagtcctgtagaacgttgcccatttcttatatcctctcaagcattattatgtattatcatattttttatctttgccggtggtcaagctgcttccttttgctgatgagacggaagcttggatatatacagcagcaggcaaaataaagcagagtgagatccaggagt

SEQ ID NO: 93793 - DNA, 1318 bp, Homo sapiens
ccaccataagtcacttcactagggtaatagagacactcctatctcccaggaaattcccagggttttttaagctccatgataggaatcagggacaaagactagaaaaattatttgttataccatagtcagtctgctggcatcatgtctatgttccaatcagcgggacagtgaaaartgccaataaggcagtttgaagacatgaccagaaagctgcacatgtgacttctgtttcagctccttggccagagcttcaacactggccatgccaactacaagagaggctagaaaatgtggtctttattgtcagcagccacgtacctagctagaaagcagaggttttattattatagaaaagagggagaatagatattgatgtagagttaccagtctaagccatgtttatttggtaattgaaggcagtgctttttctttgatgtcttgcttcagctctatcctacaagattggcatgcagtattttcattgcttctcagttcaaaatacagagtatactgaatgcatattgcttttgcagcatcataaagtctaaaaatcgttaagtcaaactactataaattggggacttgtctgtattttgtaatttctcttgtaatttcctctgtataccatgggtcacttaagagtgctttttaactcaccaaacaatattttccatttaagtaagcattttcttgatttccaatttaattctgttgtcataatataatgtggctatatgatatcaattctttgaaatttattgtctttgtgacccactacattatcagtctttgtaagttttcaatgcatgctaaagaaagaatatagtctgtattggctgatggcagtttatgaaccctcatcactattctggtaaaaagtttatatctctatctttttctttaaaagtagaatcatattgtatatagtatcttgcagatttatttaaacatgtaataatgtattttaaacatatttccatataactacatgtgacttggagcacatctttatttatcaggataaactccagtgggagactgtccttcaatggtatgctttttaaaaagggttcctctaaattattgccatgattatcaattcgtcctcctcccaccaacccctgagaagggttaaaccaattttcgctcccttcagtcctgtagaacgttgcccatttcttatatcctctcaagcattattatgtattatcatattttttatctttgccggtggtcaagctgcttccttttgctgatgagacggaagcttggatatatacagcagcaggcaaaataaagcagagtgagatccaggagt

SEQ ID NO: 93794 - DNA, 632 bp, Homo sapiens
acccatatcattcctgtgaagttggtacaatcattatctttgatttataaatgagaaaactaaagcacatagaggttaagttgcctaaagttaataacgtattttcccagatgtgcatattagtrcggaaggtaaatgctacagttatctagattctgtacatgaaaagcagaaaaagtgtgagattgtggatctgcttttataagacaaattctttcaaatgaagtgagcacaagttatcataagtaaatgatcacaaatgtgaatgcaggaggacagatactgtaaaagtgctgcccaggggaacaaagaagcagagggcaaatcatatcaaggaaaactaactccagtgtatctcctcccaaagttgagagttaagcgtggcacaaatgcttctgagtgtatttttttcttcctttgggatttccaatctgtcagaaagagaacctgctgtgctctctgcctttccctggggtggcccttcaagctcgggtcccttttcctgggaagattaattcattcagttcctaccactctaacctctacagcctcttggcgtcagattttatggtatatcagctccttaaacaccttgttgtacttgataatccatgaccaaaagccacaatttt

SEQ ID NO: 93795 - DNA, 632 bp, Homo sapiens
acccatatcattcctgtgaagttggtacaatcattatctttgatttataaatgagaaaactaaagcacatagaggttaagttgcctaaagttaataacgtattttcccagatgtgcatattagtacggaaggtaaatgctacagttatctagattctgtacatgaaaagcagaaaaagtgtgagattgtrgatctgcttttataagacaaattctttcaaatgaagtgagcacaagttatcataagtaaatgatcacaaatgtgaatgcaggaggacagatactgtaaaagtgctgcccaggggaacaaagaagcagagggcaaatcatatcaaggaaaactaactccagtgtatctcctcccaaagttgagagttaagcgtggcacaaatgcttctgagtgtatttttttcttcctttgggatttccaatctgtcagaaagagaacctgctgtgctctctgcctttccctggggtggcccttcaagctcgggtcccttttcctgggaagattaattcattcagttcctaccactctaacctctacagcctcttggcgtcagattttatggtatatcagctccttaaacaccttgttgtacttgataatccatgaccaaaagccacaatttt

SEQ ID NO: 93796 - DNA, 632 bp, Homo sapiens
acccatatcattcctgtgaagttggtacaatcattatctttgatttataaatgagaaaactaaagcacatagaggttaagttgcctaaagttaataacgtattttcccagatgtgcatattagtacggaaggtaaatgctacagttatctagattctgtacatgaaaagcagaaaaagtgtgagattgtggatctgcttttataagacaaattctttcaaatgaagtgagcacaagttatcataagtaaatgatcacaaatgtgaaygcaggaggacagatactgtaaaagtgctgcccaggggaacaaagaagcagagggcaaatcatatcaaggaaaactaactccagtgtatctcctcccaaagttgagagttaagcgtggcacaaatgcttctgagtgtatttttttcttcctttgggatttccaatctgtcagaaagagaacctgctgtgctctctgcctttccctggggtggcccttcaagctcgggtcccttttcctgggaagattaattcattcagttcctaccactctaacctctacagcctcttggcgtcagattttatggtatatcagctccttaaacaccttgttgtacttgataatccatgaccaaaagccacaatttt

SEQ ID NO: 93797 - DNA, 366 bp, Homo sapiens
gaatgtagaataaattgaacaaacgtgtggagagctagaatcagaaattcatgataataacacttactccttttatgtgtctaaaagctctgatagaggaagataatggatgtactatagaacatgtaaactttaaactatacaaagttctatagggaatatcaaacaatggcctttggtgataaaaaagagcaagcaaaacgagatatatgaatggataaccaataatatattagtacaattttatttgccaggatgggctaaagtaggttttgagagacacaataagtttgyaaagtctctaaaaagatacataaaaatttaaaaatatgcaaaagagatactgaagttcttaaaaaagaaaca

SEQ ID NO: 93798 - DNA, 747 bp, Homo sapiens
cccttccctgatgccgctgtccctctctgccactccttcatgcaagaatgacaagaaagaccgctcaggatctctttgaggaaagggatgtctctccaaaatgaaatgccagtggggcttctctcatctaggctgttgatcattcctgtgcactctgggcctccctcagattaatacttttataggctgaagtacctggccttgagtgagctctcttggccttgatctgtaacagcagactaagatccaagctggtgtgagtgttataactaaggtaaaggagcagctgaatctccatcacttgccaaaatggctggaatggatctgtattgtcagttggacagctaggaaacaggttgtgtgtggatggctatgcgtggccaccatcccttttctagggttgctgctgctggaagctgctttgaggctactagaggacctttgaacttatctctagggaattgtagttggctgggcccgggttaggtgctggagtgggactgctgtagggaaaagattaaaggccctctcccttgctcctatctgccacctgagagagtattgccagcctgattcrtttagtgtgaacaagcagccatgatcagaagaagctgacacctgctgagctgagctccaacagcctaagaccctagcttttgtgggggggtggtttagactctgaagtcatggggctgataaggtaatgactgctggttttcaaaatgctttctccttcattgtttgatt

SEQ ID NO: 93799 - DNA, 747 bp, Homo sapiens
cccttccctgatgccgctgtccctctctgccactccttcatgcaagaatgacaagaaagaccgctcaggatctctttgaggaaagggatgtctctccaaaatgaaatgccagtggggcttctctcatctaggctgttgatcattcctgtgcactctgggcctccctcagattaatacttttataggctgaagtacctggccttgagtgagctctcttggccttgatctgtaacagcagactaagatccaagctggtgtgagtgttataactaaggtaaaggagcagctgaatctccatcacttgccaaaatggctggaatggatctgtattgtcagttggacagctaggaaacaggttgtgtgtggatggctatgcgtggccaccatcccttttctagggttgctgctgctggaagctgctttgaggctactagaggacctttgaacttatctctagggaattgtagttggctgggcccgggttaggtgctggagtgggactgctgtagggaaaagattaaaggccctctcccttgctcctatctgccacctgagagagtattgccagcctgattcgtttagtgtgaacaagcagccatgrtcagaagaagctgacacctgctgagctgagctccaacagcctaagaccctagcttttgtgggggggtggtttagactctgaagtcatggggctgataaggtaatgactgctggttttcaaaatgctttctccttcattgtttgatt

SEQ ID NO: 93800 - DNA, 617 bp, Homo sapiens
ctgtatataaatctgtgcagccactagtcaacaaatactgtgtatgcctagcacttcctagtctagtccacagcatctgtgggtttaaccaactttgcatcaaaaatattcaaaaccaaaattgcatctgtgctgaacatgtacagactttttttcttatcattatttcctaarcaatagatatatttaattttttttctttgagacagggtctcactctgtcacccaggctggagtacagaggtgctatctcagctcattcacaacctttacctcctgggctcaagtgagcctcccatctcattctcccaagtagctgggagggaccacaggcgtgcaccaccatgcctggctaatttttgtagagatggggttttgccatgttgcccaggctggtcttgaactcctgggctcaagtgatccacccacctcagcctcccaaagtgctgggattacaagtgtgagccatcatgccggccaatagtgtattttcatagcggttacattatattagatattataagtaatcaagagatgatttaaagtatacaggaggatgtgtataggttaaatgcaaatactgaaccaatttattttacatcaaggacttgaggatc

SEQ ID NO: 93801 - DNA, 622 bp, Homo sapiens
acttttgttagatgcagagttttttmtttctgcttttcatttttgttttgtttttatgaaagctattgcatgacatacgagaaactacttccactggcatattctcatttattttagaggtttgtttttaagtagttgcttttccatattccttggatttattatcagttgatattttagattagtgaaatatcaggtgtaatcttaagaatcaaaagaaacctactccattataagatataaataggttattatcagcgaccaaaatacattttggcaattcttactactgattctagaattacattgaattctaaatcccaaattcctgtggcaataaagtagcatgggattcatcgtagcagatagctgggcacctgttttattaccaccttgattaattctggcacccagatttacggaagtgcaggaacaagcacaaccgctactcaaagccaccggctgtttttaggtcatgaagtcaacttcctggaatttctagggaaaatagttgaaaggggaggacaaatgtcactttaaatagagatgtttaaatcagatttctgcctgagggtaaagtttaggtctgttttagcccagatgtaatgtctccctctacaga

SEQ ID NO: 93802 - DNA, 678 bp, Homo sapiens
ctgggctgtgccctgcccttaggctgaatttgacttgatgtagctgcagctgctgtctggttgaggagggacatggaagctaggctctcctatatatacctaggacaatacccactgccctcctatgggctgctgtgaaactgagacctgggcagattacagtccccacagcttcttctccatgctgcttaactgaaaggaggtgcaccttctgtggttataagcccacagctggtatcatttccagagtttaacactgggattttccccaccctcaggctgagttcaaggtgatggcaagaaaatggtgaattaagagtttaaatacaggcagtctgacttcaaagccttcatgcttaatttctgtgctattctggcagaaagaaatataatagtgaacttcagtgtggctaccaacatggaaaccaagagctatggaatactgttcyggatgtcatcattgtggcaaaaggagtatgttgataatctctggaaaactctgttttatccttatgtaaaactggtgcccttctatctaggacaccatgtataatttttgggtcactatacttcaaaattatgaaatcagaaaggtcaactaatatagagtgaggaggaagtgtgatggtgttagagatgctgttcaggaaaaaatttatacagattggaagtgatgca

SEQ ID NO: 93803 - DNA, 1325 bp, Homo sapiens
atggggaggcatcatgtagggtgcctggagtctgggagaccagtcaggatgacagggtgtggggatgagacctgagctccagcagtggtggcgggaaggacagaagggcagaaaggcagggttcagcctcatgctcctctgttcttgtctcctttcaggaacacaatgcacaacatccgtggcaacaagcaggcccagggaacaggccatgaacctccaggggaagattctmcacagagtggggagcctcagagggaggagcagcccttggcctctgacgccagcaccccaggtgagcctctgtccagggctgagctgccttcagggaccagctcctcacggctggcacaagtgccttctttccttccagcgaaccagcatttgtgcttttgtgtgtgtcttagttggcttgggctacttactgaaacaccatagactgcgtggcttaaataacagatacttatttctcacagttgtgtggaagctgggaggtccaagatcaaggtgccggcagattcaatgtgtggtgagggctcccttcctggcttgcagatagatggccaccttctcactgtgtgttcacgtggccgaaagagctctggtctctgctgcttattctaagggtactgatcttatcaggggctccaccctcatgacattaaatctgatcacctcccaagggccccacctgttaataccaccacgctactaaaaatacaaaagttagctgggcatggtggccagtgcctacaattccagctactcaggaggctgaggcaggagaaccacttgaacctgggaggcagaggttgtagtgagtcgagattgcaccacagcactccagcctgggtgacagagtgagactccgtctcaaacaaaaccaaaaacaaatgtacacatgtgataaaatggcatagacctatacacacatattgtaccaacaccagtttcctagagttgatagtgtactatagctatgtaagatgtcaccatcaggggaagcttggtgaagagtacttgggacatgtctgcactatctttgcaacttcctgtgagtctataattttttcagagtaaaaaattaagaagaggctgggcatggtggctcacgcttgtaatcccagcactttgggaggccaaggctggaggattgcttgagcccaggagttcaagacaagcctgggcaacacagggagaccctgtctttacaaaaaaataaaaaaattagctgatcatggtgcaagcctgtagtcccagctacttgggatgctcagctgggaggatcacttgagccagggaggtcgaggctgcagtgagccgtgatc

SEQ ID NO: 93804 - DNA, 1325 bp, Homo sapiens
atggggaggcatcatgtagggtgcctggagtctgggagaccagtcaggatgacagggtgtggggatgagacctgagctccagcagtggtggcgggaaggacagaagggcagaaaggcagggttcagcctcatgctcctctgttcttgtctcctttcaggaacacaatgcacaacatccgtggcaacaagcaggcccagggaacaggccatgaacctccaggggaagattctccacagagtggggagcctcagagggaggagcagccctyggcctctgacgccagcaccccaggtgagcctctgtccagggctgagctgccttcagggaccagctcctcacggctggcacaagtgccttctttccttccagcgaaccagcatttgtgcttttgtgtgtgtcttagttggcttgggctacttactgaaacaccatagactgcgtggcttaaataacagatacttatttctcacagttgtgtggaagctgggaggtccaagatcaaggtgccggcagattcaatgtgtggtgagggctcccttcctggcttgcagatagatggccaccttctcactgtgtgttcacgtggccgaaagagctctggtctctgctgcttattctaagggtactgatcttatcaggggctccaccctcatgacattaaatctgatcacctcccaagggccccacctgttaataccaccacgctactaaaaatacaaaagttagctgggcatggtggccagtgcctacaattccagctactcaggaggctgaggcaggagaaccacttgaacctgggaggcagaggttgtagtgagtcgagattgcaccacagcactccagcctgggtgacagagtgagactccgtctcaaacaaaaccaaaaacaaatgtacacatgtgataaaatggcatagacctatacacacatattgtaccaacaccagtttcctagagttgatagtgtactatagctatgtaagatgtcaccatcaggggaagcttggtgaagagtacttgggacatgtctgcactatctttgcaacttcctgtgagtctataattttttcagagtaaaaaattaagaagaggctgggcatggtggctcacgcttgtaatcccagcactttgggaggccaaggctggaggattgcttgagcccaggagttcaagacaagcctgggcaacacagggagaccctgtctttacaaaaaaataaaaaaattagctgatcatggtgcaagcctgtagtcccagctacttgggatgctcagctgggaggatcacttgagccagggaggtcgaggctgcagtgagccgtgatc

SEQ ID NO: 93805 - DNA, 1325 bp, Homo sapiens
atggggaggcatcatgtagggtgcctggagtctgggagaccagtcaggatgacagggtgtggggatgagacctgagctccagcagtggtggcgggaaggacagaagggcagaaaggcagggttcagcctcatgctcctctgttcttgtctcctttcaggaacacaatgcacaacatccgtggcaacaagcaggcccagggaacaggccatgaacctccaggggaagattctccacagagtggggagcctcagagggaggagcagcccttggcctctgacgccagcaccccaggtgagcctctgtccagggctgagctgccttcagggaccagctcctcacggctggcacaagtgccttctttccttccagcgaaccagcatttgtgcttttgtgtgtgtcttagttggcttgggctacttactgaaacaccatagactgcgtggcttaaataacagatacttatttctcacagttgtgtggaagctgggaggtccaagatcaaggtgccggcagattcaatgtgtggtgagggctcccttcctggcttgcagatagatggccaccttctcactgtgtgttcacgtggccgaaagagctctggtctctgctgcttattctaagggtactgatcttatcaggggctccaccctcatgacattaaatctgatcacctcccaagggccccacctgttaataccaccacgctactaaaaatacaaaagttagctgggcatggtggccagtgcctacaattccagctactcaggaggctgaggcaggagaaccacttgaacctgggaggcagaggttgtagtgagtcgagattgcaccacagcactccagcctgggtgacagagtgagactccgtctcaaacaaaaccaaaaacaaatgtacacatgtgataaaatggcatagacctatacacacatattgtaccaacaccagtttcctagagttgatagtgtactatagctatgtaagatgtcaccatcaggggaagcttggtgaagagtacttgggacatgtctgcactatctttgcaacttcctgtgagtctataattttttcagagtaaaaaattaagaagaggctgggcatggtggctcacgcttgtaatcccagcactttgggaggccaaggctggaggattgcttgagcccaggagttcaagacaagcctgggcarcacagggagaccctgtctttacaaaaaaataaaaaaattagctgatcatggtgcaagcctgtagtcccagctacttgggatgctcagctgggaggatcacttgagccagggaggtcgaggctgcagtgagccgtgatc

SEQ ID NO: 93806 - DNA, 1034 bp, Homo sapiens
tccttgagacaatcaactgtgggggaaatatatctcttaacttagcttggaataagaagaatcaagttaaatgcttgagctgctctctggagcaagaatgcagagtacagacattcattttgtgttcctatcatcagacagatctgtgtgctttgaaaatctcctagtacatagaggtgggatcctgaaataaggaacagaacatcctgccagggcttgtgcctgaggagaaagccacttggcaaacaccagcagggtggcatgagatagaccaatgcaggctgggtgggatctgaaggaaggagacaggcacagtttagcagatgggccagcacagtgcaataacgtttatgtaggccagtggttctcacagtctaacccctggacaagctgtgtcagcatcacctaggaactttttagaagtgcatattctcaagccctgccccagacctattaaatccagagctccgaaattagggcccaaccatccgcattttaacaagccctccaggtgcttctaaagcaagctcaggtttgagaactgctgatgtcatcagtcataacttctgcgtttctcctcttgagcagkgagagagccagaggattctccaaagcctgcacccaagccttctctgaccatcagtttcgctcagaaagccaagcgccagaacaacaccttcccattcttttctgaaggaatcacacggaaccgaactgcccaggagaaagtggcagccttggagcaacaggttctgatgctcaccaaggagttaaagtctcagaaggtgaggtctggtcccagggaggccccaggttccagtggacccctccagttcctggagcctttcggataagctagatgggacgcattagccgtgctgggcaccagctactctctggtctttaaaggccaaactgcagaatgttgaaatatgctgttgattactcaagaacctgatgtcactcaaagtaagtcacaaaagggcaccaagggcaggtatctctggagatctactctaataactgtctcttgg

SEQ ID NO: 93807 - DNA, 727 bp, Homo sapiens
ttagtgtgcggctgcagctgagatggttcacgctcagaggaggcagccccctgccatggccctatagtacatttgcggcacaggctgcctccagagccccatgctttccrtttatctaggctgcctcccaaatgtggctgcctcccagatgtgcctgtcagagaggggacgaggggagacaagcaggccatctcctctgcaccaaggccttgctgagcacagtggacatgggcagttaaatataacagaaaggagggtggctatgctcgaaggcccctggaggctgagtagtccagtggcaggagctcgagctttggagccagccctggccctctcaccgtgtgacaattccctttacctttctgagcctcgtactcagcctccataagatatgtgcaaagagctgggcacagtggctcatgcctgtaattccagcactttgggaggctgagatgggcagattgcttgaggccaggagtttgagcccagcctgggcaatatattggaatcctgtctctacaaaaaaaaaaaaaaaagaagagtggtggtgcacgcctgtagtcccagctactcggaaggctgaggtgggaggatcacttgagcccagaaggtagaagctgcaatgagctgagattgcagcactgcagtccagcctgggcaacagagtgaggccctgaaaagaaaagaaaagaaaggaaggggggaagggagggaaagaaagaaagaa

SEQ ID NO: 93808 - DNA, 727 bp, Homo sapiens
ttagtgtgcggctgcagctgagatggttcacgctcagaggaggcagccccctgccatggccctatagtacatttgcggcacaggctgcctccagagccccatgctttccatttatctaggctgcctcccaaatgtggctgcctcccagatgtgcctgtcagagaggggacgaggggagacaagcaggccatctcctctgcaccaaggccttgctgagcacagtggacatgggcagttaaatataacagaaaggagggtggctatgctcgaaggcccctggaggctgagtagtccagtggcaggagctcgagctttggagccagccctggccctctcaccgtgtgacaattccctttacctttctgagcctcgtactcagcctccataagatatgtgcaaagagctgggcacagtggctcaygcctgtaattccagcactttgggaggctgagatgggcagattgcttgaggccaggagtttgagcccagcctgggcaatatattggaatcctgtctctacaaaaaaaaaaaaaaaagaagagtggtggtgcacgcctgtagtcccagctactcggaaggctgaggtgggaggatcacttgagcccagaaggtagaagctgcaatgagctgagattgcagcactgcagtccagcctgggcaacagagtgaggccctgaaaagaaaagaaaagaaaggaaggggggaagggagggaaagaaagaaagaa

SEQ ID NO: 93809 - DNA, 658 bp, Homo sapiens
atgcccagatcagcagcatgggggagggctcagcagcagctctgccagggtttcaggtgttccctgggtaggtgggaagggctggggaggagaggttgccaaggcagagatgggggagaaaagtagacacaaagcaaggagctgtcgctggagctgaaggaggaacacttccccaagagacacccatcctggctgcaaatgcagtttccctctgacccacaattccatctccaggaatctgtgcttcagaaccatttacacaaatgcttgaatatgctttaaaaatattccgatcttctgtaagagagaaaagttggagacagccccagtgcttaaagcagyacttggcatacagtagcacttcataaaccatgtgtctaatgaatgaatgagctcaatctcactaatagggctattaatcaattccagggggagctctgctgccataagaaagtgaagtagactcacattcagaggtggccatggggtgctgtcatgtgaagaaagacaccaccctctgcttcagtgagcaggagctcctctctgagaacagctacgtgtgcctatgcatacctattacacaggcctatgtgcaagagatttgctgagaaagtgctctcaggggaagcttagaagggcaggggagaagccgggcaag

SEQ ID NO: 93810 - DNA, 1075 bp, Homo sapiens
ttttttttttgctttcgctcacatcagtattagtctgttctcacactgcgaataaaaacatacctgagactgggtaattataaaggaaagaggcttaattgactcacagttccacatggctgcagaagcctcacaatcatggcagaaggcaaggaggagcaagtcacatcttacatgatggcagggaagaaagaatgagagccaagcaaaagaggtttccccttataaaaccatcagaacttgtgaaacttattcactaccataagaactgtatggggggaaccacccccatgattcaattatctcccaccaggtccctcctacaacacatgggaattatgggagctacaattcaagatgagatttgggaggggacacagccaaaccakatcagatccaatttcacatatttttggacccaggaaaccccactaaggccaagattacatatgcttttccagagtctgcttttgaagtcttcaggaggctcctgtggagaaaggagctgctgtccaagccagagggcctgtgggtgggatgggcagcttcctccacattccctgttttccaggctcaggggggcagccactgggaaatgggatgcagtcaggtcacttgcaggccattcgcccagcagagaagccaccagggtgggaagtggctcactaggatgagtgctgggccaggtctggtcagtgtgaccaccttgtcctgagcttatgatgatgaagctgcagtcggtcaggggcacgcagaacagagtgcagcagtctgtgtggtctcaccccctgcagcggcatctagatgctctgcatgaaggacaggagtgtctccatatcccagggcttccacagcaggaaaagaactgacgaggagcagttccagggatgggagaagacagaaggacaagccttgctgtaaactcaggacaagcctcttggaaacagtttcagaaacaggctggaggtggatatgaggaggcaagagtagaggggctgatggccccagtcaatcagtggatggcactcccaaggctcaggaaagctgcccagggtgtctaggcacccctttaggt

SEQ ID NO: 93811 - DNA, 651 bp, Homo sapiens
atcccatatactcataacccttatcgctcagtgttctgcagccttggtagttgacaggtagtcccctgactctcagaagcatctctgtttctatgtaagtttcatttccttttagtttttttttcctaaatgcagttcatcctcattattcatggattcctttttttttttttttttggttgagacagtgttttactctgtcgcccaggttggggtacagtggtgtgttctcrgctcactgcaacctctgcctcctgggttcaggtgattctcctgcctcagcctcccgaatagctgggactacaggtgcccaccaccatgcccagctaaaatttttgtatttttagcagagacagggttttaccacattggccaggctggttttgaactgacgtcaggtaatccgtctgccttggcctcccaaagtgctgggttacacgtgtaagtcactgcacctggcttcatggattctatttttatgtgttggcctactcactgaaactgacctgtgacctcagtatcaatatttacagtgcttttgtgatcctttgtggacttgtggagagtggtgaaaattttgaatcacctgacgtgcacgttctcggctcaggtagaacaaggcaatgctctgccttctttcagctcttactc

SEQ ID NO: 93812 - DNA, 550 bp, Homo sapiens
ctcctggctggatcatctggtggagtgggagtgtgcacrtgcccacccccatttctaaataagatatgcattgtctcagggcctttgcaatgtccactccctagtcctcaatgctcttccccattggtcatcccagagctcatctcaaatgtcaccctttagaggggcagctgtcagtcttcccagttaaagcatatgccaaccccctcatcactcctggtctcaacaacctctttatttccctcattgctattatcttcatctgtaattctcatctttataatatctcttgaatgaatctttaggaggattactcttcctagagtgtgcaaaacggattgcagggatggtgagaggtgggcggaaatgttggaaaggggacaagggtggaattggtagcactgatcttgttgagagaggattggccctggaaaaagaaagtagcaatggagcaggaagtaattagacatagaagagagctcttcacgtgggaggtgaggagaatcggtgttgggattgtgtgttaggactgaggaaggaggaggaggag

SEQ ID NO: 93813 - DNA, 550 bp, Homo sapiens
ctcctggctggatcatctggtggagtgggagtgtgcacatgcccacccccatttctaaataagatatgcattgtctcagggcctttgcaatgtccactccctagtcctcaatgctcttccccattggtcatcccagagctcatctcaaatgtcaccctttagaggggcagctgtcagtcttcccagttaaagcatatgccaaccccctcatcactcctggtctcaacaacctctttatttccctcattgctattatyttcatctgtaattctcatctttataatatctcttgaatgaatctttaggaggattactcttcctagagtgtgcaaaacggattgcagggatggtgagaggtgggcggaaatgttggaaaggggacaagggtggaattggtagcactgatcttgttgagagaggattggccctggaaaaagaaagtagcaatggagcaggaagtaattagacatagaagagagctcttcacgtgggaggtgaggagaatcggtgttgggattgtgtgttaggactgaggaaggaggaggaggag

SEQ ID NO: 93814 - DNA, 1031 bp, Homo sapiens
ggtgagctgagattgctccactgcactgtaatttatgtgactgagtgagacaccttctcaaaaacaaggaaacaaaaaatgaaaacaaacaaaaaacaccttaaacaaataaatgtccgtgttatttactaatactgaatatatacttaaaaccagcacttcacctacatgtgcattcttctgcctgggaggtgttgatagagtgaccttaggaaaatgtctttgtctgtggttcaaaaatgaattggacttgagtgagaagaggcacacatcttctctccccctccctccccttgcttcttcccatttccatgttccgtcccytattattctctcatactctatttctcctcatatacaggtgtttttttgtttttgtttttggtttttgttgttttttttttttttgagttggagtctcgccctgtcacccaggctggagtacagtggcacatctcggctcactgcaacctccgcctcccaggttcatgccattctcctgcctcagcctcccaagtagctgggactataggcacccactaccatgcccggctaatttttttttttttttgtatttttagtacagacggggtttcactgtgttaggcaggatggtctcattctcctgacctcaggatccacccgccctggcctcccaaagtgctgggattacaggcatgagccgccacgcctggcctaccaggtgtttttctaggccctattttagaagaggaagaaaagatttttaccctcaaggaatcttcagtctactggtgtctgagagacctgaacaatctaaccacgatgtattgccaaagctgatgagacagaagcaggggaaaaatgaaacaggatcccttggaagggagacgtcactcctgctctgcagtcgtgggaaaggctgcagagagaaggcatttcctctacacccaaccttgaccttcagcaagtcccttagcctcccgttgagtggcaggcaacatgtaaacagcagctatctcttagagggcaggagttctatgaatgcactt

SEQ ID NO: 93815 - DNA, 547 bp, Homo sapiens
  misc_feature (1)...(547): n = A,T,C or G
gatnnnnnnnnnnnnnnnnnnnnnnnnnnnnnnnnnnnnnnnnnnnnnnnnnnnnnnnnnnnnnnnnnnnnnnnnnnnnnnnnnnnnnnnnnnnnnnnnnnnntactgttaattgaacatctataatgtgctatatacagttctctgcactttacatgaaatatgttatttaatcttctcmgtaacgctatgtggtgggtaggtaacgttgtgttctataagataagataagggacctttggcacagagaaactctggaattggccgagattacttggatgtaagtgtcagagactgggtttgaaacagagtgcgttccccaaagaatgcatttcccagttctcccaaaatagttttctgtgcactatgcatacattttctccttagtgccgtatctgttcaagttaattgaggaaaatcaaactatctactatttaaaaaataggctgatcatctttactgctaatgggttcaaatcactttgtttataatagatctgcttcagaaagctacagcagaggcatccgtcattattactgtgaagaca

SEQ ID NO: 93816 - DNA, 725 bp, Homo sapiens
cacccagaatttattatatattataaaaatcagtggctatcatgggccagagacccayactgaagtcatttataaaatatctttaaaattccccacccaagtaagaggcagaatcagattttggatcattctatcccctattaataaaaacactactccatttttgtcactgtagtgataagaacactgtacattcttgttggttataaaaaataggctgggcatggtggctcatgcctgtaatcccagcactttgagaggctgaggtgggcagactgcttgagctcaggagttcgagaacagcctgggcaacatggcaaaaccccgtctctacaaaaaatgcaaaacttacctgggcatggtggctcacacctctagtcccagctacttgggaggttgaggcaggaggatcacttgagccagggaggcagagtttgcagtgagccaggatctcaccactgcactccagcttgggtgacaagagggaggccttgtctcaaaaataagtaaataaataaaataaaaacatacacagctctaaaatctacaaattgttatttaatactactagaaacatataaagcaaatgaaaagaaaaaataaaaccaagtgcaatattttcgagcttttctacaggatatttacattattcacaagtcatttacctgaatcagagacctaaccacaccatcttttatcactttcagcctagattcatccttctc

SEQ ID NO: 93817 - DNA, 899 bp, Homo sapiens
ttttcactgtggtatgatatattaggctgttctcacattgctgtaaaggaatacctgagactgggtaatttatacagaaaagaggtttaattggctcacagttccacaggttgtacaagaagtgtgatagtttctggggagtcctcaggaaactttcaatcattgcgggagatgaaggaaagcaggcatgtctgaagtggctggagcaggagaaggggctgggggaggtgtcacacacttttaaacaaccagatcccatgataactctctcagttctcatgaagagcaccaagtgggggaactctgcccccatgaccgaatcacctcccaccaggccccacctccaacactggggattacaattccacgtgagatttgggtggggcacaaatccaaaccatatttgtatggtatacacatctgtataatataagatgggtatcacaagcatatacagacatgtatcataagcatatagaacaatgaattttcacaaattatgcacttatgtatccagcatctagatcaagagggagaacattaacagctcccagagaccttgtacctccttcactattcacatggagagtaattactctcctgacttctaacaagcgtgtattaatggyactaatttttgtagtgctatgaatagaatcttactattttgtgtctagtcttttttgttcaacatttgcgtgtgagattcatccatgctgttgaacaaagttccatgtcattcatttccatcattttatagtacattgggtgattaaaccacaactaatttatccattctactctttgtagacttttaaaaagattccccttataagatattacaaatagagtttctatgagcattcttatgcgtgtcttttagtgaacattcttatgca

SEQ ID NO: 93818 - DNA, 1089 bp, Homo sapiens
atgtttcaaatgagttttgccatctcgccattcatgagagtacatgtgaatgagttaataatgtgagtgtgtgctgtaccggagtgtgtgtgtgtgcatgtacatgtgaatttgtgtactcttaagtcttttgagatgcaggcttctttctgcaaggacactttgtaaagccagggcattttaggaccaaggagagcaatctgacctaaaagagcagatgatgccaggccccggcagaccccatctcaagtggcagatcataaattagagtctatttcttggtagcaatagcacattgggcaatagagttttgttttctaacatcagaaaacacatacatttgtctgcacaggaaaagtatttcctggaaaactgtctcaaaaagagcacactagagaagagacattagcttcaaatacagccatttttccagagtcttcaccataaggaacaaaaacccttcagctcccaatccacagggtctcacctgaggggtcaaggccaccaccactgccaagatgccagtacattttcacttaccctaactttgtggcctcagagaggacaatgtccataccccttacctcacccatactaaggttatagacttcctcacaactaacatttactgaatagctgctgagtaccagtcacttgtctaggtgctaggtttatagagaaaaaataacagtcatggccctgctgttatatagcccacattctagtgggagaagcggacaataaacaaagagatagtctaatacataaatacaaaaaatgtgatgaatgatatcaaggaaatgacagggtgtttttaaaaagagaataagaagggaatccagttgagtttagatgattgggtaagtcctcactgaagaggtgatgtcttagctgagatctggaggaaaagtggtataggcaggcaaagggaagaggagaggaccattctaagtggaggaaagagcatgcgcytaagtcctggggcaagaacaagtttaatgctttgggatttggaagaagctcaatgaaactaaactctagtgagtaggagagttcaagatgagagtgtagaaataggagagaccaaat

SEQ ID NO: 93819 - DNA, 647 bp, Homo sapiens
cagctgcctgcacagcagacacacctatattagagcttaataccataatagaccatgtctgttgtgtatataatttagttgggagtggagtatctttccttaaagaccatctgcatattttaagagcaggagtagcttgtgtagtttaagcctccagactctaattcaattaggtaccagagtgaarggtgctgtaatgggaatctaatcaggccatcaatattgataaaagtggtaatcagtcagcacagccacatcagcctgaggaacagaaagtgcgtgtgttcgacatttatttaacaggaaggccatcatgttgcagtagcacatgtaggccgtagctctggggaccacagtaaaaaaggaaatttgaatgtgaaaatggaaagaccaaattcttcaggaaaggactggcagcaaatataaactagacaaaaatgaatacccatatgtaagtagcattggaattcttgagactagagtgatggtagtgtggtggctctgtaacttcttgagaaaagattgataggtctttagaaaaggatgtagacacatgactatgacacatagagaagttccttctgctgagaaggtggtccttcctttagaaactattttccaaggagcataaaatatgttaggggctt

SEQ ID NO: 93820 - DNA, 2439 bp, Homo sapiens
acaaggatcagtttcactcatgattatttttcattaactgattttcttacactctaatattgtatttatttcctgaggcctattatgtagacttattccaaagaagaacaacagtgctgaggagttgttcatagttgcttaaggacaaagcactgtgctaaatattgtggaattattatatggtgccccacacacagaatccctggaaattaatttagacaggcaagaattggtttgattttcatgtgtgcaatgagacaagcctttttgaaatttgaaagataaaattcctttcaaagatgccacttgtcagcctaataagaaaatcatctgtactttttcctacatattttcctgagtattaaactttttaatcaaggccatgtgagcattgaagtattataaagctcatttgttttacttaggaaagtctattcatctgggatatcacacactattcacagtttttccatttttattttctaattaatattttcttcctctttctatatttgctgtttacatttttgtaatttgacactaatcattgcaccagtattgtgggctcctatgtctgcatacgtcatcatgctggaggctggaagagatacacagttgtgagtccaagttttggccttcaaggtggcatgcrttccagtcaaagaaaaagacccacacaccagacacaaaagggatcatgaccggggccttgctgctcaaaaggtgtttctcagaccagcatgctcccttggagtttgtgagaaatgcagtctaagtcctattgaatcagaagacgcatgttaacaaaatccccacacagttcatattcccagtacaatatgaggattgggcaacgggcttggtgtggaaggggaactgagtatggaaataagaagcctaaaaattccacacagtaccgctggcagaacaatttggaggacatggttcacagtcatttcctaggtatagttatatttggattttgaaccttacctggtctgaggacagttgagcaaaggtacatggatggggatccatctaaaataaataatttaaaggcttgaagaaatctctcaaattaaaggatgctcatttctgtttgtattcttgtacatcagatttttgtaatacagaattctcctgacatcactaactcgtaagtaaaaataagatcagatttgctttgatattcaagttacatagatttctagatcccatatgatcagagtagcaacaaatgcagttatccaccaatccaacctccaacaccttacttctttaaaattttttattgtggtaaaatacagattttacctatattcaatggcattaagtaccttcatattgtttccaatcatcaccactgcctatttcaagaacttcatcatcacaaacagaatctctcttacccattaaacaataattccctattccgttctgcccctagttccaggtaaccaccactctactttctgtccttatgaatttgactactctaggtaccttacataagtggaataatacagtatttgttcttttgtgatagttcacatggcataatgtccttttggtttgttcatgctatagcatgtatcagaattttattcctttttaaggccaaataatattccattgtatgtacatatgacattttttaaacgtttattttaggttcaggtacatgtgaaggtttgttataggtaaactagtgtcacaggggtttgttgtacaaattatttcatcaaccaggtattaagcccagaaccacatagttatcttttctgctcctctccttcttcccaccctccaccctaaagtaaaccccagtgtttgctattcccttctttgtgttcataagttctcatcatttacataccacatttttatccattaatctgctgatggacatttgggttgtctgtagcttttggctgttatgaatagtgctgcataaaaccttaccttttcatgttactgagtgtaaagctattgagagctacctctgcatcgttctgaagctgagcaatcttggcagctttcacagaagctgtcatcatgtgcatgatggagctattgggggcagaatgccctatttcacttcatttttgctgaagtgcagattgactgccaaaaccaagacaatctaatccaagttctactcactagtgtgttgaaaccttaccaagacacagaattcctgtgggaagcaggacataccctcccccagcagtaagcttacactcaaaattagcccggctgccaagtgtacagtgctgagtgttagccattgccggtcactcagaagcagccacttcctccaaagcatgtggtggcaccctagaagtgggtaagaggagatgccagtaccactctgaacatcccagagccagtcgccactctcacaacccacatcctgggtgcattctacaaagctagtat

SEQ ID NO: 93821 - DNA, 2439 bp, Homo sapiens
acaaggatcagtttcactcatgattatttttcattaactgattttcttacactctaatattgtatttatttcctgaggcctattatgtagacttattccaaagaagaacaacagtgctgaggagttgttcatagttgcttaaggacaaagcactgtgctaaatattgtggaattattatatggtgccccacacacagaatccctggaaattaatttagacaggcaagaattggtttgattttcatgtgtgcaatgagacaagcctttttgaaatttgaaagataaaattcctttcaaagatgccacttgtcagcctaataagaaaatcatctgtactttttcctacatattttcctgagtattaaactttttaatcaaggccatgtgagcattgaagtattataaagctcatttgttttacttaggaaagtctattcatctgggatatcacacactattcacagtttttccatttttattttctaattaatattttcttcctctttctatatttgctgtttacatttttgtaatttgacactaatcattgcaccagtattgtgggctcctatgtctgcatacgtcatcatgctggaggctggaagagatacacagttgtgagtccaagttttggccttcaaggtggcatgcgttccagtsaaagaaaaagacccacacaccagacacaaaagggatcatgaccggggccttgctgctcaaaaggtgtttctcagaccagcatgctcccttggagtttgtgagaaatgcagtctaagtcctattgaatcagaagacgcatgttaacaaaatccccacacagttcatattcccagtacaatatgaggattgggcaacgggcttggtgtggaaggggaactgagtatggaaataagaagcctaaaaattccacacagtaccgctggcagaacaatttggaggacatggttcacagtcatttcctaggtatagttatatttggattttgaaccttacctggtctgaggacagttgagcaaaggtacatggatggggatccatctaaaataaataatttaaaggcttgaagaaatctctcaaattaaaggatgctcatttctgtttgtattcttgtacatcagatttttgtaatacagaattctcctgacatcactaactcgtaagtaaaaataagatcagatttgctttgatattcaagttacatagatttctagatcccatatgatcagagtagcaacaaatgcagttatccaccaatccaacctccaacaccttacttctttaaaattttttattgtggtaaaatacagattttacctatattcaatggcattaagtaccttcatattgtttccaatcatcaccactgcctatttcaagaacttcatcatcacaaacagaatctctcttacccattaaacaataattccctattccgttctgcccctagttccaggtaaccaccactctactttctgtccttatgaatttgactactctaggtaccttacataagtggaataatacagtatttgttcttttgtgatagttcacatggcataatgtccttttggtttgttcatgctatagcatgtatcagaattttattcctttttaaggccaaataatattccattgtatgtacatatgacattttttaaacgtttattttaggttcaggtacatgtgaaggtttgttataggtaaactagtgtcacaggggtttgttgtacaaattatttcatcaaccaggtattaagcccagaaccacatagttatcttttctgctcctctccttcttcccaccctccaccctaaagtaaaccccagtgtttgctattcccttctttgtgttcataagttctcatcatttacataccacatttttatccattaatctgctgatggacatttgggttgtctgtagcttttggctgttatgaatagtgctgcataaaaccttaccttttcatgttactgagtgtaaagctattgagagctacctctgcatcgttctgaagctgagcaatcttggcagctttcacagaagctgtcatcatgtgcatgatggagctattgggggcagaatgccctatttcacttcatttttgctgaagtgcagattgactgccaaaaccaagacaatctaatccaagttctactcactagtgtgttgaaaccttaccaagacacagaattcctgtgggaagcaggacataccctcccccagcagtaagcttacactcaaaattagcccggctgccaagtgtacagtgctgagtgttagccattgccggtcactcagaagcagccacttcctccaaagcatgtggtggcaccctagaagtgggtaagaggagatgccagtaccactctgaacatcccagagccagtcgccactctcacaacccacatcctgggtgcattctacaaagctagtat

SEQ ID NO: 93822 - DNA, 2439 bp, Homo sapiens
acaaggatcagtttcactcatgattatttttcattaactgattttcttacactctaatattgtatttatttcctgaggcctattatgtagacttattccaaagaagaacaacagtgctgaggagttgttcatagttgcttaaggacaaagcactgtgctaaatattgtggaattattatatggtgccccacacacagaatccctggaaattaatttagacaggcaagaattggtttgattttcatgtgtgcaatgagacaagcctttttgaaatttgaaagataaaattcctttcaaagatgccacttgtcagcctaataagaaaatcatctgtactttttcctacatattttcctgagtattaaactttttaatcaaggccatgtgagcattgaagtattataaagctcatttgttttacttaggaaagtctattcatctgggatatcacacactattcacagtttttccatttttattttctaattaatattttcttcctctttctatatttgctgtttacatttttgtaatttgacactaatcattgcaccagtattgtgggctcctatgtctgcatacgtcatcatgctggaggctggaagagatacacagttgtgagtccaagttttggccttcaaggtggcatgcgttccagtcaaagaaaaagacccacacaccagacacaaaagggatcatgaccggggccttgctgctcaaaaggtgtttctcagaccagcatgctcccttggagtttgtgagaaatgcagtctaagtcctattgaatcagaagacgcatgttaacaaaatccccacacagttcatattcccagtacaatatgaggattgggcaacgggcttggtgtggaagrggaactgagtatggaaataagaagcctaaaaattccacacagtaccgctggcagaacaatttggaggacatggttcacagtcatttcctaggtatagttatatttggattttgaaccttacctggtctgaggacagttgagcaaaggtacatggatggggatccatctaaaataaataatttaaaggcttgaagaaatctctcaaattaaaggatgctcatttctgtttgtattcttgtacatcagatttttgtaatacagaattctcctgacatcactaactcgtaagtaaaaataagatcagatttgctttgatattcaagttacatagatttctagatcccatatgatcagagtagcaacaaatgcagttatccaccaatccaacctccaacaccttacttctttaaaattttttattgtggtaaaatacagattttacctatattcaatggcattaagtaccttcatattgtttccaatcatcaccactgcctatttcaagaacttcatcatcacaaacagaatctctcttacccattaaacaataattccctattccgttctgcccctagttccaggtaaccaccactctactttctgtccttatgaatttgactactctaggtaccttacataagtggaataatacagtatttgttcttttgtgatagttcacatggcataatgtccttttggtttgttcatgctatagcatgtatcagaattttattcctttttaaggccaaataatattccattgtatgtacatatgacattttttaaacgtttattttaggttcaggtacatgtgaaggtttgttataggtaaactagtgtcacaggggtttgttgtacaaattatttcatcaaccaggtattaagcccagaaccacatagttatcttttctgctcctctccttcttcccaccctccaccctaaagtaaaccccagtgtttgctattcccttctttgtgttcataagttctcatcatttacataccacatttttatccattaatctgctgatggacatttgggttgtctgtagcttttggctgttatgaatagtgctgcataaaaccttaccttttcatgttactgagtgtaaagctattgagagctacctctgcatcgttctgaagctgagcaatcttggcagctttcacagaagctgtcatcatgtgcatgatggagctattgggggcagaatgccctatttcacttcatttttgctgaagtgcagattgactgccaaaaccaagacaatctaatccaagttctactcactagtgtgttgaaaccttaccaagacacagaattcctgtgggaagcaggacataccctcccccagcagtaagcttacactcaaaattagcccggctgccaagtgtacagtgctgagtgttagccattgccggtcactcagaagcagccacttcctccaaagcatgtggtggcaccctagaagtgggtaagaggagatgccagtaccactctgaacatcccagagccagtcgccactctcacaacccacatcctgggtgcattctacaaagctagtat

SEQ ID NO: 93823 - DNA, 672 bp, Homo sapiens
tgcattccaaaatagcatttcttctgcccataccttttacatgttgcatataaaaccatattgcaatcagataaaactatattctaaaatgggatggcaatgcctttccattgatagcaatgcgaagctgggtttgaggtgggattatacttcaggaagagacaaaattctcactagaaagttagtgtagataactctaggactgaggagggtgggcagcatawgacttaatttaaacactaacccaggatcctcaaaatgtatacgattgactctatgcactgaccttggaactgcaaggttcagactcacagtgtgctgggataatcatcacttggctgcttatgtcctcactaatttgtatttcttaaaatgcagaatgtttcaggtggagagtgaatcttcctgcatagcactctttgggaaactgtcagaatagaaaatactttgacagtttccatttttatgaaattgatgggggctgaaggtacacacatatgcaaattatttaataaagcttatggagaagtctataaaccagaaaaacttaattacataataataatgactgtatgttgaatgcttactgtgtcccaggtactactgaagttcacaagagcagaaagaggtgtaggattagcagagaagagtgaacttgtaaatctggacctt

SEQ ID NO: 93824 - DNA, 672 bp, Homo sapiens
tgcattccaaaatagcatttcttctgcccataccttttacatgttgcatataaaaccatattgcaatcagataaaactatattctaaaatgggatggcaatgcctttccattgatagcaatgcgaagctgggtttgaggtgggattatacttcaggaagagacaaaattctcactagaaagttagtgtagataactctaggactgaggagggtgggcagcatatgacttaatttaaacactaacccagratcctcaaaatgtatacgattgactctatgcactgaccttggaactgcaaggttcagactcacagtgtgctgggataatcatcacttggctgcttatgtcctcactaatttgtatttcttaaaatgcagaatgtttcaggtggagagtgaatcttcctgcatagcactctttgggaaactgtcagaatagaaaatactttgacagtttccatttttatgaaattgatgggggctgaaggtacacacatatgcaaattatttaataaagcttatggagaagtctataaaccagaaaaacttaattacataataataatgactgtatgttgaatgcttactgtgtcccaggtactactgaagttcacaagagcagaaagaggtgtaggattagcagagaagagtgaacttgtaaatctggacctt

SEQ ID NO: 93825 - DNA, 1344 bp, Homo sapiens
gcatatatgttatttaataatacgattgatgctatatttaaagtataatttgtttaagtgaatctgcatgcataacggaggggtactacactcccattttgccatttagtgtacaatttccacaggcagcaacaatggagattggtatttcccaccagtgagctccagtctgccaagtgtgtcacagagcctagctcttcagaggccacatggctgtggagtctcagtggctcctagtggtgctcagcaagaaagctcacacggtgcctcctcatcattcatctcctatcactcagcagcaagcagaagctgcaaacgtagagagcaagctgccaccgatcaccagggaaatcacaaaagtaacttggaaagcaaacgtggcttcttctaggtaagatattaggagttccaggtcttaaggctctaacttcaaagtatcaagataaagaaagcttcccatagcaaattaattttaagaaaaacacaacaaccattccatacgtgacgttagaaatctgttaatttatagtaggttggaaagtatgaaattgccaagattcgattgtttctgatctaaaacatagcaggttaatatgattctattaagtaatagtcacatacatttaccatataacaatttgttttgctaatcttgctgatcagctgaatcctaaagcatatcttgttttagtataattttagtattaattatatctttagacagaaagtgtcattgagttttgtactgtactatggcaccttgtgctttgtttttgtcctaaacattcaagtcatactagtttttatttttattaactttttttttcttggtagagacgggattttgccatgttgcccagtctggtcttgaattcctgggctcaagtgatccactcgcctccaagtcatactagttattaatgaactggaatgttttatagtttgaaatcctcatagagaaactcactatcatacccagaatactgtccataatttgaccaggacccttattatctggacttgccaaataaggatgttcctaatactggaaagttcaaatctgtaatgttttgaaatgttcccagagtgatgattacctagcgaagggctgtctgatttgaagctacacataataaagctatttcctcttgattttgctcctgattaaagagccagagaaaatgacacccatctgagaatcattgtgccattagccagaaaaagcatgtaccattttcagaatgttggccagtaagagcctttcattgrtgccagaagcttgggacccaaagccatctttgtgttttttgtctttgacgtttccttttagagacagtaagctta

SEQ ID NO: 93826 - DNA, 943 bp, Homo sapiens
gaggccattatccttagcaaaataatgcaggaacagaaaaccaaataccacatatgctgatttataagtkggagctagatgatgagaacacatggacacaaagaggggaacaacacacactggggtctaccgaagggtggagggtgggaagagggagaggatcaggaaaaataactaatgggtactaagcttaatacctgggtaatgaaattatctgtacaacaaacccccatgacacaagtttacctatatatcaaacctgcacatgtacccctgaacttaaaatcgaagtctaaaaaataaataaaatcacattttaagtgattcaaaaatttgtgggaaaaaaactcatttttctcattttttaacaaatcctccccaccttcctaatctgtatggtgatgacttagacgcgtaacccagttatcagctggggcctccctgcacattccatccttgcctgagtttctctggttttctgaaaatttccagaggtacgtaagttctccatggtcttggagtttacacgtccatattagtctctgttttacagcacatgaatctggatgtgaaactccactgcctctcacacccacccgtgatgggaggtacctcttcactaaagattttgggagtgggaggccaaggcaggaggatcgcctgaggtctggagttcgagaccagcctgagtagagaaaccctgtctctactaaaaatacaaaattagccaggcgtggtggcgcatgcctgtaatcccagttacttgagaggctgaggcaggagaatcgcttgaacctaggaggcagaggttccggtgagccgagattgtgccactgcaccctagcctgggcaacaagagcaaaattccatctcaaaacaacaaaaaagatttggggagagcgatggaggagtttacatggcaatgcaaatgacttcaaatgca

SEQ ID NO: 93827 - DNA, 943 bp, Homo sapiens
gaggccattatccttagcaaaataatgcaggaacagaaaaccaaataccacatatgctgatttataagttggagctaratgatgagaacacatggacacaaagaggggaacaacacacactggggtctaccgaagggtggagggtgggaagagggagaggatcaggaaaaataactaatgggtactaagcttaatacctgggtaatgaaattatctgtacaacaaacccccatgacacaagtttacctatatatcaaacctgcacatgtacccctgaacttaaaatcgaagtctaaaaaataaataaaatcacattttaagtgattcaaaaatttgtgggaaaaaaactcatttttctcattttttaacaaatcctccccaccttcctaatctgtatggtgatgacttagacgcgtaacccagttatcagctggggcctccctgcacattccatccttgcctgagtttctctggttttctgaaaatttccagaggtacgtaagttctccatggtcttggagtttacacgtccatattagtctctgttttacagcacatgaatctggatgtgaaactccactgcctctcacacccacccgtgatgggaggtacctcttcactaaagattttgggagtgggaggccaaggcaggaggatcgcctgaggtctggagttcgagaccagcctgagtagagaaaccctgtctctactaaaaatacaaaattagccaggcgtggtggcgcatgcctgtaatcccagttacttgagaggctgaggcaggagaatcgcttgaacctaggaggcagaggttccggtgagccgagattgtgccactgcaccctagcctgggcaacaagagcaaaattccatctcaaaacaacaaaaaagatttggggagagcgatggaggagtttacatggcaatgcaaatgacttcaaatgca

SEQ ID NO: 93828 - DNA, 943 bp, Homo sapiens
gaggccattatccttagcaaaataatgcaggaacagaaaaccaaataccacatatgctgatttataagttggagctagatgatgagaacacatggacacaaagaggggaacaacacacactggggyctaccgaagggtggagggtgggaagagggagaggatcaggaaaaataactaatgggtactaagcttaatacctgggtaatgaaattatctgtacaacaaacccccatgacacaagtttacctatatatcaaacctgcacatgtacccctgaacttaaaatcgaagtctaaaaaataaataaaatcacattttaagtgattcaaaaatttgtgggaaaaaaactcatttttctcattttttaacaaatcctccccaccttcctaatctgtatggtgatgacttagacgcgtaacccagttatcagctggggcctccctgcacattccatccttgcctgagtttctctggttttctgaaaatttccagaggtacgtaagttctccatggtcttggagtttacacgtccatattagtctctgttttacagcacatgaatctggatgtgaaactccactgcctctcacacccacccgtgatgggaggtacctcttcactaaagattttgggagtgggaggccaaggcaggaggatcgcctgaggtctggagttcgagaccagcctgagtagagaaaccctgtctctactaaaaatacaaaattagccaggcgtggtggcgcatgcctgtaatcccagttacttgagaggctgaggcaggagaatcgcttgaacctaggaggcagaggttccggtgagccgagattgtgccactgcaccctagcctgggcaacaagagcaaaattccatctcaaaacaacaaaaaagatttggggagagcgatggaggagtttacatggcaatgcaaatgacttcaaatgca

SEQ ID NO: 93829 - DNA, 943 bp, Homo sapiens
gaggccattatccttagcaaaataatgcaggaacagaaaaccaaataccacatatgctgatttataagttggagctagatgatgagaacacatggacacaaagaggggaacaacacacactggggtctaccgaagggtggagggtgggaagagggagaggatcaggaaaaataactaatgggtactaagcttaatacctgggtaatgaaattatctgtacaacaaamccccatgacacaagtttacctatatatcaaacctgcacatgtacccctgaacttaaaatcgaagtctaaaaaataaataaaatcacattttaagtgattcaaaaatttgtgggaaaaaaactcatttttctcattttttaacaaatcctccccaccttcctaatctgtatggtgatgacttagacgcgtaacccagttatcagctggggcctccctgcacattccatccttgcctgagtttctctggttttctgaaaatttccagaggtacgtaagttctccatggtcttggagtttacacgtccatattagtctctgttttacagcacatgaatctggatgtgaaactccactgcctctcacacccacccgtgatgggaggtacctcttcactaaagattttgggagtgggaggccaaggcaggaggatcgcctgaggtctggagttcgagaccagcctgagtagagaaaccctgtctctactaaaaatacaaaattagccaggcgtggtggcgcatgcctgtaatcccagttacttgagaggctgaggcaggagaatcgcttgaacctaggaggcagaggttccggtgagccgagattgtgccactgcaccctagcctgggcaacaagagcaaaattccatctcaaaacaacaaaaaagatttggggagagcgatggaggagtttacatggcaatgcaaatgacttcaaatgca

SEQ ID NO: 93830 - DNA, 1092 bp, Homo sapiens
gtcaggaattcttcctaatttacagagactctggaaaatggcaggggagtacagatcaccctggcagaccattcccgggggaggcaggtggtggccaaagagataattgctaaactatttatcagagaaggaacttggagccgctggaatggaaagtgtgtgtgtcattagacccatggcatttaattacctccccggccatttaagaagctcaaaaacaagagtccttggtaaaatacattgcccagattctactgcaatgaacactaggaaatgtagggtttaagatttaattaagagaagacactggctgggcgcggtggctcacacctgtaatcccaacattttgtgaggccgaggcgggcagatcacgaggtcaggagttcaagaccaggcaggccaatatacggaaaccaaccccctctctactaaaaatacaaaaatagccaaatgtggtggcgtgcgcctgtaatcccagctactygggaggctgaggcaggagaatcgcatgaacctgggagacagcggttgcagtgagctgagatcgggccattgcactccagcctgggtgacagtgtgagactctgcctcaattaaaaaaaaaaaaaaaaaagagagagagagaagataccttctcttataggaggaaggcccttgcaaagaaaacacacccagtaggacaggtgcttcctgctgacctgtcagatggggagagacaggttgagtgacattttcctgactgtacacatctgctccagggtgaaacccaaaggaggaaatcactactaagtgtcagagcctgagatgatttcaggaataatgctcatggcgctcaagggtagagtgttggataaaagagccctcctggactccatgcttactgccagccttgggaaggaccacacccaggtggtataagcagagcagaatgtcccaatgtcatcttttacaatgaagggaggactccttggagtctaagggtgttccttttgatctgagccccaaacctgaaggagtaggttgtaactgaaacctaaggtgaaatgtagaaaagaatttccagactgcagaagcatttagaggaatttggga

SEQ ID NO: 93831 - DNA, 394 bp, Homo sapiens
aattcctgtgtaagacacaaagtgcaaaaaagttagtgacttgcccaatgtcacagggttaacaaaaggacaaataatttgggagctaatgatcaaaatgatcatatccaaaatatgtctcatgaaacaaagaacaaatgtaatacataaaagtagggggcaatggggtagcacaaaggcttttatcaagcccaaagtgtcggttgccagatgatgctgtggttgggttactctcatttagtcagtgtctgagtgaaacacatttaatattgaccattcaaatacttaaagttcaaaagatgttakggagtctagatttttaaactggaattggagtaccacttgtaaaagaaggatgtctatctagtttttattttctaatttcccaagattt

SEQ ID NO: 93832 - DNA, 530 bp, Homo sapiens
cattagaaaatggtactccaaactgcaaatgggccgcctggagaccagggttatagaactctcacattctgtccttttayagttttgaattttgccacacttgaaagttttgcttagaaaaaaacaaacaaaaaaaacacccttttttttaataaaaagaaagaagcctgataaaaccaaagaaaatgttatggaggatgcagaatcatatcttgctgataggagagcaaattggtaaacctcattggaaagcaatttggaaatatctcaccaagttgagccagcaactacactcctaggtatatgctctagaaaaacttctttcggccgggcacagtggctcacgcctgtaatcccagcactttgggaggctgaggtgggcagatcacgaggtcaggagatcaagaccatcctggctaacacggtgaaaccctgtctctactaaaaatacaaaaaattagctgggtgtggtggcgggcacggtggtggacgcctgtagtcccagctactcaggaggctgaggcaggaaa

SEQ ID NO: 93833 - DNA, 545 bp, Homo sapiens
taaaggcgcacccttctatagaagtagcttgccttgctgagaattaaaaataaaattttacattcaagtgctatttcttttacggcactgaaactttatttataacatagagaagggttgatattcttggtggaaattatgactytgttttgttaacaaagagtcgaactctaaaatatttgaagagatttatttattctgaattattctttttgttgttcttgttttgtttgagggtttttgttgtagttgttgttgtttgagacagatctcactctgtcgcccaggctggagtgcagtgacgcgatctcggttcactgcaacctccgcctcctgggttcaagcaattctcctgcctcagcctcccaagtagctggtattacaggcacccaccaccacacccagctaattttttggtatttgtagtaccgatggggtttcaccaagttggccacgctggtctcgaactccgaacctcaggtgatctgcccacctcggcctcccaaagtgctgggattacaggtgtgagccacccgaccctggcc

SEQ ID NO: 93834 - DNA, 545 bp, Homo sapiens
taaaggcgcacccttctatagaagtagcttgccttgctgagaattaaaaataaaattttacattcaagtgctatttcttttacggcactgaaactttatttataacatagagaagggttgatattcttggtggaaattatgactctgttttgttaacaaagagtcgaactctaaaatatttgaagagatttatttattctgaattattctttttgttgttcttgttttgtttgagggtttttgttgtagttgttgttgtttgagacagatctcactctgtcgcccaggctggagtgcagtgacgcgatctcggttcactgcaacctccgcctcctgggttcaagcaattctcctgcctcagcctcccaagtagctggtattacaggcacccaccaccacacccagctaattttttggtatttgtagtaccgatggggtttcaccaagttggccacgctggtctcgaactccgaacctcaggtgatctgcccacctcggcctcccaaagtgctgggattacaggtgtgagccacccgamcctggcc

SEQ ID NO: 93835 - DNA, 701 bp, Homo sapiens
ctcattcattcaattattaatatttcctgagcatcagctatgtgtcaggcactttgtgaggtgctggaagtataggggacatagtcacattctctgccttcctggagcacagatgagttaacctatgtctataagtgttagcaacctcattataaaatcaggttactatgagtatctttctcatggggttgttatggggacagaatgagttaaaacacaggtatgctcagctgggacattttgcagattttatattaaaaaacaaatttttctctactcacttatctgcttaaaagcttataaatgttccaggcaaaracaggattattaggaaatgaggatggagaagtccagagattgctactatggcaatgaaatctacccataggaatttgcctctagacttcaacctttgaatttgctcagtctgtggtcagggatttattgccccagtttgttaggggtcctcagtttcacaactccatctgccttttgccctgatgaaattccagctcagttagtgatttgtttcctgatagactggtccccaggggcatcatatctatacaaaaactcaggtgctggctctactcagaagctgctatattagtggtattgttccccaaaatagagatcctctgaccctaaggcccatgggtccttccttagtcaaagtctgcctaacgaggctttttgtttca

SEQ ID NO: 93836 - DNA, 491 bp, Homo sapiens
agctatccagtaactgaactgggactcagagacagcagtctcaactccagaacctatccttataacgwacactctggtgcttaataaaggtgaattataaaagagagaacacttttcggctgggtgcagtggctcacgcctgtaatcccagcactttgggaggccgaggcgggcagatcacgaggtcaggagatgagaccatcctggctaacacggtgaaaccccgtctctactaaaaaatacaaaaaattagccgggcatggtggcaggtgcctgtagtcccagctacttgggaggctgaggcaggagaatggcgtgaactgggaggcagagcttgtagtgagccgagatcacgccactgcactccagcctggatgacacagcgagactctgtctcaaaaaaaaaaaaaaaaaagggagagaacacttttctaaatatccttacaaatggaaataaggcctgtagttcaacaaacacgtgcctttaaagt

SEQ ID NO: 93837 - DNA, 491 bp, Homo sapiens
agctatccagtaactgaactgggactcagagacagcagtctcaactccagaacctatccttataacgaacactctggtgcttaataaaggtgaattataaaagagagaacacttttcggctgggtgcagtggctcacgcctgtaatcccagcactttgggaggccgaggcgggcagatcacgaggtcaggagatgagaccatcctggctaacacggtgaaaccccgtctctactaaaaaatacaaaaaattagccgggcatggtggcaggtgcctgtagtcccagctacttgggaggctgaggcaggagaatggcgtgaactgggaggcagagcttgtagtgagccgagatcacgccactgcactccagcctggatgacasagcgagactctgtctcaaaaaaaaaaaaaaaaaagggagagaacacttttctaaatatccttacaaatggaaataaggcctgtagttcaacaaacacgtgcctttaaagt

SEQ ID NO: 93838 - DNA, 491 bp, Homo sapiens
agctatccagtaactgaactgggactcagagacagcagtctcaactccagaacctatccttataacgaacactctggtgcttaataaaggtgaattataaaagagagaacacttttcggctgggtgcagtggctcacgcctgtaatcccagcactttgggaggccgaggcgggcagatcacgaggtcaggagatgagaccatcctggctaacacggtgaaaccccgtctctactaaaaaatacaaaaaattagccgggcatggtggcaggtgcctgtagtcccagctacttgggaggctgaggcaggagaatggcgtgaactgggaggcagagcttgtagtgagccgagatcacgccactgcactccagcctggatgacacagcgagactcygtctcaaaaaaaaaaaaaaaaaagggagagaacacttttctaaatatccttacaaatggaaataaggcctgtagttcaacaaacacgtgcctttaaagt

SEQ ID NO: 93839 - DNA, 575 bp, Homo sapiens
aacgatggtctccttactttgtttctctcttcccatggggatctttccagggttttcccattaagtgtgggttgtcggcccagcacggtggctcacgcctgtaatcctaacactttgggaggccgaggygggcagatcaccagaggtcaggagttcaaaatcagcctggccaacatggtgaaaccccgtctctactaaaaatacataaattagctgggcatggtgatgggcacctgtagtcccagctacttgggaggctgaggcaggagaatcacttgaacccaggaggcagaggttgtagtgagccaagatcgggccactgcactccagcctgggcaacaagagcaaaaatgtctccaaaaaaaaaaaaaaaaaaagcatggattgtcagggaatgcctttcgggggagggaacatttaagctgagaaaggagtgacaaaaaacaaaaaagagctaagtaggcagaggataagcaggaagtagcattcctaagcagagaaaacagcaagaacaaaggtcttgggtttagaaataagagtccagtaaaaaaaatctaagcagagtcagttgaaat

SEQ ID NO: 93840 - DNA, 575 bp, Homo sapiens
aacgatggtctccttactttgtttctctcttcccatggggatctttccagggttttcccattaagtgtgggttgtcggcccagcacggtggctcacgcctgtaatcctaacactttgggaggccgaggtgggcagatcaccagaggtcaggagttcaaaatcagcctggccaacatggtgaaaccccgtctctactaaaaatacataaattagctgggcatggtgatgggcacctgtagtcccagctacttgggaggctgaggcaggagaatcacttgaacccaggaggcrgaggttgtagtgagccaagatcgggccactgcactccagcctgggcaacaagagcaaaaatgtctccaaaaaaaaaaaaaaaaaaagcatggattgtcagggaatgcctttcgggggagggaacatttaagctgagaaaggagtgacaaaaaacaaaaaagagctaagtaggcagaggataagcaggaagtagcattcctaagcagagaaaacagcaagaacaaaggtcttgggtttagaaataagagtccagtaaaaaaaatctaagcagagtcagttgaaat

SEQ ID NO: 93841 - DNA, 575 bp, Homo sapiens
aacgatggtctccttactttgtttctctcttcccatggggatctttccagggttttcccattaagtgtgggttgtcggcccagcacggtggctcacgcctgtaatcctaacactttgggaggccgaggtgggcagatcaccagaggtcaggagttcaaaatcagcctggccaacatggtgaaaccccgtctctactaaaaatacataaattagctgggcatggtgatgggcacctgtagtcccagctacttgggaggctgaggcaggagaatcacttgaacccaggaggcagaggttgtagtgagccaagatcgggccactgyactccagcctgggcaacaagagcaaaaatgtctccaaaaaaaaaaaaaaaaaaagcatggattgtcagggaatgcctttcgggggagggaacatttaagctgagaaaggagtgacaaaaaacaaaaaagagctaagtaggcagaggataagcaggaagtagcattcctaagcagagaaaacagcaagaacaaaggtcttgggtttagaaataagagtccagtaaaaaaaatctaagcagagtcagttgaaat

SEQ ID NO: 93842 - DNA, 575 bp, Homo sapiens
aacgatggtctccttactttgtttctctcttcccatggggatctttccagggttttcccattaagtgtgggttgtcggcccagcacggtggctcacgcctgtaatcctaacactttgggaggccgaggtgggcagatcaccagaggtcaggagttcaaaatcagcctggccaacatggtgaaaccccgtctctactaaaaatacataaattagctgggcatggtgatgggcacctgtagtcccagctacttgggaggctgaggcaggagaatcacttgaacccaggaggcagaggttgtagtgagccaagatcgggccactgcactccagcctgggcaacaagagcaaaaatgtctccaaaaaaaaaaaaaaaaaaagcatggattgtcagggaatgcctttcgggggagggaacatttaagctgagaaaggagtgacaaaaaacaaaaaagagctaagtaggcagaggatawgcaggaagtagcattcctaagcagagaaaacagcaagaacaaaggtcttgggtttagaaataagagtccagtaaaaaaaatctaagcagagtcagttgaaat

SEQ ID NO: 93843 - DNA, 827 bp, Homo sapiens
ccaattactaattgcttgattcatcattttcttccaatctgagatgtatctcttgtttatattatgtcaagattatgttggcaggtgtgttttctcccaattaagcaatgaaataatgtagtatataaatgaatggctgacgctgtgtggctgttgcagcagtgactgttggaataggagcaagaattccttgtctaatgattcagaaactgacaaacatatttagttttgcagtgccttccctgagcctttatagttctcaggtgctagtgttatccattgataatgattttgtgtgcagctgcctatgttttccttttaaagcagctctaatgtatcttttcaatcatagaatactctctcagtattttggtttgttttttttttaattttcaggtggctagaagagcagggcataaggggagggtgaaaagtagagataaaggttatttgccttatttgaagagtcacagtagatttgatgcaacatcaagagagacattgcaatgatttagatttatatgatgtgcaatatagctggatacttgagatgaactattggcaaatgaagattgccaaagsaacaaaataaagatgcagtcatccttggataactgtacttttcctcaagattttcattcagtttgagaattaacatttttttctaaatataaagcaatagctacctagacaagaggtgtgaaactttaaaagcttgaattgtttcatgaagaaaaaaaaattttaaaagacaatcattttgggcttttaaatgcctgagaaactttgatagccttttatattctggagaaaacaggaagagaaac

SEQ ID NO: 93844 - DNA, 1380 bp, Homo sapiens
gggtttggtgggtggcggcccgtggccgtcctcgtgaggaagcttagctgtgtgtcctgcagccgtctcatcctctctggatagaaattatcaagagtttcttaacgtttaagtgatagctttttaaagacaaggttttttgtcccagagtaactcagacttaccaagttgtacttaccaatgttgaaagtgcagcttctgctggagtcgccttttcaactcctaacttcaccttttcaaatgtcagccatgtatctgagcattgcggagccgagtgtggtgagatcttgacaccagccaccacgcctcccaggccggccccgtcctgcggcggttggaactcagcctgtggctccccagtggggtcagtcaaagccaagtgcagtggctgaccttttatacccataaacaaakatgagcaagagtgagactgacccgcagatgagggcacgtggctgtgggggcatgggagtgggggctgcggagccacagcgctgtctgtgcccgcaggcacgttgcccctggcctcgcaggagtcggccgtggtggaggacctgctgtacgtgctggtgggcgtggactggaggtacgtcagtgctcagcccctggctgggaggcagagccggacctttctcgtggaccccaacctggacctgtccatcagggagctggtgcacagggatcctcccagtggccgccagctactccgctgtgaccaggtgggcaccgggcgcggtccctgggagcctgcgctgttgtgggggaggggttaggtcccatcctgatgaccatggggacgtctgcatcgcttctaaagagagcgcccgccttggtgacaactccgtgcccaactcagttttggagggtctgtgagtcaccatccagggtcatgactcatctcctcctggggcaaaagttcccctctgggatgtggggttcaagtgagtcatttgcttcctgtttgggatgagactcagaatatcggacattgtatgtgcctgcagcttgcctttttgaggaagtctgacagcttttcttccaggttcattgaagagaaagtcttcctttgagtacgggcaggtgaaccacgccctggcggccgccatgcgcaccctggtgaaggagcacctgattctggtgtcacagctggagcagctgcacaggcagggcctcctttcgctgcagaagctctggttctacatccagccagccatgcgcaccatggacatcctggcctccctcggtgcgtgcccgcccggggggcatggggcagtggtgggtggcaggtgttgaacatggcacccagtgtgaggagagactctgcaggggccgtggagcagctgcccagggcaggggcgtgtggccaaagctcatgttgct

SEQ ID NO: 93845 - DNA, 842 bp, Homo sapiens
gtcacattttgtctcaaagccattcttaccctaatgtgaatggcatgaaaagcaagaaagcaagggctggcactgggccgcaggtgacttctgctgcctgggggtgtgtccgcttgcctgtgtggcacaggacgaggtcccccaggctgccgagaggctcccaggtagggctggggatactggcctgtgcctgagctcatgcaggtgaccctgttattatagaacaatggccagctggcaatcacacttcccttccttgacctcatggtgcaagttactcaacagcaaagtgcaaaggcggcacgctggccacatcagaggcacagcaaggcccctgccgaygctgagctaccagggatttattcctaaaaagacaggaccagcttgggccagaacaggctcctcccgcgctgaggaagttccacccaatcccacagaacacagctctcctcttcagcaggtgccggggggtctgggagcctgaaccccacagccctggaggcttccctcccctcctcctgtcaccacctgcaaaccccacttctcaaggcccagggcttcccagaccccaggacacaagatcaggggtttctgggcctcggggccaggcaggaaagctagcaggctcctctgctcaccggtccggcatttgcacaacactgagactgacagcttgggttgctgataaatgtgtttactcacaggccagacctgcacagcctgcagacaaggaggaagcggtttgtggctggagagttggacacccccacccccactcggcggtgctctcagtgaggcagccccgggtgagagctgcccacacccttgttccccgcaggatc

SEQ ID NO: 93846 - DNA, 891 bp, Homo sapiens
taccttttgttttcttacctttccctcataccttttgttttcttttttcttttctttttttttggtaaagtgaacaaaatctccagtgaggtcacaagctgcaaaattctgccagtccttttaaatattacacttggcaccacatttaagaccaaatagacgttccatcaaatgcaagcagacccaaaatgagaggtgttcgcaagccacagaagaacttttttttttttttgtaaaggctttcaaaaagggactgttcttttagctcttgactaggtcgttttggatctggactttcccaggtcattttggatctggactttcccactgggtgttggtaacaacctcccttcaccctcaacaagggccatgttgggtaggggtgggactggattattttaaagaaaataccattcatttagaacatctgttagttgagggtagaatttatttattttttatttatttatttatttattttttgagacggagtcttactctgtcaccccagctggagtgcagtggcgcgatctcggctcattgcaacctccacctcccgggttctcctgacacagcctcccaagtagctggggttacaggcgcctgccaccacgcccagctaattttttgattttcgtagagacagggtttcaccatgttggccacactggtctcaaactcctgacctcgtgactcgcccacctcagcctcccaaagtgtccctggccaggacaaatacaactctacttttcycaataggaggtaaacttgtgtgacaagcaatcaagaaaagtagtacaaactgaaaatatacatgaattcaagatggctttaattccagaggtcacagaaccatagctggttaggaagagatggctacatgcaagaggc

SEQ ID NO: 93847 - DNA, 682 bp, Homo sapiens
tgtgaaacaaatgcccaggttgggactctacctggaacccattctcgtatcaggtaggagggaacacagcccagaaggacctggttctgcctctgctgtgtcatcttgggcaagccagtgtccctctctgggtctcagactccatgactgtacagatgatggatgctctgtgacctctggggctccttctggccctgatgctctgtgctaatacctgcctcctttaaaaacaaaacctggacccagtgtggtggctcacgcctgtaatcctagcactttgggaggtcaaggtgggyagatcacaaggtcaggagttcaagaccagcctagccagcatggtgaaaacctgtctctactaaaaatacaaaaattagccaggcgtggtggcaaccacctgtagtcccagctacttgggaggctgaggcaggagaatcacttgaacccaggaggtggaggttgcagtgagctgagattgtgccaatgcactccagcctgggcaacagagtgagactccatctcaaaaaaaaaaaaaaaacaaaaaaaaaaactgaagtggagcagaaagaaaaatgggaagggagaagaatggttcaggaggccatattactataaagctcccccatttctgcctgctgaaaattgctttcctcattctgcaggaagactcccatttcttgctggg

SEQ ID NO: 93848 - DNA, 682 bp, Homo sapiens
tgtgaaacaaatgcccaggttgggactctacctggaacccattctcgtatcaggtaggagggaacacagcccagaaggacctggttctgcctctgctgtgtcatcttgggcaagccagtgtccctctctgggtctcagactccatgactgtacagatgatggatgctctgtgacctctggggctccttctggccctgatgctctgtgctaatacctgcctcctttaaaaacaaaacctggacccagtgtggtggctcacgcctgtaatcctagcactttgggaggtcaaggtgggcrgatcacaaggtcaggagttcaagaccagcctagccagcatggtgaaaacctgtctctactaaaaatacaaaaattagccaggcgtggtggcaaccacctgtagtcccagctacttgggaggctgaggcaggagaatcacttgaacccaggaggtggaggttgcagtgagctgagattgtgccaatgcactccagcctgggcaacagagtgagactccatctcaaaaaaaaaaaaaaaacaaaaaaaaaaactgaagtggagcagaaagaaaaatgggaagggagaagaatggttcaggaggccatattactataaagctcccccatttctgcctgctgaaaattgctttcctcattctgcaggaagactcccatttcttgctggg

SEQ ID NO: 93849 - DNA, 608 bp, Homo sapiens
cgcggcagctcatgcctatcatcccagcactttgggaggctgagccaggcagatcacttgacctcaggaattgcagagcagcctagccaacagggtgaaatcttgtctccactaaaaacacaaaaattagccgaaggtggtgtctgtagtcccagcttcttaggcggctgaagcaggagaatcgcttgaacccggaaggcagaggttgcagtgagccgagattgcgccacttcactccagcctgggcaacaaagtgagactctgtctccaaaaaaataaaataaaataaaataaaaagaaagaaaatcaagtagatttatgcacacacacagagtaatcaaaactgtgtggtattggcatatgaatagacacgtagattaataagacagtaaagaatctagaaatagaccaacaaatatgctcaactgatttttgacaaaggtgcaaatgcaattcaatggaggaaagayagacttttctttaaaacttcggtatatatacagaaattctaggggttctctaaaagtataaaaataccttttaaaatgcaactggccctcccaggatagctttttcaataaatggtgctggagcaattgggcattata

SEQ ID NO: 93850 - DNA, 608 bp, Homo sapiens
cgcggcagctcatgcctatcatcccagcactttgggaggctgagccaggcagatcacttgacctcaggaattgcagagcagcctagccaacagggtgaaatcttgtctccactaaaaacacaaaaattagccgaaggtggtgtctgtagtcccagcttcttaggcggctgaagcaggagaatcgcttgaacccggaaggcagaggttgcagtgagccgagattgcgccacttcactccagcctgggcaacaaagtgagactctgtctccaaaaaaataaaataaaataaaataaaaagaaagaaaatcaagtagatttatgcacacacacagagtaatcaaaactgtgtggtattggcatatgaatagacacgtagattaataagacagtaaagaatctagaaatagaccaacaaatatgctcaactgatttttgacaaaggtgcaaatgcaattcaatggaggaaagatagacttttctttaaaacttcggtatatatacagaaattctaggggttctctaaaagtataaaaatacyttttaaaatgcaactggccctcccaggatagctttttcaataaatggtgctggagcaattgggcattata

SEQ ID NO: 93851 - DNA, 1255 bp, Homo sapiens
tccctaaactctcactaatggacttattagaactgtacttttatgtatgaccttcttatacagcagaattgaatctatgccaatacaaaattacattgtgtgttatatattagccacagggaatttttgccttcggtgtgatccattatggttataatttattgccctctaagttctagccatgccactaacagttgcatagggagctaaagttgagagtgataactgttccaggtgacctggttagatctaatttatgggtacttagcaggactaagtgaggcctcagtacacagtgcatttgatcctctatttgataagattttgaccttttggtcccagtggtaccactccaagtagaattagaagttgagatagaatgtttttataggtctctcttgcaataattggaagataaataactttaaaagtgcataattcacctcattgtcttccaagaggtgtgccaaggacaaacagtacacatatttattttgtttttaatttacaattaaaatatgctggacatgccttaaaaggtctattacacacttgaaagctggtagtaaaaatggaggtcatctaattcaaattctttccaggaaacttctaagagctagtctttttcaatggtcttttatcctcaaactggcatatttcagtgatgggtcttgttttatagaatagtctgttctattccatgtcactttttcctcctgatttttctttattttatacaaagacaaatgtgaaaaaaagaaattgaagcatcacaaatattttagctcataatggcagaggaaaagtatttggaagtgcgaaggcataaatttatttctaacataaactatactcttctactgataagaatctctgctctatttgttattttttaaaaacttttatgggtatatagtaggtgcatatgagttacatgagatactttgatagaggcacataattatttggtgcaaatttggattaagagaagccctctacttatggtgaaaacatgctttgaaatatttttcaactatttttcttatttctgctctctgaaactacagtaagtcaactaatggatgtttccatgacaaccatttagatatttgacaaatcatatgttgttaaatttaaaatcctcccattttatacattctcaaaagtgttcaaatttctcttctatgcacctgtaaaatggtacctgtwataatctacctatatattattatctgatattattaattaatgtaca

SEQ ID NO: 93852 - DNA, 526 bp, Homo sapiens
tattgtaaactgaactattctcttaatsttttttaagcttattacttgttaggtatacaagtacaactgatttttgtgcattggttttgtatcctactactttgctgaatttagttattagttgtgtgtgtgtgtgtgtgtgtgtgtgtgtgtgtgtgtgtgtgtagactctttagggcagggatgtccaatattttggcttccctaggccacagtgaaagaagaattgttttgggccacacaggtaatacactaacactagcgacagctgatagctgatgagttacaaaaaaaaaaaaatcccaaaaaataatcttatgctgttttcagaaagtttataaatttttgttgggccacattcaaagttgtcctaggctgcatgtggcctgcggatcataggttggacaagcttgctttagggttttctatatgcagtgtatttaagaaagaggaagattgtttaacttcatataataataatcagatacttgaatatgttttattatttatacataatattattcaa

SEQ ID NO: 93853 - DNA, 657 bp, Homo sapiens
  misc_feature (1)...(657): n = A,T,C or G
tgcattggatgtttattaatatgctgattcaggggccttagccctagaggatctgatacagtaagaatctgatttatattcctacaccaagtgattctgaggcaaatggtctgaggagcaggattggctacataatttgtaggaaatgaaaatgcaggccccttgctaaaaaataattggaaatttcaagatggtgacagcaaagtaataaaccaagagtgaggaccttcgaaatgtgggcccctctgtgactgcacaggtcacaagcccatgaagccagccccactgggtagattagaaacacttctccaggtaaggtttaagtcagacaaygctagatgcttccagagcccttagtgactgaaataaaatctatccccacattagctcagaaagcatagcccacgatggcttctcttcccaaggaatccttgaggaatgatgacaggaccttcttctagatgagaatggaaaaatatctttttaagtttagttgctggaaaaattcagtaaagaaaaaaatgtaaatagccaaatttggggccagatgtctttattgttatttttctcatttgaatagctattncctagtggttnctatttcatgcacatgagacgaccnattataaagtataaagcagggatagaggatttaag

SEQ ID NO: 93854 - DNA, 657 bp, Homo sapiens
  misc_feature (1)...(657): n = A,T,C or G
tgcattggatgtttattaatatgctgattcaggggccttagccctagaggatctgatacagtaagaatctgatttatattcctacaccaagtgattctgaggcaaatggtctgaggagcaggattggctacataatttgtaggaaatgaaaatgcaggccccttgctaaaaaataattggaaatttcaagatggtgacagcaaagtaataaaccaagagtgaggaccttcgaaatgtgggcccctctgtgactgcacaggtcacaagcccatgaagccagccccactgggtagattagaaacacttctccaggtaaggtttaagtcagacaacgctagatgcttccagagcccttagtgactgaaataaaatctatccccacattagctcagaaagcatagcccacgatggcttctcttcccaaggaatccttgaggaatgatgacaggaccttcttctagatgagaatggaaaaatatctttttaagtttagttgctggaaaaattcagtaaagaaaaaaatgtaaatagccaaatttggggccagatgtctttattgttatttttctcatttgaatagctattncctagtggttnctatttcatgcacatgagacgaccnattataaagtataawgcagggatagaggatttaag

SEQ ID NO: 93855 - DNA, 851 bp, Homo sapiens
tggccttgtggttgtactattttaccacagcatagaagagagtcgtattttctgctagcaaaactgttccaagtcctgtgatggagtgaatatcaataggttgtgacgatcccccagaagcattgtgatgtcagttgccgacattcaccagctgtacagacgtgcgcacagctgagttctgacccctcccatcccctgccctgttctgggagggaaaaatacaggggatgacataacccagggctgatgggggctgcttccaaaagtaacgggagaagcaacagtgttcttaagaagccaccacccccagtgccttgtttgatatttttcctgtgtctagtcttttccctcctcagccgatcttccacactgactttaagtatagctacctaaaatctttctacgtcaagtataatccagggaccggtagcctctgcatacccckgggaacttgttaaaaatgcagaatgccccatcccagacatatgaaatcagaatctgcattttaacaagatccccaggtaatctacttgcacactgtgtttaagaagcactgggggccgggcacggtggctcacacctgtaaccccagcactttgggaggccaaggcgagagaattgcttgagcccaagagtttgagaccagcctggacaacatagcgagaccctgtttcacctatttatcattccttgaatacattaaggctttctcaagcccaacaaagcgcaactttgtatgtgcagttcccgctgcaagaatgcctttccacaaatggggaaatcacgctcaaccttcaaaacccaacccaggccaggcgcaatggctcacacctgtaatcctagcactttgg

SEQ ID NO: 93856 - DNA, 851 bp, Homo sapiens
tggccttgtggttgtactattttaccacagcatagaagagagtcgtattttctgctagcaaaactgttccaagtcctgtgatggagtgaatatcaataggttgtgacgatcccccagaagcattgtgatgtcagttgccgacattcaccagctgtacagacgtgcgcacagctgagttctgacccctcccatcccctgccctgttctgggagggaaaaatacaggggatgacataacccagggctgatgggggctgcttccaaaagtaacgggagaagcaacagtgttcttaagaagccaccacccccagtgccttgtttgatatttttcctgtgtctagtcttttccctcctcagccgatcttccacactgactttaagtatagctacctaaaatctttctacgtcaagtataatccagggaccggtagcctctgcataccccggggaacttgttaaaaatgcagaatgccccatcccagacatatgaaatcagaatctgcattttaacaagatccccaggtaatctacttgcacactgtgtttaagaagcactgggggccgggcrcggtggctcacacctgtaaccccagcactttgggaggccaaggcgagagaattgcttgagcccaagagtttgagaccagcctggacaacatagcgagaccctgtttcacctatttatcattccttgaatacattaaggctttctcaagcccaacaaagcgcaactttgtatgtgcagttcccgctgcaagaatgcctttccacaaatggggaaatcacgctcaaccttcaaaacccaacccaggccaggcgcaatggctcacacctgtaatcctagcactttgg

SEQ ID NO: 93857 - DNA, 727 bp, Homo sapiens
agaaataaatttaagtctgtagtctatgagataacacaagtgggggacaaaattatgataggcctcccttcctggctgggcagtccatgtgacatgtctgctcagggctcatggcatctcagccagacattctgagattctggcctcttggctccttgagccaactctaccattaaaatattaatttctctattataactcattgaaggtgaaggttatgatttttgcttgcccaatacacttccctctcttctaatgacaacagtaacatgtaytcttttttttttttttttttttgagacagtcttgctctgttgcctaggctggagtgcagtggtgtgatctccactcactgcaacttctgcctcccaggctcaaatgagcctcccacctcagcctcccaagtagctgggacttcaagtgtgtgccatcatgcccagctagctttttttgtatttctgtagagatgaggtttcactaagttagccaggctggtctcgagctcctaacatgtcgtgtgctcttaattgggccaattatattactccatcttcctggcttggtgattggctcagggaagagtatatgacctaaactgattcaatgcaagtgattgttaggattgttttcaaactgcagacaaagacaaaggaatcctctttctttgctggtagaactgctgttaggatgagatgagagatcatagttgctaggattcatgttcccc

SEQ ID NO: 93858 - DNA, 1222 bp, Homo sapiens
atttttaccacatcacttaacttctaagttttctaattattgtattgtacaactgaaagaatgatattcacacacacacacacacacactccatacccttgaacactgagagacaatagactgatcaggaggctcttacatctgcaagaaacaaaactggagactagcaggacacatagcttctgagtgatggcgtaacaagttgctatttataccccatcttccattcaccaatgtgaactaggggtctatccctgcaagagagtaattttagagaatgagcttccgggtgagctcacagsttaacactgcttgtatcaccatcttgagtcagcagtggataatgctgtgcagaataaactaattttagtcctctgcggtatccttgtaaacacttcatagtgattctttaaaaagtcagtgggaacttgctatctctgcttcatttcctactcccaataatttgctagggttatttttaggtaactgtgtcttacaggatttgtttaggtgagctcctctgtttcagaatggccatgtgaaaattctgccacagattttgaagtcagaaggctgtctggttaaatggatccagaaaaattactaacagatatggtgacaaaggacatggaaatgtaagtgtcctgtatgtgctacaggaaaaagtgctgcccatctttccctcatttcagcaacactttcagtgagccccagctcatggaaagagagacgaggagagaaaaaggcttattcctgaagctaatagctttccttctctctctaatactatatgtttgcagtgacaatgatccctcagcttctgaatcatctcctcattctgtgatgtacccctgggttctgagtttcatttctttggcagtcagtcacatgctgaatatagagcacctctaatttgttcagtgtctcatggatcactgagaaagaatagggccttatgacaaactccactggtcagagcgcccggatctaggtgtgtgatcacagcctttaacacttgaccaggaactcatatttcatggagtgagaattgtgagaccttgcactagggttttgtgattctgagaaagatgctgggtttggctgtatttatcaaggaatgtggataccaagagaaggggctgagttgggaagaagggggtaaagagaattctaggcaaattaaacctctcagcaacgagtatcccataggccagaaagagtg

SEQ ID NO: 93859 - DNA, 568 bp, Homo sapiens
tttaagaagatgtaattgatagaatacatgatacatatgaatgtgttaaacagagatttaggctgctcgcaaagaggttaattcaaattcaagccagagagagagctgaaagtggatacagacctgcagactagtttaagcagggcaggagatgtcagcataggagagataccccccaataacaggaaggagattcctttgttccaagagccagatggaatatttgatcttactgggcatttattgatattgatatttggtttctctattcatcctcatttaagaaagaagttacctctaatgtcaaggatattacaattacggttttatcttttttttttagacagagtttcgctcttgttgcccaggaaggagtgcaatggcacgattttggctcactgcaacctccgcctcccaggttcaagtgattctcctgcctcagcttcccaagtagctgggattacaggcatgcgccaccagccaggctaattttgtatttttagtacagatggggttttgccatgttggccaggatgrtttcgaacagttttattttcaatttccatta

SEQ ID NO: 93860 - DNA, 934 bp, Homo sapiens
atattattctgaatcttagccattattcagtattatccaccttgtataaacatggggcactaaaatatatttacattttgtatatatttacatttcatatttgttttacttttcaaatgtattttaaagcatcatgtttacaagatagttttttttacaaataaaatttgttaagagatatggattgtcaatttttttcaagaaactacttattaaagtataatatatatattttaaaagctcacaaatcataggcgtacagcttacaacatgactacactatgtaactggaatccatatcttgaaatagaacattaccagatcccaaggagctctctttatgccccctctagttcactatccccaaccccactccaagggactccactaacctgattccaaatggcatagattcatttgccaatttttgaactttatgaaagtaaaatcccacagtattttctcttttatctcccattcctcctccattcctttagttttcaggttttgttttgttttgttttgtttttggagacggagtcttgctctgtcacccaggctggagtgcagtggcgtgatctgggctcactgcaacctccgcctcccaggttcaagcagttctcttgtctcagcctcccgagtakctgggattacaggcgtctgccaccacacctggcaaatttttgtatttttagtagagatggagtttcaccatgttgggcaggctggtctcgaagtcctgacctcaagtggtctacctgcctcagcctcccaaagtgctgggattacaggagtaagccaccgtgcccgcctgcccattcctttagttttttttgctggtaaattcatccacgttatggtgtgatgttgtttgtttatcctcagtgctgcaaagtggtccattgtatgaattttacatgttagtttaaataat

SEQ ID NO: 93861 - DNA, 934 bp, Homo sapiens
atattattctgaatcttagccattattcagtattatccaccttgtataaacatggggcactaaaatatatttacattttgtatatatttacatttcatatttgttttacttttcaaatgtattttaaagcatcatgtttacaagatagttttttttacaaataaaatttgttaagagatatggattgtcaatttttttcaagaaactacttattaaagtataatatatatattttaaaagctcacaaatcataggcgtacagcttacaacatgactacactatgtaactggaatccatatcttgaaatagaacattaccagatcccaaggagctctctttatgccccctctagttcactatccccaaccccactccaagggactccactaacctgattccaaatggcatagattcatttgccaatttttgaactttatgaaagtaaaatcccacagtattttctcttttatctcccattcctcctccattcctttagttttcaggttttgttttgttttgttttgtttttggagacggagtcttgctctgtcacccaggctggagtgcagtggcgtgatctgggctcactgcaacctccgcctcccaggttcaagcagttctcttgtctcagcctcccgagtagctgggattacaggcgtctgccaccacacctggcaaatttttgtatttttagtagagatggagtttcaccatgttgggcaggctggtctcgaagtcctgacctcaagtggtctacctgcctcagcctcccaaagtgctgggattacaggagtaagccaccgtgcccrcctgcccattcctttagttttttttgctggtaaattcatccacgttatggtgtgatgttgtttgtttatcctcagtgctgcaaagtggtccattgtatgaattttacatgttagtttaaataat

SEQ ID NO: 93862 - DNA, 963 bp, Homo sapiens
tttttaatatttacattctgtcttgcaaccatagattccatagttggttagcttttgttttaaatttaagtggattcagtgctctataccagcctcttttcatgtcttatccattctagagttctttaattgctctctggtttgtatcaatttgctcatcaagtactaccccttctatcctccactcccctacctccaacatacacacacaagaagagcttgtagaagttgtagtccttgaatacttagagtcctgagaatgtctttctgttactttactactttgtagcctgcctggatacaaaattcttgagtcactctttctttctctcagaatttggtagctatttctccattgtcttttggcataaggtgctgaactttgtctcttaccatggcttttttatctgccttcttgttagtttgagtcatcattggatttttttttccacaaagggtttatgtgtgctatttgacttgagcttgtctattttcatatttgagatgtttgcttgtttctcttattcatgaatgacaacttgtctttataagcatgttccactccttctgacatggaatgagaccagggagggcttgaagccaatgtggcttacaaaaagaaaaaaaaaatcaactgaggtcgggcatggtggttcatgtgtgcaatcccagcactttgggaggctaggtgggaggattgcttgaggccaggggttcaagaccagcctgggcaacatagcaagactgtctctaccaagaaaaaaaaatcctaagctgggtgtgatgcatgcctgtagtcacagcarcttgggaggatgagccaggaggataacttgagcctgggagttgagtccagcctgaataacatagcaagacctcatctctaaaacaaacaaacaaacaacaaaacatccttgtaaatggcttgtttttcttgcttgtattagtgaagaactgtttata

SEQ ID NO: 93863 - DNA, 439 bp, Homo sapiens
ccagacttaagactgagatcaccactttttcatctatagtgaacttacaggtccataatcctcacccatgtacaaagcttctaatccatcttaattgccagccaaaaatcactagacatttgaagaaaataaatacaaatgacagatatcacaacagggaaaaaaaagatcccaaaggaaagaaaarcataaaagaaaactttaataacattaataatgtttctgagataaggaatagatctataaaataaaaggatgctatatttttcaaaaggagagacagggatggcagaaaagagtttttagaaactaaaaatttctaaattcaacaaaaatatcagaagatgaagtcaaagtcaaaagaagtcataaaaagtaaaatagagaatgcttttctcaagcgcaaagctcacaggtcttccaaacccactttaatggg

SEQ ID NO: 93864 - DNA, 651 bp, Homo sapiens
aatcaagttagagatcactttgcttgcacagtagcttaactcagtggggggctagcaaacagagagttttttcatgagatactgcagctttattttcagtgtcatctatcaggtcaggattcatatctgctgttaggagaaatttcatttttggctcatcaggccagggggtattgcttctgaagcacttccctcctacgggtaaaaagaacctgggacgaacccatactgctaactgctaattgtaagagtatacacagttaatacacactgttagaacatygatctagtattgcatgggtttgtcttagaaagtcttacatgacatcatagtcctttattgccagaaagcagataatgctctgtgaacatctatagagaaagccaatcaacattaggtaagaaggcataggaaggcagatatgaatttaaccttcagctattgagtttcttttgggcccttacatgattgtaaccttttaacatcttacacagtttagttctttttatacttctttttataccagtttctaggttcttgcaggtaaactcagataagttttcctgagtgatttcttccctttttcctcatttattgagtgattaaattgagctgcatgcttagggttcaaaaatacacaaggaaaaata

SEQ ID NO: 93865 - DNA, 651 bp, Homo sapiens
aatcaagttagagatcactttgcttgcacagtagcttaactcagtggggggctagcaaacagagagttttttcatgagatactgcagctttattttcagtgtcatctatcaggtcaggattcatatctgctgttaggagaaatttcatttttggctcatcaggccagggggtattgcttctgaagcacttccctcctacgggtaaaaagaacctgggacgaacccatactgctaactgctaattgtaagagtatacacagttaatacacactgttagaacatcgatctagtattgcatgggtttgtcttagaaagtcttacatgacatcatagtcctttattgccagaaagcagataatgctctgtgaacatctatagagaaagccaatcaacattaggtaagaaggcataggaaggcagatatgaatttaaccttcagctattgagtttcttttgggcccttacatgattgtaaccttttaacatcttacacagtttagttctttttatacttmtttttataccagtttctaggttcttgcaggtaaactcagataagttttcctgagtgatttcttccctttttcctcatttattgagtgattaaattgagctgcatgcttagggttcaaaaatacacaaggaaaaata

SEQ ID NO: 93866 - DNA, 634 bp, Homo sapiens
ctgattgtagccttggctaggtgcagtggctcatgcctgtaatcccagcactttgggaggccaaggtagatggatcacttgaggccaggagtttgagaccaatctggccaacatggtgaaaccctatctttactaaaaatgcaaaaattagcagggcatggtggtgtgtgcctgtaatcccagctattcsggaggctgaggcacgagaatcacttgaacctgggaggtgcaggttttagtgagctgagatcatgccattgcactccagcctgggcgacagagtgagaccccgtctcaaaaaaaaaaaaaaaaaaattgcagcttcatgggatgcttactaagcatcaagaaaaaaattccgcttttcaatgtatgtgttttgttaagggtccaaaaatagtaaaaatgtttcattttttggtatggacacagattaagttaattggtgttaattatccaattttatgaattaactatatcttttatctttcaatttggcagaagtaaaaagggagagaagacaaaatttttgtaagctaaatactatgaatatgagaagcttagttttacttttttcattgagaagtgacttgcttagtgggggaaaaaaaagagaaaatttctattacgaagg

SEQ ID NO: 93867 - DNA, 727 bp, Homo sapiens
ctttttaaggctgaatagaattcctttgtgtagatagaccacattttctgtatccattcaactactgatggacacttaggttgattccatatcttgctattgtgaatagcgctgcaatccacatgagagtgcagatatccctttgatacactgatttcatttccattggatgtatacccagtagtgggactgctgagtctacagacatctttctatgattgatcttgttagtgtaaaatccaggaacctttgcatatccttcaggagggcagaaaggaagcaatcctattataactgagatcaagtttcttgccatccctttaattgggtaaatttaatttgttttaagataatatctataaagcatccaaagcagggcctggcacacagtaggcactcagcaatgtgtcttcccttgcttctgagggcaacccctcggcttgctattcttgccatgcccacagcaagcagaaacctaaacatggggaggcacttgttcagatccccatgggcctcacacagtgggcttttcagcaattcttgagtaagaggagtatcaggcgtgaaagtacccagaaggttcagcccctcattgyctcagtagctgacaagctggcctctagggctgctggaaactgcatcctagttccaatcactggcagttaaactgcctcctcactttcctttccaaaactgcataatattcatttgggattctccagccacc

SEQ ID NO: 93868 - DNA, 2462 bp, Homo sapiens
gtttatttgagcattttatatttaacaagaaataatgataggctacctggaatttgtttcaaaataatcctggaggagtgtgaggtaggtaagattatagataaaggaagactggcaatgggttgttcaagctgggcaatgggtccatggtggttattattctcatttctctgcttatagatattggaaaatttctgtaataaaaagatagagaaagaagagaaacttggcttaagggaaaataatgctagtttggttattgggtcctcttcagcacctaagtggctttctgggttaggaggcagtgagaggtgagggacagggtgctgtgctgtgtgaggacacccggctgggtgactttgaacaggtcagatcagcctcagttttctcgcctgcaaaatcgggtagttgaatgtgctaaactcggaggtgcttcagttcctgattctgttgttggtctccagagacacccttacacccttgactccttccagtccctggctgggcatcttgttctcctctgttttttggttgtggaaggaacctcactggccttcttcaagtgcctccctctcacatgtgcttaagcattgggagaatctggctcttcacgttaccaagactacccaagatgggagcagggctccagacgtaacgtacgaaaacgaacataagatacaaaatggtgtatcatacattagtttttttcacattggagaaagatgtcatatctagaggaaaactgatatattcagttggtgcaaaagtagttgcgatttttgccattacttttagtggcaaaaaaccgcaattacttttgcacaaaactaatatttggatataaccaagagaaagttattttcttctttaaaaaattatctcaagcagtggaatcaagctgtttggatatgatcagggccatttgctgtctgataatcaatgaagtacaccttaggccagacccacaacatcttgaggtataaaagaaagttcatttcttccaagaaaagtaactcttctacgtttgtccttctcttaaactcctgggttggtattcacatggatatgaaccttaytgtgttctgccgcacagcgataaataccacttttcctggtatgggtttctgttataggaattcttaattggtagtagataggatgtaacactaatttattaatgcattgtaatagcatgtttattattgtagtgggagttaagaagggtcccattcgtggccagttttggtggtccttgaatcagttgtattttggagtgctcattctacgtctaaaggacatcttgccctataaggcaggctgggcttatgccccagcttccagttctctggccttgttttaaagcagaaagtttccaatatcttcaactctgatttaggctgttcagtgtctggctgttagattctagggcaggagaatagatctcttttccgtccacttctctcagataccccccttcatttcttttcttctcctgcatgagaggtcccacgtaagctctaggttcttctatcccttccctattgttagaactcaaaatggcatttacatctttttttcccctacataatcattttttcccattttgctttgatttgatttgatttggtgggaggtgaggatataaacatccttcctttggatttttatatatgcttgtatctccccaaagctaagagtacaaatgccctgcctaaataaacacagttgtttctctaacttatcacagtgtattaccatcaaaaccaaacttactgaaaatctaacctatctctgctgcctctactttctttcttcccacattctcattccttttcccactgcaatctatctctgtgtcctgtattcaccgaggttactccaagcctccgaaccattaaatttagtgtcgttctcttattttcattcatttcaacctctacaacattttccattactgaacagtcagtcctgccttaatgtccaaaatacctcttccttaatttacaaaagctaccattgtcttgtttgtctttgacttctctttctctcttttgccttttctcttcttcttctcatcacccctaacccccagcaggaaggttgctatgtgccttagcccttctgttgctttgaatatgcacttctttcctatacccacatccctcaaactggcccaggctccagctgatgcccatgcacatctacccaagcacctgatgggtagcactatttgaggacagcatgttaactcaaaatccattcatatggtctaaatgtatttctgtggaaaacatgctagttgctaggcactgttctggaagctggtgttctgcagccaataagcaagtgaggttcctgccctcatggagctttcattctagacaggtagggtactaataaatgctatgatggacacagggagtgaaggaagagggagtggaaaagtactatctataaatgca

SEQ ID NO: 93869 - DNA, 695 bp, Homo sapiens
caacctcagcaacaattaatattagcaggcctataaatctttggcaacccaataggtgaaaaatcatttctaattattgttttaatttgttttgtctagtgccagtcgtatgtacttcttttctgtgaccaactcttcattcttagcttttccccattttactttaaggtcgtcttgttgatttataatggctctttatattagggatrttatgcctttatcatgaatgacacaaatgcaggccttttttatttgtatgtaaataagaaagcttttcatctttataagctttttatttaaggcttctagattttgtatcccatttagaaaagctctccccttcctaatttattttttcaaaactggaccaggtgtggtggctcatgcctgtaattccagcactttgagaggccgaggtgggcagatcacttgaggccaggagttcgaggccagcctggccaacatggcaaaaccttgtctctactaaaagtaaaaaactaaaaaattagccaggcatggtggtacacacctgtagtcccagctagtcaggaggctgaggcaggagaatctttgaacccaagaggcagaggttgcagtgagctgagattgtgccactgcactccagcctgggtgacagagtcagacctgtctcagaaaaaaaaaaaaaaattaaaccatgctttcctctgctgcct

SEQ ID NO: 93870 - DNA, 917 bp, Homo sapiens
aattgttgggccacttggtttttctcatgagttataaaattttgaagttataaaatccagtttctaataccctcctcctttaagtacttatatcagccaaatgaagcttagcctggtacttgaggcttcacagtgagaccataaccttcccacaaagcccgtttgccccctacccagttctatgctctttggttccagctggttgggtcctggagtgtccccagatgtgacataactggttctccctcctccatgcctgatccacccaccctattgtgtctactggagtgagctcgtcttctggctccacattttcaacccctccttgccsttgaattctcatctagctcagcctctgcatcttctgtgcacacagcctgaagtcacctttctttcctctgaatttttctgtgcattgatacccctctgatagcaactgaagtcctttctctatcagtcccgtatagccacatttcctctccccactagaccccctgagggcaggaaccatgtcttgggtatttttgtgtctcctacagtgctcaatgcctggcaatttcacaaacatttgttgggtggaagaatgaaggagctgattaatgtttgcggaagaactcactcagtgaaccatttctgtgggctgagctgtgaggtctcttggcctgagctgaccagtcattatttctgtttattccccctctgacaggcaggaagaaacttcaggatgagaatgagacaggcaaaagcctggtggagctttgtgctatttcttttcttttcttttcttagatggagttttgctcttgttgccaggctggagtgcaatggcgcgatctaggctcactgcaacttccgcctcccaggttcaagcgattctcctgcctcagccacccgagtatcggggattacaggtgccc

SEQ ID NO: 93871 - DNA, 917 bp, Homo sapiens
aattgttgggccacttggtttttctcatgagttataaaattttgaagttataaaatccagtttctaataccctcctcctttaagtacttatatcagccaaatgaagcttagcctggtacttgaggcttcacagtgagaccataaccttcccacaaagcccgtttgccccctacccagttctatgctctttggttccagctggttgggtcctggagtgtccccagatgtgacataactggttctccctcctccatgcctgatccacccaccctattgtgtctactggagtgagctcgtcttctggctccacattttcaacccctccttgcccttgaattctcatctagctcagcctctgcatcttctgtgcacacagcctgaagtcacctttctttcctctgaatttttctgtgcattgatacccctctgatagcaactgaagtcctttctctatcagtcccgtatagccacatttcctctccccactagaccccctgagggcaggaaccatgtcttgggtatttttgtgtctcctacagtgctcaatgcctggcaatttcacaaacatttgttgggtggaagaatgaaggagctgattaatgtttgcggaagaactcactcagtgaaccatttctgtgggctgagctgtgaggtctcttggcctgagctgaccagtcattatttctgtttattccccctctgacaggcaggaagaaacttcaggatgagaatgagacaggcaaragcctggtggagctttgtgctatttcttttcttttcttttcttagatggagttttgctcttgttgccaggctggagtgcaatggcgcgatctaggctcactgcaacttccgcctcccaggttcaagcgattctcctgcctcagccacccgagtatcggggattacaggtgccc

SEQ ID NO: 93872 - DNA, 917 bp, Homo sapiens
aattgttgggccacttggtttttctcatgagttataaaattttgaagttataaaatccagtttctaataccctcctcctttaagtacttatatcagccaaatgaagcttagcctggtacttgaggcttcacagtgagaccataaccttcccacaaagcccgtttgccccctacccagttctatgctctttggttccagctggttgggtcctggagtgtccccagatgtgacataactggttctccctcctccatgcctgatccacccaccctattgtgtctactggagtgagctcgtcttctggctccacattttcaacccctccttgcccttgaattctcatctagctcagcctctgcatcttctgtgcacacagcctgaagtcacctttctttcctctgaatttttctgtgcattgatacccctctgatagcaactgaagtcctttctctatcagtcccgtatagccacatttcctctccccactagaccccctgagggcaggaaccatgtcttgggtatttttgtgtctcctacagtgctcaatgcctggcaatttcacaaacatttgttgggtggaagaatgaaggagctgattaatgtttgcggaagaactcactcagtgaaccatttctgtgggctgagctgtgaggtctcttggcctgagctgaccagtcattatttctgtttattccccctctgacaggcaggaagaaacttcaggatgagaatgagacaggcaaaagcctggtggagctttgtgctatttcttttcttttcttttcttagatggagttttgctcttgttgccaggctggagtgcaatggcgcgatctaggctcactgcaacttccgcctcccaggttcaagcgattctcctgcctcagccacccgagtatsggggattacaggtgccc

SEQ ID NO: 93873 - DNA, 898 bp, Homo sapiens
tcctgcaaaaaaatcctatttgcaaagtattacaataatccattaaatatttcagggtttaatcttgaaatactgatattagatagtacttagtactttagtaaagcactgtcatttatattccatattagtttataaagctgttttataatctgaaacaatagcatatttgttgtagactgtcaatggaaagctgctatttctgggtaggaaatctagacaaatctttcaattgctgaatcctgaaatgtccaacttcctcgtcagcaaatgacttgcttcttctaagcaattcaacaaatatttagtgcacattaaatatttacatggcagaggcctatttctcctacccttgtcgaactaatagaaaatactgcttctaagcaaaaattactaccaaataaataaaggagcatagagattaaaagcttgtcaccaagtgcagagattaaaaacaataatcaccaagcccagtttaatgcaaagcattaggaagttgaaccaatgtttcaatacttattaacttatccattgaataagctaaacgcaggtatatttttaacagtagaaaaaagaagaacccaactagaaaatggagtttttattatttcatattaaaaaaaaaattgttgcwttacaaatttattctcattaattcctctgagtttactactactcaaaagaaaacttggacataatacaaatgtatccttccagaaagctttcttccttaaaactgaggtaaacattaaatttccaagtgaaaattaaacactcaagtgtttattcaatgtatctgcttcatcttccaaatctaatacgggcacccatctaatcatgaaattgctctgctgtgtaactagtgctccaggaaatgcagaagtgtcaaacccactga

SEQ ID NO: 93874 - DNA, 623 bp, Homo sapiens
tcacttacatgaaatgtccagaataggcaaatctgtagaaagtacatgagtggttgccaggggctgggagatatacagtgtttgtaagtgacagctaagggatgtgaggtttctttttggggtgataaaaagatttgaaaatggataatgctgatggttgtccaattttatgaatatactaaaagcctttgaattgtacattttaaatgggtgaattatatgttatataatctcaataaatcctttcttaaaaagggaaatgaacatttctgcatgtttgctgggtctccaactgataataagttccccaaggcaggggtcctttgtcttccttataaccttctcatcccatcctctcttcctcccaaagatgacacttaaataacagacagacacctcctagcaaagctactayaaaatttttttgtagcggatgaggggggttggttgctggtttgactttcatacttaaatcagagaggctctcccatattaaatctccactccagatatgcaagtaccaagaatttatgaaaaaaaattaagtttctgcttgtttctaaagtagcttcctaccaactgcttctatccagaccatcagaaaccacacttaaagatattct

SEQ ID NO: 93875 - DNA, 888 bp, Homo sapiens
tgtatttcctattctgtcctatcctatcccattttacaacagatatgcccatctcattccataacttctcatcccatcttgtttcatttcactaaaagaatgctgatcataacccattcatttgatttcatgacactctaccatagcttgaaaagcatggtagatacagtattttctacctggttcacatccctcaattttacttttcagtatgtcttctttcctaacttttctttatcaccagttctatctcagatgtttaaaaccatcacccactgctctttgacacaaaaaacaaaaaactatttttcctgaggtttattacttgctcccttctcagtgcttccctaggaggtgaccagaactgcacacagtctgcatttctacgtaacatgagtcctaagagagcaagggcaggctcaacagccagttgaaataaattctgggaaaatgagaggcactgttgttgttttctcacttaagttctatgcctttttacagtcacatcagaaatagaacatcatctccttatctcasaaaactatattctcagtgactttctgaaatactttttgatctcaacagtcattacaaacttttagtatatggttgattatacctatggcaggtaaaacatactgtgcacagggcctgcaaccacaataaactaggttgctgggagattcaatcaaaataattatcgacccatgtttaccaaatatgctaaccagtactttttttgtgatttggtaaacttgatttttcattgtgtttgttcccaggcttgctaattagcaacattcagaaacactaattcacactaatgagggaatctattctgtaagataccactgcacttgagtatttctcttcacaatcaaagacccc

SEQ ID NO: 93876 - DNA, 547 bp, Homo sapiens
gcacctcctcctgcaggaagccccctgaccattcccttcttccattcggctttcccccagagactttgggggtggcacagggggttcccgaggccctcaaggcaccactcaggggctgagggtatgtagggtgtccccagaaktctgcccctgctgacctcttctagcatagagactggctcttctgtcccggccgcccctcgtgccaccagcagctccaccccacccatccaccacattctcaaacattcacggcctgactcggaggcagcaagaacaaaagcacaaacacaacgcgaagggaatggacttatctgctgcggcatcttggacattcttcttctggactttagaaacgctgcctggaggcagtttctcttggactgcattcaatgtttccgcaggagaaggggagcaagtggggcggagtgactgcatcctttgggtactggcatgggacaaggtgggtgcccgagagccctggagcacagatgtctgtgcacggctctgtgcaccagcccaggtgcagggtgtccacagtgcaaga

SEQ ID NO: 93877 - DNA, 1307 bp, Homo sapiens
gcacctttcccaggaggggctctgggtgagtgctggccctgtaggtccctcggcctgtcgggagagccactcaggacagcggcttcaggcccccaggcactctcagctcaggaggcccggcctggtttcctgcattccagcagagggccagatctgacaggccagcattcctctcgcagagcatgcccggggcggccactcagcaccaggccccgctgggagtctcactgggcaaaggcacccagcatccagctgcctcccctgcaggaccccaggagcatggcctgggctgccaggtggccttggaagagcacaaagagctgtttgtcttcaggctcgggtgaggaggaagggcctgccaggaggctggagtcagactctgactccttctgacaccacggctccctcttcccagcagcttcagctggtgcctcccctctctcagcctcagcttccccactgccatccatccgctcagtcagtttttcccagagtggtcactcatggactctgttatgcggcaggggctcgagcctccgccctgcccgggrggggcccacagtcaggagggaacgcgggcaggcagccgtgggtgaggcccaggacagaggatccagggagctctcagcatccagagctgcagtcagggaaggggagccaggtgaggggacctctgagatgggctttgcagtgtgactaagagttcacaaagagaagcgtgttccctgccggagtgtggtcctcaggggcctgtggttccaggttcccatgattaaagcctgtgcccaggagagatgagcagggacagggtgagggcagatgggccaggaggcttccacagggtagaagctttggttacaatgccctttcctcttcctgcaaagcagtggcccatgggccagccctcccacacccccgtacctgccaggcttcgcaacagcccacagggacacacagagcccctgcccagtatctcagctcctgtccccaggcatcccagtgcatggaggcttcaagaggcagaagccctgtgtttgggagcaggcctgctggggaccactaagggtcagggtccctcataagactttgggggcagcctcggaggcccaggccactcaaacatgggagccaggctggtggacagggccacagccccacccagagtcccccagcactgggcttgggcccccgcttcctccaggggagaccacgtgggtgactgagtcccacttgtcccctccagctcctcccctgccccatgggtcctccctcacccctcacagcctcagtgtccttatccgggagat

SEQ ID NO: 93878 - DNA, 645 bp, Homo sapiens
cagtgaggagtgaatgcatttgtcccttcagcagatatctgaccaccagggtcagcggtgctaacaggccagggcccagctcaagccaccgtttccttttctgaggagtatccccagggtctcatcctcccagtgattcaaggcccctgcctgtggcccagtcccccagccagcactaggagggtcccacctgcctccttcagccatagcccccatgtacacccatgggtctcctccctcacctctcgactctgaggtgggtggcaggaggtaagagagctgaccaccaccggcccagggatctcacacattgtaaaaaaaaaaaaaaaaaaaaaaggtgcctcagtttccccaccccattgccctcctttggaatttctatgaagcatacgtggggtggtgcacacttggcacacacggacggacacacacacagtcacacagccacacacagaccaggaagtcacacacagaaccttgaaacctcacatgagaccactgagaakcccatggcagaggacgccctgcctgtgggcagcccacgcactgacagcttcctggggcccacagtgaacaaggcccaggcccctaggcagacacacgcaacgagaggatggacaggtggacagaggcagaggaaggagt

SEQ ID NO: 93879 - DNA, 801 bp, Homo sapiens
taaggctcagaggattctcgccgcagcgttgttcggcccgaaaaggccattgtggacaatggacgtgaataaatttgaggcctctgtgggttttctcgatgtcaaaaagttcctcagtacctggaaggtaaaacatacttgctgcaatcagatgcttggcatattaagcgttggaattctctctgcctgccctgcctagtgagcggtagggaggaactcaggctcagccaatcgccgagctgtagatacattcccaggctccctgccggaccccacaacatccagccttttttttgttttttcttttttttcttttttcttttttttttttttgagacgragtcttgctctgtcgcccaggctggagtacagtggcgcgatctcagctcactgcaacctccgcctcccgggttcacgccattctcctgcctcagcttcccgagtagctgggactactggcgcccgccactacgcccagccaatttttttgtatttttagtggagacggggtttcaccgtgttagccagaatcgatctcctgacctcgtgatccacccgtctcggcctcccaaagtgctgggattacaggcgtgagccacctcgcctggccttttttttttttttttaagagacagagtctcagtcggtcgcccagcccggagtgcaatggcgcgatctcggctcagcaacctccgcctcccaggttctagcgattctcctgcattagcctcctgagtagttgggattacaggcgcgtgccacaacgcccggctaatttttttgtattttcagtagagatag

SEQ ID NO: 93880 - DNA, 801 bp, Homo sapiens
taaggctcagaggattctcgccgcagcgttgttcggcccgaaaaggccattgtggacaatggacgtgaataaatttgaggcctctgtgggttttctcgatgtcaaaaagttcctcagtacctggaaggtaaaacatacttgctgcaatcagatgcttggcatattaagcgttggaattctctctgcctgccctgcctagtgagcggtagggaggaactcaggctcagccaatcgccgagctgtagatacattcccaggctccctgccggaccccacaacatccagccttttttttgttttttcttttttttcttttttcttttttttttttttgagacggagtcttgctctgtcgcccaggctggagtacagtggcgcgatctcagctcactgcaacctccgcctcccgggttcacgccattctcctgcctcagcttcccgagtagctgggactactggcgcccgccacyacgcccagccaatttttttgtatttttagtggagacggggtttcaccgtgttagccagaatcgatctcctgacctcgtgatccacccgtctcggcctcccaaagtgctgggattacaggcgtgagccacctcgcctggccttttttttttttttttaagagacagagtctcagtcggtcgcccagcccggagtgcaatggcgcgatctcggctcagcaacctccgcctcccaggttctagcgattctcctgcattagcctcctgagtagttgggattacaggcgcgtgccacaacgcccggctaatttttttgtattttcagtagagatag

SEQ ID NO: 93881 - DNA, 677 bp, Homo sapiens
ggatccaataacatataataagtgatcatgtttcaaaaagaataaaacatcctcagaatgcaaattgtaatatacatggctaattctaaataaccatttggttaaggtcagtaaattgctccaattttaagtgataggaagccatagttcttattttatagatgaggtaaatgcttcaaggaactaaagtactccttttctggccataaatccaaatattggcttagaagaaatagaattaatgtttcctgtcttctaggtgttaactgggtcagaaaccgaacactgatgctaactgttaaggtttattatccttcagcatgaggtggttcacattctgattctaggggttcagggtagtaaggaaatctccaggcaagtacgtaatctcaaacactcattcagytaacaaatctgctaagtgccagttttcagggactttcagctgtggggttaaagactgtgagggctaccatacatctctgagaacaagcctaaataccacaagtcatgaaattaattatctcagtttcatgggtttccagatgctaatgtgcaatatcctatttattctccatccccattgatgagacaaaagaagaggaaaaatataattatcaaaaaaaccacacccagagagaatggggtgggtaggcaggagcaggattctgagcagg

SEQ ID NO: 93882 - DNA, 577 bp, Homo sapiens
gctgaaaataaacctggaagttggatctattgagaaactgtatgtcagcctccaaaatgacatctttttaatgtatttccaaaggtaattttgctttatgtaacatttgccttataatctgtttttaagacttaacctcagcrtaaaatattatttcattctgctaccaaactgagattggtccaagatctttgaagcttatctctctgacctgtacagatgctgtcagcatcctcccatatgctctctgcattcaccactactgtacataccttctaacacaaactgccagcatctgcagctctacctgagggctcccctctggccaccaaggtctgctttgctcatctgtggggcaggccagaaatgctgagaaattagtgaatactagaaacagcccataacaatgactgacaggaagacggcagatgacaggctaactctcaggtgcatatttcacagtgtaccccagagttccctatcgggatgaaggtagagtttcccagagtgataagttgcttgatgaaaccatgtattggctttctttcctcccctttccctttcctagtattttctg

SEQ ID NO: 93883 - DNA, 889 bp, Homo sapiens
ttaataacacaaaccaaaaataagcagttcaatagaatagtggcatgagctagcactagttccctggttctcatagaaccaggtagatgaatacacattttctgcaagcctgacttatctggggtttggctctgacagaataatcctagcctgctagggaaggttgaagactcacccttaataaaatgcaagcggcctagagcaagggttctttccaaattattgtaaccacttcttcttgccaatggtttttttgtttgtttgtttttgacatggtcttgctctgttgcccaggttgaagtgcagtggcatgatcccggctcactgcagccttgacttccttgacctcctagactcaagaaatcctcccacctcagcctcccaagcagctgggaccacagccaggcacaactatgcccagctaatttttaaatgtttggaaagacrgaggtctcactttgttgctcaggctggtcttgaactcctgagctcaagcgatcctcctgcctcagcctcccaaagtgttgaaattgtaggcatgagccattgcacccagcccttccttccaattgaataaaaattgctaccatcccatataacacagagcagaaaaccatctgcaaatcttaacggatcattgtcccattcccaagcagggcggggtctgtgattccaagccctccactgctcacacgccaaatgagaacatgggaaaatgaacatgggaactgacagtctccccgcgaacgtgggaactgacagtctccccgttcactttgttacataagtgatacaaactctttttagaaattatacacaggcaaaagagcaaacatcacacatagtcttacaacttttagagtaaatgcttccagaatttttttctatg

SEQ ID NO: 93884 - DNA, 565 bp, Homo sapiens
cctctcaatgggtccctttcacaacatgaaggaaatatgggagctctaattcaagatgagatttgggaaaggatacagccaaaccatatcaggagccaacaaaggatgataagkcacccaggaacagcagaagagagtcagtgccattcccacgtgtgaaagagaaaaacaggaacattggcctcagccagaatggccgcaatgtaggaagggactgtggttgggaaaagggatacaaaggggacataaaatctcctccttctggttgtcttccaatgcctttcccaagccaaaccctagtaaggcaatcgatgcaatcagcagagttcagtctcccaggccactgagcagagaacagagaatatgtgagggacacagggaacaagtgttgaataatcagcccagataccactttgtaaaaacacaaacacaaaaatagcaaaactaataataataataacaaaataaaacaaaacccagaaatctctctcacacctgctctttctttctcatctgtttaatatgtttttatgaacctgaagaaatgagcagaaaaaaacaagat

SEQ ID NO: 93885 - DNA, 565 bp, Homo sapiens
cctctcaatgggtccctttcacaacatgaaggaaatatgggagctctaattcaagatgagatttgggaaaggatacagccaaaccatatcaggagccaacaaaggatgataaggcacccaggaacagcagaagagagtcagtgccattcccacgtgtgaaagagaaaaacaggaacattggyctcagccagaatggccgcaatgtaggaagggactgtggttgggaaaagggatacaaaggggacataaaatctcctccttctggttgtcttccaatgcctttcccaagccaaaccctagtaaggcaatcgatgcaatcagcagagttcagtctcccaggccactgagcagagaacagagaatatgtgagggacacagggaacaagtgttgaataatcagcccagataccactttgtaaaaacacaaacacaaaaatagcaaaactaataataataataacaaaataaaacaaaacccagaaatctctctcacacctgctctttctttctcatctgtttaatatgtttttatgaacctgaagaaatgagcagaaaaaaacaagat

SEQ ID NO: 93886 - DNA, 565 bp, Homo sapiens
cctctcaatgggtccctttcacaacatgaaggaaatatgggagctctaattcaagatgagatttgggaaaggatacagccaaaccatatcaggagccaacaaaggatgataaggcacccaggaacagcagaagagagtcagtgccattcccacgtgtgaaagagaaaaacaggaacattggcctcagccagaatggccgcaatgtaggaagggactgtggttgggaaaagggatacaaaggggacataaaatctcctccttctggttgtcttccaatgcctttcccaagccaaaccctagtaaggcaatcgatgmaatcagcagagttcagtctcccaggccactgagcagagaacagagaatatgtgagggacacagggaacaagtgttgaataatcagcccagataccactttgtaaaaacacaaacacaaaaatagcaaaactaataataataataacaaaataaaacaaaacccagaaatctctctcacacctgctctttctttctcatctgtttaatatgtttttatgaacctgaagaaatgagcagaaaaaaacaagat

SEQ ID NO: 93887 - DNA, 1750 bp, Homo sapiens
atagatacgggtatttccagttaaaataaaatgcaatggaatttgagtaatcagaaagcaatgaaaggaaagaaggtggatcagaaatgatgaggtattattaagatacttctggtttatggtgatacatattctaaaataaggatctcttcaggttagcctcaaaatgactgtcatttctaagaacaaacttactttgctggggtttgaaggaagatgttggggatatagagagaagaaaaaggtataattaataatttcattagttcatatatcaaccaggctatacacaaaatatcttctattaaattgtggtgtgacatatttatcatttggcaattgtgaattagtaacatagtgtttatggccaaaatgcagaaggacagttctcagtcttccaggtaagtacatgctttttacaggcatacttagtggctattagatgattcttggtggaagaccttgttatttttttccttgagtataatatttatacatgaattctttttcaaaaagcatcaaatgatcacacactctgcactaaatactgtatcaggcactgatgatacaaagataaatgagataagattcctatctcatcctcaaggagttcagaggatatggaggactgacatgctaagtacaatattatagaataagttatcctatgaacaagatgttgtaggagcataaaagagtggctcactcactgtgtctgggtcctgtacaaaggctatggagatatgggagctgagtcttgaagggtgagtagagtgagtagagattcaccaagtggagaagtagagacaggacattacaaaaagaagaaagcccaggacacacaaacacacctatgtgagacagcataggatatgcatgaaatggcaagtggctcatagagtctggagttcagggtgcctggaggactgcttaggggaatgagacaaaacatgaggctagagaagcaagtgggtgttgggtgcttgtcttagtccatttggagccactacaacagaatacctgaagatgagtaatttataaacaaaagaggtttatttggctcataattctggaggctggaaattccaagaagatggcactggtactgctaggcttccagtgaaggccctgtgctataycacaacgtggcagaaaagcagaaatggaagcagatccacagcagaaactcagaataggcttattaaaacattgtcaaaatagctaggctattagtctagctcctgagtcccccctcttccagtgggggtgcacacttagaatttgtgtcatcttaattgcatcttgcaccatcccccttgcttaaatcctcagaaaatttctatagcacttctttcaagcatgaaggaaaaggattctgtactgctaaaagagggcagaattctccctcccccatctcatggccgagtatctaagcttagaaatgggaggaatttagtacacaccaactgagagagataggctaggaggagtggattaatcactggctcttttatgattgttttgtctttaattgtgtgttatttataacatactcattggggaaagtattgtaccttatagaaacctgtccactttctttgtatgaaaactgtttaaagcaagtataagtttgtagcctcttatttgacattcatggaaccagaagcatctaggaattaaattgtttatttcctcagactaagttatattacataatatcatgtatgttatttaatacccccagcagaag

SEQ ID NO: 93888 - DNA, 1750 bp, Homo sapiens
atagatacgggtatttccagttaaaataaaatgcaatggaatttgagtaatcagaaagcaatgaaaggaaagaaggtggatcagaaatgatgaggtattattaagatacttctggtttatggtgatacatattctaaaataaggatctcttcaggttagcctcaaaatgactgtcatttctaagaacaaacttactttgctggggtttgaaggaagatgttggggatatagagagaagaaaaaggtataattaataatttcattagttcatatatcaaccaggctatacacaaaatatcttctattaaattgtggtgtgacatatttatcatttggcaattgtgaattagtaacatagtgtttatggccaaaatgcagaaggacagttctcagtcttccaggtaagtacatgctttttacaggcatacttagtggctattagatgattcttggtggaagaccttgttatttttttccttgagtataatatttatacatgaattctttttcaaaaagcatcaaatgatcacacactctgcactaaatactgtatcaggcactgatgatacaaagataaatgagataagattcctatctcatcctcaaggagttcagaggatatggaggactgacatgctaagtacaatattatagaataagttatcctatgaacaagatgttgtaggagcataaaagagtggctcactcactgtgtctgggtcctgtacaaaggctatggagatatgggagctgagtcttgaagggtgagtagagtgagtagagattcaccaagtggagaagtagagacaggacattacaaaaagaagaaagcccaggacacacaaacacacctatgtgagacagcataggatatgcatgaaatggcaagtggctcatagagtctggagttcagggtgcctggaggactgcttaggggaatgagacaaaacatgaggctagagaagcaagtgggtgttgggtgcttgtcttagtccatttggagccactacaacagaatacctgaagatgagtaatttataaacaaaagaggtttatttggctcataattctggaggctggaaattccaagaagatggcactggtactgctaggcttccagtgaaggccctgtgctatatcacaacgtggcagaaaagcagaaatggaagcrgatccacagcagaaactcagaataggcttattaaaacattgtcaaaatagctaggctattagtctagctcctgagtcccccctcttccagtgggggtgcacacttagaatttgtgtcatcttaattgcatcttgcaccatcccccttgcttaaatcctcagaaaatttctatagcacttctttcaagcatgaaggaaaaggattctgtactgctaaaagagggcagaattctccctcccccatctcatggccgagtatctaagcttagaaatgggaggaatttagtacacaccaactgagagagataggctaggaggagtggattaatcactggctcttttatgattgttttgtctttaattgtgtgttatttataacatactcattggggaaagtattgtaccttatagaaacctgtccactttctttgtatgaaaactgtttaaagcaagtataagtttgtagcctcttatttgacattcatggaaccagaagcatctaggaattaaattgtttatttcctcagactaagttatattacataatatcatgtatgttatttaatacccccagcagaag

SEQ ID NO: 93889 - DNA, 1750 bp, Homo sapiens
atagatacgggtatttccagttaaaataaaatgcaatggaatttgagtaatcagaaagcaatgaaaggaaagaaggtggatcagaaatgatgaggtattattaagatacttctggtttatggtgatacatattctaaaataaggatctcttcaggttagcctcaaaatgactgtcatttctaagaacaaacttactttgctggggtttgaaggaagatgttggggatatagagagaagaaaaaggtataattaataatttcattagttcatatatcaaccaggctatacacaaaatatcttctattaaattgtggtgtgacatatttatcatttggcaattgtgaattagtaacatagtgtttatggccaaaatgcagaaggacagttctcagtcttccaggtaagtacatgctttttacaggcatacttagtggctattagatgattcttggtggaagaccttgttatttttttccttgagtataatatttatacatgaattctttttcaaaaagcatcaaatgatcacacactctgcactaaatactgtatcaggcactgatgatacaaagataaatgagataagattcctatctcatcctcaaggagttcagaggatatggaggactgacatgctaagtacaatattatagaataagttatcctatgaacaagatgttgtaggagcataaaagagtggctcactcactgtgtctgggtcctgtacaaaggctatggagatatgggagctgagtcttgaagggtgagtagagtgagtagagattcaccaagtggagaagtagagacaggacattacaaaaagaagaaagcccaggacacacaaacacacctatgtgagacagcataggatatgcatgaaatggcaagtggctcatagagtctggagttcagggtgcctggaggactgcttaggggaatgagacaaaacatgaggctagagaagcaagtgggtgttgggtgcttgtcttagtccatttggagccactacaacagaatacctgaagatgagtaatttataaacaaaagaggtttatttggctcataattctggaggctggaaattccaagaagatggcactggtactgctaggcttccagtgaaggccctgtgctatatcacaacgtggcagaaaagcagaaatggaagcagatccacagcagaaactcagaataggcttattaaaacattgtcaaaatagctaggctattagtctagctcctgagtccccmctcttccagtgggggtgcacacttagaatttgtgtcatcttaattgcatcttgcaccatcccccttgcttaaatcctcagaaaatttctatagcacttctttcaagcatgaaggaaaaggattctgtactgctaaaagagggcagaattctccctcccccatctcatggccgagtatctaagcttagaaatgggaggaatttagtacacaccaactgagagagataggctaggaggagtggattaatcactggctcttttatgattgttttgtctttaattgtgtgttatttataacatactcattggggaaagtattgtaccttatagaaacctgtccactttctttgtatgaaaactgtttaaagcaagtataagtttgtagcctcttatttgacattcatggaaccagaagcatctaggaattaaattgtttatttcctcagactaagttatattacataatatcatgtatgttatttaatacccccagcagaag

SEQ ID NO: 93890 - DNA, 1750 bp, Homo sapiens
atagatacgggtatttccagttaaaataaaatgcaatggaatttgagtaatcagaaagcaatgaaaggaaagaaggtggatcagaaatgatgaggtattattaagatacttctggtttatggtgatacatattctaaaataaggatctcttcaggttagcctcaaaatgactgtcatttctaagaacaaacttactttgctggggtttgaaggaagatgttggggatatagagagaagaaaaaggtataattaataatttcattagttcatatatcaaccaggctatacacaaaatatcttctattaaattgtggtgtgacatatttatcatttggcaattgtgaattagtaacatagtgtttatggccaaaatgcagaaggacagttctcagtcttccaggtaagtacatgctttttacaggcatacttagtggctattagatgattcttggtggaagaccttgttatttttttccttgagtataatatttatacatgaattctttttcaaaaagcatcaaatgatcacacactctgcactaaatactgtatcaggcactgatgatacaaagataaatgagataagattcctatctcatcctcaaggagttcagaggatatggaggactgacatgctaagtacaatattatagaataagttatcctatgaacaagatgttgtaggagcataaaagagtggctcactcactgtgtctgggtcctgtacaaaggctatggagatatgggagctgagtcttgaagggtgagtagagtgagtagagattcaccaagtggagaagtagagacaggacattacaaaaagaagaaagcccaggacacacaaacacacctatgtgagacagcataggatatgcatgaaatggcaagtggctcatagagtctggagttcagggtgcctggaggactgcttaggggaatgagacaaaacatgaggctagagaagcaagtgggtgttgggtgcttgtcttagtccatttggagccactacaacagaatacctgaagatgagtaatttataaacaaaagaggtttatttggctcataattctggaggctggaaattccaagaagatggcactggtactgctaggcttccagtgaaggccctgtgctatatcacaacgtggcagaaaagcagaaatggaagcagatccacagcagaaactcagaataggcttattaaaacattgtcaaaatagctaggctattagtctagctcctgagtcccccctcttccagtgggggtgcacacttagaatttgtgtcatcttaattgcatcttgcaccatcccccttgcttaaatcctcagaaaatttctatagcacttctttcaagcatgaaggaaaaggattctgtactgctaaaagagggcagaattctccctcccccatctcatggccgagtatctaagcttagaaatgggaggaatttagtacacaccaactgagagagataggctaggaggagtggattaatcactggctcttttatgattgttttgtctttaattgtgtgttatttataacatactcattggggaaagtattgtaccttatagaaacctgtccactttctttgtatgaaaactgtttaaagcaagtataagtttgtagcctcttatttgacattcatggaaccaraagcatctaggaattaaattgtttatttcctcagactaagttatattacataatatcatgtatgttatttaatacccccagcagaag

SEQ ID NO: 93891 - DNA, 602 bp, Homo sapiens
agctcacaggggctctgatgatggcgttggaacagaatagaaccttgggatgggagaatgtgacccagaatcatcacaggccgactcctgacatcacagggtcatagagctgggccagccttggggccctccttggtgtagaaatcccttttccagcccccacttggcataagtcctgtcccagccagctgggtgtgtcccgatggccagtaggccaccctgcctatttggaagtacttactaatttcagctgaaatctgtctttccagtgttgcccatctccagktctcgtacgccctgggggcacacgagattgttctgccccttgcaatgggacagcccccaggtatgggtgtaacagtcacaaaattccctccttcgagggaaagctctacatgtcctacaaatatttcttctagaaatttcttcttcttggccaggcgtggtggctcatgcctgtaatcccatcattttgggtggccgaggtgggtggatcatttgaggtcaggagtttgagaccagcctggccaacatggtgaaacctcatctctactaaaaatacaaaaattagctgggcttggtggtgggtgcctgggtcagga

SEQ ID NO: 93892 - DNA, 602 bp, Homo sapiens
agctcacaggggctctgatgatggcgttggaacagaatagaaccttgggatgggagaatgtgacccagaatcatcacaggccgactcctgacatcacagggtcatagagctgggccagccttggggccctccttggtgtagaaatcccttttccagcccccacttggcataagtcctgtcccagccagctgggtgtgtcccgatggccagtaggccaccctgcctatttggaagtacttactaatttcagctgaaatctgtctttccagtgttgcccatctccaggkctcgtacgccctgggggcacacgagattgttctgccccttgcaatgggacagcccccaggtatgggtgtaacagtcacaaaattccctccttcgagggaaagctctacatgtcctacaaatatttcttctagaaatttcttcttcttggccaggcgtggtggctcatgcctgtaatcccatcattttgggtggccgaggtgggtggatcatttgaggtcaggagtttgagaccagcctggccaacatggtgaaacctcatctctactaaaaatacaaaaattagctgggcttggtggtgggtgcctgggtcagga

SEQ ID NO: 93893 - DNA, 1060 bp, Homo sapiens
ccagcagattggatggtgccctctcacattgagtgtggacgttccttacctagtctactcaactcataggttaatctcctctgaaaacaccctcacagacataccgtgaaataatgctttaccaggtttctaagtatttatcaatgcagccaagtcaacacttaaaattaattatcatagatatgaatgatgaaaactgttaaaacttgcaatgttgttttgcaatttttatccaatttaaaatgcatgtttaatataattccacagaggatattaatttttaaatgctttctctacattagaaacactttcagcccttaccttagcttgataatgttaatataaagggatctagattaccagtcactacagggattgatactttctaggaaatatcttgagatgctaatgagctgtgatggttaatactgagcgtcaacttgattggattgaaggatgcaaagtattgatcctgtgtgtgtctgtgagggtgttgccaaaggagattaacatttgagtcagtgggcttggaaaaacagatgcacccttaatctcagtgggaaccatctaatcagctgccagcacagctagaagatagagcaggcaggaacatgtgaaaagactagactggcttagcctcacagcctacacttttcttccatgctggatgcttcctggcctcaaacattggactccaaattctttagttttggggctcagactggctctccttgctcctcagcttgcagatagcctattgtgggaccttgtgatcatgtgacttaacacctaagaaactcccatatatattctattatatagatatattctattatatacccataactaataggagatatatatatatatatatatatcaggatccagtttatatatatatatatatatatcctattagttctgtccctctagagaaccctgactaatacaaattttggtaccaggagtggttctacaggaacagaatattaagggkggagttctttcattggttttggggtttctggatttggctgcttaatattgttagacccaaaaa

SEQ ID NO: 93894 - DNA, 402 bp, Homo sapiens
  misc_feature (1)...(402): n = A,T,C or G
tcccagncttgccatctggactgccagctcgtctctatcctctcccacacccattctccatcttgaagccagagtcaaaatgatcttatcactctcctgcttttttattttatttatttatttatttatttatttatttwtttatttatttttttgagacagagtgttgctccatggtccaggctggagtcccgtggcgtgagcgtggctcactgcagcccctaacttccagctccaggtgatcctcccatttcagcctcctgagtagctggaactacagacatgtgccaccacacccagctaattgtttctttttaagtttttagtagagacaaggtcatgctgtgttgacaaggctggtgctgggattacagcaggcgtgagccaccgtgcctggccttg

SEQ ID NO: 93895 - DNA, 402 bp, Homo sapiens
  misc_feature (1)...(402): n = A,T,C or G
tcccagncttgccatctggactgccagctcgtctctatcctctcccacacccattctccatcttgaagccagagtcaaaatgatcttatcactctcctgcttttttattttatttatttatttatttatttatttatttatttwtttatttttttgagacagagtgttgctccatggtccaggctggagtcccgtggcgtgagcgtggctcactgcagcccctaacttccagctccaggtgatcctcccatttcagcctcctgagtagctggaactacagacatgtgccaccacacccagctaattgtttctttttaagtttttagtagagacaaggtcatgctgtgttgacaaggctggtgctgggattacagcaggcgtgagccaccgtgcctggccttg

SEQ ID NO: 93896 - DNA, 402 bp, Homo sapiens
  misc_feature (1)...(402): n = A,T,C or G
tcccagncttgccatctggactgccagctcgtctctatcctctcccacacccattctccatcttgaagccagagtcaaaatgatcttatcactctcctgcttttttattttatttatttatttatttatttatttatttatttatttwtttttttgagacagagtgttgctccatggtccaggctggagtcccgtggcgtgagcgtggctcactgcagcccctaacttccagctccaggtgatcctcccatttcagcctcctgagtagctggaactacagacatgtgccaccacacccagctaattgtttctttttaagtttttagtagagacaaggtcatgctgtgttgacaaggctggtgctgggattacagcaggcgtgagccaccgtgcctggccttg

SEQ ID NO: 93897 - DNA, 552 bp, Homo sapiens
ctgattaagtaagtagccacatgagcatggattgaaataggtcccatctgtataacttratttcaatagtctatcatctcacagattatgtgggatggctggattcccacaaggcttggtccagatctgcctgtggttccatgcattgccagtattccagaaggattgtaaaaataattaaaattcagtcttaagagcatatcagtctaatttctacctgctgttccaaaccctccaagggcggatcccagggtggcgccgagagaactgctacttccgaatcccaaggatgtgttggcaggctgggcagagccctgggagaagagggagctgctctgtgaattgctgttcagagagttgttgccgtagaaagaactggatgccaggttgttattgggctgctgctggggctggggctgaggctgctgtgttcctaaagggcgaaatggtccatttgttgttccagcaagaccaccagctgctccatttgctgaagctgcggctgctgcaacagctatgaagaagaaagcaaaccgtttggctatgaaaggg

SEQ ID NO: 93898 - DNA, 971 bp, Homo sapiens
tacccgggtgtgcaatggcacagcggagttcagacaacacaactgagccrtattatacaaccagcacatctccactgggctgtattatggagctgaagattaaaaccccatatgagaaaaacctggattcaagatataaactaagaaaagataaagctaataacgcctcttctattgtgcagtactttgacatttttcaactataaccatcatctaatatgagtttcataagcattctctaaactatatagattagtcactatgaacctaattttcactgaagcatatcaaagattcaaaccttggaagagaatataaatattatctggtctaacttagcatccaattcatgatttcttctggcaacttctacgacaagagtcattcaaccttagctcgaatgcttgttgcctcctttcccctaaaatacctccatctgcatcacacttgaaagaaaatttttgaataagtcatttatttaaaggaccatgccacttttaaaacatgttaataatcatacctaaaaaagacaaataacatgatgacaaactagttaagattcttggaaaagtagaaacttctttaagccttggtgtctcttctttcagagcgagtgcaataaaaattgttccaacctcctcagtgtatgaaatactgcacgtaaaaggggtcagcacagttcttgacacacagaatatgcaaagcacatattagtttcccttagtattagtattattagcagtataatttgacatcaataaaataatcccatagaagcaagggactggttcttctatgatttcagattatgtttgtcaggaatttttttttttttttttgagacagagtctcactctgtcacccaggctggagtgcagtggcaagatcttggctcactgcaacccccgcctcccggtttcaagcgattctcatgcctcagcctcccgagtagctgggattacaggcatgca

SEQ ID NO: 93899 - DNA, 971 bp, Homo sapiens
tacccgggtgtgcaatggcacagcggagttcagacaacacaactgagccatattatacaaccagcacatctccactgggctgtattatggagctgaagattaaaaccccatatgagaaaaacctggattcaagatataaactaagaaaagataaagctaataacgcctcttctattgtgcagtactttgacatttttcaactataaccatcatctaatatgagtttcataagcattctctaaactatatagattagtcactatgaacctaattttcactgaagcatatcaaakattcaaaccttggaagagaatataaatattatctggtctaacttagcatccaattcatgatttcttctggcaacttctacgacaagagtcattcaaccttagctcgaatgcttgttgcctcctttcccctaaaatacctccatctgcatcacacttgaaagaaaatttttgaataagtcatttatttaaaggaccatgccacttttaaaacatgttaataatcatacctaaaaaagacaaataacatgatgacaaactagttaagattcttggaaaagtagaaacttctttaagccttggtgtctcttctttcagagcgagtgcaataaaaattgttccaacctcctcagtgtatgaaatactgcacgtaaaaggggtcagcacagttcttgacacacagaatatgcaaagcacatattagtttcccttagtattagtattattagcagtataatttgacatcaataaaataatcccatagaagcaagggactggttcttctatgatttcagattatgtttgtcaggaatttttttttttttttttgagacagagtctcactctgtcacccaggctggagtgcagtggcaagatcttggctcactgcaacccccgcctcccggtttcaagcgattctcatgcctcagcctcccgagtagctgggattacaggcatgca

SEQ ID NO: 93900 - DNA, 971 bp, Homo sapiens
tacccgggtgtgcaatggcacagcggagttcagacaacacaactgagccatattatacaaccagcacatctccactgggctgtattatggagctgaagattaaaaccccatatgagaaaaacctggattcaagatataaactaagaaaagataaagctaataacgcctcttctattgtgcagtactttgacatttttcaactataaccatcatctaatatgagtttcataagcattctctaaactatatagattagtcactatgaacctaattttcactgaagcatatcaaagattcaaaccttggaagagaatataaatattatctggtctaacttagcatccaattcatgatttcttctggcaacttctaygacaagagtcattcaaccttagctcgaatgcttgttgcctcctttcccctaaaatacctccatctgcatcacacttgaaagaaaatttttgaataagtcatttatttaaaggaccatgccacttttaaaacatgttaataatcatacctaaaaaagacaaataacatgatgacaaactagttaagattcttggaaaagtagaaacttctttaagccttggtgtctcttctttcagagcgagtgcaataaaaattgttccaacctcctcagtgtatgaaatactgcacgtaaaaggggtcagcacagttcttgacacacagaatatgcaaagcacatattagtttcccttagtattagtattattagcagtataatttgacatcaataaaataatcccatagaagcaagggactggttcttctatgatttcagattatgtttgtcaggaatttttttttttttttttgagacagagtctcactctgtcacccaggctggagtgcagtggcaagatcttggctcactgcaacccccgcctcccggtttcaagcgattctcatgcctcagcctcccgagtagctgggattacaggcatgca

SEQ ID NO: 93901 - DNA, 971 bp, Homo sapiens
tacccgggtgtgcaatggcacagcggagttcagacaacacaactgagccatattatacaaccagcacatctccactgggctgtattatggagctgaagattaaaaccccatatgagaaaaacctggattcaagatataaactaagaaaagataaagctaataacgcctcttctattgtgcagtactttgacatttttcaactataaccatcatctaatatgagtttcataagcattctctaaactatatagattagtcactatgaacctaattttcactgaagcatatcaaagattcaaaccttggaagagaatataaatattatctggtctaacttagcatccaattcatgatttcttctggcaacttctacgacaagagtcattcaaccttagctcgaatgcttgttgcctcctttcccctaaaatacctccatctgcatcacacttgaaagaaaatttttgaataagtcatttatttaaaggaccatgccacttttaaaacatgttaataatcatacctaaaaaagacaaataacatgatgacaaamtagttaagattcttggaaaagtagaaacttctttaagccttggtgtctcttctttcagagcgagtgcaataaaaattgttccaacctcctcagtgtatgaaatactgcacgtaaaaggggtcagcacagttcttgacacacagaatatgcaaagcacatattagtttcccttagtattagtattattagcagtataatttgacatcaataaaataatcccatagaagcaagggactggttcttctatgatttcagattatgtttgtcaggaatttttttttttttttttgagacagagtctcactctgtcacccaggctggagtgcagtggcaagatcttggctcactgcaacccccgcctcccggtttcaagcgattctcatgcctcagcctcccgagtagctgggattacaggcatgca

SEQ ID NO: 93902 - DNA, 971 bp, Homo sapiens
tacccgggtgtgcaatggcacagcggagttcagacaacacaactgagccatattatacaaccagcacatctccactgggctgtattatggagctgaagattaaaaccccatatgagaaaaacctggattcaagatataaactaagaaaagataaagctaataacgcctcttctattgtgcagtactttgacatttttcaactataaccatcatctaatatgagtttcataagcattctctaaactatatagattagtcactatgaacctaattttcactgaagcatatcaaagattcaaaccttggaagagaatataaatattatctggtctaacttagcatccaattcatgatttcttctggcaacttctacgacaagagtcattcaaccttagctcgaatgcttgttgcctcctttcccctaaaatacctccatctgcatcacacttgaaagaaaatttttgaataagtcatttatttaaaggaccatgccacttttaaaacatgttaataatcatacctaaaaaagacaaataacatgatgacaaactagttaagattcttggaaaagtagaaacttctttaagccttggtgtctcttctttcagagcgagtgcaataaaaattgttccaacctcctcagtgtatgaaatactgcacgtaaaaggggtcagcacagttcttgacacacagaatatgcaaagcacatattagtttcccttagtattagtattattagcagtataatttgacatcaataaaataatcccatagaagcaagggactggttcttctatgmtttcagattatgtttgtcaggaatttttttttttttttttgagacagagtctcactctgtcacccaggctggagtgcagtggcaagatcttggctcactgcaacccccgcctcccggtttcaagcgattctcatgcctcagcctcccgagtagctgggattacaggcatgca

SEQ ID NO: 93903 - DNA, 1671 bp, Homo sapiens
tgcatgtgtaaaaatatttgctacatgacactattaaatgtgagtttctgagctagttgcttaacattgctgaatctgtttccttatcaataaactgggataacagtcatggtattataccttacaggtaatactgtgtggataaaacgagccattgtatgtgattatacataaacttaaaagcctgtattaaaaatcagaatacatattatttgtgcacacaggctctagcatcagaggatttggttagaatagctagagtttgagattcttgggtacattctttaagctaactaaagttatttaatctgtgaaataggaataaagattgcattaaaatagttgattaaatcaaggaatctctgcctcttcccatacaaaattccttgagtgatagaaaaggtattaaaaaatattaaaccacatagcagtagaaaataggaatttgtgccaataaagggctagagattttgaatcattagtgaaagtcagaaatcagatgaagactaagactggaggaaactgtgcccccaaatacaagcagaagagcactttgtaaaggacagagcagttaaaaatgtgctgtgtacttagtgtaaaccaatataagtagcagaagcatctctgtgtgactagtcagtgaactaaattctgatcagctgtcttgttactttccttctctgcctcttccatttgctgaaatacagagaaagggccctggtacttggcagacaggcaccactcagtataactggagacctttaggaaatgcaaggcacctccaaacctagagggaaagtttccagcacactgcaatgagcatacttatttccttttccttttattttagagcaccaataattagaatctacatcttctccataccacccccaccaagaagatttccaaaagctaagagacagaaatcaaattaccaaatatttgggggtaaaccaaaaacattaaaaaaataaaaaaagaccaaaaaaattaaaattataagtaaacagtagaacyagtagaatacttcagtactttaaataaaaacaacatcctaagaatcttgagggtagcagaggtataaaataagaaaagccttaagaaaatgaaacattaatgcatctggaattagaagtttccagacaacacaaaaactatctcaatagatagctggatagcaaaagggacacagctgcagggcaaaaggaaaataatattcaggcacaaagtggagataatgatagtgacccctcatagttctgctgagaggattaaagaagagaaaccatgtatgatcacctagtccagtggctaccatgtggaaaccttataataaaagcaattttattattattgttgttatccatgttgttgttacagtcatactccatactccattcctggttactaatgttataacaattataataattattatattatcagtaaaatgaaagggtatcaatgagtgatctctctgcaaaatcccagatttaacactaagaattgatgacattaggagggagattgaggtgggaaggagccagggaagtgggatgagaggatcctggggcagaatgatgacactcatgagagtgttggtaagggactgtaggaagccagatgtgaggacaagacagaaagggacatgggaaagtaaagagtaatccc

SEQ ID NO: 93904 - DNA, 771 bp, Homo sapiens
atcctaccctccttgattacatcatcatgagggactttgagccagatgctctgagctaagtcacacctgaattcctgacacacagaaactgtgagataataartatttgttgtgttaagacactaagttttgcggtgatttgttgcacagcaatagataactaatacaacacgatgctttgctggaaagatgaaccatgcactgtaggggtagagaggcaggagtgatcaaatctgcatggagaagttgggcaaggtgtccccaaggagggtatggtcctgtagctagagaagaaggctacagataattagtggtaatccatcctccctttccctctcctcttattaccatggaacaatcttcaagctcctaccctagaatccacacctggcaaagaatctgcaccgtgttgttctgtagatctgggctaatgcactattggtaatggaataaaagagatgctggtggttcccttcctctccctacacctctttcagacacagtggactggctctgtcctgactatctccttcagattactgggtctcagtctagctgccttttcccccagaaggggcctcagacaccccatcttgcatttgcaaagtctccattcagcacagctcagcacatctccctgtgccctcctcaattaaaaatgacacaaaagtaaaggagacacatagctctttgaaaaaacttccagatccaaactttttaatgaagatggaatataaagagcctgtcttatctgtccgatgtgactcccat

SEQ ID NO: 93905 - DNA, 771 bp, Homo sapiens
atcctaccctccttgattacatcatcatgagggactttgagccagatgctctgagctaagtcacacctgaattcctgacacacagaaactgtgagataataaatatttgttgtgttaagacactaagttttgcggtgatttgttgcacagcaatagataactaatacaacacgatgctttgctggaaagatgaaccatgcactgtaggggtagagaggcaggagtgatcaaatctgcatggagaagttgggcaaggtgtccccaaggagggtatggtcctstagctagagaagaaggctacagataattagtggtaatccatcctccctttccctctcctcttattaccatggaacaatcttcaagctcctaccctagaatccacacctggcaaagaatctgcaccgtgttgttctgtagatctgggctaatgcactattggtaatggaataaaagagatgctggtggttcccttcctctccctacacctctttcagacacagtggactggctctgtcctgactatctccttcagattactgggtctcagtctagctgccttttcccccagaaggggcctcagacaccccatcttgcatttgcaaagtctccattcagcacagctcagcacatctccctgtgccctcctcaattaaaaatgacacaaaagtaaaggagacacatagctctttgaaaaaacttccagatccaaactttttaatgaagatggaatataaagagcctgtcttatctgtccgatgtgactcccat

SEQ ID NO: 93906 - DNA, 1476 bp, Homo sapiens
  misc_feature (1)...(1476): n = A,T,C or G
gtttacttgattctgccactgcagttcctatttccaggaaaccaacaaccctgtaaacacctgttttcctttgaccacagaacacagcatagttttattaacaggagcctaaaaaataggaaaaaacaacctgcccccttggaacacagtcttgttttccagttcaccacagctgcgaaggagcccggtggggactctttgcttttagttccttcacctctgctgtgtgcccagtaaatgaaaagcccctgctcttaatgggtttttatwtcattcatgttttacatntgtgaagtngagtgggctttattctttcgaattctgacaccagacttcagaagcagaagcgatcctgatctgtaggagcttgattcagaaagctaggtgggggctggggctcagttctgaggctttttgagatgcaggtgggcttcgctgtatggcccctaaggagggatccaggactgactgtctgccctgcagtttgccacgattctatccaaacgtccaactctactctttgggcgtttgttctagtctttgccaactgccatttcccccactctcacctttgatgacttaagaattttgtgttttttgttgcctcatcactgcccttgtgctttcctgatccccaccctgcgtcttcctccctttccgcattccctgacccacatacttgtccactggttgagataaagccctcaattcaacgtatcttcacttggcttttttttaagtcgtggtggtgcgataacaatactgtcatttcctgaagactcactgcaggtgtcaagtgctgtgttaagtgttttgcagctgttaccactttaatccttacagcaacccctgcgacctctgtgttttattattattcctatcttatggatcaaaaaacagacacattctagactgcaggctggctgattggcaagaccgcagttgacgtagccagagaaccagagagaggttcatttaacagcaaagtttgggcacttgatttgcctgtggacctaatctaatgtgttaactggttacgagccttcccctcgacttcctcttgaataagtaaatgaatctaaactttaaatattggaataccatacacatacggaaaagtgcatgaatcatacatgtctagctcagtgacttttcaccaaaggcagccacctgtgtaaccagcccttggatcaaggaacagagcaggatcattgcccagaaacccctcccatgccccttgcagtcaccaaggttaaccaccaccttgactttcaatactgcagatgaattttgcctgtgttcgaaattctagaaatgcggtcatttccatgtccattattttgtatctggcttcattctgaattcaggtgtgagcgatattcatgaatgctcactatctgtttatacattcctctttctgattggttttacttttcctagttcctcaaccagtagagaaagttaagtttccttctg

SEQ ID NO: 93907 - DNA, 1476 bp, Homo sapiens
  misc_feature (1)...(1476): n = A,T,C or G
gtttacttgattctgccactgcagttcctatttccaggaaaccaacaaccctgtaaacacctgttttcctttgaccacagaacacagcatagttttattaacaggagcctaaaaaataggaaaaaacaacctgcccccttggaacacagtcttgttttccagttcaccacagctgcgaaggagcccggtggggactctttgcttttagttccttcacctctgctgtgtgcccagtaaatgaaaagcccctgctcttaatgggtttttatttcattcatgttttacatntgtgaagtngagtgggctttattctttcgaattctgacaccagacttcagaagcagaagcgatcctgatctgtaggagcttgattcagaaagctaggtgggggctgggkctcagttctgaggctttttgagatgcaggtgggcttcgctgtatggcccctaaggagggatccaggactgactgtctgccctgcagtttgccacgattctatccaaacgtccaactctactctttgggcgtttgttctagtctttgccaactgccatttcccccactctcacctttgatgacttaagaattttgtgttttttgttgcctcatcactgcccttgtgctttcctgatccccaccctgcgtcttcctccctttccgcattccctgacccacatacttgtccactggttgagataaagccctcaattcaacgtatcttcacttggcttttttttaagtcgtggtggtgcgataacaatactgtcatttcctgaagactcactgcaggtgtcaagtgctgtgttaagtgttttgcagctgttaccactttaatccttacagcaacccctgcgacctctgtgttttattattattcctatcttatggatcaaaaaacagacacattctagactgcaggctggctgattggcaagaccgcagttgacgtagccagagaaccagagagaggttcatttaacagcaaagtttgggcacttgatttgcctgtggacctaatctaatgtgttaactggttacgagccttcccctcgacttcctcttgaataagtaaatgaatctaaactttaaatattggaataccatacacatacggaaaagtgcatgaatcatacatgtctagctcagtgacttttcaccaaaggcagccacctgtgtaaccagcccttggatcaaggaacagagcaggatcattgcccagaaacccctcccatgccccttgcagtcaccaaggttaaccaccaccttgactttcaatactgcagatgaattttgcctgtgttcgaaattctagaaatgcggtcatttccatgtccattattttgtatctggcttcattctgaattcaggtgtgagcgatattcatgaatgctcactatctgtttatacattcctctttctgattggttttacttttcctagttcctcaaccagtagagaaagttaagtttccttctg

SEQ ID NO: 93908 - DNA, 683 bp, Homo sapiens
tcgctgaagctgcttatgaaactttgtaagtaatggccaggaagacactgctacttcctggttatcctcatatttcagaagctcatggagaccccagacagcttctgctgaccagcagaacaacctgagaagtgctgcatatgatgctttgatggaaattgtgaaaaatattacyaagtactattacccttcagttcaaaaattgactctgacagctctggtctgactgcagaaggtgtatcagatgaaatcccatataagagcacttttgataagatctatttcaatgacctttggtctttactctgcctaactctttgaagtgttccctgaaaagtgcagcatcaagatgagaccatagtctccctgtcaaggattttccaaatcacaagtaggtctggaggaatgcaagaggatgacctaatggcagttaacacactgggggaaatgttgattgatgaatttctaaagtacatagaagcctctaaactctttctgagcaaggatattgtattgaaaaattatactgagtgtcaggttttattggagaccataggtttagtggaagacttatgtcacattttgaaattcagtatcttaccttttgttgatggagaacatagggaatgagaatatccacaggtttgtgaagacacagattctgtgtttggtgatattgccct

SEQ ID NO: 93909 - DNA, 1458 bp, Homo sapiens
cataggtgagatacttgtaaagttgcccacacagggcacctttagacaaagatactcacacagrgagcccagtgtgagcccaagctgagaccccatccctcttcccttctgccagaagttccctcctgttctcaccggggcttatacaggagtgaagccaggaggcccccaaggcccagggctcaccagggcttactttgaacatgaggttcagatgcatcttgcttcaggactgttatggagtgaattgtgtccctgtgaaaaggtgtcaaagttctaagccccagaacctatgaatgtgacctttttggaaagcgagtcttcgcagatgataaagttaaagtgaggtcaggagggcaggccctgatccagtctgaccggtcaccttatataagaggagatgaggacacagacacaggcagagggaagaccctgagagaaccaaggacagaggcctcaggaggaacctgccctgcccgcacctcgatctcagacttcgcttctccaggactgcaagaaaatcaaggctgctgcgtacgtcgccccgtgtgcggtgccttgtcatggcagccagagtacacacatggcgtgggatcagccctaggcagctggacagaggacacatgtcaatgacagacaggtctgggatatggagggacagagatgtgcagggagtgagtttcccctttaggcccccagaaagcggctagaggtgagtgctgggctctgtgcgctcataaggtggtaattaacagtggcaggacggtgccccattggatgctctgggatatcgtacaagtctctgttttgctgatgctggagaaaagaatggcgataaataaatgtaaagcacgctggtgatggtgtgaaatgatgcttcatctaattatcactattctgtgctgtcgttaacatgcgctcgaggagaatgggaatgacttttacatttatatcacagctcggatttgccatcttaagcccatagcacggggacacaatatgccctgggatggaatctcttacagacaaatgacgggattacacaacttggtaagaagaaatgattcactgtggctgagttgaaaacagcagagtaataacacacaggactccaggagagcccgaagaagacccagaaggtgaggaaatgagaagtaggcaactttgatgggcaactgagggatgtcgttggaaaatctttcctcaatcacagacgtccttttctgtctaatgagggtcgtaatacagtgaacgtgggtggccccatctctctttgatgcttaacggactgtggcattcctgaaatttgctgttttgaacgtaaggggtgaacggacctggattgaagccgaacaccccctgtggctgctttttctccaggttcctattatctcttgctctctcctctcaaactggaaatacttcagttaactgacaatttgacaattccacttagtt

SEQ ID NO: 93910 - DNA, 1458 bp, Homo sapiens
cataggtgagatacttgtaaagttgcccacacagggcacctttagacaaagatactcacacagggagcccagtgtgagcccaagctgagaccccatccctcttcccttctgccagaagttccctcctgttctcaccggggcttatacaggagtgaagccaggaggcccccaaggcccagggctcaccagggcttactttgaacatgaggttcagatgcatcttgcttcaggactgttatggagtgaattgtgtccctgtgaaaaggtgtcaaagttctaagccccagaacctatgaatgtgacctttttggaaagcgagtcttcgcagatgataaagttaaagtgaggtcaggagggcaggccctgatccagtctgaccggtcaccttatataagaggagatgaggacacagacacaggcagagggaagaccctgagagaaccaaggacagaggcctcaggaggaacctgccctgcccgcacctcgatctcagacttcgcttctccaggactgcaagaaaatcaaggctgctgcgtacgtcgccccgtgtgcggtgccttgtcatggcagccagagtacacacatggcgtgggatcagccctaggcagctggacagaggacacatgtcaatgacagacaggtctgggatatggagggacagagatgtgcagggagtgagtttcccctttaggcccccagaaagcggctagaggtgagtgctgggctctgtgcgctcataaggtggtaattaacagtggcaggacggtgccccattggatgctctgggatatcgtacaagtctctgttttgctgatgctggagaaaagaatggcgataaataaatgtaaagcacgctggtgatggtgtgaaatgatgcttcatctaattatcactattctgtgctgtcgttaacatgcgctcgaggagaatgggaatgacttttacatttatatcacagctcggatttgccrtcttaagcccatagcacggggacacaatatgccctgggatggaatctcttacagacaaatgacgggattacacaacttggtaagaagaaatgattcactgtggctgagttgaaaacagcagagtaataacacacaggactccaggagagcccgaagaagacccagaaggtgaggaaatgagaagtaggcaactttgatgggcaactgagggatgtcgttggaaaatctttcctcaatcacagacgtccttttctgtctaatgagggtcgtaatacagtgaacgtgggtggccccatctctctttgatgcttaacggactgtggcattcctgaaatttgctgttttgaacgtaaggggtgaacggacctggattgaagccgaacaccccctgtggctgctttttctccaggttcctattatctcttgctctctcctctcaaactggaaatacttcagttaactgacaatttgacaattccacttagtt

SEQ ID NO: 93911 - DNA, 1066 bp, Homo sapiens
tttccctggtccttggctgtcctgggttctcgacgcctctatggctcccggagggtaaggccccagctgcccatcgagtctgccggctggtgtgtccccacggggcttcgtaggtgctgtcccagagccttagtcttggagctggagccagacgcagaggtgccctcggtctccctgggccgctgccaggcggctgtggccccttcttgctccttctctgttgcgccgtcttccttccttccttccttccctctttccaactgaattctcgtttttcctctctccctagtgcttgtacggctgctatgtccattcctccatcatccccaccttccaccggaggtgctactggctccttcaggtaggtggctgggactggattcttcttctgtctctggtgctcgggaagggtctgtggagggcactgagggcgcggggctccgcatgcgacacggcttcgggctgagagccctggtgagcttgcctagggagacttcggctgttgcggcactgaggccagctcagtggctgggctggtgttgtcatgtgtcaggaaggggagaaggcctggtggcaggggtagctgtcacccactgatgggaaataaacctaggtgcttccagcttccaaggcgcctcagttttcttttgatgaggacaagaaagaaggccgagtatcctgccctgaaatgcctgttggctgaaagctgtacattcattttctctcatgggttagttacaaggcacrtgtggaaaacaggctcccggaggttgccaggcacagctggattgattgggatagctgtggggaaaggaggaaggagctccgtaatcgatttgtgatgtctgctgtggcagggatggaacaggttgtggctgggcatgctagccattcctgtgggagagtggcctggtgcccagatctctgtccatggtgtttgtgcacagcgttgctgaaccaggggtgggtaggtacgggaggcccacctggcctcttgccctctggggatcgtctgccagctgtcttgcctgccgtgtgggcgggaaggtctgagggatccatgcag

SEQ ID NO: 93912 - DNA, 640 bp, Homo sapiens
ccgtgcatggctcaggagaccacagccctggccgtgcgtgacggccactgagcgcttgatcagaaacttcaaggcctggcttttggttctcacagctaccctgggaaggaaacagggcaggggtgagttcgtcccagtgtttcatagaagaagaaactgagggtcaggaagagaataaggggctccaaaagacatagggtaggcagggccctggtccaggccctttaaacagacgtggtccctgtcctgggggagcccacaggccacagcggccaggcccaaggtgcacacatgtgcagtgagcagagatgagaaggaagagcagcttccagagcctggatgtgctggcctcacagggaccagtcctgatgccaagaagggcaagagaaaggttgaccgaccctgacataaaccccaagtttcccctgccctggcccttggcgtccctgtgaggctggggtctgatgggacctttcttccacacctttggccgccacagctgagctgaccatgggcacactccagagcacttggacctcggcaggggacactgagccagcccgctgtrctccaaggggtagctggaacttggcagcagagacaggagtggccaggccctgacatttgggcccttggatcc

SEQ ID NO: 93913 - DNA, 658 bp, Homo sapiens
tcggtaaggggtccctccttgccagggcctggtccctcctcccagctccccagctctagaggtactagagcagttgaaggctggttcctggacttgcccttcccgggcctgtggcatctgaaagggttattacttccagggtcattttgtttagtttctgtctcttattaacttgtagtccctcgcctctgtaccctgggaacggcagtggggctggggtcccagcggggcggatgcagaggtagaatgcaggctgtggctgggagctgagggccctgcaatctgggtgtgggatgtaaagaggtaactsaggctggaggttgtgggtgccgggtaccaaagtggggcacattctgagctgtgggcaaagcctgcacgttggggggaatggcagggcacagcggcattgcaggaggatctaagtcccccatgtctcagcccctctggggcacagctggcaggcttggccaggtgggacaggagcagaaaggggaaactgacagccgcaggcaagcagaggaggccgcagaggaagaggagggaggcccagcagaggcccttcccagccctatcctccccggatgcctggatgccggaggcaggtctccggtgtccaaccagcagcctggcccctctttagcctccaggcctggaaagc

SEQ ID NO: 93914 - DNA, 1134 bp, Homo sapiens
tttaaatgctccacttaatccaaaggtactttggagtgaaaatcattattctggctttggatatattgtcaggtaataacaacagctatacagaaaaataaagtgcagtaagaggattgatttgataaaagaatattctatctgagaagacaaagcccataaaatggaagtaggaatgtccctggaagtgaattatagaatttcagagaaagaaacatttgggaccttaatgaattggaaaatgcttcatgggtcagtctgctactagcactgcagaaggggtagatttacggagcacgagcatgagcattgcagattggaggtacacagtaagcaaagacacagaagcaggatgacagagtgaagggaagatagtaaggtgattctttcaatttcttcaccttcttatctgctcccaagtcctgactacattaactcagtagtacttcctgttcttgtctttcacttgatcactccccaacccagaccaagggcatttacctcctggtggctgtttcctgggtccatctgcattttttaaaaaatcaagatttgtcttgcatgtctcaccgtgcttactccccaaaacagccccaaacacaccactttcttaacatacatacacatattcacacgcatatacatacatacacatatatacatatacacacatgcacatgcacataaatatgtatttcaactttcttttgttatctacattaatttcaaaataatgggctcataattcatgtcattaatttttcatttttttagtagaagctactaaattttttaaaggaagttgagactttaactctcctacaccacttcccaaatcttcctccccactctccctgcaaaatacatatatatatatttcccttatattcattattacatatagctgtgttatgggacagagatattttatgttattttactatataaatagtattcataactgagtcatgtagtttactatgtgtctttgcccatttgtgatgctaaaacaaaatacctgagactgggtaacagataaacaacataaattctatttcccttgattctggagactgggaagttcaagacttaggcacyggcaggttaggtgtctgctgctgctggtctctgttt

SEQ ID NO: 93915 - DNA, 973 bp, Homo sapiens
gatgggagaactgtatatccccctaactcaagacggcagctaccttttcagcttagctataactagcgctctctgaccctcagtccaaggcaagcaagctcaatatgccaatactgattaacttgtctcattattaaagtaaataaataaaaatgcttgagcgtccttcctaaccagagcagattcaaggctctgaagatacaaaagtaaatttaaaagggatccttccttaagggatctcacaatctgtgcgaagactgatatataccctgcaggcaaggactcaatccttgactgcagtgtacatatttggattgataawtactgaagtcacagattgagcagagtgttcaaatcatatggagaaaagagctatgagtcattctgggtgcagcaatgaaggtgaaagaaaagcattaactcagtcttgaggataaataagtgtgaacttaccagagaagttaaaaggaaaatccacaaaactaagatggcccaagccaaagcatgacattctgaaggcgcattacatatttctggagtggtgaatactctggtatgagcctaggatggtgcttgatatttaaagagagctcaataaatatttcttgaattagtgagtgaatcaatagctaaataattataattattaacagtgatagctagatttattagattattatttagtgtcgaattcaatattaagcacttttcatatattgtatcacttaatttccacaacaaccatagaagacaagcattgttattttttccattttgtacatgagtttcctaaagctctgggaggcagaggaacttttccaatgtcacatggccagtatcagtatcagaatttggctacaacatgactgcatgactttaaattatatgcacttaaattgtttcacctaaagtatacagtgtgttggaaaagaggatggaataagaaatgtctggaaaaatacattatggtcat

SEQ ID NO: 93916 - DNA, 973 bp, Homo sapiens
gatgggagaactgtatatccccctaactcaagacggcagctaccttttcagcttagctataactagcgctctctgaccctcagtccaaggcaagcaagctcaatatgccaatactgattaacttgtctcattattaaagtaaataaataaaaatgcttgagcgtccttcctaaccagagcagattcaaggctctgaagatacaaaagtaaatttaaaagggatccttccttaagggatctcacaatctgtgcgaagactgatatataccctgcaggcaaggactcaatccttgactgcagtgtacatatttggattgataaatactgaagtcacagattgagcagagtgttcaaatcatatggagaaaagagctatgagtcattctgggtgcagcaatgaaggtgaaagaaaagcattaactcagtcttgaggataaataagtgtgaacttaccagagaagttaaaaggaaaatccacaaaactaagatggcccaagccaaagcatgacattctgaaggcgcattacatatttctggagtggtgaatactctggtatgagcctaggatggtgcttgatatttaaagagagctcaataaatatttcttgaattagtgagtgaatcaatagctaaataattataattattaacagtgatagctagatttattagattattatttagtgtsgaattcaatattaagcacttttcatatattgtatcacttaatttccacaacaaccatagaagacaagcattgttattttttccattttgtacatgagtttcctaaagctctgggaggcagaggaacttttccaatgtcacatggccagtatcagtatcagaatttggctacaacatgactgcatgactttaaattatatgcacttaaattgtttcacctaaagtatacagtgtgttggaaaagaggatggaataagaaatgtctggaaaaatacattatggtcat

SEQ ID NO: 93917 - DNA, 1135 bp, Homo sapiens
ttgcgcaggaatgtctgtttattcacagcagaggagcagagacaaggaaacctgtttcacacctggcatttaatttagaagggattgcttctccggctgaaggaaaagccatctgaactgcgcagtcctggctctgcactggggttcccgcagccagcgcgttatgtgccttatgaaacctagagccttatttttcaatgcactctgtaagactgtgtgtgcgtgcacgtggtggtgggggtggtgagtgtcaaatgtgtgtgcacatagccactcctatgggtgtaagcactggacatggcccacatggcaggcacccaaagcatatccggcccaatctctaagtgtcccccaccccttttcggcttagctccataaaagtcacgagggacagggcgggtggctcacgcctgtaattccaacactttgggaggccgaggcgggaggatcacgaggtcaagatcgagaccatcctggctaacatggtgaaacctcgtctctactaaaaatacaaaaattagctgggtgtggtggcatgtgcctgtagttccagctactgggaagtctgaggcaggagaatcgcttgcacccgggagggggaggttgcagtgagccaagattgcaccactgcactcctgcctggggacagagtgagactccgtctcaaaaaaaaaaaaaaaaaaaaagtcacgtggaaccatcgtgcagtgctgagctacacatgttacaacacatccccgggtagctcccccaaccgcacctttcattttatttgggatttatcctactctttggatttgctaaatgtgaaaattccgcgaagaaaccaatccattctaccggctccgaagcaacaggttattatgtaaggcagtgaaagtatctcactgagcaccgctttggggattgttgaattaagttcttcctgctacagaacccttttgtcctccgatcaagtcccatctctttgtaagcaaaatggaaatgtcccttggcatacgtagcactctgttttcaagttgtttattctgtttttcaaaaytgtttacacattgtaattgtacatatttatggggttaaatctgaggtttccatacatatctatgttgtataatggtccaatcagggtagttag

SEQ ID NO: 93918 - DNA, 1464 bp, Homo sapiens
ttgttcctaatctttttcagtgcttagggtaagcagagttcacaagcttaaaatcctcttcaaccaggagtctaggggatagaatcttattccaaaagacagtttattttaatgtcagggtgtggagcagacacagctgaacatttaaggccaaggccatgtgtgtgttttagcatccagcacatgtgcttgaatactgacaccccaacacacacatatacacatatccaaaacaaggagaaaataataaattctgggtggccccagtgtttggagaatgaataagatgagccattctkattgccaatcttgggagcaaccaggagactttgcctttctgaagattctgacaattatttaggtaaaaaaaaaaaaaaaaattagtatttaaaggactacaaaggaaaaaaaaaccaacttgatccatccttgtctttctgtctctactctttaattttgagccacacctacaacaaacgtactgaattgcaaaatagccaaggaggcttaaggaccctaagaaatgcatcagaggaatatacagaggccaggaaaagtgaagacagcaatggggagggtgaaaggttttcacaaatgtctgttatggcaagcactacgacgccagcactggggtgaaggggcttgcaccccacccatccctgcccattcccagccacagctgtccagtggacagactatgtaaattatggggtggcttgccagctttcagctggtgtgattaagcatctgcaattaattggagttctaaaatcttcccacctcccatttccacagcagacattcaaaatttaaacagcaagaaagtaaaagagggattgaagcaattctctgctgtgtttagttaagttcatcagttcattcaaatcagccccgaacagaaacaaaacaacagatgaagctttgtgaccaaaacagcaggtttgagagtatagatggcttattttaaagtttaaaaagttttcactgactttaaaatataaagaaagtataaaaacaaacatttttaaagtcaaacatttaagacccaaataataattgctgtcattcgaaaaaaaaagtaacaattcatgtgatatgatgtttaaaaacaatacctgttatgagtctctagtatttatttcaactaaaacattattttcatatatcctgtatctctatcaatttatccctttgtttatacacttttttctccttcctccctccctcccttccttccttccctctttctttccttcctttccttctttctttctttctctttctttatttctttctctttcttcctcccttccttcctttcttccttcctttctttctttctttttctttctttttttttaagatggagtctccctctgttgcccaggctggagtgcaatggcacaatctcagctcactgcaacctctgcctcccgggttcaagcgattctcctgcctcagcct

SEQ ID NO: 93919 - DNA, 1464 bp, Homo sapiens
ttgttcctaatctttttcagtgcttagggtaagcagagttcacaagcttaaaatcctcttcaaccaggagtctaggggatagaatcttattccaaaagacagtttattttaatgtcagggtgtggagcagacacagctgaacatttaaggccaaggccatgtgtgtgttttagcatccagcacatgtgcttgaatactgacaccccaacacacacatatacacatatccaaaacaaggagaaaataataaattctgggtggccccagtgtttggagaatgaataagatgagccattctgattgccaatcttgggagcaaccaggagactttgcctttctgaagattctgacaattatttaggtaaaaaaaaaaaaaaaaattagtatttaaaggactacaaagraaaaaaaaaccaacttgatccatccttgtctttctgtctctactctttaattttgagccacacctacaacaaacgtactgaattgcaaaatagccaaggaggcttaaggaccctaagaaatgcatcagaggaatatacagaggccaggaaaagtgaagacagcaatggggagggtgaaaggttttcacaaatgtctgttatggcaagcactacgacgccagcactggggtgaaggggcttgcaccccacccatccctgcccattcccagccacagctgtccagtggacagactatgtaaattatggggtggcttgccagctttcagctggtgtgattaagcatctgcaattaattggagttctaaaatcttcccacctcccatttccacagcagacattcaaaatttaaacagcaagaaagtaaaagagggattgaagcaattctctgctgtgtttagttaagttcatcagttcattcaaatcagccccgaacagaaacaaaacaacagatgaagctttgtgaccaaaacagcaggtttgagagtatagatggcttattttaaagtttaaaaagttttcactgactttaaaatataaagaaagtataaaaacaaacatttttaaagtcaaacatttaagacccaaataataattgctgtcattcgaaaaaaaaagtaacaattcatgtgatatgatgtttaaaaacaatacctgttatgagtctctagtatttatttcaactaaaacattattttcatatatcctgtatctctatcaatttatccctttgtttatacacttttttctccttcctccctccctcccttccttccttccctctttctttccttcctttccttctttctttctttctctttctttatttctttctctttcttcctcccttccttcctttcttccttcctttctttctttctttttctttctttttttttaagatggagtctccctctgttgcccaggctggagtgcaatggcacaatctcagctcactgcaacctctgcctcccgggttcaagcgattctcctgcctcagcct

SEQ ID NO: 93920 - DNA, 1464 bp, Homo sapiens
ttgttcctaatctttttcagtgcttagggtaagcagagttcacaagcttaaaatcctcttcaaccaggagtctaggggatagaatcttattccaaaagacagtttattttaatgtcagggtgtggagcagacacagctgaacatttaaggccaaggccatgtgtgtgttttagcatccagcacatgtgcttgaatactgacaccccaacacacacatatacacatatccaaaacaaggagaaaataataaattctgggtggccccagtgtttggagaatgaataagatgagccattctgattgccaatcttgggagcaaccaggagactttgcctttctgaagattctgacaattatttaggtaaaaaaaaaaaaaaaaattagtatttaaaggactacaaaggaaaaaaaaaccaacttgatccatccttgtctttctgtctctactctttaattttgagccacacctacaacaaacktactgaattgcaaaatagccaaggaggcttaaggaccctaagaaatgcatcagaggaatatacagaggccaggaaaagtgaagacagcaatggggagggtgaaaggttttcacaaatgtctgttatggcaagcactacgacgccagcactggggtgaaggggcttgcaccccacccatccctgcccattcccagccacagctgtccagtggacagactatgtaaattatggggtggcttgccagctttcagctggtgtgattaagcatctgcaattaattggagttctaaaatcttcccacctcccatttccacagcagacattcaaaatttaaacagcaagaaagtaaaagagggattgaagcaattctctgctgtgtttagttaagttcatcagttcattcaaatcagccccgaacagaaacaaaacaacagatgaagctttgtgaccaaaacagcaggtttgagagtatagatggcttattttaaagtttaaaaagttttcactgactttaaaatataaagaaagtataaaaacaaacatttttaaagtcaaacatttaagacccaaataataattgctgtcattcgaaaaaaaaagtaacaattcatgtgatatgatgtttaaaaacaatacctgttatgagtctctagtatttatttcaactaaaacattattttcatatatcctgtatctctatcaatttatccctttgtttatacacttttttctccttcctccctccctcccttccttccttccctctttctttccttcctttccttctttctttctttctctttctttatttctttctctttcttcctcccttccttcctttcttccttcctttctttctttctttttctttctttttttttaagatggagtctccctctgttgcccaggctggagtgcaatggcacaatctcagctcactgcaacctctgcctcccgggttcaagcgattctcctgcctcagcct

SEQ ID NO: 93921 - DNA, 640 bp, Homo sapiens
aaaccaaaatgaaatccctgaactgccagaaaaagaattcagaaggtcaattgttaagctaatcaaggaggcaccagagaaaggtgaagtcctacttaaagaaattttaaaaaatgatataggatatgtgataaacatcataaaaaatgatataggatatatcatataagatataggatatatgamaggttttccttcatacgttacctgatacttttgcctcataactcttaagattctttccttcatcttgactagataatgtgatgaatatgtgccaaggtaatgatctttttgtgatgaatttccaaggttttctttgagcttcttgtatttggatgtctaggtctctagaaaggccagggaagttttccttgattattccctcaaatatgttttttaaacttttagatttcttttcttcctcaggaatatcaattattcttatattttgtcacttaacaaagcaagcactagtagctattcttacatcagacaaaacaaactttaaagcagcggcagttaaaaaagacaaagagagacattatataatgatgaacagactagcccaacaggaaaatatcacaatactaaatatatattcacctaacacaggagctcccagatttataaaacaatt

SEQ ID NO: 93922 - DNA, 1899 bp, Homo sapiens
ccaggctatcccattctcctcgaggtggggctccatgggggctgtgtcaggactgctctgaggtgcccaggcagcagccatgctagcatcatcctcagagcacagaccatctctgagtaagtctagtatgggagaatgctgtattgtcaagacgatttttgattacacaatcacaaagtgaatactccatgaacagaaaggcatgctggaaggaggcttacggggcctcaggacagaagccctgtgctgtggagctgagcctgtgcgctgtgggccttgtccctactatgtgtggggctggctgagccccaaggacagctgagtgtgctttggagacagttagcaactgctattagtcctgagaaaattctagcagttgcttctcggagtgtcttctttgggagaggccggtgggcaggtggtcaagggtggctgttttcctggcagtgaggcatggcaggaacaggatgaggcactgcagaagccccactggctggtcctgggctgcagtccctgacctggtcccgtctgctcctctggcacctgtgagcactcatggtgcccaagcacatgtggctgctttcactcccagttccctgtctctatttctggagtcccagagatagaaggcccccaagtgatctcatcaaggctgagagggcctcgcagggcagaaaggaggcccccacttgaacagctgtggcctgcagtcccctccgcgcctgctggacttgatgccaggcatgactgcctgcactggcaagagaggccctggcctgagaagctcctatcctggcaaaaagtgtgcctaagctgggaaggacccaggtgctgacctgaccatctcgccactgccaaggacaatgctctggatggcttgcaggtccagatgtccgccagagacttcactacttggccacagtctctgctgaggctcagaggagcctgggaggaggtaggggccagggctgggccacttctgactctgcatcagtaacccttagtcatgcccttggtatgtgacacaggcacagcaggttcgctgcagaacacccacagctgagcaggctggcctgtgctagcccctgctgcctcctgtcctgccagcagcaaacacagggaagtgctatagagaggcgtggggtggggggtcttagaattaggggatcccactgcaagggatccacaggccccctgaaggtgtatccaacagaaactgtgtctgctgtgtgtgttctgtacgcccttgtctagctttcatcagaattttttttgttttgttttggagacagaatctcactctgtagcctaggctggaatgcagtggtgcagtcatggctcactgcagcctcaacctcctgggctcaagtgatcctcctacctcagcatcctgaatagctgggatcataggcmcatgccaccatacctggctaattttaaaaaaaagtttttgtagagacagggtctccctatgttgcccaggctggtctcaaactcctaggctcaagtgatcctcccacctcagcctcccaaagtgctggagttataggtgtgagccactgcagccggcctcatcagattcttaaagaggctcttgactcaaataaagtcagaactggggtctgggacacggagggctccaggactccctgcccctgcagaggccactgtggaagtgaagtgaaccccactccagcaccagcaggtcacacgttatgtatgttaaagtacctgctacaggtggactcaggtaacaggggaaagagttggaaggaagggacattagttacctctcaggataagacagaactctcagatctttcaaaatcctaaagacaaaacacacttcataattttaaaattatacaatttaaaaacttaaaaattgggttgtactgg

SEQ ID NO: 93923 - DNA, 613 bp, Homo sapiens
caacccattgaaagggctgttgaaggggttatattttccagacatatcaggagttcaagttgttactaaaaatgcaaaaagagtttgctaatcagaacataagcattcaatatctatcactatcaagatgtgagataagggataggtaattgattctgttggaaaagcagagtcatataatgatgaaagtctgataatacctctgtgacttgaaagggacagaagtaaacaggaacatgaagcaaagagttttagttctgatagtctctttgaggaggaggaataatggcactattgtcattttttgaatatttcccctagtatttttartgatttcacaaatcgttcgaatgccttaaaggactaccactctggaatatcactcaaagcaatgttcttgtgaggattaggcttaatgaaaagtcctgtaatgcttggacacatggaaagctgaccagtattagataaaacaaaattgttatagttgggaattgttactatcggtattttcatcatcattttgcaacatttatatttttttcttaatgaaatatgttgatttttcagtttttaaagtaaaattgtattacatttaaaaaattaatagagaact

SEQ ID NO: 93924 - DNA, 613 bp, Homo sapiens
caacccattgaaagggctgttgaaggggttatattttccagacatatcaggagttcaagttgttactaaaaatgcaaaaagagtttgctaatcagaacataagcattcaatatctatcactatcaagatgtgagataagggataggtaattgattctgttggaaaagcagagtcatataatgatgaaagtctgataatacctctgtgacttgaaagggacagaagtaaacaggaacatgaagcaaagagttttagttctgatagtctctttgaggaggaggaataatggcactattgtcattttttgaatatttcccctagtatttttagtgatttcacaaatcgttcgaatgccttaaaggactaccactctggaatatcactcaaagcaatgttcttgtgaggattaggcttaatgaaaagtcctgtaatgcttggacacatggaaagctgaccagtattagataaaacaaaattgttatagttgggaattgttactatcggtattttcatcatcattttgcaacatttatatttttttcttaatgaaatatgttgatttttcagtttttaaagtaaaattgtattacrtttaaaaaattaatagagaact

SEQ ID NO: 93925 - DNA, 1356 bp, Homo sapiens
tgcagtgaataaagggtcagttacttagtcactccggttttatttaatcctactgtcatctgacaatatggtactgatactatttcctatttctagatggttgctagaaatatactgtaatatttattcttgatatatgtttgttactttaacgggaatacataggctataaatagtccccttgcctctcacaagttagacagtcctgcccagaatgccctgctgaagagttgtagcagatcaccctgttcctccttaacytctctgttcctcatatgctcacctataaaatagtgatcatagtaacacccatcttgtgatgatgtagagaggttcaaagaagcgaattaggggaggccaggcatggtggcttatgcctctaattccagcactttgggagtccaatcacttgaagtcaggaatttgagaccagcctggccaacatggtgaaacccacttctactaaaacaaacaaacaaacaaacaaaaaacaaacaaacaaacaaaaaacacaaaaattaactgggcattgtggcagttgcttctaatcccagctacttggttggctgaggcaggagaatccgttggacccaggaggcggaggttgcagtgagccgagatcacaccactgcactccagcttgggtaacagagcaaggttttgtctcaaaagaaaaaaaaaaagaaaccaattagggtggaaacacttagaacagggtgttcataagttgtcaccctcttgaagcaattgttggacactattttaaaaatgttttacttctgagtgaaatgttgcattttattttactagaagattcttatgtagtttaagtacattttacggtattgtcaaagagcatgagcaaaatatttaggaaagatgagaccatatttcttttatttatgacattgccacaaaaaaatcaggtagatgaatttgtattaagtttttgtaccaatttcatatctaaaatttcaaagaattttattgcaacaaactctttcttaccattaactcaaaaaaattctgttttaaattgacttcattccataagtctctacactactaatttggccagaagttattttcaatcctaattgggaacaacaaagatccacatgatatcctttcaatttatgatgttgaagaaagttgaattgtaataatttgagtgtgcagtcaaagcaattttcaatactatgtatcactgtagaaacaagggagaatgtcttggttaactatttaagtggcttgagtatggcaattaaaatttcatctaagctcattttgatgaatcttgtaaggtgacatttatttcttaggctctgaacattgtaagttctgttgattttcatg

SEQ ID NO: 93926 - DNA, 1407 bp, Homo sapiens
tgcatttgattaacatatagaaaaattgtaaattgtattctaacatcacattaacttcaaatgtgaaagatatcttgtatcacttttaaagaaaatataaaatatattttatttagtaaaattgaatttgtagaatgatgacttttttttttactttactgcttaatacttgagaaattttcctctttgatgaggctgttagaaaacaggaactctaacaattatatagtgggaagataaattcatacaacgactttggaaatctacttgacaatgtaaggatgaaagtgcccaaagttgtaaaatttccctgctctatgtctatcctatgaaaattctaatatatataaacaacaaaaccataaatatttattgtagctttgtttttaacatttacaatggtaaatataaaaatgccaacatytgctgatatgaaaattgatagctttatattatatatataatgaaatcccatatagaaattaaacaaaaacggatacccaagtatcagctgcaatggttctcaaaaatatcatagtgagattataaagcatgtgttgaaataatacagataaaacaataacatcttatttaaatttgaagatacaaacactaccgtatgtgttataaaatattctatacacagacctgtacttaaaaatagagaaatatacaaggggatgctaaacaattttagcctgtagttatcccttgtagaatttcttataatcttgtttctggttatgttgctgtatcaattatttttcatgtttgggtatgtgtgaaatatttcataaaaggaagttggacgttttaataatacattgactttaacaggaggaagaacaggtgattggggtattttgttgtataccaacacatgactgaaataatcatctattttaattctgttcagttcagtggaaagtctttgaaggttttttaacagagttgcagtttgtcatatctttgagaacattgtgttagattaagtggaacagaaatgcttagagggaaggagattaaaataatgtgttgtatggatatttgaggtgacatacaatagaactggaaaatagagaaacttcatgaaaaatagtataaaaagagacataaatgacttaccaattgactctgctgtgtttgatagatgggaattgtagtcgtaacattggatgaaataggaaagacagactagtagagctctttggaggcaagttctataagttctttttacattttgagtggaagttttcacttttaaatgaaatgcatatggataaaaaataaaggtaaatatagttattatgaaattgtcaacataaaatgagagttgatgcataaaaatgaacagactggaaaaagggaactttttaaatataaaaaaaaattgcctcttttctgata

SEQ ID NO: 93927 - DNA, 1407 bp, Homo sapiens
tgcatttgattaacatatagaaaaattgtaaattgtattctaacatcacattaacttcaaatgtgaaagatatcttgtatcacttttaaagaaaatataaaatatattttatttagtaaaattgaatttgtagaatgatgacttttttttttactttactgcttaatacttgagaaattttcctctttgatgaggctgttagaaaacaggaactctaacaattatatagtgggaagataaattcatacaacgactttggaaatctacttgacaatgtaaggatgaaagtgcccaaagttgtaaaatttccctgctctatgtctatcctatgaaaattctaatatatataaacaacaaaaccataaatatttattgtagctttgtttttaacatttacaatggtaaatataaaaatgccaacatctsctgatatgaaaattgatagctttatattatatatataatgaaatcccatatagaaattaaacaaaaacggatacccaagtatcagctgcaatggttctcaaaaatatcatagtgagattataaagcatgtgttgaaataatacagataaaacaataacatcttatttaaatttgaagatacaaacactaccgtatgtgttataaaatattctatacacagacctgtacttaaaaatagagaaatatacaaggggatgctaaacaattttagcctgtagttatcccttgtagaatttcttataatcttgtttctggttatgttgctgtatcaattatttttcatgtttgggtatgtgtgaaatatttcataaaaggaagttggacgttttaataatacattgactttaacaggaggaagaacaggtgattggggtattttgttgtataccaacacatgactgaaataatcatctattttaattctgttcagttcagtggaaagtctttgaaggttttttaacagagttgcagtttgtcatatctttgagaacattgtgttagattaagtggaacagaaatgcttagagggaaggagattaaaataatgtgttgtatggatatttgaggtgacatacaatagaactggaaaatagagaaacttcatgaaaaatagtataaaaagagacataaatgacttaccaattgactctgctgtgtttgatagatgggaattgtagtcgtaacattggatgaaataggaaagacagactagtagagctctttggaggcaagttctataagttctttttacattttgagtggaagttttcacttttaaatgaaatgcatatggataaaaaataaaggtaaatatagttattatgaaattgtcaacataaaatgagagttgatgcataaaaatgaacagactggaaaaagggaactttttaaatataaaaaaaaattgcctcttttctgata

SEQ ID NO: 93928 - DNA, 1407 bp, Homo sapiens
tgcatttgattaacatatagaaaaattgtaaattgtattctaacatcacattaacttcaaatgtgaaagatatcttgtatcacttttaaagaaaatataaaatatattttatttagtaaaattgaatttgtagaatgatgacttttttttttactttactgcttaatacttgagaaattttcctctttgatgaggctgttagaaaacaggaactctaacaattatatagtgggaagataaattcatacaacgactttggaaatctacttgacaatgtaaggatgaaagtgcccaaagttgtaaaatttccctgctctatgtctatcctatgaaaattctaatatatataaacaacaaaaccataaatatttattgtagctttgtttttaacatttacaatggtaaatataaaaatgccaacatctgctgatatgaaaattgatagctttatattatatatataatgaaatcccatatagaaattaaacaaaaacggatacccaagtatcagctgcaatggttctcaaaaatatcatagtgagattataaagcatgtgttgaaataatacagataaaacaataacatcttatttaaatttgaagatacaaacactaccgtatgtgttataaaatattctatacacagacctgtacttaaaaatagagaaatatacaaggggatgctaaacaattttagcctgtagttatcccttgtagaatttcttataatcttgtttctggttatgttgctgtatcaattatttttcatgtttgggtatgtgtgaaatatttcataaaaggaagttggacgttttaataatacattgactttaacaggaggaagaacaggtgattggggtattttgttgtataccaacacatgactgaaataatcatctattytaattctgttcagttcagtggaaagtctttgaaggttttttaacagagttgcagtttgtcatatctttgagaacattgtgttagattaagtggaacagaaatgcttagagggaaggagattaaaataatgtgttgtatggatatttgaggtgacatacaatagaactggaaaatagagaaacttcatgaaaaatagtataaaaagagacataaatgacttaccaattgactctgctgtgtttgatagatgggaattgtagtcgtaacattggatgaaataggaaagacagactagtagagctctttggaggcaagttctataagttctttttacattttgagtggaagttttcacttttaaatgaaatgcatatggataaaaaataaaggtaaatatagttattatgaaattgtcaacataaaatgagagttgatgcataaaaatgaacagactggaaaaagggaactttttaaatataaaaaaaaattgcctcttttctgata

SEQ ID NO: 93929 - DNA, 2927 bp, Homo sapiens
  misc_feature (1)...(2927): n = A,T,C or G
tgcatcattcattaattcattaaatgtattgtgttttgtatgggaaaacaatgatgccaaagtgtctatagctatatagtctgatatgtgctataataagaatttggaaaaagtattattggttcacaaaggcagaaatttaggaggttagatacatttaaagtaaaatttgattaaaaagtgtgaacttaaatagattaagataacatggggtgtttgtaaaatatattagtaaaatacaatgacatacccaaagtcctgttaaatcaaattaaatatggcctgagaaaaacgccatacttctatatttcagtccttgtgaatgaaytgcaacctaattcaataggtacacaagactaaaacctaacttaggaatatgcacctgtaacaatcgctgagtcttggccaattccagcagccatacttcaactagtcgcatacagctgagtgttcaaataaggcaagtgccaagctgtaaccaatccagctgtttctgtacctcacttctgatttctatacatcactttactttgtattgtctataaattcattctgactatgagacacccctggagtctctctgaatctgctgtgattgtgggggctttccaatttatgaatcattcatcactcaattaaactgtaaatttattttggctgaaggtgttttttgttttttttttttgtttgtttgtttttttagcagtcctcaccataatgatccatacacgtaagtgtctaatataatctttctagctttcctttttggttgtgtttagtcatactgttgctgattcagctttgtataaaatgtcagagcaaaatggctatcaataatatagagatctgcaagaattcccacacaggtgaaatatgcatggtggaaagaggcaattcttaaggcaaagagccaagcatgtaccaaacaccaatgcccttgtataccaaagctaaagattctacaatttgccaaagataagaatgtacctttcacaacagcaaggacctcatatattgtcttattatatatccctaaaatctagcacagtgttgaataagaggaagtagaaataattttgagaaggaattaaacatgtatttgtagaagtcaagtcttacccattgaaaaaatatctcccccatatttgtaattcattaaattgtttggaagggaaaagaaaccaaagggaatactccatagagaaagttgtttcagaaattatgtaaatttattctaataactaagaaatagtgaaaatgtattagaaaggttaggtagaggcacatttcagatttagactaaggtgcaaatggctttctacttaatgatagagaaaagcataaataaaagtacattgtatacatgaaatggttttgtttgaattgggtatagaatatcaaatgagaaatatatagtaaggaattgaatatacggaaatacagatatagatggccagagcacctacttgtagctcttgatagcagaattatcagtcaactgaaaagatattttaagacctccaagaataagtagataatttctattctgtattttgttaatgaaagaaaaccagggtaataactgcttgaattttcatcactagcatgtttcctacatacataaacatagtgagtagtgagtatattcacatataaagtaacaaagaattatagtaaaccccaacatccaatcgggaaaaatgttgtaactctatatattcattaaattgttcacaaactgacatcttttagcatatattatggtttcctttagcttgttaaagagcatggactcatgactaaaacataagaacacccaatgaagttcaactaaatcaattcaactatgaaaaataaaatgactagtgatcatctctttattattattgaaagaataacttacaagtaaaaacattcaatttttgaaaacagctttgtatttattgaatttatgcatataacgttagttgcatttcaaaataaaatggctgccttaaaagtgatgcaaaattacatatttatacattctctgaattaagcaggattaattgaaaagtggttatgaaggcatgactgcaagctacaaattgagcctatttttagtaacttgctctagctgagatgttatatgttcagatttgttgacacgaagctttattgagaagcattacttattcccaataactcaaggaggagcctgttttgggaggaaaaaccacatcaagtatgttttgttgaatcaagaggattttatttttagaaaactactaatgattttttctgaaaacgtgactattttgaaatctaagaaaaatcaaatatttgatacttaacataatttgcaacttgacataaaactactcagtttagttggtcataatatactcattcctaacttattccactttacaaaaaaagtaaaagaaaagaataaataaataagtaaggaaagagaaacaaacaaacaaaaaacattggaaacggactaggtaaaaatttatagaatcaaggattaatttccaccaattatggcatgaataaaaccaatcaactaaaatatattttaaaaatcaagaagatagtaggaaaacagcctctgaggacccctggaacagtaattaggcgggcactctgtgcctgttggacattaccattttctttaatgtttgtatgaaacgacgccaatttatctttaagcaatttatctttaagttgtaaagtgatgcaaacagctgtcatgtaacaatcaccaagagaggacccattctagttcacaaactgccctgatgctttttataaaaaacaatccattcaggataatgtgttnnnnnnnnnnnnnnnnnnnnnnnnnnnnnnnnnnnnnnnnnnnnnnnnnnnnnnnnnnnnnnnnnnnnnnnnnnnnnnnnnnnnnnnnnnnnnnnnnnnnt

SEQ ID NO: 93930 - DNA, 2927 bp, Homo sapiens
  misc_feature (1)...(2927): n = A,T,C or G
tgcatcattcattaattcattaaatgtattgtgttttgtatgggaaaacaatgatgccaaagtgtctatagctatatagtctgatatgtgctataataagaatttggaaaaagtattattggttcacaaaggcagaaatttaggaggttagatacatttaaagtaaaatttgattaaaaagtgtgaacttaaatagattaagataacatggggtgtttgtaaaatatattagtaaaatacaatgacatacccaaagtcctgttaaatcaaattaaatatggcctgagaaaaacgccatacttctatatttcagtccttgtgaatgaactgcaacctaattcaataggtacacaagactaaaacctaacttaggaatatgcacctgtaacaatcgctgagtcttggccaattccagcagccatacttcaactagtcgcatacagctgagtgttcaaataaggcaagtgccaagctgtaaccaatccagctgtttctgtacctcacttctgatttctatacatcactttactttgtattgtctataaattcattctgacyatgagacacccctggagtctctctgaatctgctgtgattgtgggggctttccaatttatgaatcattcatcactcaattaaactgtaaatttattttggctgaaggtgttttttgttttttttttttgtttgtttgtttttttagcagtcctcaccataatgatccatacacgtaagtgtctaatataatctttctagctttcctttttggttgtgtttagtcatactgttgctgattcagctttgtataaaatgtcagagcaaaatggctatcaataatatagagatctgcaagaattcccacacaggtgaaatatgcatggtggaaagaggcaattcttaaggcaaagagccaagcatgtaccaaacaccaatgcccttgtataccaaagctaaagattctacaatttgccaaagataagaatgtacctttcacaacagcaaggacctcatatattgtcttattatatatccctaaaatctagcacagtgttgaataagaggaagtagaaataattttgagaaggaattaaacatgtatttgtagaagtcaagtcttacccattgaaaaaatatctcccccatatttgtaattcattaaattgtttggaagggaaaagaaaccaaagggaatactccatagagaaagttgtttcagaaattatgtaaatttattctaataactaagaaatagtgaaaatgtattagaaaggttaggtagaggcacatttcagatttagactaaggtgcaaatggctttctacttaatgatagagaaaagcataaataaaagtacattgtatacatgaaatggttttgtttgaattgggtatagaatatcaaatgagaaatatatagtaaggaattgaatatacggaaatacagatatagatggccagagcacctacttgtagctcttgatagcagaattatcagtcaactgaaaagatattttaagacctccaagaataagtagataatttctattctgtattttgttaatgaaagaaaaccagggtaataactgcttgaattttcatcactagcatgtttcctacatacataaacatagtgagtagtgagtatattcacatataaagtaacaaagaattatagtaaaccccaacatccaatcgggaaaaatgttgtaactctatatattcattaaattgttcacaaactgacatcttttagcatatattatggtttcctttagcttgttaaagagcatggactcatgactaaaacataagaacacccaatgaagttcaactaaatcaattcaactatgaaaaataaaatgactagtgatcatctctttattattattgaaagaataacttacaagtaaaaacattcaatttttgaaaacagctttgtatttattgaatttatgcatataacgttagttgcatttcaaaataaaatggctgccttaaaagtgatgcaaaattacatatttatacattctctgaattaagcaggattaattgaaaagtggttatgaaggcatgactgcaagctacaaattgagcctatttttagtaacttgctctagctgagatgttatatgttcagatttgttgacacgaagctttattgagaagcattacttattcccaataactcaaggaggagcctgttttgggaggaaaaaccacatcaagtatgttttgttgaatcaagaggattttatttttagaaaactactaatgattttttctgaaaacgtgactattttgaaatctaagaaaaatcaaatatttgatacttaacataatttgcaacttgacataaaactactcagtttagttggtcataatatactcattcctaacttattccactttacaaaaaaagtaaaagaaaagaataaataaataagtaaggaaagagaaacaaacaaacaaaaaacattggaaacggactaggtaaaaatttatagaatcaaggattaatttccaccaattatggcatgaataaaaccaatcaactaaaatatattttaaaaatcaagaagatagtaggaaaacagcctctgaggacccctggaacagtaattaggcgggcactctgtgcctgttggacattaccattttctttaatgtttgtatgaaacgacgccaatttatctttaagcaatttatctttaagttgtaaagtgatgcaaacagctgtcatgtaacaatcaccaagagaggacccattctagttcacaaactgccctgatgctttttataaaaaacaatccattcaggataatgtgttnnnnnnnnnnnnnnnnnnnnnnnnnnnnnnnnnnnnnnnnnnnnnnnnnnnnnnnnnnnnnnnnnnnnnnnnnnnnnnnnnnnnnnnnnnnnnnnnnnnnt

SEQ ID NO: 93931 - DNA, 2927 bp, Homo sapiens
  misc_feature (1)...(2927): n = A,T,C or G
tgcatcattcattaattcattaaatgtattgtgttttgtatgggaaaacaatgatgccaaagtgtctatagctatatagtctgatatgtgctataataagaatttggaaaaagtattattggttcacaaaggcagaaatttaggaggttagatacatttaaagtaaaatttgattaaaaagtgtgaacttaaatagattaagataacatggggtgtttgtaaaatatattagtaaaatacaatgacatacccaaagtcctgttaaatcaaattaaatatggcctgagaaaaacgccatacttctatatttcagtccttgtgaatgaactgcaacctaattcaataggtacacaagactaaaacctaacttaggaatatgcacctgtaacaatcgctgagtcttggccaattccagcagccatacttcaactagtcgcatacagctgagtgttcaaataaggcaagtgccaagctgtaaccaatccagctgtttctgtacctcacttctgatttctatacatcactttactttgtattgtctataaattcattctgactatgagacacccctggagtctctctgaatctgctgtgattgtgggggctttccaatttatgaatcattcatcactcaattaaactgtaaatttattttggctgaaggtgttttttgttttttttttttgtttgtttgtttttttagcagtcctcaccataatgatccatacacgtaagtgtctaatataatctttctagctttcctttttggttgtgtttagtcatactgttgctgattcagctttgtataaaatgtcagagcaaaatggctatcaataatatagagatctgcaagaattcccacacaggtgaaatatgcatggtggaaagaggcaattcttaaggcaaagagccaagcatgtaccaaacaccaatgcccttgtataccaaagctaaagattctacaatttgccaaagataagaatgtacctttcacaacagcaaggacctcatatattgtcttattatatatccctaaaatctagcacagtgttgaataagaggaagtagaaataattttgagaaggaattaaacatgtatttgtagaagtcaagtcttacccattgaaaaaatatctcccccatatttgtaattcattaaattgtttggaagggaaaagaaaccaaagggaatactccatagagaaagttgtttcagaaattatgtaaatttattctaataactaagaaatagtgaaaatgtattagaaaggttaggtagaggcacatttcagatttagactaaggtgcaaatggctttctacttaatgatagagaaaagcataaataaaagtacattgtatacatgaaatggttttgtttgaattgggtatagaatatcaaatgagaaatatatagtaaggaattgaatatacggaaatacagatatagatggccagagcacctacttgtagctcttgatagcagaattatcagtcaactgaaaagatattttaagacctccaagaataagtagataatttctattctgtattttgttaatgaaagaaaaccagggtaataactgcttgaattttcatcactagcatgtttcctacatacataaacatagtgagtagtgagtatattcacatataaagtaacaaagaattatagtaaaccccaacatccaatcgggaaaaatgttgtaactctatatattcattaaattkttcacaaactgacatcttttagcatatattatggtttcctttagcttgttaaagagcatggactcatgactaaaacataagaacacccaatgaagttcaactaaatcaattcaactatgaaaaataaaatgactagtgatcatctctttattattattgaaagaataacttacaagtaaaaacattcaatttttgaaaacagctttgtatttattgaatttatgcatataacgttagttgcatttcaaaataaaatggctgccttaaaagtgatgcaaaattacatatttatacattctctgaattaagcaggattaattgaaaagtggttatgaaggcatgactgcaagctacaaattgagcctatttttagtaacttgctctagctgagatgttatatgttcagatttgttgacacgaagctttattgagaagcattacttattcccaataactcaaggaggagcctgttttgggaggaaaaaccacatcaagtatgttttgttgaatcaagaggattttatttttagaaaactactaatgattttttctgaaaacgtgactattttgaaatctaagaaaaatcaaatatttgatacttaacataatttgcaacttgacataaaactactcagtttagttggtcataatatactcattcctaacttattccactttacaaaaaaagtaaaagaaaagaataaataaataagtaaggaaagagaaacaaacaaacaaaaaacattggaaacggactaggtaaaaatttatagaatcaaggattaatttccaccaattatggcatgaataaaaccaatcaactaaaatatattttaaaaatcaagaagatagtaggaaaacagcctctgaggacccctggaacagtaattaggcgggcactctgtgcctgttggacattaccattttctttaatgtttgtatgaaacgacgccaatttatctttaagcaatttatctttaagttgtaaagtgatgcaaacagctgtcatgtaacaatcaccaagagaggacccattctagttcacaaactgccctgatgctttttataaaaaacaatccattcaggataatgtgttnnnnnnnnnnnnnnnnnnnnnnnnnnnnnnnnnnnnnnnnnnnnnnnnnnnnnnnnnnnnnnnnnnnnnnnnnnnnnnnnnnnnnnnnnnnnnnnnnnnnt

SEQ ID NO: 93932 - DNA, 2927 bp, Homo sapiens
  misc_feature (1)...(2927): n = A,T,C or G
tgcatcattcattaattcattaaatgtattgtgttttgtatgggaaaacaatgatgccaaagtgtctatagctatatagtctgatatgtgctataataagaatttggaaaaagtattattggttcacaaaggcagaaatttaggaggttagatacatttaaagtaaaatttgattaaaaagtgtgaacttaaatagattaagataacatggggtgtttgtaaaatatattagtaaaatacaatgacatacccaaagtcctgttaaatcaaattaaatatggcctgagaaaaacgccatacttctatatttcagtccttgtgaatgaactgcaacctaattcaataggtacacaagactaaaacctaacttaggaatatgcacctgtaacaatcgctgagtcttggccaattccagcagccatacttcaactagtcgcatacagctgagtgttcaaataaggcaagtgccaagctgtaaccaatccagctgtttctgtacctcacttctgatttctatacatcactttactttgtattgtctataaattcattctgactatgagacacccctggagtctctctgaatctgctgtgattgtgggggctttccaatttatgaatcattcatcactcaattaaactgtaaatttattttggctgaaggtgttttttgttttttttttttgtttgtttgtttttttagcagtcctcaccataatgatccatacacgtaagtgtctaatataatctttctagctttcctttttggttgtgtttagtcatactgttgctgattcagctttgtataaaatgtcagagcaaaatggctatcaataatatagagatctgcaagaattcccacacaggtgaaatatgcatggtggaaagaggcaattcttaaggcaaagagccaagcatgtaccaaacaccaatgcccttgtataccaaagctaaagattctacaatttgccaaagataagaatgtacctttcacaacagcaaggacctcatatattgtcttattatatatccctaaaatctagcacagtgttgaataagaggaagtagaaataattttgagaaggaattaaacatgtatttgtagaagtcaagtcttacccattgaaaaaatatctcccccatatttgtaattcattaaattgtttggaagggaaaagaaaccaaagggaatactccatagagaaagttgtttcagaaattatgtaaatttattctaataactaagaaatagtgaaaatgtattagaaaggttaggtagaggcacatttcagatttagactaaggtgcaaatggctttctacttaatgatagagaaaagcataaataaaagtacattgtatacatgaaatggttttgtttgaattgggtatagaatatcaaatgagaaatatatagtaaggaattgaatatacggaaatacagatatagatggccagagcacctacttgtagctcttgatagcagaattatcagtcaactgaaaagatattttaagacctccaagaataagtagataatttctattctgtattttgttaatgaaagaaaaccagggtaataactgcttgaattttcatcactagcatgtttcctacatacataaacatagtgagtagtgagtatattcacatataaagtaacaaagaattatagtaaaccccaacatccaatcgggaaaaatgttgtaactctatatattcattaaattgttcacaaactgacatcttttagcatatattatggtttcctttagcttgttaaagagcatggactcatgactaaaacataagaacacccaatgaagttcaactaaatcaattcaactatgaaaaataaaatgactagtgatcatctctttattattattgaaagaataacttacaagtaaaaacattcaatttttgaaaacagctttgtatttattgaatttatgcatataacgttagttgcatttcaaaataaaatggctgccttaaaagtgatgcaaaattacatatttatacattctctgaattaagcaggattaattgaaaagtggttatgaaggcatgactgcaagctacaaattgagcctatttttagtaacttgctctagctgagatgttatatgttcagatttgttgacacgaagctttattgagaagcattacttattcccaataactcaaggaggagcctgttttgggaggaaaaaccacatcaagtatgttttgttgaatcaagaggattttatttttagaaaactactaatgattttttctgaaaacgtgactattttgaaatctaagaaaaatcaaatatttgatacttaacataatttgcaacttgacataaaactactcagtttagttggtcataatatactcattcctaacttattccactttacaaaaaaagtaaaagaaaagaataaataaataagtaaggaaagagaaacaaacaaacaaaaaacattggaaacggactaggtaaaaatttatagaatcaaggattaatttccaccaattatggcatgaataaaaccaatcaactaaaatatattttaaaaatcaagaagayagtaggaaaacagcctctgaggacccctggaacagtaattaggcgggcactctgtgcctgttggacattaccattttctttaatgtttgtatgaaacgacgccaatttatctttaagcaatttatctttaagttgtaaagtgatgcaaacagctgtcatgtaacaatcaccaagagaggacccattctagttcacaaactgccctgatgctttttataaaaaacaatccattcaggataatgtgttnnnnnnnnnnnnnnnnnnnnnnnnnnnnnnnnnnnnnnnnnnnnnnnnnnnnnnnnnnnnnnnnnnnnnnnnnnnnnnnnnnnnnnnnnnnnnnnnnnnnt

SEQ ID NO: 93933 - DNA, 2927 bp, Homo sapiens
  misc_feature (1)...(2927): n = A,T,C or G
tgcatcattcattaattcattaaatgtattgtgttttgtatgggaaaacaatgatgccaaagtgtctatagctatatagtctgatatgtgctataataagaatttggaaaaagtattattggttcacaaaggcagaaatttaggaggttagatacatttaaagtaaaatttgattaaaaagtgtgaacttaaatagattaagataacatggggtgtttgtaaaatatattagtaaaatacaatgacatacccaaagtcctgttaaatcaaattaaatatggcctgagaaaaacgccatacttctatatttcagtccttgtgaatgaactgcaacctaattcaataggtacacaagactaaaacctaacttaggaatatgcacctgtaacaatcgctgagtcttggccaattccagcagccatacttcaactagtcgcatacagctgagtgttcaaataaggcaagtgccaagctgtaaccaatccagctgtttctgtacctcacttctgatttctatacatcactttactttgtattgtctataaattcattctgactatgagacacccctggagtctctctgaatctgctgtgattgtgggggctttccaatttatgaatcattcatcactcaattaaactgtaaatttattttggctgaaggtgttttttgttttttttttttgtttgtttgtttttttagcagtcctcaccataatgatccatacacgtaagtgtctaatataatctttctagctttcctttttggttgtgtttagtcatactgttgctgattcagctttgtataaaatgtcagagcaaaatggctatcaataatatagagatctgcaagaattcccacacaggtgaaatatgcatggtggaaagaggcaattcttaaggcaaagagccaagcatgtaccaaacaccaatgcccttgtataccaaagctaaagattctacaatttgccaaagataagaatgtacctttcacaacagcaaggacctcatatattgtcttattatatatccctaaaatctagcacagtgttgaataagaggaagtagaaataattttgagaaggaattaaacatgtatttgtagaagtcaagtcttacccattgaaaaaatatctcccccatatttgtaattcattaaattgtttggaagggaaaagaaaccaaagggaatactccatagagaaagttgtttcagaaattatgtaaatttattctaataactaagaaatagtgaaaatgtattagaaaggttaggtagaggcacatttcagatttagactaaggtgcaaatggctttctacttaatgatagagaaaagcataaataaaagtacattgtatacatgaaatggttttgtttgaattgggtatagaatatcaaatgagaaatatatagtaaggaattgaatatacggaaatacagatatagatggccagagcacctacttgtagctcttgatagcagaattatcagtcaactgaaaagatattttaagacctccaagaataagtagataatttctattctgtattttgttaatgaaagaaaaccagggtaataactgcttgaattttcatcactagcatgtttcctacatacataaacatagtgagtagtgagtatattcacatataaagtaacaaagaattatagtaaaccccaacatccaatcgggaaaaatgttgtaactctatatattcattaaattgttcacaaactgacatcttttagcatatattatggtttcctttagcttgttaaagagcatggactcatgactaaaacataagaacacccaatgaagttcaactaaatcaattcaactatgaaaaataaaatgactagtgatcatctctttattattattgaaagaataacttacaagtaaaaacattcaatttttgaaaacagctttgtatttattgaatttatgcatataacgttagttgcatttcaaaataaaatggctgccttaaaagtgatgcaaaattacatatttatacattctctgaattaagcaggattaattgaaaagtggttatgaaggcatgactgcaagctacaaattgagcctatttttagtaacttgctctagctgagatgttatatgttcagatttgttgacacgaagctttattgagaagcattacttattcccaataactcaaggaggagcctgttttgggaggaaaaaccacatcaagtatgttttgttgaatcaagaggattttatttttagaaaactactaatgattttttctgaaaacgtgactattttgaaatctaagaaaaatcaaatatttgatacttaacataatttgcaacttgacataaaactactcagtttagttggtcataatatactcattcctaacttattccactttacaaaaaaagtaaaagaaaagaataaataaataagtaaggaaagagaaacaaacaaacaaaaaacattggaaacggactaggtaaaaatttatagaatcaaggattaatttccaccaattatggcatgaataaaaccaatcaactaaaatatattttaaaaatcaagaagatagtaggaaaacagcctctgaggacccctggaacagtaattaggcgggcactctgtgcctgttggacattaccattttctttaatgtttgtatgaaacgacgccaatttatctttaarcaatttatctttaagttgtaaagtgatgcaaacagctgtcatgtaacaatcaccaagagaggacccattctagttcacaaactgccctgatgctttttataaaaaacaatccattcaggataatgtgttnnnnnnnnnnnnnnnnnnnnnnnnnnnnnnnnnnnnnnnnnnnnnnnnnnnnnnnnnnnnnnnnnnnnnnnnnnnnnnnnnnnnnnnnnnnnnnnnnnnnt

SEQ ID NO: 93934 - DNA, 2927 bp, Homo sapiens
  misc_feature (1)...(2927): n = A,T,C or G
tgcatcattcattaattcattaaatgtattgtgttttgtatgggaaaacaatgatgccaaagtgtctatagctatatagtctgatatgtgctataataagaatttggaaaaagtattattggttcacaaaggcagaaatttaggaggttagatacatttaaagtaaaatttgattaaaaagtgtgaacttaaatagattaagataacatggggtgtttgtaaaatatattagtaaaatacaatgacatacccaaagtcctgttaaatcaaattaaatatggcctgagaaaaacgccatacttctatatttcagtccttgtgaatgaactgcaacctaattcaataggtacacaagactaaaacctaacttaggaatatgcacctgtaacaatcgctgagtcttggccaattccagcagccatacttcaactagtcgcatacagctgagtgttcaaataaggcaagtgccaagctgtaaccaatccagctgtttctgtacctcacttctgatttctatacatcactttactttgtattgtctataaattcattctgactatgagacacccctggagtctctctgaatctgctgtgattgtgggggctttccaatttatgaatcattcatcactcaattaaactgtaaatttattttggctgaaggtgttttttgttttttttttttgtttgtttgtttttttagcagtcctcaccataatgatccatacacgtaagtgtctaatataatctttctagctttcctttttggttgtgtttagtcatactgttgctgattcagctttgtataaaatgtcagagcaaaatggctatcaataatatagagatctgcaagaattcccacacaggtgaaatatgcatggtggaaagaggcaattcttaaggcaaagagccaagcatgtaccaaacaccaatgcccttgtataccaaagctaaagattctacaatttgccaaagataagaatgtacctttcacaacagcaaggacctcatatattgtcttattatatatccctaaaatctagcacagtgttgaataagaggaagtagaaataattttgagaaggaattaaacatgtatttgtagaagtcaagtcttacccattgaaaaaatatctcccccatatttgtaattcattaaattgtttggaagggaaaagaaaccaaagggaatactccatagagaaagttgtttcagaaattatgtaaatttattctaataactaagaaatagtgaaaatgtattagaaaggttaggtagaggcacatttcagatttagactaaggtgcaaatggctttctacttaatgatagagaaaagcataaataaaagtacattgtatacatgaaatggttttgtttgaattgggtatagaatatcaaatgagaaatatatagtaaggaattgaatatacggaaatacagatatagatggccagagcacctacttgtagctcttgatagcagaattatcagtcaactgaaaagatattttaagacctccaagaataagtagataatttctattctgtattttgttaatgaaagaaaaccagggtaataactgcttgaattttcatcactagcatgtttcctacatacataaacatagtgagtagtgagtatattcacatataaagtaacaaagaattatagtaaaccccaacatccaatcgggaaaaatgttgtaactctatatattcattaaattgttcacaaactgacatcttttagcatatattatggtttcctttagcttgttaaagagcatggactcatgactaaaacataagaacacccaatgaagttcaactaaatcaattcaactatgaaaaataaaatgactagtgatcatctctttattattattgaaagaataacttacaagtaaaaacattcaatttttgaaaacagctttgtatttattgaatttatgcatataacgttagttgcatttcaaaataaaatggctgccttaaaagtgatgcaaaattacatatttatacattctctgaattaagcaggattaattgaaaagtggttatgaaggcatgactgcaagctacaaattgagcctatttttagtaacttgctctagctgagatgttatatgttcagatttgttgacacgaagctttattgagaagcattacttattcccaataactcaaggaggagcctgttttgggaggaaaaaccacatcaagtatgttttgttgaatcaagaggattttatttttagaaaactactaatgattttttctgaaaacgtgactattttgaaatctaagaaaaatcaaatatttgatacttaacataatttgcaacttgacataaaactactcagtttagttggtcataatatactcattcctaacttattccactttacaaaaaaagtaaaagaaaagaataaataaataagtaaggaaagagaaacaaacaaacaaaaaacattggaaacggactaggtaaaaatttatagaatcaaggattaatttccaccaattatggcatgaataaaaccaatcaactaaaatatattttaaaaatcaagaagatagtaggaaaacagcctctgaggacccctggaacagtaattaggcgggcactctgtgcctgttggacattaccattttctttaatgtttgtatgaaacgacgccaatttatctttaagcaatttatctttaagttgtaargtgatgcaaacagctgtcatgtaacaatcaccaagagaggacccattctagttcacaaactgccctgatgctttttataaaaaacaatccattcaggataatgtgttnnnnnnnnnnnnnnnnnnnnnnnnnnnnnnnnnnnnnnnnnnnnnnnnnnnnnnnnnnnnnnnnnnnnnnnnnnnnnnnnnnnnnnnnnnnnnnnnnnnnt

SEQ ID NO: 93935 - DNA, 746 bp, Homo sapiens
aacttcatagcttagcctagcctaccttaaacgtgctcagaacactatttttgcctacagttgggcaaaatcatctaacacaaagcctattatataataatgtcgaatattatgtaattgaatactgtacagaaagtaaaaaaacagaatggttgtatgggtactcaaagtatggtttctactgaatgtgtattgctttcacaccatcataaagttgaaaaattgtaagctgaaccatcataggtcagggaccatctgtatttgaatgagtgaggtgggggcctgaatccaccctcctcctcctctcaccaccccatcctcargatacacatagaccagtgaagtctgtcttggccttgtgaaacccttaccatctgaatggcctaatgaagtagaacttgtgactgataggaagactttggagaggtttggaatgttctttgacttaccaggaatctagtagacccaggattatccaaatgtcaccaaacagtgagttcagtgcccagaggggaggcccattattaacccttccttgaggtagacacacccagtgtagatgagggtgatgctgggtggtccctgcccaaggcttagtctgaccctactcaggaaggggatataataggaatagcattatgagaggttctttctgttctgtaccccttatgtgttataagataatggaggaaaatctcagttgccaaacctgtgtcggccacattaaagcaacagttactatatca

SEQ ID NO: 93936 - DNA, 746 bp, Homo sapiens
aacttcatagcttagcctagcctaccttaaacgtgctcagaacactatttttgcctacagttgggcaaaatcatctaacacaaagcctattatataataatgtcgaatattatgtaattgaatactgtacagaaagtaaaaaaacagaatggttgtatgggtactcaaagtatggtttctactgaatgtgtattgctttcacaccatcataaagttgaaaaattgtaagctgaaccatcataggtcagggaccatctgtatttgaatgagtgaggtgggggcctgaatccaccctcctcctcctctcaccaccccatcctcaggatacacatagaccagtgaagtctgtcttggccttgtgaaacccttaccatctgaatggcctaatgaagtagaacttgtgactgataggaagactttggagaggtttggaatgttctttgacttaccaggaatctagtagacccaggattatccaaatgtcaccaaacagtgagttcagtgcccagaggggaggcccattattaacccttccttgaggtagacacacccagtgtagatgagggtgatgctgggtggtccctgcccaargcttagtctgaccctactcaggaaggggatataataggaatagcattatgagaggttctttctgttctgtaccccttatgtgttataagataatggaggaaaatctcagttgccaaacctgtgtcggccacattaaagcaacagttactatatca

SEQ ID NO: 93937 - DNA, 973 bp, Homo sapiens
tatagggttctatctgcagttttgggcatctactggggggcttacctacccaaggaaggtaacccccgtggatgaggggggactactgtacttgcacatgaattttcatctcaggggccacctctggaaattcaacctaagacacaaagatccctgatagaataggtattaataggaatttaaaaatcatttaaaactcaatccattttgatgtttcttgtacatttgaggcttcagtaggaaaaaaggtatgaaatcctcatcactcttcatatatcccaactgatagcctaggaattttttgacagttcaatcataatttgatagttcaaataaatatacatttatttgtttaaatataccacaaatcaggctgggtgcagtgactcaggcctctaatcttaccactttgggaggctgaggcaggacgattgcttgagaccaggggttcaagaccaacctgggcaacatagtaagacccctctctacaaaaaaaagaaaactgttttaattagccaggtatggtgccacacacttgtagtcttacctacttggaaggctgagacaggaagatcccttgagctcaggagttcaaggctgcagttagctatgatcacaatgctgcactccagcctaggcaacagagtgaaagaccctgtctctttaaaatacagatagatagatagatagatagatagatagatagatagatagataactcaaatataattgccataagaagagaatgtcactatttttatgccaacaagatgaataaaacacacacamaaaaaataaaatatgtatctgtcaaacttttttagggctctgagaacagctttagtggaaaaaacaccccggcatggggctggctccatggggaccatagtttgtcactctgagcctcctcattacctcctaagactatagtttcctaatcctaaaatcccggtaattttgctgatcttttctg

SEQ ID NO: 93938 - DNA, 638 bp, Homo sapiens
cattagacattaaatatatcatcaacctaattacatatgacttactagttcagtgctgattatatccgaaatcatcagagtcttaaaaatagtcatgcttgtttgtcccaacaatgttttcaaccatagtttctgtggttccaaccacatatggagaaataatataygtcctcacggggagaagagtgatttctgagttttaaaaagtcgaaggttgtcattttgccactttgagaatatcccttgatctagtttgatctatgtatgttccacctagagactaaattaaaactctagccaaaatattaaaggatggaaatatagtccatgactgtggtttatcattccattattagaattgactagcagtattttgacacctagataggactgctttggtgtgtctaggtgtattgtattatttaagttacataatattagaaacttaaaataaaaacaacttggtatcagaattggtgactgagttcgagtttggtattcagctgtttccatgcaactgaattgttaaaatgcttacaatttcctgtgatttattttctaaagcaagaaaagggacctaacattaatatgcctcttttagattaaattagatttaccttaatgaaatatacaaacaa

SEQ ID NO: 93939 - DNA, 608 bp, Homo sapiens
catcacagctgccaggggaatgagccctttattagaccacgtctgcagtcaagctggaagataagaagtgtgtcagtgtgccagtgcctgagtgtgcatgagtgtgagcagttgtgatggtgcatgatcatgtgtgggtgtgaacatgtgtgggtgcccgaggagggtcctgaagtcagggtgtgggtttcttttatgaggctctgcagtaaagggaagtaaggggaacaatgtagcggtggggttttcctggcccatgcatggtagtccaccatgcccttcatacaacatatgtctcattagcatctgaaatctccacctccggacatgagttttagcattaacataaggaaaaggtaactatgagttggaagttaagcctagctgtgcatgcagggccttgggaaagttacygatcccctaaagcagaaacatgtggttaaaagcttcttgggcctttgacgctgattggctggagttacagctagaggaaggggcctttgttcttttttttttttctccagaccatgtggaaacaggaaaccagccagcttgcctgtctcaggcccacctgtgtcacccttgcctgtcttatgagcagggcctgg

SEQ ID NO: 93940 - DNA, 742 bp, Homo sapiens
cagtggcagtaagcaacctggccatcattcctgcaacacctgtttgcttctgttaaagggtgaatattaatctgcaaatcagggcagctatgatacaacacatccttttctttgagatacatgcaatcattaatgagcctgtgatggttaatttcaggtgtcaacttgattggaccatggaaagcctagatatttggtccatcattgttctaggtgcgtctgtgagggtgttttgggataagattaacatttatttttatttatttatttatttatttttattttttgagacacagtcttgctctgttggccaggctggagtacattggtgtgatctcagctcactgcatcctccgcctcctgggctcaagcaattcccccacctccacctcccaagtagcctccctggctaattttttgtatttctggtagagaygggtttgccatgtggccgaggctggtctcaaactcctgagctcaagcagtctgctcaccttggcctctcaaagtgctggaattacaggcatgagccactgcgcttggctgagagtaacatttaaattggcaggctgagtaaagccaattgtcccctaccccacctcagtatggggggccttgtccaatcctttgaaggactgcatagaacacaaaggctgaccttcccccaagtaagggagaatgcctcctgtccgatgctctttggtcaggggcagctgcatttttcctgccattgtgtaacgca

SEQ ID NO: 93941 - DNA, 742 bp, Homo sapiens
cagtggcagtaagcaacctggccatcattcctgcaacacctgtttgcttctgttaaagggtgaatattaatctgcaaatcagggcagctatgatacaacacatccttttctttgagatacatgcaatcattaatgagcctgtgatggttaatttcaggtgtcaacttgattggaccatggaaagcctagatatttggtccatcattgttctaggtgcgtctgtgagggtgttttgggataagattaacatttatttttatttatttatttatttatttttattttttgagacacagtcttgctctgttggccaggctggagtacattggtgtgatctcagctcactgcatcctccgcctcctgggctcaagcaattcccccacctccacctcccaagtagcctccctggctaattttttgtatttctggtagagatgggtttgccatgtggccgaggctggtctcaaactcctgagctcaagcagtctgctcaccttggcctctcaaagtgctggaattacaggcatgagccactgcgcttggctgagagtaacatttaaattggcaggctgagtaaagccaattgtcccctaccccacctcagtatggggggccttgtccaatcckttgaaggactgcatagaacacaaaggctgaccttcccccaagtaagggagaatgcctcctgtccgatgctctttggtcaggggcagctgcatttttcctgccattgtgtaacgca

SEQ ID NO: 93942 - DNA, 1101 bp, Homo sapiens
gggagtatgtgataaatctgtaccttctgctcaattgtactgtgaacctaaaaaaagtttaaaaagttaagtaaatttttaaaagttaaaaacttatgcccagaggggtgggaagatttaaaggaaactagcaacagcctggacagcatagtgagaacctatctctaaaaaaaaaattaaaaaaattagactagcttggtggcacatacctgaaatcctagctacctgggagactgaggtgggaggattgcttgagcccggcatgttgagactgttgtgagctatgatcacaacactgcactctagcctgggtaacagagtgacatcctgtctcataaacaacaacaacaacaacaacaaaaacaacaacaacaaaggaaactagcaatcaatcatttaagttagtgaaagggggtatttaaacctttttgtggttgcagagtgaccttgtcatattctgagtattgctcctgttctgtcaggtatatcatggtctgaatgtcagcaagggtgcccttcattttctctaattgtcagaaaggtatattttcaaattatcacactgtaatgtcattcttcaaattaggctatagaactttattataggagaagacaacactttatcccaatttttcattaagataaaatctctttgtagtatccagtatgagtttatataacaycaaatttcttattactttttaattcctttatttattcttatcacgttccaagtacttgttttaacctaaagaagtataataagtcaggaaacaacaggtgctggagaggatgtggagaaataggaacacttttacactgttggtgggacggtaaactagttcaaccattgtggaagacagtgtggtgattcctcaaggatctagaactagaaataccatttgacccagccatcccattactgggtatataacccaaaggattataaatcatgctgctataaagacacatgcacacgcatgtttattgtggcactattcacaatagcaaagacttggaaccaacgcaaatgtccatcaacaatagactggattaagaaaatgtggcacatatactccatggagtactatgcagccataa

SEQ ID NO: 93943 - DNA, 696 bp, Homo sapiens
cccacctggttaatctaggataatctcccaagctcaggattcttcactttttttttttttttttttgagacagggtcttactctgttgctcaggctggagtgcagtggcacaatcatagctcactgcagcctcaacctcccggtctcaaacaatcctcccatctcagcctcccaaggagctgggactataggtgtatgcaaccacgcctggctaatttttgtatttatttatttatgtatttttggtagagatggagttttgccatgttacccaggctggaggattcttcactgaattttatctgcaaagtccyttttgcatcataaggtaacatttgtaggtttctgagatgagaaagcccacagccattatcaaagtggtcatcatcgccttgccatgaagctgagtgagctttgaccacacaaggccatgtgtcttctctgcaaaatgagggattgctctcaacaatcctcaagactcttctgtctgagtatcttgagtcctggatgcaaacattctggtttgaacgttccttcctcaaaaacttttgtcttagtttttctaagccaacttgtccaatggtgtcatggtggagagagacggggccacgccagcatagagcctggctctgcagccccagccagcctggaatcccagctctgcccctccctggtggggcctgggggagtcatgta

SEQ ID NO: 93944 - DNA, 696 bp, Homo sapiens
cccacctggttaatctaggataatctcccaagctcaggattcttcactttttttttttttttttttgagacagggtcttactctgttgctcaggctggagtgcagtggcacaatcatagctcactgcagcctcaacctcccggtctcaaacaatcctcccatctcagcctcccaaggagctgggactataggtgtatgcaaccacgcctggctaatttttgtatttatttatttatgtatttttggtagagatggagttttgccatgttacccaggctggaggattcttcactgaattttatctgcaaagtcccttttgcatcataaggtaacatttgtaggtttctgagatgagaaagcccacagccattatcaaagtggtcatcatcgccttgccatgaagctgagtgagctttgaccacacaaggccatgtgtcttctctgcaaaatgagggattgctctcaacaatcctcaagactcttctgtctgagtatcttgagtcctggatgcaaacattctggtttgaacgttccttcctcaaaaacttttgycttagtttttctaagccaacttgtccaatggtgtcatggtggagagagacggggccacgccagcatagagcctggctctgcagccccagccagcctggaatcccagctctgcccctccctggtggggcctgggggagtcatgta

SEQ ID NO: 93945 - DNA, 742 bp, Homo sapiens
aaaacttttcatttctttccatagctgttctttgctttttwatcccatctctacattatttattttatccttccctgttttaagataattctggctggggacagtggctcacgcctgtaatcccagcactttgggaggatgaggtgggtggaaaatttgaggccaggagttcgagaccagactgggcaacatggtgaaacgttgtctctactaaaaatagaaaaattagccgggtgtgatggctggctcctataatcccagctacttgggaggctgaggcaggagaatcacttgaaccccggaggcagaggttgcagtgagcagatatcatgccactgcactccagcctgggcaacagagtgagactctgtcttaaaaaataaaataaaataaaatataaaataaaataaaataaaattctgctcattggagatgtagcatttctcatacttctggatctgaatataatttaatggcattctttgttgactagcattttctgaaagttcactaggaattttaaccttcctaatatttttataaacttttactcttttatgatcagtttatgtgctccacacagtcaactttagttcatcccttggaatctgtgttcaccagaggtcttcctatgcaagcataccagttatttcagtttctgtctcttcccacttggcctttcattatttgtatacagttgtccctcaacatttgttggagattggttccaggacccaatctg

SEQ ID NO: 93946 - DNA, 538 bp, Homo sapiens
aggcccagaaaccttgaaactgaccagctcgagcctccttgtaagcctctccagctgtgaaaatcccctggctcgtagtcctatgtcgtccacatgatgcttttcctgcattttgcagacaactgctgatccccaagggcgggccatgcatggctgtatctcccatccagagaacatctacaaagctcacgcagccatggggtctcatagtttgacctgaaactgatggtgactcctgtcaccaacaggagtggtcaaaacatcctttctggagtattaagtgtttgtagaaccctggacatttatggtggcagagtgtgtagcagcctcaaggagaaatcttccccctccattgcccctttctagaatcacaccaaataattggggttctcagcagagtctggaggcaatcccagagactgaggaargggagagccttccacttttccatttctcccaagccattttgtatgcctacaggtgtcagtataaaccaaagaatgtgccttgtctcagatgaaaagttagagtaaccata

SEQ ID NO: 93947 - DNA, 903 bp, Homo sapiens
atggaagaatcttttaaagttaccaagtagatgggtgatgaaggagtccttatattgaaactcataggagctagatgtttaaactttcaacttattttatacttgtttaatttatctatagactatatatttgaaaacattaaaaacaataaaaagttgacaatatgaaatctttgttaaatatactcttattstttctgtgtacttagaagtaagcgttactgccataaataagtgatcagttctctccttgtcacagtagtatctgagtcatttacatatagaagttgaattatcactttttttattttaaaatagttcttacctatagctttactttctttaaaaaatatggcatgcaagactactggatgaatttattccatttgcattttatgttatagtcttctgtagttcctcaaatatttagtatgaccaaaatgatgcagtagttttacatgatatatgtaaatagaaaaatcatttaaactttatgttatagatttatcattttgatgttgctttatatgtaatatatggtaaataatacagatttaaggatttttttgccaattttttgctttttaaaaattgataaggctgggtacagtggctcacgcctgtaatcctagcactttgggaggctgaggcgggcagatcatgaggtcaggagttcgagaccagcctgactaacatggtgaaacctcgtctctgctaaaaatacaaaacagccgtgtgtggtggcgtgcgcctgtaatctcagctacttgggaggctgaggcaggagaatcacttgaacctgggaagtggaggttgcagtgagccgagatcgtgcctgggcaaccaatgtgagactccgtcccaaaaaaaaaaaaaagatatataattatacatatatatggg

SEQ ID NO: 93948 - DNA, 903 bp, Homo sapiens
atggaagaatcttttaaagttaccaagtagatgggtgatgaaggagtccttatattgaaactcataggagctagatgtttaaactttcaacttattttatacttgtttaatttatctatagactatatatttgaaaacattaaaaacaataaaaagttgacaatatgaaatctttgttaaatatactcttattctttctgtgtacttagaagtaagcgttactgccataaataagtgatcagttctctccttgtcacagtagtatctgagtcatttacatatagaagttgaattatcactttttttattttaaaatagttcttacctatagctttactttctttaaaaaatatggcatgcaagactactggatgaatttattccatttgcattttatgttatagtcttctrtagttcctcaaatatttagtatgaccaaaatgatgcagtagttttacatgatatatgtaaatagaaaaatcatttaaactttatgttatagatttatcattttgatgttgctttatatgtaatatatggtaaataatacagatttaaggatttttttgccaattttttgctttttaaaaattgataaggctgggtacagtggctcacgcctgtaatcctagcactttgggaggctgaggcgggcagatcatgaggtcaggagttcgagaccagcctgactaacatggtgaaacctcgtctctgctaaaaatacaaaacagccgtgtgtggtggcgtgcgcctgtaatctcagctacttgggaggctgaggcaggagaatcacttgaacctgggaagtggaggttgcagtgagccgagatcgtgcctgggcaaccaatgtgagactccgtcccaaaaaaaaaaaaaagatatataattatacatatatatggg

SEQ ID NO: 93949 - DNA, 626 bp, Homo sapiens
tctcctttttcttaacccttttctcatttattttgcctctttatggctcaatctgttttaatatcatttgtgtctgacttagttcactatttctgtcttcagttttataagatatgctgttctattcattgagcttttaatttcatagattatatttttatatttttaaaagttctagttttcaaaatttgctagttcatgttttgagttatgttattgtataacattttaaatatccttacaatatatgctgtttcaggtaattttaatatctgaagcctgtgtgggaggaacaaaaaaaattagtatcttrattccattctttgtgtctgatggttataatcacaggtgtttagattttctgtagtaattttgaattacccatttatgttaggcaagacctgagttgatcaagtgtttcttcttcaagagggcatttgtactttccttttgtcatgtgcctgaggtgccatctctttagggtgacaggatccattcctaggctttgtagatacaaagataaataagagttattgcatttacagtaagtttcttagtgactttattatattcattagaatcttaaatttattctacatttacttttattgtaacttgaaaatatc

SEQ ID NO: 93950 - DNA, 854 bp, Homo sapiens; identical to SEQ ID NO: 82132

SEQ ID NO: 93951 - DNA, 741 bp, Homo sapiens
ggatccagttaatgggcccttgaaggtgagtatgggaagcttggacgtcactgaccctgtctaggtttagatgccccaaacattccacctaggctttcgctcagccttattcctggcacccaccttccaccacccaatatgagtccatcctccacactgatgctgtcatgatcttcctgaaacacaacttggcctatcccagcactccctccttcagctccttcaatgtatccttatggagtaaagtccaaactcctaagcctgcctttcaaagtcctccacaacctccttttgagcatgatccttcatgcacctgtccttctacaggccccacctctctggctgactcgtgttgggccctctacccattctccttcctctctgcaacctcccttgccttctcccagggtcttctgttgaagatctgttattctttaaggcctggttctaatctcatgtccttcaaaactccttttaagatcttctagtttgaaatagtctctcaagccactgtatttgtatatcatgtatctacacyagcacttatctgtctgcccagtatcagagttatttataaatgtctgtttctcctattatgttgtatgctcttagaaagcaaaaatagaattgacaaaagaaatatttgatgagtttctcgtatgggagtttataaaaacctttttggaatagttctatagatatctaaacactaagagcaaccatcctgagcctaggacatgc

SEQ ID NO: 93952 - DNA, 741 bp, Homo sapiens
ggatccagttaatgggcccttgaaggtgagtatgggaagcttggacgtcactgaccctgtctaggtttagatgccccaaacattccacctaggctttcgctcagccttattcctggcacccaccttccaccacccaatatgagtccatcctccacactgatgctgtcatgatcttcctgaaacacaacttggcctatcccagcactccctccttcagctccttcaatgtatccttatggagtaaagtccaaactcctaagcctgcctttcaaagtcctccacaacctccttttgagcatgatccttcatgcacctgtccttctacaggccccacctctctggctgactcgtgttgggccctctacccattctccttcctctctgcaacctcccttgccttctcccagggtcttctgttgaagatctgttattctttaaggcctggttctaatctcatgtccttcaaaactccttttaagatcttctagtttgaaatagtctctcaagccactgtatttgtatatcatgtatctacactagcacttatctgtctgcccagtatcagagttatttataaatgtctgkttctcctattatgttgtatgctcttagaaagcaaaaatagaattgacaaaagaaatatttgatgagtttctcgtatgggagtttataaaaacctttttggaatagttctatagatatctaaacactaagagcaaccatcctgagcctaggacatgc

SEQ ID NO: 93953 - DNA, 750 bp, Homo sapiens
tcctttgagcccaggtgttcgagaccagccyggacaccacagggagaccctgtctcaaaaaaaaaaaaaaaaaaatatatatatatatatatatatatacatatatatatatggaaaggttccaaagagcaccatcctgcccaagtcacttctgtatttattctcatagatgcctatttagtctgtaggcatgggctacttgtaggttcagtgccagaaacagcactggatattgcagcacatgtaacattttgcaggtaagatgtaaacccaccttactcccttctttaccctctcctcctgtggcttcttccatctccctcacctattccaggaggctttgatgtaaggttttttgttagtatgctcagtgagtagggagcagtcagtatagggaggtgggtgggagccatgattgtctccctgtcaccacaagtacagctgagactgtgctccatccagtcacactccaacagcagctgccacagcaaccacactctcagcctagtttccaagagtcaaagtggctgtccccaaagccccctggaatgttgatagagctgaaaactcagattaaaaaatgactcgataaaaaattgactgagtcagaacttaaagactatgccttgctcagccctacccccattctgcttctgtttccatctcatccagtgcatgttctagctgttatatgcagtgtaaggacaccacacatgtgaagtaataatgtgatagtcctttagaacttct

SEQ ID NO: 93954 - DNA, 1838 bp, Homo sapiens
ctgtaatctcagcactttgggaggctggagtgggatgatggcttgagggcaggagcttaagaacagcctgggcaacatagaaagaccctgtttctacaaaaataaaaataaaataggccaggggcagtggctcatgcctgtaatcccagcactttgggaggccaaagcaggcaaattacctgaggtcaggaggttcgagaccagcccggccaacgtggtgaaaccccatctctactaaaaatacaaaaattagctgggcatggtggcgtgcgcctacaatcccagctactcgggaggctgaaggaggagaattgcttgaacctgggaggcggaggttgcagtgagccgagattgtgccactgcactccagccccatgacagtgcgaaactccatctcaaataaaaataaatacataagataaaaaataaataaataaaaattagctgggcatggtggcatgcacctataatcccagctactcaggaggctgaggtgggaggatctcctgagtccaggagttcgaggctgcaagtgagctatgatcgtgccagtgttctccagcctgggcaacagagtgagacctggtctctaaaaaataaaaaaataaaaataaaccacagctgtccagcaaccattaatcaccccacctgccttgcccctcccttaatcmagttcccaggccccccaggaattagcaggatccttcttagcccacatgggaaaaagacaaaaagaaagaggtaaagagaagagtgccccccaccatcctcctacagcccagatagctcattagtagcctcccagttcctggggtgcctttctccaacgccccccatccccacccagagattctttacctggtaacttggggttgggccaggtggggaaaggatttgactaggaagggtgcaggcttcaagcacccctgtattctttggtggcagagtccgtcctcccttgtttgagttctactctgcccagcgggtccagagtcctcttgatacccccagactttactcttcccagcccggaattgcctgagaagttccaagcccataagcacacactaccctccaaagcccccttttcttatccttgcatgctttccagtgccccagtccctgtcatttcatccctcctccagggtcctcgggctaaggagaccacagaggactcctgagcactaagtccagctgctcgccatccccgctccagggccgccttccctggagcacaaacggaggagcccagcctttctcagttgtcaggctcagggaggtcagagaacaagaagtctttcagtaccacttttctggccaccactcccatcagcagcctcagggcaagcttcttgccaaagcttgcaagtgacagatcagtgttggaaccccgcctcctgccccaagtctgcggaactcccctgtcctcctggggacagggtccaattctcccttacaccctccagtcttggagatgcttctaaaatcctcctgccctactgctcctggaacactttggcaaagacaagatcaaccagaagagccagcctcagagcgttcacctggcaaggagtgggcaggaagaggaaggaagtagaggggctgacctctcagaaacgcaaggaacaggcagccttctaggacaagtccctctcaagttccaaacatctcccctcctctctgggcccagcaatgccaagacagcaagaaagctggaggaaacctaaggcctctgggaacctttctggagctctgccccaggtcatccttcctcatccttgggggaaaagaatcaaaacccagagagaccaagggccgtgggcaaggtcagtgaacct

SEQ ID NO: 93955 - DNA, 1831 bp, Homo sapiens
aattagcgtgccatcctccttcgtgaatgtccattttattttttaataaaattcaagttcccaatctaggcatagaaatgtttcacagtcttgttccagaccctcactagtgccattttcagccactctccagagattaaatattcctgcaaactcggtttcctcacttccccagagaggccaagtctttttcttttacgacctgggcctttgtatttacttcccctttactcacaatgctctcccctaacctcattttttacccagaaaattccgatgattccactgtgacccaactcagaccacacgtaaccacacgtatcrttacaaagctttccgtttctttcagaagcattagctgctctgttctctgagtcccacatacatacatcgttttaactgaatttacctgtttctcccatctctgtgtttgagacccaagactctggagccaagttcgggccctggctccaattattctaagtgtatgacattgaacatgttactatatctcctcaagcctccattttcatccataagatgggacaacgtatgtaccaatctcaaatgcatgtcatgaggtttccatgggataatgtatagtgcttatcagaacaggaatacatgggaagtgctcaataaatgtgagctattttcattacctttgtatttataatatgcacaggaattaacataggataagctaaaatcagctttaattctttaatatagtaatgatttgtggtttccaccaactatatccatctgcatatgatacattactaactcaacagtcagccagaaatcatccccatcttctaagacaggaagcataggtaaattaatagtcatccatggaatacaccacacatgcacacatgtagagttatctacaggtctgaaagccccactcgactcatgataaaggcccagtctatgccttttctcttttaccttggtttttcccatagcacgaatgctgtgataagcactatagcagactggtcagaagcacagactctgtcaaagctaatttttaaagataggtctagaagcagagggccagttttcaggcctgctcacccatgataggtcaggcagagggggatgagcgggcactcacatccagtgtgtgtgtacgagcaattgccaaagttaaggacgacaaggggtaaatttttttttttttttttgagaccaagtctcgctctgtggcccaggctgcagtggtgcagtggcgcaatcttggctcactgcaacctccacctcccaggttcaggcaattcttctggctcagcctcccgagtagctgggattacaggcatgtaccaccatgcccggctaattttttgtattttttgtagagacggggtttcaccatgttggccaggctggtctcgaactcctgacctcaggtgatccgccccccctaggcctttcaaagtgctgggattacaggcgtgagccaccgcgcccagccaaacaaggggtacatttttaagatagaaggaaaagtcatcagggaaggtgggttagatcagctgtgaaagtcccctcaaatatgcaagtactcacagatgattttcaggaaatactgttcgttttactgtgataatggtatatttgttgttaaaagaaaaaagagtccttatcttttaagagatacttactgatgtcttcatggatgaaatgatgtgatgtttgggatttgcttcaaaaagtcttaaggggtagtgagaaagacaggataagaaaataaatgaaatgtacttattggtgttgtgtatatttgaatccatttcactattctcttggcttttggagatgtttt

SEQ ID NO: 93956 - DNA, 797 bp, Homo sapiens
ttcgaaaggaaggaaaaaacaagaaaaaggggggaaaaagaaaactttgatgttttatttggtttgtaaagctttactgatgacaacagcataatttcaggttagacttttataaaatattgaaaatagctcctagatcgcattagccatgtaaaactctgggtgaaatatccctgacagtcctagaaaaaattggttggttgtttctctcagctccaaaagagctgtttctgcctctgtcttactctgcaggaggtgcggtaggaggtgggaagtcggggagagtggggatggtacaaagatgaaaagtaagggaatggtttttcaggaatttggagtttagcaagagaaacagactcatgagtgatactaacagttctacctkacatatgtatcatgttttttgtttgtttttgttttttttttgtttttcttgcagtttacagtgcaatttcccatcatttattcctcaaaaagccctttaaagtaggcattattagccccattttaagggtgattttaatataagccaggatgtgccatgaaagtaagatgttctttttttttttgttttcttgagtccaggcatttctcctgtatctagcgtccatcatttaaaatctaccactccttaccatattctacacctttccttttgtataaaagtgtgaggtataacccaggctgcaacttcagccctcaacagcaggaactattgtctaatgaaagatgtactccagatggaaaatttctcaagtgaaatggatggaattggtaaatccattgttttctaaatt

SEQ ID NO: 93957 - DNA, 586 bp, Homo sapiens
  misc_feature (1)...(586): n = A,T,C or G
tttgctagctgtctttagcattccttagcttgtagatgcatcatgctgagctctgtcttcatgttccnacggcattctccctatgcgcgtgtctctgtggccaaatttccccttttataaggacactgttatattggaatgaggtcccatcctactctagtatgacctcatcttaactaattacgtcttcaacaaccctacttccaaataagatcacattcggaggtactgggagttaaaaacttcaacacataaattttggtaaggacataattcaatccgtgacatggcgcctcccaccattttctatggtgttttcatttttgggttctgaatcccagattctccaccttgccctgtggtaagaatgctggggctgcagaaggaagatggcagaaaaaatgkgacccacagcagcaggtctgagtcagaggcggtcaggttctagttgtcagaggagtgagaatattgaaaagcccaacctcaacgatggggcctggctggattgggaaaaggttctgtgcattttgttggtggctacaaacacaactatgtatcattctttaattgatgtagatactcttcc

SEQ ID NO: 93958 - DNA, 737 bp, Homo sapiens
gggcatatgtgcagctaccgcacggtgggcggagccatgatgggggtggggcatatgtgcagcgaccgcacggtgggcggagccatggtgggggtggggcatatgtgcagctaccgcacggtgggcggagccatgatgggggtggggcatatgtgcagcgaccgcacggtgggtggagccatgatgggggtggggcatatgtgcagcgaccgcacggtgggcggagccatgatgggggtggggcatatgtgcagcgactgcgcggtgggcggagccatggtggggggtggggcatatgtgcagcgactgcacggtgggcggagccatggtggggggtggggcatatgtgcagcgactgcaccgtgggcggagccatgtggggcggtractgccagctgggcggagccatgatggggggtgggggcgagagacagcatggtggacggagccatgacggggacagcagtggcggggcgggtgactgcacggtgggcagagccacgtggggcggtggagccacatggtgcgttatctgcatggtgggcagggccatctgggcaggggcctcacgggggtggggcctgggcacctgacaaaggcactgtccaggaagcagcggttccgcaggaggccagcccagagctggacgccaacgatgccgaaaatgaagaagacgaagaagcacagcagaaggacgttcccgagcatgggcagcgtatccagcagcagagtgacca

SEQ ID NO: 93959 - DNA, 1988 bp, Homo sapiens
gcatcagtgtgagagcacttatgatggtttcctttccccctcagcataaaaatagcttgtccctctaggaaagatagcctgactttattaatgaaagtgaaattctycctaaggccctaacagtatatttaaaatgaatagaaagcaccaccaatgacagataagatgaattttgcccaaattgtcctggagccctttcctatgtattttggagaatatgaaataaatacatgggttaccatatcttctgaaaagatattgaagacacatttctttactctgactttcctatatgtatttcattctatacttacacaacttaaagttactgttctgagaagtggtttccagttttcccaatgagaagtaaaaatgagttcttaaaccagaaataaaactttcataaagtcactttaagggtttatattgtatcccccagcaacttgtgattaatagattgcatgtttaacattaatatccatgtttaaagagatctctggttacctaacacaatttctttattccttttagcaacatagttcaatttttaaaatacaagtgttattaaaaacatctcaaatctttccttgccttgcttttttctagacaattgtataaacttgaaagcaccaagtagctattacatcttccatttttacttcttggacttagactgttttacttcctatgaagcaaatgcctttgatatatatacactttgataataactggtaacattatctgaccttaaaggttattggtagagatgaacatattataatgttttcttatttctaaaaaaaaaaaaatacatcccgacttcatagcttataattttgcccatatcagatatgaaggtaagaaaagctacacaacctataatttctgtttttgataatagaggattataaaacctgttcagaatttatcctcattctgtaagaatgtgccctattccaacagacatttcagaacatcaattactatgcatgcagtaattttgagatattatttataattccttaaaatgaaactaagatctttctactctaaccagttttaaataaggatccgtcagtgaatccaggactagtactacatgaaattgtcagaaaaaaaaatgtgtctattttttcagggagagaggatcagtggtttacatcagattctcattgttctcattgtgattaacaaaaggctaaattccactgaaataagtaaagcctgctcgtagatattcttccttctatcctttctttcatttcttccagtatcttctagattcaaaattcactggaaagtacattgaactagaagtcacaaaacccaggagctacttccaattctattatttactaaccatgtggctttgggcaaatagcatttctctaagcgttagttctcttatcctaaaatatagataataatgccctacagttccccaccaaatggggagggcatagcctgagttatcagaaaccaacagccgattcccctttcctgaatggagataaacataacaataaatcaacataataattagaatgtaaaagaagaaatcactttcatggttaagacattttaaaatttcactcatcagttatgtaatgaaaaagatgtcaaatcaggaaaggaaaaaatgtgatttatttagtcagtggggaggacagacaccctggttgccaaccatgccggttcagagtgacagccctggaaggctgctctcggataaagtcattcctgtcagcattctcactgacattctttataagatacattttgctaccattacattaaatttaacttatgttataaatgatgggaaagtttttgtcttaaaaatagtcactccatctgtattctgaaattattctatttcaccgccattgtttattgtgctgtctcaaccaagcactgtagtccattccatatgggacacatcagagtagcaatctttttgatggttcaaacctcaaataaaataatgt

SEQ ID NO: 93960 - DNA, 1533 bp, Homo sapiens
tgcatttggccctagtttccctatcaacaaaatctaaagatgagcctaaacaattccatcctcagacagttgaaagaattttggggtcatactctgcattttaccaggttttggggaagacatctaaaaggaatttgacttttgtcctttaaaaatctctaaagcaagccagacatggtggctcatgcctgtaatcccagcactttggaaggccaaggccagaggcttgcttgggaagaccagcctgggcaacatggcaagacctcatctctacaaaaaaattttaaaagttagccaggcctagtagcacacatctgtagtcctagctactcaggagactgaggcaggaggatttcttgagtccaggagtttgaggctgcagttagccatgattgcatcaaagcactccagcctgagtgacagagtgagacccagtctcaaaataaataaataaaacaaaaaaactcctaaaacaaattcctattatattacttatcatgttattttcattaatctgcacatagctccatcttctctactcagctacctattcctttaggtaaggggtgtgttcatctttttacccttgtttctaatacaatgatgggcatatcacagtgcttaataaagttgttgatgtataagtacaataaatgtagaaaaaacagtggtcttgatgtataagaaaagattgtccatactttgagaggttatggtttaaattatagaagagaaaattcaaatgaagagaaattaagtggcatctaagaagtgaatttaaaatactttgtaaacatcctgggaacaattgcaaaagagcattgtgctgcatgagagaaaataggaactgtggacttcccttcatagttcttcatcatccagtatgccaacctgggctttttcacacagtaattttrtggtcctaagagcagcaaaaggatcatcctcaatgtgcaaacacttttgaagtctctgcaatcatcatatttgctactgtcccatgagccaaaaaagtcatatagccaagctcagagtgagtttacgagcatactcgcaaaaggcctggatacaggaagacaaacacattgggaccctagctgcaatccatttatcatagaagggtaaggattcccaataatagcttctactaattccatatcctgtggttccagttgtacaaaaaataaaaccccgatataactgcatgcatacatgcacacacacacagacacatacacacagatctggaaaatatataaaaatgcattaataatgtttaatatatgcttctgtatttttaaaagattttaaatatgtttgttttcttgtattgcatatgtatcttgttattcagcaaaaacatctggaagataataaaatgtgattttggatgaggtttcaccttttgtgctttttatatttcttctgtgttttccatgttttctacaaagcatatgcactcttttataatcagtcaaatacgtgtgtgtgtgtgtgtgtgtgtgtcaactacactttaaaaatgatatggag

SEQ ID NO: 93961 - DNA, 684 bp, Homo sapiens
atgcttctaagctcctcctggggtcctgctgaggctcaatgccagctgaaaccatacccttgctcacatactttcccttctctttccttcttcccttgcttccttagagattcctcctgcaatggcttcctcaaaaaagcattttcataagcaacctcatgtcagcctctgcttccacagaagccaatctgagttaagcaggtgtttaacttagcatgtccaacataaaattcttgttttcttctcatcccctgcccctgaactttctcctttgcctgtcyttcttatctcattgaaagtaacaacacaagtatcaagtgaaaataaaagaatcttctctgatttctttctttctaatgtattattaaattctactgatattaccaatatctattcaaataccaacctagtctaagatactaacatctgtcttctagacttcaactgggttcctaacactgatggtattacacaatttttgcaatgaagtcttacccacctataatccattttccataaagcagcattatcattttctaagtcacacactgtagttttaatacaatcccaaactaacaagcttgaagaaataaaattattgttaaaattgtaaaaattacggagtcttatatttaactaatcatggtacctttcctcaatatcaattataccagacacttccaa

SEQ ID NO: 93962 - DNA, 575 bp, Homo sapiens
ggcctcaagtaatcctcccacctcaatcccccaaaatgctgggatttcaggaacatgccactgcactttattagtgttacctgtcataaagttaattactcataattttatttcagtatatatatatatatatatatatatacacacacacacaccatacacaccatagtagaataaattaattatattttctacaaaaattattttcaatcytttttgttacaatgagtatcattttcacatcttatctcaaaatgtcctgagaggatacagtgccatgcaatttgttttctttgcaaaaatctgttcatgtatctaacaactaaattattttacaaaaaatcatttacactaagataatcacatagttaaatatatgaaagtaaaattttcagaaatgcactggcaatgtattaatgatgttttggtggaaatggttcagataactgaaacctattgataagatagctatgccacatttaaagcaaagaaaccccaaaaacagatgaaatataagtcaaagggcaagctctgtttttcttcctattgctttgtgtggggtcatttaatcatgg

SEQ ID NO: 93963 - DNA, 575 bp, Homo sapiens
ggcctcaagtaatcctcccacctcaatcccccaaaatgctgggatttcaggaacatgccactgcactttattagtgttacctgtcataaagttaattactcataattttatttcagtatatatatatatatatatatatatacacacacacacaccatacacaccatagtagaataaattaattatattttctacaaaaattattttcaatcttttttgttacaatgagtatcattttcacatcttatctcaaaatgtcctgagaggatacagtgccatgcaatttgttttctttgcaaaaatctgttcatgtatctaacaactaaattattttacaaaaaatcatttacactaagataatcacatagttaaatatatgaaagtaaaattttcagaaatgcactggcaatgtattaatgatgttttggtggaaatggttcagataactgaaamctattgataagatagctatgccacatttaaagcaaagaaaccccaaaaacagatgaaatataagtcaaagggcaagctctgtttttcttcctattgctttgtgtggggtcatttaatcatgg

SEQ ID NO: 93964 - DNA, 637 bp, Homo sapiens
tttttaaaaagtgttcctggaataattagatatccatatgtataaaaaagagaagtaggggaggagagggagaagaagaagtaaggaaagaaaagagaaagaaattggatgcatattttaaacaatatacaaaaattaactcacaatgtatcaactgatgtcatatttaaatatagcttatacaattgatatgttagacctaatcaaaatttaaaacttctgtctttgaaagataatattaacaaaatgaagagacaagccatagactaggagaatatattgcaaagtatatatctgataaacaacttatattcataatatgtaaatcatataacaaatgtcaaaatttaataataaattattaagtagtaagaagaaatttgttgtataataataagaaattaaatagtaagaagacaatcaattcaaataaatgagctaaagatttcaacagatacttggccaaagaaaatacaggagtttctgtaaataagtacagggattctgagtatcatttgtcatgagggargcaaaaattaaagcaatgagatttagctacatagctagaatggctaacatttaaaaatatcaaccataccaaatattggcaacaataaggaaaaacaggaaatttgtg

SEQ ID NO: 93965 - DNA, 1048 bp, Homo sapiens
aagggccctgggcacccaggggaggcggctaacactgcagggcagacaagacagcaaggcttcaccaaaggtgaaaatctggtgtggtcctaaatgatcatagaggtttgccaggcagtgatggagatgacaggtgagttggaggtgggattctgggtagagaaagctgtgtgtgcagaggtacagggtgcactaagggatggggcatgcaagggaaggtgtgtcctggcactttgggagctcaccagggtggctggactggaaaagcaggctcagagcagattagcaaagacattgtttgttaagctgtggagtctgaacttcatcttgcagtaagcagagacccagcaaagattcatgaacaaagccaggtgacacattccgatttcttttgcaggatgttgtctcaaggttagagtggagtgagggagttgggtaccccagagaccctcgaaagctcttgaagtaatcctcrttagaagtgatgagggtctgaactgggatgctggggactggatattttttagaagtgaaagagtcagatttgatctgaaaatcttccataaagtgacataacaaagttgaaaatgaaagaaggggaaagattctctagcaagaatcaagcaaaaggaacatggcatagtgatagtttttgtgagataaaatggaattgaaagcaaaagaaaaaataataataattagggtaaagagggaaactacattaaaaaaaaaggaacaatccattgagaagttacaacagccataaactcatcagacgtcttcaaaatacagaaagagagtcatttctcagactggggagtcagggatgcctgagggtacagctaattaggctataagtacccatggctctgccatccagggatgtgagtgctccaggaaacagagctgggtggaagaaagggaccaagctcagtcatgggtggaatgttcatgtgatattcatcactggatagaaatacaggtccagggctcaggagagaggtctcggctggacgtgaagatttgggcatcacagtatcacagtgta

SEQ ID NO: 93966 - DNA, 667 bp, Homo sapiens
ttttacagcaattaaaaaataagacaataacagaactgtggtttgtattaaagatctagtaactctaattaaagaaaaaggaaaggaagaaaatggtctctaaatgtttataggccctactagcatctctgtagctaatctggtttgtttatagagtactagagtcttactcaaaattataagctttgtttataaacccaagctcactgagacagactgatgaggctgctgaagttaccattaaagctacaggaacttttaagaaagtttttgaagacacactgtgtctgaagggaccatgaaaagttartgatcatacttgcctgtgttaccagatgtcttagtctgttttgtgtggctgtaacagaatgtgacaaacttggtaatttataatataaagaacagaaattacttttctcacagttctggaggccaagaagcccaagatcaaggtgctggcaggcttggtgtctggtaagggcctggtctctgcttccaagatgatgccttgaactctgcatcctctggagggaggaatgctgttcctcacaatggcaaaagagtaggagatagcaaactcactccccaaaccccatttaattgtggcattaatccatttaagagggcagagtacttgaatacctaaatacctcccactagggctcac

SEQ ID NO: 93967 - DNA, 549 bp, Homo sapiens
tgtggctcacgcctgtaatcccagcactgtgggaggccgaggccagcggatcacgaggtcagaagatgagaccatcctggccaacatggtgaaaccccgtctctactaaaaatacaaaaattagctgggcrtggtggtgggcacctgtaatcccagctactcgggaggctgaggcaggagaatggcttgaacccaggaggctttggttgcagtgagctgagatcgcgccactgcactccagcctggtgacagagcaagactctgtctcaaaaataaataaataaattaataaataaatattaaatgaaataaatgtctaaatactacaactaaaagttcttccaattttcttaagttttgtgaagtctggagaagttgtctctcattattgtataaagaatattgagtatgagaaagaataaagtaaaaagtaaaattaactagtgatgtacataaaagcatgagaaagttgagattgagaagttatgaagtcaacatagaaaattaatctttttatctcatatttgcaactttaataagttatatcat

SEQ ID NO: 93968 - DNA, 659 bp, Homo sapiens
tatatatattaagtatatatatatacttaataaccttattttttagatcctggaatgaccagtgcattaatattatccatgcaataaatagcttttctcagcattttagaaagtagaatgattgcagaagaggaaactgtaatagtcaacacacgaaaagatgttttaacttcagtggtcatctgggacaggcatattaaaatggctatgaaataccatttcacacttgctatattagcaaacattaaacaatctaacagtacaagtgtgatgaaatgataaatagaaactataccccatttagagaacaatttggcaccatctagtagaattaaaacctagcattgaactcctagrtacacatcccacattgtcccttgagcacgtgcatagggagatatgtgtaagatgtttactgcaacactgtctattataacaaaagttagaaccacctgactttcaaaacaagactggataagatgtggtataaatttaatagaatacaacgtctgaaataaatgaactagatctatatatgactatatggaggaatttctaaaacacaatgttaagtgaaaaaaaagcagaacagtgtatactatgtgacacatattcttaatacaaattttaaaaacacacaaaccaatgctatatttgtt

SEQ ID NO: 93969 - DNA, 935 bp, Homo sapiens
tacatggatcagccttctttcaagtctgacagcattaaaccagctaatgctttcatttcacataagctttctccctcacaggttgaatatagaaaacacctacactcagcacacatgaaagttatttttttccaccagctattagtggaaaatctgtgcaggccaaacagttttatattataatagctctttattttatccctttaattcacaacttctagactaaatatctgaattgccattgtcagttgttttatctctaaaactatttgcatcttcatttgtaagtgttttaaacactttaaggtcttgctatttaagtagttaaaagtagttctaacaaattacacaaaagtgcctgttaataaacatcaatacacgtttcatgaatgaatgggtcaattctaaattctatattaaaaatggagaccacttagaaaactaaaactattgggtaaaactattcgtgtagaaatatgggtgaaattaatattgtaggcagtgagagatttgggctaggagaagggaagagcattcctaatggagtgaacaagtatgggtattctggggtaggttaaaagrttgtgatacataaatagagtgtgattgtaatttttttttttttttgagacagagtctcactctgttacccaggctggagtgcagtcgtgtgatctcggccctctgcaacctccacctcgcaggctcaagcaattctcccgcctcagcctcccaagtagctgggattagcaggtgcctgccaccatatccagctaatttttttatttttagtagagacagggtttcagcatattggtcaggctggtctcaaactcctgacctcaggtgatccacccaccttggcctcccaaagtgctgggattacaggtgtcagccaccgcgcccggcccaattatgttttttcttttttaagt

SEQ ID NO: 93970 - DNA, 617 bp, Homo sapiens
gtaatttcattagtaaaatttaatactttatttttgtttgccttgacattccatacaaggtttggaaattgcttaggatggggctggcatagcatttggtgcaagccgagtctggaggcttagggcattccaaacagtgttttatttgtactttatatgacacttaaaatacatggtcactgatgaaactccatacaagcagatgagatctgtaaataattgatttgaccattgtgtcagctcattttcaaagaagaatactttcatagatttttactgttcacaccaatgcagtaatttstaagaaggtgaatatttaacaccatacaggcagagcatactcgttgactaagataaatgatttctgagttgagttacttaggagaaaattaaattctagtagtgacaattattttttattgtatttctcatcttgtaagttcagcaactcttctatccacaaccactccataaactacttctccttctgcagacttgtttgtgaaagtcatactgcagaatgagatataaacagaccgcccctctttgtattacctgctacatgcagccctatgactactgcattttattttcaaattgaagatcaattgatttcc

SEQ ID NO: 93971 - DNA, 592 bp, Homo sapiens
cagagaagaaaaaggtgggacagtgccaacaccggggtttaattctgagtctgagagcaggacgcatggtgggggcgggtggttctggagctgggccccggcctctgctgggctgaccgtatttgggggcctggctgggcctacttggaggtccccttcttggatttgctggtcaggaaggcctstgactgttgcagggggggcactttgacgcctttctgcttcagctgattatagtagtcgcttctctctgagataattctctacacaagaaacacagccgtcgaggtggccttcccagttcctcaccttggccttgaggccggtctgcacagtccgtgccagctgcccgggacgccaccctctcctcctcctccagagaggcttgctgcagcaggggtgtgctggtgaatacttacaaccggctctccagggggagaaaaaacaaacaaccctcggctttgtggcgttgccagtttctgtggtgggaatattcccacagtggctgattttcagccacggaagtgaagtcacagaatgcggagccgggggcaggtgcacaccaccagcccgcagaagcctgcactaagcc

SEQ ID NO: 93972 - DNA, 559 bp, Homo sapiens
cttctacctgtgaagtttcatcattccttggaacaacagacgaacttgccttctccaaactctgcatctcactgagcctctatatttgcaagtgggtgccaccagcttctctgtgcacagtggttaagatcttgcttgggccctcaagtcagacatatttgggttaagattcacttcctggctgtgtggacctcacagaatttactgtctcttctggagtctttgttcccttgtcagtaaaatggagtgctgtctaactcaggggattgctggaaggatgaactgaggacaaccaagcggagaaccacacacattgtgttagcacggagtattcaattggatgttctaccaagaaatggcatggagaagtgctttgcaagctagactgrccaattcaatttatttattatgatttttgttacttgtaagctccacaagagcaaggatttttgtctgttttgaccacagttataccgcagagcctaaacagtgactggcatatagcaggcactcagtaatatgtggaatagatgaatgaatgctagctagcccaagaaga

SEQ ID NO: 93973 - DNA, 770 bp, Homo sapiens
caggggtggtggaggtggaagaaaatcctcatataagaggactcttgcaggtcaaacctgtggtggttacgaggaaactctgtatctgtatacgatatcatttctattcttaaataagtatattaccttcaatgaatcacttgacctcccsaaactttagttttgtaatcatcatgcaagaagtgaattagttgacttatttttttagacttcaaagtcacctctataagtatcaaacccagaaatgctttctaaaaagcatccagcatgggagaaagatgtaggccagaagactaaatcagtctagtctttccacgttcttctgtctgcttttattctggctgagctggcagctgattacatggtgcccacccagattgagggtgggtctgcctctcccagtccattgactcaaacgttaatctcctttgacaacactctcacagacacacccaggaacaatactttgcatccttcaatccaatcaagttgacactcagtattaaccatcacagggaaacatccatttcttagtcttttcttgcttctaaaggctgcctcctcatagttccttcctctgtcttcaaagccagcagcaaagatttgttctctgacttctgcttccatcatcatatctcattctccaccttccttttgtaaggacccttgtgattacattgggccactagataatccgggataacctctccttctcatgatccttcactcaatcacaactgcaaagtccctcttcccatgtaagatttata

SEQ ID NO: 93974 - DNA, 640 bp, Homo sapiens
gatcctttaagctctaaaatgaaagccttgaatatcttcatcactccatatcctgctttgtttttctccatagcagtgattgtcacccaaagattatttttattatttgttgattgtccaccttactaggatttaagctccattagaacagatactttgttttgttcacttctgtgacaactctctgacatttagaagagtactagaaaatagcaggaattcagtacatagggttgaatgaacgaaatctacctttcttaaccaaacaccacattaaattcatgcattaatagggtcatcgacaagatatcctcaataacacctcctcatgaaacatttacctgggttttaaaaatcctccaaaaacacaaaatatcatttgtgctatgtaactcagcattacatttaggtgacatcccctcccagtttgcctgagacgttcctggttttagcactaaaagccccatgttcatgagaatcccctcagttctgggcaaaaagatgattggttaycctaattaaatatgttagttgctgagaaaggcactgtaattacattactttagatcaattttgcaaataaaagtttgaagacacaaatccacctgtggtctccttcccatatcagctgtgttgcaca

SEQ ID NO: 93975 - DNA, 640 bp, Homo sapiens
gatcctttaagctctaaaatgaaagccttgaatatcttcatcactccatatcctgctttgtttttctccatagcagtgattgtcacccaaagattatttttattatttgttgattgtccaccttactaggatttaagctccattagaacagatactttgttttgttcacttctgtgacaactctctgacatttagaagagtactagaaaatagcaggaattcagtacatagggttgaatgaacgaaatctacctttcttaaccaaacaccacattaaattcatgcattaatagggtcatcgacaagatatcctcaataacacctcctcatgaaacatttacctgggttttaaaaatcctccaaaaacacaaaatatcatttgtgctatgtaactcagcattacatttaggtgacatcccctcccagtttgcctgagacgttcctggttttagcactaaaagccccatgttcatgagaatcccctcagttctgggcaaaaagatgattggttaccctaattaaatatsttagttgctgagaaaggcactgtaattacattactttagatcaattttgcaaataaaagtttgaagacacaaatccacctgtggtctccttcccatatcagctgtgttgcaca

SEQ ID NO: 93976 - DNA, 659 bp, Homo sapiens
caagttgaaattgtttttcttttagtgggtaagttaggtttatttacattaatttttattactcatacatttggcctcagttgtcacagaaatattttataattacatgtgttgctttatttgttatattccttttttctatgaggtgtcttctatgctctttaaaacatttattttctggcatttatgaatgtttatatttgttttaattctctattattttacttgaacccgggaggcagaggttgcagtgagctgaaattgcgccactgcgctccagcctgggccacagaacgagactccgtctcaggggraaaaaaaaaaaaaaaaaaaaaaggtattgttttaactcccaccaattaacccatacaacagccatgcttattctactttcctctttctctctcccattttccatccaatttttattacaacatgtaacatttgtatatttgtcttataacttcaccttagtgtttttgtaatacatttggatatattaaaatcctcagtataataagttcttttggccaggtgtggtggctcactttgggggtactttgggacgttgaggcaggaggatggcttgagcccaggagctcgagaccagcctgggcaacacggggagaccccatctctaccaaaaaaaaaaaaaaaaa

SEQ ID NO: 93977 - DNA, 659 bp, Homo sapiens
caagttgaaattgtttttcttttagtgggtaagttaggtttatttacattaatttttattactcatacatttggcctcagttgtcacagaaatattttataattacatgtgttgctttatttgttatattccttttttctatgaggtgtcttctatgctctttaaaacatttattttctggcatttatgaatgtttatatttgttttaattctctattattttacttgaacccgggaggcagaggttgcagtgagctgaaattgcgccactgcgctccagcctgggccacagaacgagactccgtctcagggggaaaaaaaaaaaaaaaaaaaaaaggtattgttttaactcccaccaattaacccatacaacagccatgcttattctactttcctctttctctctcccattttccatccaatttttattacaacatgtaacatttgtatatttgtcttataacttcaccttagtgtttttgtaatacatttggatatattaaaatcctcagtataataagttcttttggccaggtgtggtggctcactttgggggtactttgggasgttgaggcaggaggatggcttgagcccaggagctcgagaccagcctgggcaacacggggagaccccatctctaccaaaaaaaaaaaaaaaaa

SEQ ID NO: 93978 - DNA, 659 bp, Homo sapiens
caagttgaaattgtttttcttttagtgggtaagttaggtttatttacattaatttttattactcatacatttggcctcagttgtcacagaaatattttataattacatgtgttgctttatttgttatattccttttttctatgaggtgtcttctatgctctttaaaacatttattttctggcatttatgaatgtttatatttgttttaattctctattattttacttgaacccgggaggcagaggttgcagtgagctgaaattgcgccactgcgctccagcctgggccacagaacgagactccgtctcagggggaaaaaaaaaaaaaaaaaaaaaaggtattgttttaactcccaccaattaacccatacaacagccatgcttattctactttcctctttctctctcccattttccatccaatttttattacaacatgtaacatttgtatatttgtcttataacttcaccttagtgtttttgtaatacatttggatatattaaaatcctcagtataataagttcttttggccaggtgtggtggctcactttgggggtactttgggacgttgaggcaggaggatggcttgagcccaggagctygagaccagcctgggcaacacggggagaccccatctctaccaaaaaaaaaaaaaaaaa

SEQ ID NO: 93979 - DNA, 647 bp, Homo sapiens
ggactgcttgagctcaggagtttgagaccagcctgggcaacatggccaaaccccatctctacaaaaaaaggaaattagccgggcatggtggtatatgcctgtagtcccagctacttgggaagctgagctgggaggatgtcttgagctctcaaggcagaggttgcagtgagccgagatcataccactacactccagcctgggcaacggagtgagaccctgcttcaaaataaataaataaatatatagatatagatatatctctataataatgtatctactyactcttgtagatattagatcccagcttcttctcattagttagagtaagaataaagcagaaaggtttgagaattgaaaacagaaccttgctgcttctgacatcatgaccttgagaatctcaaacgcttagctaaagtaaaatatacatacattttgaaagataaaagattaaaataagtttgatggagactattaaaatatagtattgtttaggttatgaagacatacttagcatagtttcataatttaaataaaatcaggtcttaagagggtgctacaaaacaagttcccacatcatcttacttcacctagcccatctcagcacacaacacactcttgaatattaaaacatctagcaaatgctacat

SEQ ID NO: 93980 - DNA, 647 bp, Homo sapiens
ggactgcttgagctcaggagtttgagaccagcctgggcaacatggccaaaccccatctctacaaaaaaaggaaattagccgggcatggtggtatatgcctgtagtcccagctacttgggaagctgagctgggaggatgtcttgagctctcaaggcagaggttgcagtgagccgagatcataccactacactccagcctgggcaacggagtgagaccctgcttcaaaataaataaataaatatatagatatagatatatctctataataatgtatctactcactcttgtagatattagatcccagcttcttctcattagttagagtaagaataaagcagaaaggtttgagaattgaaaacagaaccttgctgcttctgacatcatgaccttgagaatctcaaacgcttagctaaagtaaaatatacatacattttgaaagataaaagwttaaaataagtttgatggagactattaaaatatagtattgtttaggttatgaagacatacttagcatagtttcataatttaaataaaatcaggtcttaagagggtgctacaaaacaagttcccacatcatcttacttcacctagcccatctcagcacacaacacactcttgaatattaaaacatctagcaaatgctacat

SEQ ID NO: 93981 - DNA, 647 bp, Homo sapiens
ggactgcttgagctcaggagtttgagaccagcctgggcaacatggccaaaccccatctctacaaaaaaaggaaattagccgggcatggtggtatatgcctgtagtcccagctacttgggaagctgagctgggaggatgtcttgagctctcaaggcagaggttgcagtgagccgagatcataccactacactccagcctgggcaacggagtgagaccctgcttcaaaataaataaataaatatatagatatagatatatctctataataatgtatctactcactcttgtagatattagatcccagcttcttctcattagttagagtaagaataaagcagaaaggtttgagaattgaaaacagaaccttgctgcttctgacatcatgaccttgagaatctcaaacgcttagctaaagtaaaatatacatacattttgaaagataaaagattaaaataagtttgatggagactattaaaatatagyattgtttaggttatgaagacatacttagcatagtttcataatttaaataaaatcaggtcttaagagggtgctacaaaacaagttcccacatcatcttacttcacctagcccatctcagcacacaacacactcttgaatattaaaacatctagcaaatgctacat

SEQ ID NO: 93982 - DNA, 647 bp, Homo sapiens
ggactgcttgagctcaggagtttgagaccagcctgggcaacatggccaaaccccatctctacaaaaaaaggaaattagccgggcatggtggtatatgcctgtagtcccagctacttgggaagctgagctgggaggatgtcttgagctctcaaggcagaggttgcagtgagccgagatcataccactacactccagcctgggcaacggagtgagaccctgcttcaaaataaataaataaatatatagatatagatatatctctataataatgtatctactcactcttgtagatattagatcccagcttcttctcattagttagagtaagaataaagcagaaaggtttgagaattgaaaacagaaccttgctgcttctgacatcatgaccttgagaatctcaaacgcttagctaaagtaaaatatacatacattttgaaagataaaagattaaaataagtttgatggagactattaaaatatagtatkgtttaggttatgaagacatacttagcatagtttcataatttaaataaaatcaggtcttaagagggtgctacaaaacaagttcccacatcatcttacttcacctagcccatctcagcacacaacacactcttgaatattaaaacatctagcaaatgctacat

SEQ ID NO: 93983 - DNA, 414 bp, Homo sapiens
  misc_feature (1)...(414): n = A,T,C or G
gaagattagaattttgcatctatgttatcaacccaaatatcatcactgattgtgwtgctcgatgtggatgactataaacaggcccagcctcattctgttgtccaggctgtagtgcagtctgctcctctgcctcctgggctcaaacgatcctcccgcctcagccctccaagtagctaggaccacaggggcatgtcaccacacccagctaatttttgtatttttagtagagaaagaagttcaccatgttgcccaggctggtcttcaccttctgagctcaagtgatcacctgcctcggcctcccaaagtgcttggnnnnnnnnnnnnnnnnnnnnnnnnnnnnnnnnnnnnnnnnnnnnnnnnnnnnnnnnnnnnnnnnnnnnnnnnnnnnnnnnnnnnnnnnnnnnnnnnnnnnaa

SEQ ID NO: 93984 - DNA, 358 bp, Homo sapiens
gagtgtttaaaaacatttaattttgaatttttcttgttagtataatagaaaaacagttgacttttatacattgatcttgtattctccaaccttgccaagctcactctctactagctcttttttgttgatctcattggattttctacataaacaatcatgctgttagaacgttctttragactaaaaagacttcaagacgaatactattttaaaagcagaatttttttatatgcatatgtaatcttaatgaaagcagctcacggagaaaggtcagtactttaacaattcatttctgacgatggttctttagagcaccagaaggtgatgagtgacacaaaagtttccttggcagacacgt

SEQ ID NO: 93985 - DNA, 358 bp, Homo sapiens
gagtgtttaaaaacatttaattttgaatttttcttgttagtataatagaaaaacagttgacttttatacattgatcttgtattctccaaccttgccaagctcactctctactagctcttttttgttgatctcattggattttctacataaacaatcatgctgttagaacgttctttaagactaaaaagacttcaagacsaatactattttaaaagcagaatttttttatatgcatatgtaatcttaatgaaagcagctcacggagaaaggtcagtactttaacaattcatttctgacgatggttctttagagcaccagaaggtgatgagtgacacaaaagtttccttggcagacacgt

SEQ ID NO: 93986 - DNA, 2297 bp, Homo sapiens
tgcatataaaattttgataaaattttataaccttcaaaaaggttttataaattcatattttcaacaaaattacaagaagcccatttgcctaaatattcatcatcccgctttataatctttgccacatgaataagtggtatcctgttatttcaattttcactctcttaatttaaagtaaagctgagtattttttcatgtttatgggccgcctttatttcctttacttaggaactttcttttcataactctcttcatttttatgcaaacttaaktcaatattttagataaattttgctaattgtatataattaacattatgaacctccagtagcatttccccatactcaaaaacatgtgtctgccgggtgtggtgggtcacacctgtaatcccagcacttcgggaggctgaggtgggtggatcgctgaaggtcaggagtttgagatcagcctggccaacatgatgaaaccccatctgtactaaaaatacaaaaattagccaagtgtggtggcaggtgcctgtaatcccagctacttgggaggctgaggcaggagaatcgcttgaacctgggaggggaggttgcagtgactcgagattgcaccactgcactccagcctgggcgacagagcaaaactctgtctcaaaaaaaacaaaaacaggccaggtgtggttgctcacgcctgtaatcccagcactttgggaggccgaggtgggcagatcatgaggtcaggagtttgagaccagcctggctaacatggtgaaaccctgtctctactaaaaatacaaaaattagctgggcatggtggcgcacacctgtaaatcccagctactcaagaggttaaggcaggagaattgcttgaacccaggaggcagaggttgcagtgagccgagattacgccactgcactccagcctgggcaacagagcgaggctctgtctcaaaacaaagaaacaaacaaccatgtgtcttgaatgttttacccattctctgatgggttctatcccatgtaacccctcataaagagagttgcaccatttcataatattaagttgaaccataagaaattgctgagattcaaccactttgacctataacaacagcaatttcacatgattgaacctagtactattccctaatagtaaaaacaaaaggtagtttaaactaatttttatttagcagttgtgaataaataaagattagagatttttctgagtgaaatggatctctaagatggtatctaagtaaaggtgtgaatgccatagttaaatgaggaactatattggaccctttgcctcttactgacactatggcttacctctcttctttgtttttatttttgttttgtaagaacggcgataaagcagcatcacccagcgagttgacttgtcctccaggttgggaatgggaagatgatgcatggtcttatgacataaatcgagcggtggatgagaaaggtaacattgtacatctgtgacctgattggggctctgcagcagggccttggttaaccaggataaagtttccttgggagggaggggcctcacttctgttggtctatggcaggagtccccagcccccaggccagactggtaccagttcatggccttttaggaacaaggccgcacagcaggaggtgagcggcgggcaagtgagcattaccacctgagctctgcctcctgtcagatccgtggcagcattagattctcctaagagtgcgaaccctattgtgaactgcacgtgagaggggtctaggttgtgtgctcctcatgggaatctagccatcctccctctaccccacaaccctgtccatagaaaaattgtctcccatggaaccggtccttggtgacagaaaggttggggaccgctggtctgtggcatctgggtcatgtggtaccgtctgtgactaaccaaatgtagaatccaagggaaaggcaagtgtatggacaagtgctaagtgagcagggggtgttaagagtgaaaaacatcaggtgatggggccaactggtcaggttttgagatgcttggggatccaggatgagaatttgggagggagctggagtcaagattttctctattctaaccacaccccataacctccctgggaacatcacattcagggcccccctgacgcagaaaagagaactgtaaactacccttaaagtcttcctatgcagcaatgatgcagactactgatatagcttctgatatttgtctttttctgaaccataattaaagttaagtgaacaatagcatttggaattctcaaaagagaaaatctgattcattactttccttatgc

SEQ ID NO: 93987 - DNA, 713 bp, Homo sapiens
  misc_feature (1)...(713): n = A,T,C or G
tgcatttcaatagtcctcttactctgggacagtttgttctttccatcagagagggctacacaccggccggttgcaatttgagggctctgtgctctgtacaacttgttctgctctcatgggttttgctcatcctggagcaatgaacattatgatcatagaaagggtaacttcttgaactgaaagtagattgctccccattaacatgcctcttgccctgcctttcacactgtggggcagtttcacttgmaaaatatttatgaggtgcttgttacatctggctaggtgccagggagataaagaggaacagggccgggtgcggtggctcacgcctataatcccagcactttgggaggtcgaggcgggtggatcacctgaggtcaggagttcgagaccagcctgaccaacatggagaaaccacatctctactaaaaaaatacaaaattagccaggtgtggtggcgcatgcctgtaatcccagctactcgggaggctgagacaggagaatcgcttgaacccgggaggcagaggttgcggtgagccaagatcacaccattgcactccggcctgggcaacaaaagcaaaactctgtcacaaaaaaaaaaaaaaagaaaaannnnnnnnnnnnnnnnnnnnnnnnnnnnnnnnnnnnnnnnnnnnnnnnnnnnnnnnnnnnnnnnnnnnnnnnnnnnnnnnnnnnnnnnnnnnnnnnnnnnt

SEQ ID NO: 93988 - DNA, 713 bp, Homo sapiens
  misc_feature (1)...(713): n = A,T,C or G
tgcatttcaatagtcctcttactctgggacagtttgttctttccatcagagagggctacacaccggccggttgcaatttgagggctctgtgctctgtacaacttgttctgctctcatgggttttgctcatcctggagcaatgaacattatgatcatagaaagggtaacttcttgaactgaaagtagattgctccccattaacatgcctcttgccctgcctttcacactgtggggcagtttcacttgcaaaatatttatgaggtgcttgttacatctggctaggtgccagggagataaagaggaacagggccgggtgcggtggctcacgcctataatcccagcactttgggaggtcgaggcgggtggatcacctgaggtcaggagttcsagaccagcctgaccaacatggagaaaccacatctctactaaaaaaatacaaaattagccaggtgtggtggcgcatgcctgtaatcccagctactcgggaggctgagacaggagaatcgcttgaacccgggaggcagaggttgcggtgagccaagatcacaccattgcactccggcctgggcaacaaaagcaaaactctgtcacaaaaaaaaaaaaaaagaaaaannnnnnnnnnnnnnnnnnnnnnnnnnnnnnnnnnnnnnnnnnnnnnnnnnnnnnnnnnnnnnnnnnnnnnnnnnnnnnnnnnnnnnnnnnnnnnnnnnnnt

SEQ ID NO: 93989 - DNA, 713 bp, Homo sapiens
  misc_feature (1)...(713): n = A,T,C or G
tgcatttcaatagtcctcttactctgggacagtttgttctttccatcagagagggctacacaccggccggttgcaatttgagggctctgtgctctgtacaacttgttctgctctcatgggttttgctcatcctggagcaatgaacattatgatcatagaaagggtaacttcttgaactgaaagtagattgctccccattaacatgcctcttgccctgcctttcacactgtggggcagtttcacttgcaaaatatttatgaggtgcttgttacatctggctaggtgccagggagataaagaggaacagggccgggtgcggtggctcacgcctataatcccagcactttgggaggtcgaggcgggtggatcacctgaggtcaggagttcgagaccagcctgaccaacatggagaaaccacatctctactaaaaaaatacaaaattagccrggtgtggtggcgcatgcctgtaatcccagctactcgggaggctgagacaggagaatcgcttgaacccgggaggcagaggttgcggtgagccaagatcacaccattgcactccggcctgggcaacaaaagcaaaactctgtcacaaaaaaaaaaaaaaagaaaaannnnnnnnnnnnnnnnnnnnnnnnnnnnnnnnnnnnnnnnnnnnnnnnnnnnnnnnnnnnnnnnnnnnnnnnnnnnnnnnnnnnnnnnnnnnnnnnnnnnt

SEQ ID NO: 93990 - DNA, 713 bp, Homo sapiens
  misc_feature (1)...(713): n = A,T,C or G
tgcatttcaatagtcctcttactctgggacagtttgttctttccatcagagagggctacacaccggccggttgcaatttgagggctctgtgctctgtacaacttgttctgctctcatgggttttgctcatcctggagcaatgaacattatgatcatagaaagggtaacttcttgaactgaaagtagattgctccccattaacatgcctcttgccctgcctttcacactgtggggcagtttcacttgcaaaatatttatgaggtgcttgttacatctggctaggtgccagggagataaagaggaacagggccgggtgcggtggctcacgcctataatcccagcactttgggaggtcgaggcgggtggatcacctgaggtcaggagttcgagaccagcctgaccaacatggagaaaccacatctctactaaaaaaatacaaaattagccaggtgtggtggygcatgcctgtaatcccagctactcgggaggctgagacaggagaatcgcttgaacccgggaggcagaggttgcggtgagccaagatcacaccattgcactccggcctgggcaacaaaagcaaaactctgtcacaaaaaaaaaaaaaaagaaaaannnnnnnnnnnnnnnnnnnnnnnnnnnnnnnnnnnnnnnnnnnnnnnnnnnnnnnnnnnnnnnnnnnnnnnnnnnnnnnnnnnnnnnnnnnnnnnnnnnnt

SEQ ID NO: 93991 - DNA, 704 bp, Homo sapiens
cctttctttcccatgcatattgatggcgtaccagcaggtggcagtgtaacaccttgcatgatacatttcaggcccatgttttttgctgagaaaagcagtggtcaacgtttggtytttgcttggagtttatgagacaattataggattgtggtgaagacagcgcagttaaggctgaggtgggtattgcaatataaatctctgtcttcacttttaacatatttcaaactgttttttggattgctttttcacatttagtttttcagctcaaaagaatcatagaattaaaaaagacatgaaataatgtacatttccagttattattaaatgttccttacttttctcctctttcttccatgccattagctctctgacaagcataacttatgtagttgagtgttactgaggaacacttggtttgcaaaatatgaaacttttgttgagcaacatttatgacaggcaaggtttagaatttcatgctataagcctatggcttcttcattttccataattaaataacttctgagaatgtgacttctcagaaggatgcatgagaattaaaaccagcagctctcaaagatcagatatccacagttaagaaaaacccttgaaataaacacttacatgggtcagtttttccttctgacaaacattggcttatttcaacctaatagaataattagataatatctagcttattataggat

SEQ ID NO: 93992 - DNA, 724 bp, Homo sapiens
aattctttctgatattattgcacatctagatgggttacttcccacactttaccccctctctctctcttcactgggaaactataatttcagtagttgattgaaaagttgatcagcaaagccacataaatgaagaaggacttttgaaatagcctccaaatatttttctggctaggcactaaggaacacagttgacagctgtgtagtattttctgctacaggaataacattccaacatcaagttaaaactaatgcaacaaaaatattcaatactaagagaaagtcacatggcggattgcacctttaaaaaaaaaaagtgtttttaggccgggcgcgttggctcatgcctgtaatcccagcattttaggaggccaaggcaggcagattactggaggtcagargttcgagaccagcctggcaaatatggtgaaaccctgtctctaccaaacaaacaaaaaactagccaggcccagctacttgggaggctgaggcaggagaattgcctgaacctgggagggggaggttgcagtagctgagatagtgccactgtactccagcctgggtgacagggactccgttaaaaaaaaaaaaaaaaaatttcaagtagcatttagctgagttccagaataaaatttctcctgtgtgcagacagaacttgtgtagttgtaaggtctcagaagggtaagtgcacctgaatggtgaaatgctaaccatttggaaatatatt

SEQ ID NO: 93993 - DNA, 529 bp, Homo sapiens
tgatctcattcttttttatggctgcatagtattccatggtgtatatgcaccacattttctttatccagtccaccactgatgggcaccgtttgattccatatctttgctaccatgaatggtgctcccaacagcatttgtsttttatcagtgaattctttaaaaatcagaaagccttcaagaggtgaagaatgaacatctaaaacaattcttaaggccaggaacagtgtcaaacaaggggccttctcagggagtgtacttttttattatatcttgtggtcagaagaataatgcccccgaaagatgtccacatcctaattcccagacgctgccttgtcaccgaatgtgacaaagggactttttagatgtaggatcttcaaatggcgagcttatcctggattttcctggattattcaggcagactcggtgtcatctcaagggttcttataagagggaggcagagggtctgagtcagaggaggcaacctgatgatgaaagcaggggtgagtgtgtgtgtgtgtgtgtgtgtgtg

SEQ ID NO: 93994 - DNA, 653 bp, Homo sapiens
tgagtatctctgtaagagtttggactctgtttggtggtatattcatttccaytaccctgatctctaaaagaactctaagtgggtgaagcaatctcattaagacttaccaagacagaaacaaaataatttctacacataaaaatgaatatgggccaggtgtggaggcccatgcctgtaatcccagcactttaggaggccaaggcgggtggatcatctgaggtcaggagttcaagaccagcttgtccaacatggtgaaaccctgtctctactaaaaatacaaaaaaaaattagccgggcgtggtggcaggcacctgtaatcccagctactcaggaggctgaggcagaagaattgcttgaacccaggaggcagaggttgcagtgagctgagatcatgcctttgcactccattctgggctacaaagcgagactccatctcaaataaataaataaataaataaaaatgaatatgaaatttctgctttcatttctgttttctcaggttctgttttattcagcattataaatacctaaatcaaaataacttttggatagtattgatttagataacatgatatctaattaaagattccaatgtttaaattttatacagaaggacatgttatcctttgcaatattagctctttcctggatcc

SEQ ID NO: 93995 - DNA, 633 bp, Homo sapiens
acatgtataagcaactcactccaaaaaggcaattctgagcctctctgccatttgcttagttcacgtaaccagcacttttcctctccattcagtcatcctcttatttattcattcatttattcaacaaaacttcatttagcatttatgatgggcctggcactgggaatacagaaatggctcacgttaaatccctcaaggagcttatgttctggcaaagaacatatctttgcaaagaattttccaacacattttaaaatatagtgttgttgttttggttttttgttttttgttttccttccttccttccttccttccttccttttctttcttccttcttttctttctctttctttcttttctttctttctttctttcctttcttcctctttctctctctctttcatagaaactgagtctcgctctgttgcccaggctggagtgcagtggtaggatcatggctcactgcagactcaagttcctggattcgggtaatcctcctgcctcagcctcygaagtatctaggactacatgcacacacaccaccacacccagctaatttttaaaaaagtttttggtagagacagggtctcattatgttgcccaggctggtcttgaactcttgggctcaaggga

SEQ ID NO: 93996 - DNA, 484 bp, Homo sapiens
atgaattcgggctaatacagacagaaaaacmccagaaaagacagacagatggatgatagatgattgctagctagctagcttgatgatagatagcatagatagatagattgatagatagatagatagaagatagatggatagatagaagatagatgtgatgattgatagatagatagattgtttgggggagggatagatagacagacagatattactttcacttctttctatctctccctcttttttcctggtattctctcttcacttcctcctctctctggtctgtctagctgtctgcctgtgtttcatttcctttgtgtctgcctgtaggtaggtcttgtctctctctgagcatctctccatgggactcggtgtatttctccccaactgtctctggctgtctgcccttctttctttctctctccatctccctgccttctttttgcctttcttctactctggtgatggttgctgcccttgctgc

SEQ ID NO: 93997 - DNA, 484 bp, Homo sapiens
atgaattcgggctaatacagacagaaaaaccrcagaaaagacagacagatggatgatagatgattgctagctagctagcttgatgatagatagcatagatagatagattgatagatagatagatagaagatagatggatagatagaagatagatgtgatgattgatagatagatagattgtttgggggagggatagatagacagacagatattactttcacttctttctatctctccctcttttttcctggtattctctcttcacttcctcctctctctggtctgtctagctgtctgcctgtgtttcatttcctttgtgtctgcctgtaggtaggtcttgtctctctctgagcatctctccatgggactcggtgtatttctccccaactgtctctggctgtctgcccttctttctttctctctccatctccctgccttctttttgcctttcttctactctggtgatggttgctgcccttgctgc

SEQ ID NO: 93998 - DNA, 484 bp, Homo sapiens
atgaattcgggctaatacagacagaaaaaccccagaaaagacagacagatggatgatagatgattgctagctagctagcttgatgatagatagcatagatagatagattgatagatagatagatagaagatagatggatagatagaagatagatgtgatgatrgatagatagatagattgtttgggggagggatagatagacagacagatattactttcacttctttctatctctccctcttttttcctggtattctctcttcacttcctcctctctctggtctgtctagctgtctgcctgtgtttcatttcctttgtgtctgcctgtaggtaggtcttgtctctctctgagcatctctccatgggactcggtgtatttctccccaactgtctctggctgtctgcccttctttctttctctctccatctccctgccttctttttgcctttcttctactctggtgatggttgctgcccttgctgc

SEQ ID NO: 93999 - DNA, 484 bp, Homo sapiens
atgaattcgggctaatacagacagaaaaaccccagaaaagacagacagatggatgatagatgattgctagctagctagcttgatgatagatagcatagatagatagattgatagatagatagatagaagatagatggatagatagaagatagatgtgatgattgatagatagatagattgtttgggggagggatagatagayagacagatattactttcacttctttctatctctccctcttttttcctggtattctctcttcacttcctcctctctctggtctgtctagctgtctgcctgtgtttcatttcctttgtgtctgcctgtaggtaggtcttgtctctctctgagcatctctccatgggactcggtgtatttctccccaactgtctctggctgtctgcccttctttctttctctctccatctccctgccttctttttgcctttcttctactctggtgatggttgctgcccttgctgc

SEQ ID NO: 94000 - DNA, 1118 bp, Homo sapiens
catttcaaaaatagagaaacttyttatgttctctcatattatagattttctcagatcccttagtgctcatgtcttacaaatgttaagatattgtaaaagactgctctctctactattcatttagagaaaccaacaatgttattataaaacagctggtttaactacaggagagaagtacaaattggcctcaggtatgaaactactgcgacagggagcagcaaaacaaggcaagatgctgaggaaaaacactatggcagctgcactggtgggaaggtgccttaggatataatgataggaaatgttttttaaaaaaatttttaaaagatcctggcagtagaaaaaccaactcagcttttagcattaaggagctatcatcagaatgagagcatagtagcctagtaattcattaggttataaaacttctgtaacctagttgggaaacacaagtaaataatagtcctatttaactttttttttttttttttcgagatggagtcttgctctattgcccaggccagagtgtaatggtgccttggctcattgcaacctctgcctcctgtattcaagcgattctcctgtcttagccttccgagtagttgtgattacaagtgtgagacaccacaactggctaattttttgtatttttagtagagacaaggtttcaccatgttggtcaggctgttcttgaactcctgacctcaagtgacctgcaagccttggcctcccaaagtgcttggattacgggcatgagccaccatacccagccttatttaactttttaaattaagattttcttaagctcaaatttaatccacacatatcttggtcattaagactcatcacattgggtaagagtaagttgtcttggtatagtgttggaaagtattaagtatctttattatttttttcatcctctagaccattatatggaggagatggagtgggaaaaataatataaagtaatgtaaatgtgacattgtaagtgtaaatatgtaaatgcagtagtcctccattatgtgtgagagacatgttccaagaccccagtggatgcctgaaggggtgaatagtaccaaaaccacttgctgtctattgaaacacatttctattcctgtcttcta

SEQ ID NO: 94001 - DNA, 2339 bp, Homo sapiens
cagtcccccttgggacttttgtcacacaacctcaaggtacttctggcctgtactccctccctctgcccctatagttttcctgcccaaggttttcagcagatctcactgtgtcctttaggaggagagggggagttcccagttgcaaccatgaaaagtccaaaagtccaagatcccaaggcagccttgttctccagcagtgccctcctctctcagaccctgytcttgtcacatgcctgggttgcatcttgcatgctcctgcggagctgctctgtgtctcgctggtactgctgccggacatgttccacctcctggtcacgggaggctacctcctctttcagggcccccttcagggctgtcaactcccgctcccgcagcctcagctgctcctctactcgctgtttcccctccaagacctcttccagaagttcccgggtctctaacaggtcctggagaaaataaaggaagaagtacaggggtgaccatattagaatccatctgtttatcaattcactgagtcaaaaaatatttatcgtattaggcacagtaccaggtgctctagtaccagtactggagcccagaatgataggtttcctttatcctaactctagtcccaacacaccattgaatctacctgaaagcacactgagtacctgtaatcagccacccactcctcatactttggggaaaccatggatgagcagacttgaggatgctccaactgagaaaaagcagaggctggggcatatgaccccagaccctaccttcagtaacacctccttagcaggctcaggaccctggacatgtttcagcttgttctgcagctccatcacctgggtctccagcccatgtcgtaaatcttcaccctggtccaagaggcgcttcatgttctggagcctaataatagataacattattgcacactatgtgtcaggcagttctctaaacgcatcatatattttaattcatatttattaatgcatttaaacttccttccttcaaatcttgatgaggcctcccctgatttttgcaacctgccccgctacaacctggccctcctgatctgccttaccctgttgtatttactgccttctcgtgtgttacaaatttacttgcaaaatatgtttgtttactgtctgttccctctcagtagaaactaagcttctggagagcgagcccttcatctatagggttcactgatgtgtcttgggaacctagattaatgcctgtcacagcattcttgatgaaacatctgctgaatggatgactgaatccttacaatgatcctgtgaggtaggtactattattaagtctattttatagcttaagaatctgagacagaggcaaacccaggtagcttaactccaaatcatgcactaccaccattattgataaagaaggtagagagaaaggccctatcctgtccttaaaccaacactgcccctttcagcttctggagatttccttctgtctccttcaaccctaggggcaaagagggagtggcctctaaacctggcctaggcccccaagcagcccgaggtgcgccaccagctgcactcactccttgttgctctgctgggcctcccccttcctcctctccagcagctcctgcagtcggctgcactcttctgttttctcctccagctgccgctccagcccaacttgggatggctctagcttctgccgcttctgtaaaagggaatgagagtacagcaggtagagggtagggaaagcctctcagaaagactcagaataatgggaatgtctaacactcattggacacttgctgtatgatagacactatacttaggaccttatgtgtattatccacatctaatcctcataactagccttggtacttgtgatgatgtaaaatatgttcacaaattatctgacatttctttcaaaagataaagcctaattctgtttgcctcgagcacgggcttgacttaggggcttccttctaacaaacagaaaaaggaggacgtgatgagtaaattctgatgttaggtcataaaaaggcattgcagcttttctcttggatccctcactctgggaaaaaaatagctgttatattgtgaggatactcaaaagtagctctgtgaggaaggccaaacagccaggaactgaggtttacaaccaacagccatttgattaagctgggtttttattatttttattgattttttttttttcttggtgttttgttttgagatggagttttgctcttgcctaggctggagtgcaatggcgagatctcagctcaccgcaacctccacctcccgggttcaagcaattctcgtgcctcagcctcctaagtagctgggattacaggcatgcat

SEQ ID NO: 94002 - DNA, 2339 bp, Homo sapiens
cagtcccccttgggacttttgtcacacaacctcaaggtacttctggcctgtactccctccctctgcccctatagttttcctgcccaaggttttcagcagatctcactgtgtcctttaggaggagagggggagttcccagttgcaaccatgaaaagtccaaaagtccaagatcccaaggcagccttgttctccagcagtgccctcctctctcagaccctgctcttgtcacatgcctgggttgcatcttgcatgctcctgcggagctgctctgtgtctcgctggtactgctgccggacatgttccacctcctggtcacgggaggctacctcctctttcagggcccccttcagggctgtcaactcccgctcccgcagcctcagctgctcctctactcgctgtttcccctccaagacctcttccagaagttcccgggtctctaacaggtcctggagaaartaaaggaagaagtacaggggtgaccatattagaatccatctgtttatcaattcactgagtcaaaaaatatttatcgtattaggcacagtaccaggtgctctagtaccagtactggagcccagaatgataggtttcctttatcctaactctagtcccaacacaccattgaatctacctgaaagcacactgagtacctgtaatcagccacccactcctcatactttggggaaaccatggatgagcagacttgaggatgctccaactgagaaaaagcagaggctggggcatatgaccccagaccctaccttcagtaacacctccttagcaggctcaggaccctggacatgtttcagcttgttctgcagctccatcacctgggtctccagcccatgtcgtaaatcttcaccctggtccaagaggcgcttcatgttctggagcctaataatagataacattattgcacactatgtgtcaggcagttctctaaacgcatcatatattttaattcatatttattaatgcatttaaacttccttccttcaaatcttgatgaggcctcccctgatttttgcaacctgccccgctacaacctggccctcctgatctgccttaccctgttgtatttactgccttctcgtgtgttacaaatttacttgcaaaatatgtttgtttactgtctgttccctctcagtagaaactaagcttctggagagcgagcccttcatctatagggttcactgatgtgtcttgggaacctagattaatgcctgtcacagcattcttgatgaaacatctgctgaatggatgactgaatccttacaatgatcctgtgaggtaggtactattattaagtctattttatagcttaagaatctgagacagaggcaaacccaggtagcttaactccaaatcatgcactaccaccattattgataaagaaggtagagagaaaggccctatcctgtccttaaaccaacactgcccctttcagcttctggagatttccttctgtctccttcaaccctaggggcaaagagggagtggcctctaaacctggcctaggcccccaagcagcccgaggtgcgccaccagctgcactcactccttgttgctctgctgggcctcccccttcctcctctccagcagctcctgcagtcggctgcactcttctgttttctcctccagctgccgctccagcccaacttgggatggctctagcttctgccgcttctgtaaaagggaatgagagtacagcaggtagagggtagggaaagcctctcagaaagactcagaataatgggaatgtctaacactcattggacacttgctgtatgatagacactatacttaggaccttatgtgtattatccacatctaatcctcataactagccttggtacttgtgatgatgtaaaatatgttcacaaattatctgacatttctttcaaaagataaagcctaattctgtttgcctcgagcacgggcttgacttaggggcttccttctaacaaacagaaaaaggaggacgtgatgagtaaattctgatgttaggtcataaaaaggcattgcagcttttctcttggatccctcactctgggaaaaaaatagctgttatattgtgaggatactcaaaagtagctctgtgaggaaggccaaacagccaggaactgaggtttacaaccaacagccatttgattaagctgggtttttattatttttattgattttttttttttcttggtgttttgttttgagatggagttttgctcttgcctaggctggagtgcaatggcgagatctcagctcaccgcaacctccacctcccgggttcaagcaattctcgtgcctcagcctcctaagtagctgggattacaggcatgcat

SEQ ID NO: 94003 - DNA, 1785 bp, Homo sapiens
tgagtgtctgcagcctgtgtggagcaggactgtcccaagaactggactgcccactgcagatgggttaaaagagagaaacaaatgtctgcatttctgaagccactgtcttggggatctttttgttacagcagcttagcattactccaaggaatacattcaaatacatgtctttcaaagaaaattataaaaatatatttaaaagccaaattagaaataatgtgttcctatctatatcacagttccccttcattatcatacaagacaaaatcctgtaagtgggcaactatctgttgcaaaatgcagagtctaaactaatgtttgtcaaatatgagttataatttgttttctcataacttttataatgtaataatgtctatctttttatgtttagtaaaaattaatcatttatttaaaatatttctccataggattctgtcaaatagaaacagcatatttactcagctgtttttagtaagtagcttttttctctggcaaaaagttgaaaaaatgcaccgcaatatttttctttccacaacagagactgtttttgttttctacccagtcattcaggaatcaagaggataaaaccaatcattttagacacacttttgtttcttctcacttttcttatgccttgagtccccacaagttcattgtcttttctcaggttaattttaggtggcaaagggtaagcagcgaggggtcaagtgggtattggccagttgaaatggcagactttttaaaggtagtgcacatgagaataaatcaagatctatgactgtaatcatgacggcaagcatctccccagactgaaggcccttgaggagatgtcacatctatctcctccccacaaactctctgtccccactgtacccagtgtctaagcagtaaacatatttgctccattaaagaggttcaacaaatgatgtgtggtaggtaattgatgtgggtaagtaatgatggcatctgaccactgcatcagttgactgtatggacttatgtatgggtatcagtctgagcagaaaaagcattgctgagctttcatgccactgtccttgatggtctggcataggatccaccttctcttctaatcccagccccaaatctctttcccaggataaaacattttttcattcccatcctcaggcattagtagtgtgaactaatgcttcacttccactgatcttcaacaaaggcatccattagagccttttcccatgtcacaatgatgtgatgaccacaggacgtgatgtaatgttttgttttcaatatttagaaccagaagttaagacaacccattcattctggaatttcttactcctttcaaactgctgtcttcaagttcatccttagacgctgcaatccccctagctccaggagagtcagagctttttcttgatctcaaaccttttcattgatgtaatgtttctagttttacaccataaactttttcatagcaataaactactgttttgataaaagtcaaaagaaayagatgtttgctctacttaacaagtcaatttggagaaataagtacgtatcaattaaacaaatgttatcaagtttgggggtgaattttgtgacaaaatattactttagggtttagagaagcctagttctagttcaccttcctcagagctgggcacacagtggtcttgcctgctggccttgagcagggacataaggagagaggatggacttgagcggtggttgctccaagttcaaacttctgtcctgcaacataccaggtaggtgggtgaccttgaagagttcaatgaatccttc

SEQ ID NO: 94004 - DNA, 2103 bp, Homo sapiens
gggttaatttgtattttattttattttttgagacagtctcattctgtcacctaggctggagtgcagtggtgcartcaggctcactgcagccttgaccacctgggctcaagtaatctcacttaatttttatttggtttaagaaagtcttggttgagggtggtggcttatgcctgtaatctcagcactttgggaggctgagagaggtatattacttgaggccaggagtttgagatcagcctgggcaatatattaagaccctgcctctaccaaaaaacagagtgaatgtgtggaagacaatttttccacagactgggagtgagggaataattttaggatgattcaagtgcattacatatattgtacactttatttctattattactacatagtaatatataatgaaatgattctacaactcactataacgtagactcagtgggatctctgagcttgttttcctgcaactagactgtccatctggggtgatgggagacagtaacagaatatcaggcattagattctcataaggagtacacaacctagatccctcgcatgcacacttcacaacagagtttgtgctcctatgagaatctaatgctgctgctgatctgacaggacatggagctcaggtggtcatgcaagccatgggaggggctagaaatacagatgaagtttcccttcactcgcctgctgctcacctccagctctgtggccctgtggttggagactgctgctcaagtgcatttgaaaggatccatcccacgccattcttcagagtcatctttactgctgcagtggtcaacttgtagcacccccaagctcgcaggacatatgcttcaactggcatttcacaatcaacactatgtggcagcttgagtcattgtgagctcacttcctggaaatcaccagcatcccatatcccattagcaaggagctcagcactgctccttggataaccaaacctattcccaaatcccatctgtgtgcgtctatctcctggtacccttcctagcatcaattctgtatttgtaggagtccaatcaggagacacaaactactcaaaagtttaaactagaatgagcaagatggctcacacctgtaatcccagcactctgggaggccaaggtgggtggactgctttgagctcaggagtttgagaacagtctgggaaacatggcgaaacctcgtctctacaaaaaacacaaaaatcagctgggtgtggtggcacttacctgtaatcccagctactcgggaggctgaggcaggagcattgcttgagcctggcaggtggaggctgcagtgagcagaggttgtgccactgtactccagcctgggtgacagtgtgagacccggtatcaaaaagaaaaaacatatatatatatatatatatgtaaatttaatataaaaagtattaattttggccaggcaaaatggctcatgcctgtaatcccagcactttgggaggccaaggcagacagatcacctgaggtcaggagttcgagaccagcctgaccagcatagagaaaccccatctctactaaatatacaaaatcagctgggcatggtggcacatgcctgtaatcccaactactcgggaggctgaggcaggagaatcgcttgaacccggcaggtggaggttgcgctgagccgagatagtgccattgcactccagcctgggcaacaagagtgaaactccatctcaaaaaaaaaaaaaaaaaaaaaggtattaatttttacagaggatcagcacaatgagggacacactagcacaaagtaaagacaactctagagaatacggaactagcagaggccaggcattgtggctcatgcctgtaatcccagcaatttgggaagcctaggcaggaggatcgcttgaggccaggagttggagaccaatcagtgctaaatagtgagactctgtgtctaccaaaaaaaagagacattagccaggtgtggtggtggtgcacacccatagttccagctacttgggagtctggggtgggagaaatcccttgagcctgggaagtctacactacagtgagccaagattgtgccactgcactccagcctgggcgacagagtgagaccctgtcttagaaagaa

SEQ ID NO: 94005 - DNA, 629 bp, Homo sapiens
aggccaaggcactggctgtcagtggcagagtttggctgtgacctttgcccctaacacgaggaactcgtttgaagggggcagcgtagcatgtctgatttgccacctggatgaaggcagacatcaacatgggtcagcacgttcagttacgggagtgggaaattacatgaggcctgggcctctgcgttcccaagctgtgcgttctggaccagctactgaattattaatctcacttagcgaaagtgacggatgagcagtaagtaagtaagtgtggggatttaaacttgagggtttccctcctgactagcctctcttacaggaattgtgaaatattaaatgcaaatttacaactgcagatgacgtatgtgccttgaactgaatatttggctttaagaatgattcttatactctgaaggtgagaatattttgtgggcaggtatcaacattggggaagagatttcatgtctaactaactaactttatacatgatttttaggaagctattgcctaaatcagcgtcaacatgcagtaaaggttgtcttcaactgagctgttctagttttctcttmcccagcactgtcatctagattttccatttcagtgattcccacccctcggtctactagcaacaa

SEQ ID NO: 94006 - DNA, 871 bp, Homo sapiens
ctcagcctcctgagtagctaggactacagctgtgtgagccaacacacctggatacttctttttagtagagacaaggcctcgctgtcttccccaggctgatctgtaactcctgaccttgtgattctcctgccttggcctcccaaaatgcagggagtataggcgtggaccaccacgcttggcttggcctcctccagttcttcacttctttagatgtctgttaactccttgttactttctgtggctgttcagtgggttaatacacactaggtggacaccaaaggcctggaacattactgggcaaaaacagtgagccaatccacacggaaagcaccttcttctcagcgtctttcactgctagccagatgctgagaccctgcccactccctgtgagtctccacatgcttccagaagccttagttggtggatgtcagcttcactgcacaaggagccacactcttcccactgccctggaaggggatgtccatattgtgtattagctggagactctgggcagcatcaacccttgcttgttctcctgatgaccagcagcccttcttgaattaaactggttgtagccagtaaagacagccacattccctttaagtaaaatactaaaactatacaggcatgtaacactttttaaatatttccatctgacattttaaaagttacatcttttkggggagctaggtcagattgatgagagattttctcataacacatcccctctctccctatgaaggaagagactagtgcagcgtgttctggaatctgacagcatcaaagggtggataacgatcaagggcctgtgggtgatgagtgaccttccctgtgttgaggaagcctgcataatgggcacccaagtgaagga

SEQ ID NO: 94007 - DNA, 2126 bp, Homo sapiens
cactggaacctcatgtagaccagggtgaaatcaaagggccttagaaactcacagctccacatccaggcacaggtcctttgaggatctcagacacaagtccacagcttatcagggacgcggctctgtgaaagccaaataacccggccccctaccctgctgccatctctctcctctgtrcttactctggcccacatcagctcctctgggccactccctttctgggccctgttcttttccttagtcctcctggctccatccagcctgcagcgagttcccagacctcccccaccccaggctgccacaagcaccttcttaggcatctactctgctttcagagtgagcttctcctcagatctttattggggaaaaaaggaggggcagcccctgatcttggaaaagacggtcacaaatgcgacctggaatgagatcctgttgaggactaaagaagtccagcagggcctgaacagtgatttctactgttagaaacatggagagggcaaacaccatgggcaaagaaagccctgactcagaaacagactcactgcattccaggtgcagcctcgtcagctctaagactgggcaaggggatcctagaagggatggccccctgcactgggacctgtcccaggctctgccaacagcctggcacttctaggaaaaccagaggagtcagctcttcctgtggaaggcagacaaacttcccctccattggtcctgggtgcctctttaggtccggaagagcagctgaggagctccctgctttgtgccttgctatgtgcacccaaaaagctcagtagaatttggggagaatgtatgagtcactgctgattccagggagagtgtctcttagcattgtttgtggccatagtcctcggtgcaggagagatcggctgacatttccaggaagcagaggattcagcttctctcacagctcaggctgggggaggaaaacagaaattcagaaatattttagagacccccatcaaaagcctggagaagctttggaatcccagtagaaattctgtgagtggaattgaagtcaggccgtcccttcagatgggctctgaaagctactctgacctggacagcagaggagcaccttcagaagcacaggcaaccagaacatggtagaaagacccccgaaactgcaggattctcactggggtcctgaggatggtgcaggattcccccaagaggttcatttttctcccaaattcttcagatacacagcttgcaccattcatgcttccagattgaaaagtctccctccttatgtctgaccacactgctcctctctgggctctgccccagctcacacactcagattcactcttcccaagctggtattctgagggaagcccatcctgtttgtgagtaatgatgcttcaccttccagtaggagtcaagattgtgtctgccctctctgccctcaaagacactgtgatgttttacgagtctgcattatctcttttgtaattaggtttttttaatttttaaactcaatgtagaaggaagtctttcaatccttttgtctagatgcccacaaaatacctgccatgttttatgttgtcttggttccctcctagggtcccattagaacagtcagtactgtccagcccaacctccacctcactttgtaatttaggcctgatttctttcagtgatgccttgaccttaaccttgagataaattacaccctcagtagttcctgtcttccacctgaatgggcatatgatctaccatgttaggtagcgcaaaacccaggtgaccagtggatacactgagatttttattgtgtttttagggatgacatcactgtcttcttaaagctgttttaactctgaaaagttttgatacttttgatgtggccaaaggttctccaataaagataccatatataaatatatgtatttctaatgtctgaaacagattaaaaccttccctgtatcactatgaaggtcacatattggtaaaactttaccaatatttatggaataagtgaataaatgagttttagtccttcaccctattattaattctttcactttcataaatccatatctaatttaatcacttaataagaagaaagttgaaaactcaatcaccgttaactgggtggaagttca

SEQ ID NO: 94008 - DNA, 2126 bp, Homo sapiens
cactggaacctcatgtagaccagggtgaaatcaaagggccttagaaactcacagctccacatccaggcacaggtcctttgaggatctcagacacaagtccacagcttatcagggacgcggctctgtgaaagccaaataacccggccccctaccctgctgccatctctctcctctgtacttactctggcccacatcagctcctctgggccactccctttctgggccctgttcttttccttagtcctcctggctccatccagcctgcagcgagttcccagacctcccccaccccaggctgccacaagcaccttcttaggcatctactctgctttcagagtgagcttctcctcagatctttattggggaaaaaaggaggggcagcccctgatcttggaaaagacggtcacaaatgcgacctggaatgagatcctgttgaggactaaagaagtccagcagggcctgaacagtgatttctactgttagaaacatggagagggcaaacaccatgggcaaagaaagccctgactcagaaacagactyactgcattccaggtgcagcctcgtcagctctaagactgggcaaggggatcctagaagggatggccccctgcactgggacctgtcccaggctctgccaacagcctggcacttctaggaaaaccagaggagtcagctcttcctgtggaaggcagacaaacttcccctccattggtcctgggtgcctctttaggtccggaagagcagctgaggagctccctgctttgtgccttgctatgtgcacccaaaaagctcagtagaatttggggagaatgtatgagtcactgctgattccagggagagtgtctcttagcattgtttgtggccatagtcctcggtgcaggagagatcggctgacatttccaggaagcagaggattcagcttctctcacagctcaggctgggggaggaaaacagaaattcagaaatattttagagacccccatcaaaagcctggagaagctttggaatcccagtagaaattctgtgagtggaattgaagtcaggccgtcccttcagatgggctctgaaagctactctgacctggacagcagaggagcaccttcagaagcacaggcaaccagaacatggtagaaagacccccgaaactgcaggattctcactggggtcctgaggatggtgcaggattcccccaagaggttcatttttctcccaaattcttcagatacacagcttgcaccattcatgcttccagattgaaaagtctccctccttatgtctgaccacactgctcctctctgggctctgccccagctcacacactcagattcactcttcccaagctggtattctgagggaagcccatcctgtttgtgagtaatgatgcttcaccttccagtaggagtcaagattgtgtctgccctctctgccctcaaagacactgtgatgttttacgagtctgcattatctcttttgtaattaggtttttttaatttttaaactcaatgtagaaggaagtctttcaatccttttgtctagatgcccacaaaatacctgccatgttttatgttgtcttggttccctcctagggtcccattagaacagtcagtactgtccagcccaacctccacctcactttgtaatttaggcctgatttctttcagtgatgccttgaccttaaccttgagataaattacaccctcagtagttcctgtcttccacctgaatgggcatatgatctaccatgttaggtagcgcaaaacccaggtgaccagtggatacactgagatttttattgtgtttttagggatgacatcactgtcttcttaaagctgttttaactctgaaaagttttgatacttttgatgtggccaaaggttctccaataaagataccatatataaatatatgtatttctaatgtctgaaacagattaaaaccttccctgtatcactatgaaggtcacatattggtaaaactttaccaatatttatggaataagtgaataaatgagttttagtccttcaccctattattaattctttcactttcataaatccatatctaatttaatcacttaataagaagaaagttgaaaactcaatcaccgttaactgggtggaagttca

SEQ ID NO: 94009 - DNA, 2126 bp, Homo sapiens
cactggaacctcatgtagaccagggtgaaatcaaagggccttagaaactcacagctccacatccaggcacaggtcctttgaggatctcagacacaagtccacagcttatcagggacgcggctctgtgaaagccaaataacccggccccctaccctgctgccatctctctcctctgtacttactctggcccacatcagctcctctgggccactccctttctgggccctgttcttttccttagtcctcctggctccatccagcctgcagcgagttcccagacctcccccaccccaggctgccacaagcaccttcttaggcatctactctgctttcagagtgagcttctcctcagatctttattggggaaaaaaggaggggcagcccctgatcttggaaaagacggtcacaaatgcgacctggaatgagatcctgttgaggactaaagaagtccagcagggcctgaacagtgatttctactgttagaaacatggagagggcaaacaccatgggcaaagaaagccctgactcagaaacagactcactgcattccaggtgcagcctcrtcagctctaagactgggcaaggggatcctagaagggatggccccctgcactgggacctgtcccaggctctgccaacagcctggcacttctaggaaaaccagaggagtcagctcttcctgtggaaggcagacaaacttcccctccattggtcctgggtgcctctttaggtccggaagagcagctgaggagctccctgctttgtgccttgctatgtgcacccaaaaagctcagtagaatttggggagaatgtatgagtcactgctgattccagggagagtgtctcttagcattgtttgtggccatagtcctcggtgcaggagagatcggctgacatttccaggaagcagaggattcagcttctctcacagctcaggctgggggaggaaaacagaaattcagaaatattttagagacccccatcaaaagcctggagaagctttggaatcccagtagaaattctgtgagtggaattgaagtcaggccgtcccttcagatgggctctgaaagctactctgacctggacagcagaggagcaccttcagaagcacaggcaaccagaacatggtagaaagacccccgaaactgcaggattctcactggggtcctgaggatggtgcaggattcccccaagaggttcatttttctcccaaattcttcagatacacagcttgcaccattcatgcttccagattgaaaagtctccctccttatgtctgaccacactgctcctctctgggctctgccccagctcacacactcagattcactcttcccaagctggtattctgagggaagcccatcctgtttgtgagtaatgatgcttcaccttccagtaggagtcaagattgtgtctgccctctctgccctcaaagacactgtgatgttttacgagtctgcattatctcttttgtaattaggtttttttaatttttaaactcaatgtagaaggaagtctttcaatccttttgtctagatgcccacaaaatacctgccatgttttatgttgtcttggttccctcctagggtcccattagaacagtcagtactgtccagcccaacctccacctcactttgtaatttaggcctgatttctttcagtgatgccttgaccttaaccttgagataaattacaccctcagtagttcctgtcttccacctgaatgggcatatgatctaccatgttaggtagcgcaaaacccaggtgaccagtggatacactgagatttttattgtgtttttagggatgacatcactgtcttcttaaagctgttttaactctgaaaagttttgatacttttgatgtggccaaaggttctccaataaagataccatatataaatatatgtatttctaatgtctgaaacagattaaaaccttccctgtatcactatgaaggtcacatattggtaaaactttaccaatatttatggaataagtgaataaatgagttttagtccttcaccctattattaattctttcactttcataaatccatatctaatttaatcacttaataagaagaaagttgaaaactcaatcaccgttaactgggtggaagttca

SEQ ID NO: 94010 - DNA, 792 bp, Homo sapiens
gatccattcctataaatgatagggaaaagactcagcctgaaatgggttttttatttctctttcttttgagacagagtctcgctctgtcacccaggctggagtgcagtggcacgatctctgctcactgcaacttccatctcctgggttcaagcggttctcctgcctcagcctcccaagtagctggaattacaggcgcccaccaccatgcccagctaatttttgcatttttagtagacagggttttgccatgttggccaggctggtctcaaactcctgacctccagtgatctgcccgtctcagcttcccaaagttctgggattacaggtgtgagttactgcgccaggcctaaaatggaattgacctcagtggcaaagctcttcatcacgcagcatcctaagtgttgactatcagacaatcagaatgaccctgggcttgggcaaaatggtctccatccatcactttgaagtcattccctaccaccctycactcacccctacgattccccagaactaacttcctgctctctctccccagctgtctaaagacctcgttaaacatcctcgcaataactaactgtgtgcttttggaatcagacttgaagcatctgtccaagtacccgagcattggtcaactaaagaccctggacctgagtggcaccagactggccaatttcagccttgtgccgctccaagttctcctagaaaaagttgcagccacccttgagtacctggacttagatgactgtggcatcgtagactcccaagtcaacgccatcctgcctgccctgagcc

SEQ ID NO: 94011 - DNA, 720 bp, Homo sapiens
gctaattaaaaaatatgtatattttgtagaggccaagcaccagtggctcatggctgtaatcccagcactttgggaggccaaggcaggtggatcacttgaggtcaggagtttgagaccaacttggccagcatggtgaaaccccacctctactaaaaatacaaaaagtagccaggcaagttggcagttggatgtaataccagatactcaggaggctgaggcatgagaattgcttgagcctgggaggcagaggttgcaatgatttgagatcgtgccactgcactccagccttggaaacagagcgagactccawccccccttcaataaagaatattttatagagatgggtttttgccgtgttgtccaggttggtctcagacccctgggctgaaatgatcctcccgccttggtctcccaaagtgttggggttaaaggcatgagtcactgctcccttcaagaattttgaaatgacataaaccaaagcacaatccaattttttgaaataaagacaaaactgcatttagaggaaaaaatgcaaagcttcaaattgttcatatgagaaaaaaaacaaaacaggatataactctatgccatcttaggctgcactgtcaccatcccagaccagctgactgtaggtcagttgggagtgtccttacagagagattagtgacttaccagatctggactcagtttggagggtgctcagacctcaggaagaaataa

SEQ ID NO: 94012 - DNA, 686 bp, Homo sapiens
tggatagcaaggggccggaaagttggggtagcggtaagagggaagaagtcaacaggatgtagaaactgcattctttggtgagttggtgcattgcagggcccttcagatcagctggcatcagtagtttcactgacatgcagaacctgaaagaatatctcasatgaaaaagttaatgttttacaatgcttaaatcgttgtctgcagggaagttaaggggaactgtaatctaaggtctatatgattttggaacagtaggctgccagcaaccatgaggaaccaggtcagagagcaagaagacctcctgatgaatgctgaatgtgttgcaagcttggtttatttttgtttctctccctcccttcttcactgattaaatttataaagtttatcgatgtggtttcaatttcttccaaagaagccttaacctaagcactgagaccactcacgccctcagtagcacctctcctccaccagaacgagcatgtaatctgctaccttaggttatataaaatcccaaagaccattgaatacattgagatttttattctgatatcgtagtgatgactcctctgtttttataaagctttttaaagtagaaagcatttttatattttgatgtggccaaagatcccctaacaacactactttcagattttatttttctgtctaatgtcgggaacagatcaaat

SEQ ID NO: 94013 - DNA, 686 bp, Homo sapiens
tggatagcaaggggccggaaagttggggtagcggtaagagggaagaagtcaacaggatgtagaaactgcattctttggtgagttggtgcattgcagggcccttcagatcagctggcatcagtagtttcactgacatgcagaacctgaaagaatatctcacatgaaaaagttaatgttttacaatgcttaaatsgttgtctgcagggaagttaaggggaactgtaatctaaggtctatatgattttggaacagtaggctgccagcaaccatgaggaaccaggtcagagagcaagaagacctcctgatgaatgctgaatgtgttgcaagcttggtttatttttgtttctctccctcccttcttcactgattaaatttataaagtttatcgatgtggtttcaatttcttccaaagaagccttaacctaagcactgagaccactcacgccctcagtagcacctctcctccaccagaacgagcatgtaatctgctaccttaggttatataaaatcccaaagaccattgaatacattgagatttttattctgatatcgtagtgatgactcctctgtttttataaagctttttaaagtagaaagcatttttatattttgatgtggccaaagatcccctaacaacactactttcagattttatttttctgtctaatgtcgggaacagatcaaat

SEQ ID NO: 94014 - DNA, 1147 bp, Homo sapiens
tatttgggtggctggtgtgggagaatcacttgagcacagaagattgaggctgcagtgagccatgctcataccactgctgtactccagcctgggcaaaagagagacactctgtccaaaaacaaaaacaaaatcaatcaaaaaggatctttgaccgtaattttaaaccaatcacatcctcttccacccaaatggagacatggctgtggggggtgcatgcctgtagtcccagctatgtggaaggctgaagcatgagaattgcttgaatcttggaggccgaggtaacagtgagccaagatggtgccactgcattccagcttgggcgacgatgtgagactcagctccctcagcaccaaaaaaaattatatgacccaggtgatcatgggttacatgaagatttctattgtgttttcttagggactgtcatctctgtctttgaaaactgttttaactctgaaatattttgataaatttgatgtggccaaggatccctcaacaaggataatttcaagttttctttctttctgtctaatatcaggaagagattcaacccttccctgtctcacactcaggactttgaaggacacatattagtaaaactccatgtttgtgaagggaatcagtgaatgagtcctggactttcaccctatccctaaatctttcattttgatggattaatatctaattcgatcagttawtctttaagaaagccaaaaatccaataaggattaactgggtagagattaagaagtctagtcaaatgtagctctctctgtctctcagttcaatctagcctattccccaggctggagtggagtggtataatgtcagctcactgcaacttctgcctcctgggttcaagtgatcctcctacctcagcctccctagtagcttggactacaggcgcagaccactgcacctggctaatttttgctgtcttagtagaggcagggttttaccatgttggccaggctcgtcttgaattcctgatctcagatgatccacctgcctcggcctcacaaaatgctcagattacaggtgtgagtcactgcacccagccaaaatggttcagtttgaacatgtgtaacaggagtgcattggaaacatctatcttgcgaatgatgcataacagtgtcacatagctttcaaa

SEQ ID NO: 94015 - DNA, 1147 bp, Homo sapiens
tatttgggtggctggtgtgggagaatcacttgagcacagaagattgaggctgcagtgagccatgctcataccactgctgtactccagcctgggcaaaagagagacactctgtccaaaaacaaaaacaaaatcaatcaaaaaggatctttgaccgtaattttaaaccaatcacatcctcttccacccaaatggagacatggctgtggggggtgcatgcctgtagtcccagctatgtggaaggctgaagcatgagaattgcttgaatcttggaggccgaggtaacagtgagccaagatggtgccactgcattccagcttgggcgacgatgtgagactcagctccctcagcaccaaaaaaaattatatgacccaggtgatcatgggttacatgaagatttctattgtgttttcttagggactgtcatctctgtctttgaaaactgttttaactctgaaatattttgataaatttgatgtggccaaggatccctcaacaaggataatttcaagttttctttctttctgtctaatatcaggaagagattcaacccttccctgtctcacactcaggactttgaaggacacatattagtaaaactccatgtttgtgaagggaatcagtgaatgagtcctggactttcaccctatccctaaatctttcattttgatggattaatatctaattcgatcagttattctttaagaaagccaaaaatccaataaggattaactgggtagagattaagaagtctagtcaaatgtagctctctctgtctctcagttcaatctagcctattccccaggctggagtggagtggtataatgtcagctcactgcaacttctgcctcctgggttcaagygatcctcctacctcagcctccctagtagcttggactacaggcgcagaccactgcacctggctaatttttgctgtcttagtagaggcagggttttaccatgttggccaggctcgtcttgaattcctgatctcagatgatccacctgcctcggcctcacaaaatgctcagattacaggtgtgagtcactgcacccagccaaaatggttcagtttgaacatgtgtaacaggagtgcattggaaacatctatcttgcgaatgatgcataacagtgtcacatagctttcaaa

SEQ ID NO: 94016 - DNA, 1463 bp, Homo sapiens
  misc_feature (1)...(1463): n = A,T,C or G
tctcaattctgcaagtgaaaggcatagggtctttgaatgagtaaaaaaataaaaccctactatatgctgttttccagaaactcaattcacctataagcatacatgtagatggaaagtgaaggggtagaataagatattccatacaactggaaaccaaaaacagcaagagtagctgtacttatatcaggtaaaatagatgccaaatctcacaatgcactcaggtaaaacagaatacaaatctgagcttgtaaaatattagactacgcttacacaaactatgcctagaaagaacatacatcaaaataatagaagccaaaaatgacaaatccacatgcaacatcatattgaatgaagaaacgttgaaagtattcctgctaggaactacaagcagacaaaaatgctcactttatccacttgtaatcaacataggactgaaaatgtttgtcagagcaatctggtaagcaaaaggaataaagtataattaaattggaaagaaggaagtgaaactacctgtgtttgccaatgatgtgatcatatgtgcttagaaaaccggaaagattccaccaagacttgtagatgcgataagtgaattcacttaaatctaaggtacaaaattaatatgtacaaatcagtaccactgtttgatatcaacaacaagcaagctgagaatcaattcaagaactccatcccttcacaatagttgcaaaacaacaacaaaaacagtgacaataacaaaaacaacctaggaatacacttaaccattaggtaaaggatctctatcagatgaactacaagacactgctgaaaaaatcatagacaacaaaaaagtagaaaaatatcccatgctcatggattgacagacacaatattgtgaaaatgaccacactgcccaaagcnnnnnnnnnnnnnnnnnnnnnnnnnnnnnnnnnnnnnnnnnnnnnnnnnnnnnnnnnnnnnnnnnnnnnnnnnnnnnnnnnnnnnnnnnnnnnnnnnnnnggagtctcctgtggccccaaacaacctgcaatctcagttcccgcaatgaacctggctgggagagactaaagggatatttctaattagacaccattatgttcactttcaaaagagtaatgaggggccacacatggaggctcacagctgtaattccaacactttggcaagccaaggcagaacaatcacttaagccatagagttgccgaccagcctgggctacgtagtgagaccctgtctctccaaaaaaattcaaaaaatagatggatgtgatggcgcacacctgtagtcccagctgctctgcaggctgaggtggaaggatggcttgtgtctgggaagcagaagttacagtgatctgagactgtgccactgtacccccagcctgggcagaagagcaagrctctgtcttaataaaataaataaataaataaaatattacccactttggaatggagtctagagaaacaaat

SEQ ID NO: 94017 - DNA, 1142 bp, Homo sapiens
  misc_feature (1)...(1142): n = A,T,C or G
cttgcttgaggtttctggttccatcaatcccagggagctggagaaggagagcggatttccctccaggactcccgcggataccgacctgagcgcatccgctaaagtcctcgcagcagcgcgttcacaggctccagagcaggcctgcgggtcctgttccctcccccacccctgcccctcctctcagacccagggcaatttccctacaagtgtgctcacgctgggccctatgagccacggcgccaattgactggatttcaatcagaactccatctcccttaaggaccgctttggataaaagcagaagtaacctgcaatctagatgctgatgccaaaccgtaatgggggagccggagagaagccgggcccaactccggccccagcccccagccacggcgaaatcaggcctcagctgaggcgcacgcagcttccagggcccgaggaagagggtagcctgagttccctccatctccgccaccagccgccacaggctaaatcctggagcctgccggtggggttagccggctgctagccgttttaacagttggccaggggccagggaccagccttgcacccctgggcaggccctctgtgtgggtccctgcgcgcgcgcaacaagggcccttataggccggctaaggagggtctgggtgtccttaagagccaggaggagctgcgggctcagcacttgttcccacctactaacccccaacctcatcgccagctgccgcttccgccactgggtcctctccgggctatattgcgttcaggaaacggtcactccgagagagcggggctgctccartgaccccctgcccccgccccactgcctccagaccccgcaccgcgggcgaaggcggggctgtagggacaggagggaccccgcggagcgctgtcagctctggtgcgcagtacggacagcctccctggtaaataatgcacgcctcccgggccaagctgcagcaggtagtgtgtcaaagtaatatcgcgctgcgaattgcagtgtaatcgccgtaatttagggccccgtgggtgagcccgtttcggaatggctgcgcgcccggacgggcaaggtgactggagcgtctgcgccggctttgacctctggatttcctncaagctaagtgagcccatanaaaatggag

SEQ ID NO: 94018 - DNA, 821 bp, Homo sapiens
ttttacataagcaagaaataaacctttattatattcagtctctgatatatgggtatttatctgttgctgcagttagcaaaaattatttgaacaaaaaaaatagctcaaagcagcataaaaagaccttatgtctttcatagcttattttaaaatactgttttttggaagcacatttaaaggactttaaaagcttaaaaccagtatcaataattactacacagttacagcagcagcagaattatgccatatagcatttacaaaagcatccataatcattggactttcctttgaatacccttcaccatagctcttgtttgaaaagggctatattctatctgttcaggttgtcatatagatgtatgggaaatgttttgtgtaattcagtaaacaygcaatttttaaaaattgcagccatttctgcaagtctttatgctatgttgcatgaactgctcagctcaatatttctcccatatgcattgctacaatggcatattttttggttaaagcacactttagtgataaataaagatcaaacatgtggcaatgtttgtggtgtattcgtatgccactaacctgtagtgtgaagttcatgtgcatcacatcaggaccttattccaattgttcccgaatgtttgagtctcacaactgtcatgctcagaccatgcctgtctctgaaatcttaatttccattgctactactttccctcacatctttgctcatgttgtcttctctggcattaacaccctccttcttttgtccttttacatttcctattctctctctctttctttccaagaggccaatttctacctatatttta

SEQ ID NO: 94019 - DNA, 821 bp, Homo sapiens
ttttacataagcaagaaataaacctttattatattcagtctctgatatatgggtatttatctgttgctgcagttagcaaaaattatttgaacaaaaaaaatagctcaaagcagcataaaaagaccttatgtctttcatagcttattttaaaatactgttttttggaagcacatttaaaggactttaaaagcttaaaaccagtatcaataattactacacagttacagcagcagcagaattatgccatatagcatttacaaaagcatccataatcattggactttcctttgaatacccttcaccatagctcttgtttgaaaagggctatattctatctgttcaggttgtcatatagatgtatgggaaatgttttgtgtaattcagtaaacatgcaatttttaaaaattgcagccatttctgcaagtctttatgctatgttgcatgaactgctcagctcaatatttctcccatatgcattgctacaatggcatattttttggttaaagcacactttagtgataaataaagatcaaacatgtggcaatgtttgtggtgtattcgtatgccactaacctgtagtgtgaagytcatgtgcatcacatcaggaccttattccaattgttcccgaatgtttgagtctcacaactgtcatgctcagaccatgcctgtctctgaaatcttaatttccattgctactactttccctcacatctttgctcatgttgtcttctctggcattaacaccctccttcttttgtccttttacatttcctattctctctctctttctttccaagaggccaatttctacctatatttta

SEQ ID NO: 94020 - DNA, 821 bp, Homo sapiens
ttttacataagcaagaaataaacctttattatattcagtctctgatatatgggtatttatctgttgctgcagttagcaaaaattatttgaacaaaaaaaatagctcaaagcagcataaaaagaccttatgtctttcatagcttattttaaaatactgttttttggaagcacatttaaaggactttaaaagcttaaaaccagtatcaataattactacacagttacagcagcagcagaattatgccatatagcatttacaaaagcatccataatcattggactttcctttgaatacccttcaccatagctcttgtttgaaaagggctatattctatctgttcaggttgtcatatagatgtatgggaaatgttttgtgtaattcagtaaacatgcaatttttaaaaattgcagccatttctgcaagtctttatgctatgttgcatgaactgctcagctcaatatttctcccatatgcattgctacaatggcatattttttggttaaagcacactttagtgataaataaagatcaaacatgtggcaatgtttgtggtgtattcgtatgccactaacctgtagtgtgaagttcatgtgcatcacatcaggaccttattccaattgttcccgaatgtttgagtctcacaacwgtcatgctcagaccatgcctgtctctgaaatcttaatttccattgctactactttccctcacatctttgctcatgttgtcttctctggcattaacaccctccttcttttgtccttttacatttcctattctctctctctttctttccaagaggccaatttctacctatatttta

SEQ ID NO: 94021 - DNA, 661 bp, Homo sapiens
tgctgctaaaaaatgtttgaaaatyactgactttttgcagccctgttggctgcattggtcaaaggtgaggcttttccatgtgtggacagctgaaccgtgtggaatgcaggtgagatccaggctcaaatcttttctctgcatattaataaatgtgatgcacatatttaatgtgcaattttttacacatgagtgagagattatatacaaatgtacagtatatgcatttgagagtacagtttaaataatgaaaaaccttggtaacctctttataatgatattcattcattaaattaaacctcttcccatgacattaaaaattttaccctctcctggttgcccctataaaggaatgtgcctcatacccaatcataattttatttctcttgacatattatttttaattctgtgtcttatgtgcagtagaagggtccataaaccacccacacagctcctactatttagagagacctggaagttctctacttcaccttttattttcctattgactaggaggtaaaggtagccatcctgatggttttgcttgggggaacccagtgtttgatctcctgctgttggacaagctgagctggagatatacagaaagctgtgaaatttgttaatctgtcagttccttttctgtgtaggggacctggggttttgt

SEQ ID NO: 94022 - DNA, 606 bp, Homo sapiens
caccagaagttctcttctaaccctaaaactccacaagttgtcttgctctacagatcgctccatttagtcagacataggaaagggattgctgttcagaggtattgcctcagttcatttttccaatgtcagtatcaaacaaaaaagatacttgggatgtacttaattcctcaagcaagttgctgaatctttccttcctttcttcattccatttacatctacttggggtataatatggagataatgcagtaaaaaagaaataaaaatccaaaaagtaaataagaaagttatgttccctggagattatgctatatataagaaataaatatgtaaataagaaaaccacagttcctgccataacagggtttatagtcgagagagggagagatactacataagcaaaccaataaataagaatggtaattacccactatrataaatctatgaagaaataaacataattgtgagagacaataataggagggagggcacttcatttattcacttattctgtcagtctcccaacaaatatttcttgagctactgctatccagaaagcaaggggcctcattttggagattttggagatcaaggcaaacactagtattt

SEQ ID NO: 94023 - DNA, 672 bp, Homo sapiens
ttccattcccacctgaatgccttggggtgcacttgttagcgtgctgttgtatgtgtgcttttctgtcaaacatttacaccttatgttacagccaatggtcgactgcgggctaatatttaacatctgctgagaggcttatctgatgcgcaactcaaaaccaaccatcagaaaataacacttttaagtgtgaacatagcttttagtttgctatttgattcatccgctaaacgaagatgtctctacctgcgcggaggcgggtaacacgaaggaaggtcttttattctattttacacagcccattatgtggtcccaggagagtatcattggtgaacattaactgtaacataactgatatccacaggaaagctaccaaaaatatccacaggaaagcaccatcaaatatctaacctgattgattcaacttctctctcaccatagttgttctcgggttaagtgagaactggcacctttaactgtggtgacttttcgggtgaaaagcctgaccttgactatctatctcccagtgaagrtatcaaaaacaggaggaggtgaaatgtggccagtgggagggaaaatgattaaagattcaagcgccccaggcattgcacatgcttacaaaatctgatggaaagagctgcattattatttctgacctcgcctatttaacatgca

SEQ ID NO: 94024 - DNA, 719 bp, Homo sapiens
acacatagcaggccagaccctctttttctcaatcactgccaccacttcctgcccagctcctgtctcctgcctttcccattcccattcattctcattcagcagccccagggagcttttcaaagtacaaacctgggccgggtgtggtggctcaggcctgtaatcccaactactctggaggctgaggtgggaggactgctygagcctaggaggttgagcctccagtcacctatgatcacaccactgcactctaacatgggtgacagagtgagaccctgtctcaaaagaaaagaaaagaataagaaagtacaagcctggcatgatcctcctgaaaatctgttgtttgcagaagcaagtccacgtgtcttttggaagcaggccaggtatgcgcagtaccggtgaagccaggctgctggctgtgtgacttgggcaagtgcctctcccctcttgagtctccttttccttctttgtaaggtctgtctacctcctagggcagttctgagaaccatatgagataacacacataatgggtctagaactgtgctggcctgcaggggtgctaaaacaggggtgttagcgttactagctgcttcttctccccaagctccctgtggcttcaactcttgccttgttcctatatgataatgcagccaaacctttgtgcctctacccctctgaccttactcttctttctgcaggatatgccccctaccacaggctta

SEQ ID NO: 94025 - DNA, 719 bp, Homo sapiens
acacatagcaggccagaccctctttttctcaatcactgccaccacttcctgcccagctcctgtctcctgcctttcccattcccattcattctcattcagcagccccagggagcttttcaaagtacaaacctgggccgggtgtggtggctcaggcctgtaatcccaactactctggaggctgaggtgggaggactgcttgagcctaggaggttgagcctccagtcacctatgatcacaccactgcactctaacatgggygacagagtgagaccctgtctcaaaagaaaagaaaagaataagaaagtacaagcctggcatgatcctcctgaaaatctgttgtttgcagaagcaagtccacgtgtcttttggaagcaggccaggtatgcgcagtaccggtgaagccaggctgctggctgtgtgacttgggcaagtgcctctcccctcttgagtctccttttccttctttgtaaggtctgtctacctcctagggcagttctgagaaccatatgagataacacacataatgggtctagaactgtgctggcctgcaggggtgctaaaacaggggtgttagcgttactagctgcttcttctccccaagctccctgtggcttcaactcttgccttgttcctatatgataatgcagccaaacctttgtgcctctacccctctgaccttactcttctttctgcaggatatgccccctaccacaggctta

SEQ ID NO: 94026 - DNA, 719 bp, Homo sapiens
acacatagcaggccagaccctctttttctcaatcactgccaccacttcctgcccagctcctgtctcctgcctttcccattcccattcattctcattcagcagccccagggagcttttcaaagtacaaacctgggccgggtgtggtggctcaggcctgtaatcccaactactctggaggctgaggtgggaggactgcttgagcctaggaggttgagcctccagtcacctatgatcacaccactgcactctaacatgggtgacagagtgagaccctgtctcaaaagaaaagaaaagaataagaaagtacaagcctggcatgatcctcctgaaaatctgttgtttgcagaagcaagtccacgtgtctttkggaagcaggccaggtatgcgcagtaccggtgaagccaggctgctggctgtgtgacttgggcaagtgcctctcccctcttgagtctccttttccttctttgtaaggtctgtctacctcctagggcagttctgagaaccatatgagataacacacataatgggtctagaactgtgctggcctgcaggggtgctaaaacaggggtgttagcgttactagctgcttcttctccccaagctccctgtggcttcaactcttgccttgttcctatatgataatgcagccaaacctttgtgcctctacccctctgaccttactcttctttctgcaggatatgccccctaccacaggctta

SEQ ID NO: 94027 - DNA, 724 bp, Homo sapiens
ccctcatggagttcatattctagttggtggggagaaaatttaatcatcaagtgatgttatgttacatcatgattgaaggtggtaggtgccatggaaaaagcagagcaagggagggaacatgagttttcaaagagggagtccagtttgagtaaggtcaggagctgcagtgtaaaacgtcttttccatgtgtttgtctttaatagcgtgactttaatattagaactaaagagtttcacaaagccatgagagatatgcagagcccaatggagtgtcatattactatctctaagaattgggggcgaggcacggcagatcacaactgtaatcctagcactttgggaggctgaggcaggaggattgctgaagcccaggagtttgatttcttctgcacctcagccccaaaattctctggttaataattaatcttggtcaactaaattggaacaagctggaaacccccacttgtttggaaatccataaamaccatttaatcctgggaatgatgagcatagttacagaaataactaagtaaacctgacccacaatactctctttaagaatcatctatttgtacatgtttgggcaatttaaatagtggccaaatcaagatatctaacaaatagccctcatgattcaaatgtaaaatatagttgatattattgtgcttcaaaagttctaagtttactaatcgtgtaaacagtattaatatattaataaaatctaa

SEQ ID NO: 94028 - DNA, 724 bp, Homo sapiens
ccctcatggagttcatattctagttggtggggagaaaatttaatcatcaagtgatgttatgttacatcatgattgaaggtggtaggtgccatggaaaaagcagagcaagggagggaacatgagttttcaaagagggagtccagtttgagtaaggtcaggagctgcagtgtaaaacgtcttttccatgtgtttgtctttaatagcgtgactttaatattagaactaaagagtttcacaaagccatgagagatatgcagagcccaatggagtgtcatattactatctctaagaattgggggcgaggcacggcagatcacaactgtaatcctagcactttgggaggctgaggcaggaggattgctgaagcccaggagtttgatttcttctgcacctcagccccaaaattctctggttaataattaatcttggtcaactaaattggaacaagctggaaacccccacttgtttggaaatccataaacaccatttaatcctgggaatgatgagcatagttacagaaataactaagtaaacctgacccacaatactctctttaagaatcatctatttgtacatgtttgggcaatttaaatagtggccaaatcaagatatctaacaaatagccctcatgattcaaatgtaaaatatagttgatattattgtgcttcaaaagttctaagtttactaatygtgtaaacagtattaatatattaataaaatctaa

SEQ ID NO: 94029 - DNA, 1125 bp, Homo sapiens
tgcacaaaaactcaacagccagaatgggagagctactttcagtggtacctagagaggtagcaaaaagggggaagactgcctcacctccttacaggaggccaacaaacaacttagagatactaactgataactctctagtgctttatctctcttaaagaaatcttcagaattgcttacatcccccttggttcttcccccacctccaggtacatccccagcttactccgacctctctgaacttcctggaccagatctgtttcctctgcctgcatgctctagcctaccatcttcctctccttgtctgctactcactcaacagaaggcaacagggtggtctacttctacaactccgtctcctgatgatttcacaacagtctccctggcagcctttcatctggaagaagtggaaaagggggaacctgtaggaacatctctcatgatcacaccatatagggaatgaccagtaacaggtagggaaaccccagtgatggtctttcaaacctggtcaaaggctgagctaggaggcaaagttaaaaaatttcctgactcccataaagatttgcccaagaatttgagctcattgtcaggtcactcgtcatatggcccgtgtcattcagacccttaccagctgttccacatgttggttttggatgctaaagctaaggaatggctggaaaaagcacagtggtcagaccatttagcagagtcaatttccaaaggtccaataggatgacaacaagtccccaaaagttcagaagacaggctcaaagatgccaaggcatgagccactgctctgttaattataattccttcagcattccaaaggtttgtggattggaataaaatccagcaatgccaccagaacccaaaggaattagtttgagattatttttcatgttttgataaaactttgagacaatattatgggatgtcagctgattgccttgagaacaataaaaatggcgcttattaaatgcaaactttcaaaacagaccagatgatgatttagccactcttgtaaaacaccacataacaaattgggccatggtcagaactarggaactagttaacttagctgaccaattatcctgtgctatgataaaggaaaaaaaaaacaaaagactg

SEQ ID NO: 94030 - DNA, 1560 bp, Homo sapiens
tcttagtattccagcagttgcataggaacctaaatctgagatgtggttttatcaaccaaaagtaaaattgccaaaagcccagcaaaataacctatgagtgacttaaaatcaaaactactacctatcacccctgttttagcatcagctaaatatagctgcttttagaaaagcttgttttatctccacaatagtccttctgaaaaactaattatgtgaaagtatgaaaaatgtacatttcaaggtgtacatgtttttttctcctacccagaagtcctcctttcaactctccagcaacgcccccttgcattcataaactctgtgtccacagagatacatgcatttttccagaaaagtcattaattttggaatttaagaaatatgaaatagacaaagtgggtaatttttcacacttagaagaatgtacccgttatgttttgactctttttcttgcacagctgagaaaagattaataaytcactttctctattaattggcttcccaggtgccataaaagatggtacccaatcaagtcacttaaagcaaaaaatgcccatagcactcattaacccccaaccagagaacgtggtcatcacacattaactttccagcagctagccttcctaagaaactgatatgatattaaagctccagaggagtcaactcttaaataaattgttgaattatcctcttctccgaaaggtacccaaaagtattttatattaaaaaagtagccaagcacatgtgccaacaatgcaaaagtgtatatgattacaaacaattttattttgcagaaactaggaaatggaacaattctagcttattgaggagctcttcaaattagaaggtaagagagcaaatcacaaaagatacattccaacttcctctattcatagccataagaaaaggccaggggaaaaaataataaaaggtctgaagtcctatgagactacacttaaactctgaagtctaggaaactcttactttaacattagcaagaattccaaagatttgtatttagtctaatggaagagagaaaaaacgagcttcttgatgacagcaaaaccacactcagatcattggaggtcctggcaaccagatacaaatttattcctttaggagccctgtcctttctgttgaagctcactgctggaagaataacacaacttcacagtcacagttctgccatgaaagcaggaatcatggggtacaggtgtatgagggggaggggacaggcaagagggaagaaagtgatatgtattagactgttctattcctggccacagagagagaaattctgaggcatgtcacagtgcttgatgtgaaagcctagtaagtcaaaacgggaagaaatactttcagaatcctaatggtcctattgccagagtataagttatgaggaatctggtgtatctatcatctagaaaccaaacaaaactaaaaatcacaggggaattactacaggttaaaaaaaaatgtctattttaaagatttagagatagattcaaatagctagaggagggtctgagctatttttttattacaataaggcacacttttaaa

SEQ ID NO: 94031 - DNA, 1560 bp, Homo sapiens
tcttagtattccagcagttgcataggaacctaaatctgagatgtggttttatcaaccaaaagtaaaattgccaaaagcccagcaaaataacctatgagtgacttaaaatcaaaactactacctatcacccctgttttagcatcagctaaatatagctgcttttagaaaagcttgttttatctccacaatagtccttctgaaaaactaattatgtgaaagtatgaaaaatgtacatttcaaggtgtacatgtttttttctcctacccagaagtcctcctttcaactctccagcaacgcccccttgcattcataaactctgtgtccacagagatacatgcatttttccagaaaagtcattaattttggaatttaagaaatatgaaatagacaaagtgggtaatttttcacacttagaagaatgtacccgttatgttttgactctttttcttgcacagctgagaaaagattaataactcactttctctattaattggcttcccaggtgccataaaagatggtacccaatcaagtcacttaaagcaaaaaatgcccatagcactcattaacccccaaccagagaacgtggtcatcacacattaactttccagcagctagccttcctaagaaactgatatgatattaaagctccagaggagtcaactcttaaataaattgttgaattatcctcttctccgaaaggtacccaaaagtattttatattaaaaaagtagccaagcacatgtgccaacaatgcaaaagtgtatatgattacaaacaattttattttgcagaaactaggaaatggaacaattctagcttattgagragctcttcaaattagaaggtaagagagcaaatcacaaaagatacattccaacttcctctattcatagccataagaaaaggccaggggaaaaaataataaaaggtctgaagtcctatgagactacacttaaactctgaagtctaggaaactcttactttaacattagcaagaattccaaagatttgtatttagtctaatggaagagagaaaaaacgagcttcttgatgacagcaaaaccacactcagatcattggaggtcctggcaaccagatacaaatttattcctttaggagccctgtcctttctgttgaagctcactgctggaagaataacacaacttcacagtcacagttctgccatgaaagcaggaatcatggggtacaggtgtatgagggggaggggacaggcaagagggaagaaagtgatatgtattagactgttctattcctggccacagagagagaaattctgaggcatgtcacagtgcttgatgtgaaagcctagtaagtcaaaacgggaagaaatactttcagaatcctaatggtcctattgccagagtataagttatgaggaatctggtgtatctatcatctagaaaccaaacaaaactaaaaatcacaggggaattactacaggttaaaaaaaaatgtctattttaaagatttagagatagattcaaatagctagaggagggtctgagctatttttttattacaataaggcacacttttaaa

SEQ ID NO: 94032 - DNA, 1560 bp, Homo sapiens
tcttagtattccagcagttgcataggaacctaaatctgagatgtggttttatcaaccaaaagtaaaattgccaaaagcccagcaaaataacctatgagtgacttaaaatcaaaactactacctatcacccctgttttagcatcagctaaatatagctgcttttagaaaagcttgttttatctccacaatagtccttctgaaaaactaattatgtgaaagtatgaaaaatgtacatttcaaggtgtacatgtttttttctcctacccagaagtcctcctttcaactctccagcaacgcccccttgcattcataaactctgtgtccacagagatacatgcatttttccagaaaagtcattaattttggaatttaagaaatatgaaatagacaaagtgggtaatttttcacacttagaagaatgtacccgttatgttttgactctttttcttgcacagctgagaaaagattaataactcactttctctattaattggcttcccaggtgccataaaagatggtacccaatcaagtcacttaaagcaaaaaatgcccatagcactcattaacccccaaccagagaacgtggtcatcacacattaactttccagcagctagccttcctaagaaactgatatgatattaaagctccagaggagtcaactcttaaataaattgttgaattatcctcttctccgaaaggtacccaaaagtattttatattaaaaaagtagccaagcacatgtgccaacaatgcaaaagtgtatatgattacaaacaattttattttgcagaaactaggaaatggaacaattctagcttattgaggagctcttcaaattagaaggtaagagagcaaatcacaaaagatacattccaacttcctctattcatagccataagaaaaggccaggggaaaaaataataaaaggtctgaagtcctatgagactacacttaaactctgaagtctaggaaactcttactttaacattagcaagaattccaaagatttgtatttagtctaatggaagagagaaaaaacgagcttcttgatgacagcaaaaccacactcagatcaytggaggtcctggcaaccagatacaaatttattcctttaggagccctgtcctttctgttgaagctcactgctggaagaataacacaacttcacagtcacagttctgccatgaaagcaggaatcatggggtacaggtgtatgagggggaggggacaggcaagagggaagaaagtgatatgtattagactgttctattcctggccacagagagagaaattctgaggcatgtcacagtgcttgatgtgaaagcctagtaagtcaaaacgggaagaaatactttcagaatcctaatggtcctattgccagagtataagttatgaggaatctggtgtatctatcatctagaaaccaaacaaaactaaaaatcacaggggaattactacaggttaaaaaaaaatgtctattttaaagatttagagatagattcaaatagctagaggagggtctgagctatttttttattacaataaggcacacttttaaa

SEQ ID NO: 94033 - DNA, 1560 bp, Homo sapiens
tcttagtattccagcagttgcataggaacctaaatctgagatgtggttttatcaaccaaaagtaaaattgccaaaagcccagcaaaataacctatgagtgacttaaaatcaaaactactacctatcacccctgttttagcatcagctaaatatagctgcttttagaaaagcttgttttatctccacaatagtccttctgaaaaactaattatgtgaaagtatgaaaaatgtacatttcaaggtgtacatgtttttttctcctacccagaagtcctcctttcaactctccagcaacgcccccttgcattcataaactctgtgtccacagagatacatgcatttttccagaaaagtcattaattttggaatttaagaaatatgaaatagacaaagtgggtaatttttcacacttagaagaatgtacccgttatgttttgactctttttcttgcacagctgagaaaagattaataactcactttctctattaattggcttcccaggtgccataaaagatggtacccaatcaagtcacttaaagcaaaaaatgcccatagcactcattaacccccaaccagagaacgtggtcatcacacattaactttccagcagctagccttcctaagaaactgatatgatattaaagctccagaggagtcaactcttaaataaattgttgaattatcctcttctccgaaaggtacccaaaagtattttatattaaaaaagtagccaagcacatgtgccaacaatgcaaaagtgtatatgattacaaacaattttattttgcagaaactaggaaatggaacaattctagcttattgaggagctcttcaaattagaaggtaagagagcaaatcacaaaagatacattccaacttcctctattcatagccataagaaaaggccaggggaaaaaataataaaaggtctgaagtcctatgagactacacttaaactctgaagtctaggaaactcttactttaacattagcaagaattccaaagatttgtatttagtctaatggaagagagaaaaaacgagcttcttgatgacagcaaaaccacactcagatcattggaggtcctggcaaccagatacaaatttattcctttaggagccctgtcctttctgttgaagctcactgctggaagaataacacaacttcacagtcacagttctgccatgaaagcaggaatcatggggtacaggtgtatgagggggaggggacaggcaagagggaagaaagtgatatgtattagactgttctattcctggccacagagagagaaattctgaggcatgtcacagtgcttgatgtgaaagcctagtaagtcaaaacgggaagaaatactttcagaatcctaatggtcctattgccagagtataagttatgaggaatctggtgtatctatcatctagaaaccaaacaaaacyaaaaatcacaggggaattactacaggttaaaaaaaaatgtctattttaaagatttagagatagattcaaatagctagaggagggtctgagctatttttttattacaataaggcacacttttaaa

SEQ ID NO: 94034 - DNA, 1094 bp, Homo sapiens
tttcttgccttgtttggtaataaataatgggagaggctgggggtggtggctcatgcctgtaatcccagcactttgggaggccgaggcatgcggatcatgaggtcaagagatcgagaccagcctggccaacattgtgaaacctcgtctctactaaaaatacaaaaattagctgggtgtggtggcacatgcctataatcccagctactcaggaggctgaggcagaagaatcgcttgaacctgggaggcggaggttgcagtgagccaagattgtgccactgcactccaacctgrgcgacaagagcaaaactccatctcaaaataaataataaatacataaataatgggagattcagacattggaacacaacattaaaattgtcacagaatgccaggcccggtagctcacacctgtaatcccagcactttgggaggccgaggtgggcggaaattcgagacctgaggtcagaagttccagaccagcctgaccaacatggagaaaccccgtctctactaaaatacgaaaaaattagccgggtgtggtggcacatcactataatcccagctacttggaaggctgaggcaggagaatcgcttgaacctgggaggtgaaggttgcggtgagccgagatcgtgccattgcactctagcctgggcaacacgaatgaaactctgtctcaaaaaaaattaattaaaaaaattgtcacagaagtctaatttagacaatacaaggatgaccctgatatattaagtgatatctgtgaaccatttttacattaaaaatacataatatatgcatgttttttaaagtctgggaagattcacttctaaagatggccttgatgtagaacaactagaacttttacacattgctggttggaatgcaaaatgggtagtagccactttgggaaagaatatggcaatatcttatgaagtttgacatatacttaccatttgacccatgaacccaacacatacaaaattaaagggaaataaaaatgtatgatcaggccgggggcggtggctcatgcttgttgtgatcccagcactttgggaggctgaggcggatgggtcacttgaggccaggagttcaagac

SEQ ID NO: 94035 - DNA, 1112 bp, Homo sapiens
ttctggtgggaaagtaaattattacatttttacaggacgatttgggaatatctcccaggctaaggggaaaaacgttcatatctttggacctagagatgcctgctgtatatattgtcagtaagttctcctttgttctttccacaactcatcctttaaaatggtggattacgtgtaatatccaggttttatctgtccttgtaataggattgtacatcctcactcattgacatgtgttttccagtgcctctcacagagggagcataaacttctcactccattgacatcactcctgtctacatgatttgctttggccatggaaagtgagtggatatgatatatgccataactgagcagaagtttgaaagcctagattggttttgccatttttttttcctctgccacaagatagaaaaagaagttgcctcttcagcctcaaccctagaatataaatgacatagattcaacctgaagtcaaatatcagctgacatatatgtaagcaagaaatattgtcattgtaagcctgaaatattgctgttgttttttttaaccagagcaaaacctggtatcagctaatggaaaaccaatattcactatctctatactcagaataaactctagttaacttggctgtcctcctttccaaactgtacaaatgtttgaaatttctaatatatttgaaagtatgtattttcttatgttgtttgccaactgtattacatggtcctctctcaagatgtatgttaaacagcttcatgccatatcatatacatttttaaaaattggagtaaaacttacatgaaaaattaaccaatttaccctgtacaattcagtggtatttagtacattaaccatattgtgaaactactacctctgtctagctccaaagaattctcatcaattctagtcccagtttccattgggaattctcatcattcccaatggaaacctcatatccrttaggtaataatgccctatcccccttaccccctttcacctagaaaccactaatctgctttctgtctctatggttttatcttctttagatgtcatataaatacaattgtacaatatttgatttgtttgtggcctctttcaggtagcacgtttttga

SEQ ID NO: 94036 - DNA, 633 bp, Homo sapiens
acataaacggcttggtgccctccctgtggcaataaattcttgctcaattagttcacacaaaagcygattgtttcaaagagtgtggcacttcccacctttcttgctccctccctcatgacatgtcagctcccttttgccttctgtcctgattggaagcttcctgaggtcctcaccagaagcagatgctggaaccatgcttcttatagagcctgcaaaactgtcacccaaataaacctcttttctttataaattgcccaccttcaggtattcctttataacaaatgcaaaatgaactaacacatctatttataaaaatcaggaaaacacatatttttcttacggaagttccacctccttaataaacaaaacaaattaatctgtcaaacaaatgcaccaggcttgctgcattcatgctacccatctagccactgggggtattctcattactagtgtttgctatagaccgcaggtctgtaaactatggcctattgtccaaatccagcccaccacctgtttttctaaataaagtgttacaggaacacaatcatgctcatgcacttacatattgctgatttcacatccagtgtaaaggtggaacggttacaacaaaaccatatcatccccaaaaccctt

SEQ ID NO: 94037 - DNA, 633 bp, Homo sapiens
acataaacggcttggtgccctccctgtggcaataaattcttgctcaattagttcacacaaaagccgattgtttcaaagagtgtggcacttcccacctttcttgctccctccctcatgacatgtcagctcccttttgccttctgtcctgattggaagcttcctgaggtcctcaccagaagcagatgctggaaccatgcttcttatagagcctgcamaactgtcacccaaataaacctcttttctttataaattgcccaccttcaggtattcctttataacaaatgcaaaatgaactaacacatctatttataaaaatcaggaaaacacatatttttcttacggaagttccacctccttaataaacaaaacaaattaatctgtcaaacaaatgcaccaggcttgctgcattcatgctacccatctagccactgggggtattctcattactagtgtttgctatagaccgcaggtctgtaaactatggcctattgtccaaatccagcccaccacctgtttttctaaataaagtgttacaggaacacaatcatgctcatgcacttacatattgctgatttcacatccagtgtaaaggtggaacggttacaacaaaaccatatcatccccaaaaccctt

SEQ ID NO: 94038 - DNA, 633 bp, Homo sapiens
acataaacggcttggtgccctccctgtggcaataaattcttgctcaattagttcacacaaaagccgattgtttcaaagagtgtggcacttcccacctttcttgctccctccctcatgacatgtcagctcccttttgccttctgtcctgattggaagcttcctgaggtcctcaccagaagcagatgctggaaccatgcttcttatagagcctgcaaaactgtcacccaaataaacctcttttctttataaattgyccaccttcaggtattcctttataacaaatgcaaaatgaactaacacatctatttataaaaatcaggaaaacacatatttttcttacggaagttccacctccttaataaacaaaacaaattaatctgtcaaacaaatgcaccaggcttgctgcattcatgctacccatctagccactgggggtattctcattactagtgtttgctatagaccgcaggtctgtaaactatggcctattgtccaaatccagcccaccacctgtttttctaaataaagtgttacaggaacacaatcatgctcatgcacttacatattgctgatttcacatccagtgtaaaggtggaacggttacaacaaaaccatatcatccccaaaaccctt

SEQ ID NO: 94039 - DNA, 795 bp, Homo sapiens
ttgagggaaaaatgcttctaaggaaatgactgaaacctatgaatatcaggatggtttggctttcttaggcttgcaattcttctcttctgatttgccactcttttccttcagaagtataggaacaatagaacttggaattactaacagaagaatttagtactgaaatttaataagtacgtaaaagacaccacccctctgtctgtttagggaataagaaagcaccaaggaacagcattgtattaaatgtggttaggtcatggagggtttcctggatgaatagacatttttcctagtcctgaaaaatgagtaagagtcatttagttgagatggcgctamgaatgatggaggaaggaggggaatgttgcaaaaacagagcaagaaaaagggtgaaaaaaataatattatcattcacttagtcatcaagcctgaaaatgaagtcattttgaccaagttttccccattatgctctaaatatgtcaagttcacttatatatatataaactattttaattatatatattcagaagagagtatctggaccttgtctcaagaacctgccagagacttaaaacaattcttggaacagagtatttaaaaatatgtaatttaggctgggcatggttgctcatacctgtaatcctagtactttgagaggccaaggcaagaggagcatcactcgagcccaggaggtccagagcagcctgggcaacatagtggaaacccatctttatttaaaaaaaaaatttagccgtgagtgatggtacatgccttagtcacagctattgggaggctgaa

SEQ ID NO: 94040 - DNA, 747 bp, Homo sapiens
tgtcttccccccttccatgttttctatccctccctccttccttctttctttaatttttctggacttatacccctttgactccttcatactccttctttggacttcagtattctctgtcatggtgtgctgcataaatcacacttggatgtcacttcaccagtaaccttggagatttccttaacctgtcatctgtgatgatgcaatgtcctattctctgccttggtctggagtagagttatttctagaatgttgctgggaagggtatatgagaaatatatattttttgatattttatttataaggtatctttactttctctcaaaatcttcaaggcagtaccctagtttcttctagcttcagtattgcctcagagaagtccagtgatatgctgattcctggtcctttgcatgatatatgatcttttttagtcatcatttcttggatgttaatttgtgttgtagtgtgtattagtaattcgttcctttttattgcttaacacgattccattgtattaaratgttttgtttatccactcatcagctgatgggaatttagattgattgtatgaatttcgcttctgcaaatgtttttatacatgactgtgtgtgaacatacatttttgtttttcttaagcaggtaactaggagtggaactgccaggtaatatgttaaatgtaggtttaaattttcaagaaactgccaaactgtttttcaaagtagctgtaccactttacattcccaccagcaa

SEQ ID NO: 94041 - DNA, 727 bp, Homo sapiens
caaaagcattcatcttcaatattttttagctcagaaaatcccaataaaattatatagacctcaaggaatttcagaaagccactttcattcatgttccatttcccttacaaaatacaaaatttaaaaaaaacagaatggacagtatataataggttaaagaaataactgcaattaaaaacttacaagaataaaattatattatgtaactaaagttgactgtagtagagaagtcgggcatcatttagtcctgactgacctttctatggtaacaaaatggaactaggagtcagatgacaaaaatctgtaaaatagataattaaactgagaaagataatctgaaggaagtcccttttagaactacttaccatcctaattttctatgattttatgtaaaataaagcaaaaaatgtaggccaggcaaattcacatcaaatcaagacacctatacactctggaggcctgttaaaagtattctagatcatatacaaatgtaaatggactggagcgagaaatggtttagtgtctctgataagatttttttttgcaccatgtgaccatactggaaaaaccactgaatgtgctattttcaaactgctrcttagaaggactcaatattccagaaatttgcatgctttcatagagataatgatgacccttaatttaggaaattactgtgtcaaagattgtagctattaaaggaacacagttttgttttgacacttaatgc

SEQ ID NO: 94042 - DNA, 723 bp, Homo sapiens
gggttagggcaatgtaacccatgtgcctcgaagatactaacaaattcagacatccctaatgttaggtttgtcttaggatttcaacttgtggttttaaaaatgtttctcatttggttgttttcttatttcagaaataaagttgacactaagaaaaatccaattggatagataatcaacactgcaagtcaagcaagtgttttagcctccttctcagtgcagtgttatcatttatctgttttcatgattaaaaaaattaagtgctgacagtttttcaagagacaagattaaattctgtactgaaattcttcaagcttgagctctagccagaggtgaactttattttggaaaatctgagaaaataagctccattaattctgaggtgtggaaagaaagatcttgaaatacccctcacttctccagacacattatttaacctagcacattccttacagcagctgttccaaatcttttccactttccccaaaccctcctaagccgtatggagaaggcagatgctgggtgaccttccttgtccaagctcctcccatctccaaatgcccccatgtctactcccactsaatcataaattcttttaggacagcccactgtctttcctttacactccccttctcctagtccaaaacggagtgccctgttcataagaatggttcactaagagtttaaaaaggaatgattggggcaaaatcaacttaaacaacatgg

SEQ ID NO: 94043 - DNA, 478 bp, Homo sapiens
aaaaccgaccgaagacaacggcccggaggaggccgacgccatcttggcagccccctccccctcaagggcctggctctctttcaatccggctcttcctcttctcggaatcgaatcttcccaatgtctctttatagaacccacgttctgtgggscccctccccgccccctccagggctccctcagacaagtcgagccggctgctggaccagctcaagtccacaccattcgcctggcatgggggagaactcacgtctcgcaccccctccacaagtttaactgctttccacaggggatactttcccctttcacagaagagtaagcttaagctggctgctgggaccttgcgtccagaccaagccacatctgaaaaaaaaaacgaggcatgaaaagtcccagaggagcaaacgccccctctcagtccttcctagccaccgcctgttaatcgcccaacccggccaggatttcctttatgagtagt

SEQ ID NO: 94044 - DNA, 782 bp, Homo sapiens
tccacatctggtcagagccttcttactgcatcacagcatggtggagggtatcacatggcaagaggacaagagcataccagctcaagtctttcttcctcttcttatgaagccackggtctaccatgggagccctaccctgatgaccttatctaatcctaattacccctaaaggccctcaccacctccaaatatactaacatatgaaatgtgggggacacattcaagccaacacaaagtaaagccaacacaaaggaaaatagggctgagagagaaagaggagtccagatcgtgatcacatcaagtgaacacctgaatctggctatgccaactgctataccctttgattttgcagtttaatgtactgagttctattacgctcaggcagtttaaactgaatgtcttatcacttgcaagtaagagtcctgatcagattttgtcatttcatttaagcatttaatgaacatatattgagcatctactatattccagggcaatgctaggagatgctgaggatacagatttgaatgagataatttcttttctttataaattaaaaatttgaagacttcacattttattagcaccttgacacatttgtgctttctttctccacctctcccactctctctctcatgcacacacatacgcttcttttttttctctctgaaacatttgagagtaagttgaaaagatcaactagaattaggacagtctgattatcaaactcagaaaatttaacattgatctaatattacccattataaagcccttattcaaatttt

SEQ ID NO: 94045 - DNA, 302 bp, Homo sapiens
ctgagagagcgagccttcttaaaaactgtgcaccctaggagtcctttggcagtgaccaccggcaaagcacgtaggatcatccagtgtgacccctgtctgagcctgctgcctggggatctccagggcctcagcctcaggcaggcccaggtgagaygaggacaagatgcccacacgaccttgaaattccaggcccgaccactgcagccccattaacggcctgttttcccttaagtggagaagaagcagactaagtctaacctcagtgcctcatggagtctgaccaccacagggcaccaggatcc

SEQ ID NO: 94046 - DNA, 711 bp, Homo sapiens
ccccaacccaggctaggctgtcaggagcaagagggatgcgtgtcttagctttagcacctgcaagcaccagaggccagtstggaagggaactgggaaaccagatcagagaggaagaggctgtgcccatttcacagagaggaagggtaaggtttaaggcccagacccagcactcttgacttggtgatttctttgactcctttcttccttttacattttgtctctattttttttaattttaatttttaattttattttttatttccataggtgtttgggaaacaggtggtatttgattacaagagtcatcctttagtggtacactcatcactgagtagtatacactaaacccaatttgtagtcttttatccctcacccccaccccacccttttctccaagtccccaaagtccattgtatcattcttatgcctttgcatcttcatagcttagctcccacatatgagtgagaacatacgaagttttttccatttcctgagttacttcacttggaataatagtctccagttccatccaggttgctgcgaatgccattagttcatttctttttatgactgcattatctctcttttcaaaacttcaggagagagaagaaggccccagcaacccatgatgggtggaagtcccacatgtagataggggccctggacggaggttgttgcctgttctgtgaaggagcatgaggaagggtgagg

SEQ ID NO: 94047 - DNA, 711 bp, Homo sapiens
ccccaacccaggctaggctgtcaggagcaagagggatgcgtgtcttagctttagcacctgcaagcaccagaggccagtctggaagggaactgggaaaccagatcagagaggaagaggctgtgcccatttcacagagaggaagggtaaggtttaaggcccagacccagcactcttgacttggtgatttctttgactcctttcttccttttacattttgtctctattttttttwattttaatttttaattttattttttatttccataggtgtttgggaaacaggtggtatttgattacaagagtcatcctttagtggtacactcatcactgagtagtatacactaaacccaatttgtagtcttttatccctcacccccaccccacccttttctccaagtccccaaagtccattgtatcattcttatgcctttgcatcttcatagcttagctcccacatatgagtgagaacatacgaagttttttccatttcctgagttacttcacttggaataatagtctccagttccatccaggttgctgcgaatgccattagttcatttctttttatgactgcattatctctcttttcaaaacttcaggagagagaagaaggccccagcaacccatgatgggtggaagtcccacatgtagataggggccctggacggaggttgttgcctgttctgtgaaggagcatgaggaagggtgagg

SEQ ID NO: 94048 - DNA, 501 bp, Homo sapiens
tgagaataaagcccattttctgtttttttgttttttttttttttttgatacggagtctcactctgtcgcccaggctggagtgcagtggtgcagtcttcgctcactgcaagctctgcctccagggttcacgccattctcttgcctcagcctcccaagtagctgggactacaggcacccaccaccacgcctggctaattttttgtatttttagtagagacggggtttcaccrtggtagccaggatggtcttgatctcctgacctcgtgatccacctgccttggcctcccaaagtgctgggattacaggcgtgagccaccatggccggccaagaataaagcccattttctataagaagatcttatatgtgatgctgcctttttcgtcaaacaaatggtgtggctggcctctcaccaaattatcagtgtgataaagtgaaaagagccttggggtcagaagatctaagcgctgaacaagattcttgctccaaagttaggaaaccat

SEQ ID NO: 94049 - DNA, 501 bp, Homo sapiens
tgagaataaagcccattttctgtttttttgttttttttttttttttgatacggagtctcactctgtcgcccaggctggagtgcagtggtgcagtcttcgctcactgcaagctctgcctccagggttcacgccattctcttgcctcagcctcccaagtagctgggactacaggcacccaccaccacgcctggctaattttttgtatttttagtagagacggggtttcaccgtggtagccaggatggtcttgatctcctgacctcgtgatccacctgccttggcctcccaaagtgctgggattacaggcrtgagccaccatggccggccaagaataaagcccattttctataagaagatcttatatgtgatgctgcctttttcgtcaaacaaatggtgtggctggcctctcaccaaattatcagtgtgataaagtgaaaagagccttggggtcagaagatctaagcgctgaacaagattcttgctccaaagttaggaaaccat

SEQ ID NO: 94050 - DNA, 501 bp, Homo sapiens
tgagaataaagcccattttctgtttttttgttttttttttttttttgatacggagtctcactctgtcgcccaggctggagtgcagtggtgcagtcttcgctcactgcaagctctgcctccagggttcacgccattctcttgcctcagcctcccaagtagctgggactacaggcacccaccaccacgcctggctaattttttgtatttttagtagagacggggtttcaccgtggtagccaggatggtcttgatctcctgacctcgtgatccacctgccttggcctcccaaagtgctgggattacaggcgtgagccaccatggycggccaagaataaagcccattttctataagaagatcttatatgtgatgctgcctttttcgtcaaacaaatggtgtggctggcctctcaccaaattatcagtgtgataaagtgaaaagagccttggggtcagaagatctaagcgctgaacaagattcttgctccaaagttaggaaaccat

SEQ ID NO: 94051 - DNA, 2305 bp, Homo sapiens
ggatccaaagatgagtaagagatatcccttcaatctgctcacaggttcctagggaaatgaagaaggaaccaatagttctgtctagggaaggcaggagatgcttcacagaagacatgacacttgtggatcagacaagatggagaggagttttctgatgaagaactgaagataattttcctagtgaggaaagaatgctttcaaaggcacacagaggcgaaatttcatgtcatatctagggaactgactagatcaatgagggcgtgggcacatatatgcatgtgtgtgcatgcacatatgtaagtttgcatgtgatgtacacacatgtgcacatttgtgtgagcctatgaatgcatgtttgcacctatgcatgtgtgtgcttgtgtatgtgcctgtgtgcatgcatgcctgtgtatgcatttgttgagggcataaatgtgtctgtgtgcctgcatgtaactttgcatgtgtgtgtgcatgcatgcgtgtaactctgcatgtgggtgtgtacatgtttgcatgtgtgtgagcgtgagcctaggaatgcatgctgcgtctgtgcatgtgtgtgcctgtgcatgcacctgtgtgtatgtatgcctgtgtatggatgtgtatgtgtgtttgcatgcctaggtatgcatacattgagtgcatatgtgcctgtgtgcataagtgtgtgaaagcttagtgctgacagactgcgaatgcatcttgagcagagagaggaggaaatgggaggaaagggaattctcctagacatgttacatatgtagtcttactttgtcctcacaacaaccttactacgtgggtggcattgtacccattctataataaggataagtgaattgctcaaggacctaacagttataggtgatgaagctataattcaggccacacctctaactagtccccacccacagggacctgagattggggtactttgaagtctggaagcccagctctttccatgtgtccccctctcaggtggaatctggctgaattcctgaatgcctgacatttcactgggagaactccagtggatggtgtgttcattttccagataatccctctagtgtgtgccagggcaacccagctcctctgccaccaggcagaagctagtacatttttcaaagctttttctgcaattcagagagccaacagcaaaacacaaaaccataatttcagtctttgaaaatggccagttggaaaatgaaatgggaggtcatgggtttgaggaaattgggaaaaaccatcaaatgctctccctgctcaacaaagcagctgagagcttgagttagctctgcagagaaatgaccagacgaggtcaggtactgccaagctcactgacttggcctttcctggccttcctcctctgttaaatttggtccatgaaacagcagtgattccaaacaagcttggtcatgcatcatttcagctaagtcaaaaaggagcactcctcattctaacagatattaggacctattttctgtgctaaacactgttctgaggcctttctatattctctcacataagttacatctgttttccagggcttacaccatattttctatattctatttatataggatgaaattataccatacagcacatattacatatttagtgtatttttagttatatatttaaacacttccatgttgcctatgatatactttatgtttttagcacaatcctttgagtcaattatttatcaccccattttttagactaaaaaactgaagcccagcaggctagaataacttgctttaagtcctgcaaccagtaaaactgacaaacagaatgcaaacctacatcctcctgtaacccagatttgtaccttttcttctgtgtcagctctttcatctggtttcattcttagtcacagtcagggcataaccagatgctgtgggatcctgggccacctccgggcaccctcctgaatcagcgtggtcctgaccaccaccaccctttcttcatgtcccaagggtggttgcgttgctgtgaacatacttaaaatcccggcctaaaactgttcagcaaattgtgacttgytcagaaatagaatattacaaaacccttaaaaattatatttcatggccacagaaataaatgcttatatgtaaaacaaacaacaataacaaaggacacaatgtggtcatcataacatgagatcaacattgtgaagaaattcacagaaaaaagccagaaaggaaaatccaattgcttaattaggggttattcctggatgaggggctgatgggtgccttttcttcttcttttgacttttcagtatttcacaactttt

SEQ ID NO: 94052 - DNA, 680 bp, Homo sapiens
ccatctctcagccaccagggatatcacttcttttcacaacttcctattaaatacttattttttgataaaaaagtgcttttctctttggcaayagatatttattaaggatcttctaccagttctaaattgggtaggaaacaaaatattaatccagaaataggttttcttccctaagattttacccagaacaataagcccaagtaaagacaaaagctagagagaaaatagaaaagcaatgagtttgatggtccttctcactcaatagatatttagttaacacttctgagtagccagtcctgcatgaagtgctttgcatggaaatacaaaaagaaagaaaatataacttctatatttgaagaagcaataaacatgttgtgcaaattgaataaacaagtctcttcatacctgggttgagatacacacttggaagtaatcagcaagcaggtggaatttgcagggtttctggtaagaatttgcagaatggtgaaaagtgaaacctgggaataaacacgagccactaatggagcagagagaggtgaagaggaagcaaggagaaggaccttaaagagtgctgttaagtatgtataacattgatgatgactgaactgattaagcagttactatctgcctgataggaagtatataggcatcattttgtttaatattgaaacaatctcatg

SEQ ID NO: 94053 - DNA, 680 bp, Homo sapiens
ccatctctcagccaccagggatatcacttcttttcacaacttcctattaaatacttattttttgataaaaaagtgcttttctctttggcaacagatatttattaaggatcttctaccagttctaaattgggtaggaaacaaaatattaatccagaaataggttttcttccctaagattttacccagaacaataagcccaagtaaagacaaaagctagagagaaaatagaaaagcaatgagtttgrtggtccttctcactcaatagatatttagttaacacttctgagtagccagtcctgcatgaagtgctttgcatggaaatacaaaaagaaagaaaatataacttctatatttgaagaagcaataaacatgttgtgcaaattgaataaacaagtctcttcatacctgggttgagatacacacttggaagtaatcagcaagcaggtggaatttgcagggtttctggtaagaatttgcagaatggtgaaaagtgaaacctgggaataaacacgagccactaatggagcagagagaggtgaagaggaagcaaggagaaggaccttaaagagtgctgttaagtatgtataacattgatgatgactgaactgattaagcagttactatctgcctgataggaagtatataggcatcattttgtttaatattgaaacaatctcatg

SEQ ID NO: 94054 - DNA, 1048 bp, Homo sapiens
ttgtgaggcaaaaaaaatgattttagagtatttttttgatgattttaacagtaaacatccacctgtctatagaacagatctatgtggaaatagcggaatctaccatttcacctctcaatgaatctgtttcttatttacttctttttataaaaaatttcctatttgggcctctctgaataaattataatctaagaatttagatttgcctaacgtatatggtatactacagtcacttccaccccttcatcaaggaaaggaagggtgacactggaatgaagaagctctcttgctacagacaataacagcagcagccctggacttggtggcaaagggtctgaattagcatcctggccctgcagcttagcagccaggtgactgcaggcaaattatatatctctccaagtcacattttattcacatgtaaaatactaatatggataattttcaacatattatactattctgaagattaaagattagctcctagaatgtaagtttccagcatctagatccacatctgacacattttatatatatagtgtgtgtatatatatatatatacacatatatatgtgtgtgtgtatatatatacatatatatatacatatatatatgtatatatatattttttttttttagctagagacagggctatgttgcccaggctagtctcaaactcctgattcctgggctcaagaaattctcctgcctcagcctcccaaagtactgggattatagtcataaaccaccatgcccrgccctgacacgcaatatattcttaggaaatattcattgttgaataaatacatgatctaattaagacacatttttaattttataatcgctagcaaaaaaatggaaactgacataacctccttggtttcactgcacatctgtgggatatttttctcgaggatcttgtaagagtgtccagtaggtgagcttcatactgtagctataatcatatgaatgattttcataatcattcttgttattcctctcacagagagcatttgttgagatgtttctatgtgccaggcactgtgct

SEQ ID NO: 94055 - DNA, 975 bp, Homo sapiens
agtggagataacacttcccaatcattctatgtggctattaatattatcctgatacaaaaacccacaaagacattataaggaaataagactatagaccawtatctcttatgaatacagacacaaacatcctcaagaatgcaagtgtgcacacataaacacacacatacacaatgatctacagtaggaaagatgctagaattgtcatgaaaaaatattaaaaaggggtcaaagagtataaggaagtggtcaatgctagagtagattttctatagaggtctggagaacccatcaggctgattgtgttacctatgagggtcctaaagacagccttcactaatgcagtaagaaatgtgctagtgaaagtggtgacatagataggcagacaatgagggtttttcttgacttaacaaaaaagtctgagagaaggtaaatataaagttgacgttagctaccaaacaaaggaaaaaattatgtatgaccctttgcccagattccaatcttgagccagttctcaaatccagagctcattgatgaagtaaagccagatctccttctagaaggatcctataataccacagtatatacagtagtgtttttcctaatatttctccagagggacctatgactatttcctggagcactgactaccagggagtgaggagtatccagctctttgagggcttctgaatttaggcatctgaactgggcatttttctcaagcaaacccataaatgcaaacatggcttccttattcagcagtggcaggcctagggaatccaggagtaagttgagcacctggtccatatacactttgtagtagagctgatgcaccaatcaagtgcataagtgagcatggatatgcctcaacagttgcacagcaaatttcaggtttgtttcatgatctgtgaagcaagagttattattgtgggaaagggaatatgcatgcctgactcccccatattatacccatccagg

SEQ ID NO: 94056 - DNA, 669 bp, Homo sapiens
cagaaaattaatttaatcttgagcctaaaacaatagttacaccaaatcaatatagtaagaatagctcttttgtccatgatctgagagaaccaggcagcaggtcagacatcaagcagggatggacaaccatcatttacagctcagggctgctcttgttctagggtgcttctgaggcattctggaaggttaagggtcctcaggaggcccttgctcaattacaattactattatgaaatattattacattaaaggtggataattattgtctcaatgccccttccttaattttttttcctttttctttttttaataaaatagcgacatgttctcacaatgttgcccaggctggtctcgaactcctggcctcaagcagtcctcccacctcagcctcccaaagtgctggaattacagatgtgagctaccatggccagcccctaattttatatgaagggggattacatgtttttcatgcacgtaacrtttaatttatattggtatcttatatataaagcattacaccttaaatactaaaaacctaactgggagagaagacatgtaagtccagttgtcacctgaatagatatatgagtgtgatgtacagaggaagggagggagattgtaacaccactgtcaggaaactaaaaaagcaagaacgaaccttccagtgca

SEQ ID NO: 94057 - DNA, 569 bp, Homo sapiens
tattcaccacatgtatgtttgttatgttggctctgaagaaacagatgtaaaagtgccactccataaagacactcattcaggggactaaattggggaagcaaatgtattgttttgattatgctaccaatgtagaattgaaagcaaaattaaagcagcccttttctaacattattatgttatatatatatatattatatatatatcactccatgccttcagatatgcaaacaatagaaaaccaaaagctgcctcagcaaattgatattgaaaacaaaaacgaaagcccacagctgtctaatttatttttcctattgacaatttccttattgttgattggcaaaggraacaggataagcagctgcccactgtgtctctctactggtagctaccaccgcagtgcatgctgaggatggtatgttttagaaagggccagagttggaaggcaggtagaaacggtatgtgtcagaaagaccactcacttcacttcatctaacacagcatggtatagtggagagaatgcaaaatggtaaaatttagagttggaaaacagggatgagccctggcaccat

SEQ ID NO: 94058 - DNA, 1521 bp, Homo sapiens
ttattattattattttgagacagagtttcactctgttgcccaggctggagtacagtggcacratctcggctcactgcaacctctgcctcccaggttcaagtgattctcctgcctcagactcccaagtagctgggaatacaggcacgcgtgccacaacacccggctaattttttttttttttttttttagtaaagatgggatatcgccatgttggccaagctggtctcaaactcctgacctcaggtgatccacccacctcagcctcccaaagttctggaattgcaggtgtgagctaccacacccagcctacattaggcaggagaatcgcttgaatctggcaggcggaggttgcagtgagctgacatcgcgccactgcactccagtctgacaacagaacaagactccgtctcaaaaaaaaaaaagaataagatgaagtatagatatatatcatcagtttcactgacatttaccatttatcttcctttcattgtaaggaattaggagaatgaatacttattaattatatttgaattttgacatcaagaagtcatttagaaataaaatatgatctaaaatattttgaagcatccaataactaggttgccctattatagagaaggagaattttttatttttccctttaaaaagtgagaataacttaagattaagtgttctagataggtgtcactttatattcaactgaatatgtgaaatgccaacactttttttggttattgctgagacaagaatctcacatatgctatgtaacttaaccggttaagaaatctctgtgcctatccaaagccgtctcacagtaggaggcatctagatgctttctgcacatactgcattaaaaaaaaaaaaaagtaatctgtggcaaacttgactcttccttcatatgctggggaacatgtgttcctcaaacatcgtggagagaggcactttttggatatgcccctcctaaaatttgccttgaattgacaagagttccctctgaatttttaaagttgtgagctaatgaccttagtatgggaacatgcatgccatgttatccagaagcaagaaaggccagagaaagagtttgtatgaactaacttgagtttataacttagggggtcagctttgctgaatgcgcctgatctggttaactccattcccactcccagatttcaagacataaacccataagtgagaagggtttactcagaatgtgagaaaaaggaaatgaaagataggaaatgattttcctatgattggggcttggtacaaaaggatatttcactttgaaaccaaggtagaattctaggggccaaccagtcaatcactctccagaattaaagggacaaagagactgtcctggttcaacttcagtatgaaggatgggaggagtgagggatagactgaatccaggagaggaataagtagaccaccattatggtcagccatggggagagagcagaatgcactgggtagggtaaagaacatgttcaaaaatccaccaaagacatctcgacctggatc

SEQ ID NO: 94059 - DNA, 1020 bp, Homo sapiens
gtggtagaattgtggtggcttttgtaagctctttatatttttttccaaatttttagtaataatttttataagaaaaagttatttacagaagtaaataaggatttataagggtcctctttaaaaatacttttagctgggcatggtggcatgcagctgttgtcccagctactcgggagtctgaggtaggaggatttcttgagcccaggagtttgagtccagtctgggccacagagtgagactcatctataaaaactttaaacatttttaatacttttgcgaaggtgggggaggtaaatattgataattttaatgttaatggaaattagtttaaaatatactgttctccagtctcccaagtttggccttgctagaggaatgcaaaggcaaaaagaatgggagagaaaggagaagtgagcagagagagaaagggaagtgagcaggatgaatggctgaggtgggtggagtgctctggagaaagaaaagggcatcaagcaagtgtgattcagcccctgggaagacagagtagagggaggcagacaggtatggagaaatcaggagagcatcaaagacagamaagagtatcatggaaataaaatgagtttagggtttgaagtcagaccagcactctctaccacagttgtgtgtcttcggacaaactctgtattaatttataaaatggggataaaattacccatcttacaggttgccttgtgagatcaaattaaagatgatgatgtctggaaactatactctgctactagaatttagcacttcctttgaatgtttggttgtagtccgccctcctttctgcagaatcccagaatcccaagaaccaaatagaagaaagggccagagagttcctgagcttctagaactccagtctttgctaaaatggcttcaaagggatgagacttatgtggctgcacaggctctcacaccctacctaggagaacctggagggccagagggcctcttactgtctaacacatgatggggaggagtatctgtgaaatgatgaaa

SEQ ID NO: 94060 - DNA, 762 bp, Homo sapiens
ggatgagaaaactgaggctcagagaggggacttgggcagcaggcaggacctggcactcatctgtgtctgggtccgctggggcctctttccctggtcacctcgctttcctggctgcatcggatctcgtgcctcccctttgacctttgccttctgccctctgctctgtgccctgtgctccctactcccgcagagcactgctcctgctttcgatgccaacagcatttactgtgaactgacctcacttgcctgaagaagtgtggggagggtggggaaggggtggttggctctccagccccagagtgctctgtggccctgggagggcatgggtggcacctgagccaggctcccacggttccgcctgcagatcgcctcaggcatggcgtacgtggagcggatgaactacgtccaccgggaccttcgtgcagccaacatcctggtgggagagaacctggtgtgcaaagtggccgactttgggctggctcggctcattgaagacaatgagtacacggcgcggcaaggtgggcaggggctgtgtggtatgtcgcgcttggcctgggacaggtcacgtcccgctctgagccycagttttttcctcagctgtcattcctcatggtgcttatctagcagagcggtcatgacaggaggtcagagctgccctgacctttctcgttcctgcaggtgccaaattccccatcaagtggacggctccagaagctgccctctatggccgcttcaccatcaagtcggacgtgtggtccttcg

SEQ ID NO: 94061 - DNA, 259 bp, Homo sapiens
ctatagaatctgatttttttggtaggttttggcttagggcattttttcctcatagaaattgcattgagctatgaatattgctcttcagtgggactttgacttgacatattttggggatctccttccatctcaatatataaagctgtccatctgcctttttgtcagctgcatagtattccagcaggcagagctgtcatggtttattggccrttcttctggtgatgggcatttagatggtttctactcttttgtaattaaa

SEQ ID NO: 94062 - DNA, 659 bp, Homo sapiens
agctgagaaagtttattgccaatagaactgcacaacaagaaatgttaaaggggccgggcttggtggctcacacctgtaatcccagcactttgggaggccaaggcaggtggatcacctgaggtcaagggtttgagaccagtctggccaacatggtgaaaccccttctgtactaaaaatacaaaaaaattagctgggtatggtggcaaatgcctgtaatcccagcactttgggaggccaaggcaggtgtatcacctgaggtcaagggtttgagacccgtctggccaacatggtgaaaccccttctgtactaaaaatacaaaaaaattagctgggtatggtggcgcatgcctgtaatcccagctacttgggaggctgaggcaggagaattgcttgaacccaggagccagaggttgcagtgagctgagatggcrccattatactccagcctgggcaacaagagcgaaactccatctcaaaaaaaaaaatgttacaggaagttcttctgactaaaggaaaatcacacaaggtagaaattggatcatggatcatctgtaatacaaggtggtggcccagttgccaaaactgtcaccagtggtaacttgagaggatgttctggtgaagggggggtgcctcggttggtgtaataattcaggcatgggg

SEQ ID NO: 94063 - DNA, 938 bp, Homo sapiens
aataaaaaatcatgtcctcagagtagataatttcctaaacaaaatccaaaaacacaagttttaaaggaaaagattgatatatttgattcgacaaacattgtataataaaagacgtgagaagtaaccttagtgagaaaagacgagcaaagattggtacaggctttttggaaaactagttggctctatctactgaagctgaacctatgcattccctatgaccagcaactccacttcttggtatatacccaagaaaagtgcatatgtatattcactaaggacattatgaaaagcattatttgtaatagccccacactgaaaaaaaaaaccaagagcccacaagcagtagaatgaataaataaattgtagtatattcatacattaaaatgtagcacataaaggagaattaactacaaattcacgacaacatggatgaatctcacaaacctaatgttgagcaaaagaatccagacacagaggagtatatactgaaagatcccacttatttaaagcagaaaagaggcaaaactaataatcaggagagtggttatcatccttgggcatagtgactggaaaggagcacaaragaagcttatggcagggaggggagaggttgataatgtactgtgtcttgatctgagagctggttatatgggtgtctttactttgtgaacatttatcaagatatacacctaagatatgtatgtatgtatattgtactaaaataaaacattttgaaaatctgcctaacaggataccttcttatatatggctctcaccagtagagttgcacgcatactaaaagtcatgtgtttcctcaaacaggtttaattcagttacatttgctgtaaatgaacataatatgtatgcaaaaaagaagaccagcaacagatttagagaaactttttgcaaaatatattgctgaccaataattagataca

SEQ ID NO: 94064 - DNA, 697 bp, Homo sapiens
agttgtatggcattggaaccatacttgtgtcagtacataaacatgaaagagctaatctcttttgaatggaaaatgtggcccaattctgtaagaaagggtttaaggccatacgtgattattgctagagcagtkgttctcaaagtgattttgtccttcagggggtatttggcaatgtctggagacatttttggttgttgcaactgggtagggggcagtgctactggcatgtagtgcataaaggccagagatgaagctaagcatgatacaatgcacagtgcagccctctcccacaacaaagaattgcagcccaaacatgtcaatagtttcaaggctgcctgagctacagcaaagattcttcccacactgtcttggaagttcatacaaagtacattgctttttatactccaagacatcatttgtgccttttttcctataaaaaacttttctatctgtatatttccaaattcaaattgtgagatttctttaaaggctctttacaacttctatttattttttgtatttaaataatttatagggccgggcgtggtggctcacgcctgtactcccagcactttgggaggccaaggtgggtggatcacttgaggtaaggaggtcgagaccagcctggccaacatgatgaaaccctctactagaaatacaaaaattagctgggcacggtggcagacacctgtaatcc

SEQ ID NO: 94065 - DNA, 697 bp, Homo sapiens
agttgtatggcattggaaccatacttgtgtcagtacataaacatgaaagagctaatctcttttgaatggaaaatgtggcccaattctgtaagaaagggtttaaggccatacgtgattattgctagagcagtggttctcaaagtgattttgtccttcagggggtatttggcaatgtctggagacatttttggttgttgcaactgggtagggggcagtgctactggcatgtagtgcataaaggccagagatgaagctaagcatgatacaatgcacagtgcagccctctcccacaacaaagaattgcagcccaaacatgtcaatagtttcaaggctgcctgagctacagcaaagattcttcccayactgtcttggaagttcatacaaagtacattgctttttatactccaagacatcatttgtgccttttttcctataaaaaacttttctatctgtatatttccaaattcaaattgtgagatttctttaaaggctctttacaacttctatttattttttgtatttaaataatttatagggccgggcgtggtggctcacgcctgtactcccagcactttgggaggccaaggtgggtggatcacttgaggtaaggaggtcgagaccagcctggccaacatgatgaaaccctctactagaaatacaaaaattagctgggcacggtggcagacacctgtaatcc

SEQ ID NO: 94066 - DNA, 697 bp, Homo sapiens
agttgtatggcattggaaccatacttgtgtcagtacataaacatgaaagagctaatctcttttgaatggaaaatgtggcccaattctgtaagaaagggtttaaggccatacgtgattattgctagagcagtggttctcaaagtgattttgtccttcagggggtatttggcaatgtctggagacatttttggttgttgcaactgggtagggggcagtgctactggcatgtagtgcataaaggccagagatgaagctaagcatgatacaatgcacagtgcagccctctcccacaacaaagaattgcagcccaaacatgtcaatagtttcaaggctgcctgagctacagcaaagattcttcccacrctgtcttggaagttcatacaaagtacattgctttttatactccaagacatcatttgtgccttttttcctataaaaaacttttctatctgtatatttccaaattcaaattgtgagatttctttaaaggctctttacaacttctatttattttttgtatttaaataatttatagggccgggcgtggtggctcacgcctgtactcccagcactttgggaggccaaggtgggtggatcacttgaggtaaggaggtcgagaccagcctggccaacatgatgaaaccctctactagaaatacaaaaattagctgggcacggtggcagacacctgtaatcc

SEQ ID NO: 94067 - DNA, 697 bp, Homo sapiens
agttgtatggcattggaaccatacttgtgtcagtacataaacatgaaagagctaatctcttttgaatggaaaatgtggcccaattctgtaagaaagggtttaaggccatacgtgattattgctagagcagtggttctcaaagtgattttgtccttcagggggtatttggcaatgtctggagacatttttggttgttgcaactgggtagggggcagtgctactggcatgtagtgcataaaggccagagatgaagctaagcatgatacaatgcacagtgcagccctctcccacaacaaagaattgcagcccaaacatgtcaatagtttcaaggctgcctgagctacagcaaagattcttcccacactgtcttggaagttcatacaaagyacattgctttttatactccaagacatcatttgtgccttttttcctataaaaaacttttctatctgtatatttccaaattcaaattgtgagatttctttaaaggctctttacaacttctatttattttttgtatttaaataatttatagggccgggcgtggtggctcacgcctgtactcccagcactttgggaggccaaggtgggtggatcacttgaggtaaggaggtcgagaccagcctggccaacatgatgaaaccctctactagaaatacaaaaattagctgggcacggtggcagacacctgtaatcc

SEQ ID NO: 94068 - DNA, 1172 bp, Homo sapiens
tatgggtcaggaaaccttttatagttaatggtaaaccaatctatttggagagtggcttaaaagcagcttttaaaggagagagagactactatagtttggcttaaaaggtatgtcaaccaaatgcaaaatccttgtttgaatcctgattcaaacaaaccaactgtaagaaggcatttttgagacaactggggaaaattgaatatggactaaatagtagatgatgttcaggaattattgattattttcttgggagtattatattctggttgtttttaaaaagtacraggctgggcaccatggctgatgcctataatcccagcactttgggaggccgaggcgggcagattgcttgagctcatgggttccagaccagcctgggcaacatggtgaaatgctttctccaccaaaaatacaaaaaaattagccgggtgtggtggtgcatacctatagtctcagctactcgggaggctgaggtgggaggatcacttgagcctgggaggcagaggctacagtgagccaagatcacaccactgcactccggcctgggtgacagagcaacaacaacaaaaacatacttatccattggagatacatgctgaatttgcagctgcaataaaataatgccgtagattttattttaaaatactctagcgcatgcagtactactcaaagtctgaggattggggccagtttgcaaattgtgtgctcttggtctgtaataagtgcagaaattgacaacaaatatttagaaatggctatagaactttgacattgccatggcatccaagtagtgagtggtggactctaatgagaatagaacttagtttgggtgttgtcaaacctgcatagtgtgttatgtgtggcttgggtgtgagctgtgtgctggtattggtccatggcagatcggaaattgaacaaaagagtccttagcttgaggagcagtgtcttggcgcacacacacacacacacacacacacacacacacacacagagggaggtggtggtgggatctgctgaaaaagaatggcagaaagctgatggctgttgaaggtaggtgatcagtacatggagttcataatacaattctctctatttttgtgtatatttgaaaatctacattatttggtatattgaaaagttttaaaaatcagcctgttgatggagatatttaa

SEQ ID NO: 94069 - DNA, 1172 bp, Homo sapiens
tatgggtcaggaaaccttttatagttaatggtaaaccaatctatttggagagtggcttaaaagcagcttttaaaggagagagagactactatagtttggcttaaaaggtatgtcaaccaaatgcaaaatccttgtttgaatcctgattcaaacaaaccaactgtaagaaggcatttttgagacaactggggaaaattgaatatggactaaatagtagatgatgttcaggaattattgattattttcttgggagtattatattctggttgtttttaaaaagtacaaggctgggcaccatggctgatgcctataatcccagcactttgggaggccraggcgggcagattgcttgagctcatgggttccagaccagcctgggcaacatggtgaaatgctttctccaccaaaaatacaaaaaaattagccgggtgtggtggtgcatacctatagtctcagctactcgggaggctgaggtgggaggatcacttgagcctgggaggcagaggctacagtgagccaagatcacaccactgcactccggcctgggtgacagagcaacaacaacaaaaacatacttatccattggagatacatgctgaatttgcagctgcaataaaataatgccgtagattttattttaaaatactctagcgcatgcagtactactcaaagtctgaggattggggccagtttgcaaattgtgtgctcttggtctgtaataagtgcagaaattgacaacaaatatttagaaatggctatagaactttgacattgccatggcatccaagtagtgagtggtggactctaatgagaatagaacttagtttgggtgttgtcaaacctgcatagtgtgttatgtgtggcttgggtgtgagctgtgtgctggtattggtccatggcagatcggaaattgaacaaaagagtccttagcttgaggagcagtgtcttggcgcacacacacacacacacacacacacacacacacacacagagggaggtggtggtgggatctgctgaaaaagaatggcagaaagctgatggctgttgaaggtaggtgatcagtacatggagttcataatacaattctctctatttttgtgtatatttgaaaatctacattatttggtatattgaaaagttttaaaaatcagcctgttgatggagatatttaa

SEQ ID NO: 94070 - DNA, 1003 bp, Homo sapiens
gcatatttttataatgcttatatattctctgaccttttaggacagaccagccaagaaattgttatctatagcgtattgaactaagagtgagaggaagtgggggagagagagtttttactttatcctcttatatattatttaaattaattctaagatattcaaatgttttaaaatgcaagaacatttttacatttaaaaaacaacacatatattatagaaaattggaaatgcaaaaaaagtaaaagcaatgccttgatctaagggaaacaaacactgttaaaatctgttcrgatatcctttaaaaatgtttctttgcatacaatgtgcacactatactgttttataatctacattttttcactcataaacattccacatcactatatgttcttttacaatacatttcaagtaaatatgtcactgttaattacatggctatgatagtctgttagtgcattttctcttcatttcccttcataaataaattggaaggaaaatatttgggagaaagcagtaatcaaggtaataggagaggtttgtcaaaataaatgtcataaatgaggattgggcggtgactcagagacccaaaagctaagttcattctttaaaaataagatgtatcaccaaatcttaaggggggaaagaaaacgatgatggaatgaatcagaattacagaatgtcttctacatttctaacaaagttaacaaatagtcatttaaagaattaaaacaaaaatgaaaaaacaattaagaaatcattagctgactccaaacaaagacagagaaacaagtctgggtcctacactttaaaaagtggttgtccaggaaagacacagaagactgctgtgtgacacagcagggagagcccctaactcctaatttagggtgatttattgcttccttcttttaatatttttgcacattttgaatttttataatggcatataacgtatttacaaaaataataaatccattacaaaccctttctgatagattatttttaa

SEQ ID NO: 94071 - DNA, 1003 bp, Homo sapiens
gcatatttttataatgcttatatattctctgaccttttaggacagaccagccaagaaattgttatctatagcgtattgaactaagagtgagaggaagtgggggagagagagtttttactttatcctcttatatattatttaaattaattctaagatattcaaatgttttaaaatgcaagaacatttttacatttaaaaaacaacacatatattatagaaaattggaaatgcaaaaaaagtaaaagcaatgccttgatctaagggaaacaaacactgttaaaatctgttcggatatcctttaaaaatgtttctttgcatacaatgtgcacactatactgttttataatctacattttttcactcataaacattccacatcactawatgttcttttacaatacatttcaagtaaatatgtcactgttaattacatggctatgatagtctgttagtgcattttctcttcatttcccttcataaataaattggaaggaaaatatttgggagaaagcagtaatcaaggtaataggagaggtttgtcaaaataaatgtcataaatgaggattgggcggtgactcagagacccaaaagctaagttcattctttaaaaataagatgtatcaccaaatcttaaggggggaaagaaaacgatgatggaatgaatcagaattacagaatgtcttctacatttctaacaaagttaacaaatagtcatttaaagaattaaaacaaaaatgaaaaaacaattaagaaatcattagctgactccaaacaaagacagagaaacaagtctgggtcctacactttaaaaagtggttgtccaggaaagacacagaagactgctgtgtgacacagcagggagagcccctaactcctaatttagggtgatttattgcttccttcttttaatatttttgcacattttgaatttttataatggcatataacgtatttacaaaaataataaatccattacaaaccctttctgatagattatttttaa

SEQ ID NO: 94072 - DNA, 1374 bp, Homo sapiens
cgcggctttatataagcagcggaggagaaaagcagattgggatgaatgcaacagaagttgggcaagggagcaaataggaaaacggcaagtaatctgaaagatttgccaaaatcacagaagagttttaaacccagaatgtttaaccgtctcctcaagctcatgttctggaaatctgccttggtatccaccatagcaggcactttcagccctacagagtaggattacattggaaatctcaggggccctctggattttcttactctgtaaaaaccatagaacagcctccctgtaacctgagcacagcccaagtactagacgcattcagaggataaggaggaatgtcacttttaaagcaacacaaatagtaattccttgccattgcacaaggcccagagtgtgaatctatccggctgtgccatgcaccttgttggctgcctctctgaacaggatcttggctgcagctcagcagaagcaaggctgctattctccagtgccatctgctcacacaggatggattgctactgctgcccatgagagtcttccctctctctctctgtagtaactctggcaatgccctgttggagaactacagcaagggctccaaaaatgtgtgctgctcagcaacctccggaagggaaacgggaacagggagagctgatgcggacactcttctgacaggacctcctcagcaatcagcaaggacaagcagtccactgagcgggccaacacacaatcatccttcaacagccagcaagaacaacgataccagtggcaacagtaatgaaacacttaggaagtactggaccaggggttgtcaaatgaaggtcatgaccamtattttggttgtttaaaataaaaagtggcacacaaaaagagaaaatattatacattcttaaaatgtgtttcacttaattgcaggattaagctaattcctaccatggagcacattaaaaatagatatccataaaaattttaaaaagaaaaaataaataagcaaatattgggtcaagtctttctatactcccttgtacgtattatctcaattaattcttacaacaaccgtatgaagtagtaccattattattcttggtttgtggttgaagaaatagaaagtgtttgagtaacttgcctggctggcttcccagtcaatgtggttccaaagcctgaactcttaacacatgccctacagcaagtagctccctagaccctgtgtccaaagcctttgctcacttcctcaagcaatttctctcacaccgtaattctttgttcaaccatctgtccctttcccctttccccttgtgaactgagaacacctcaagggcaggtcttgttgagctcagtgacttaaacaaaggctcagggagcaaaggatcc

SEQ ID NO: 94073 - DNA, 549 bp, Homo sapiens
tgccatgtttatcctccaactccaaagaaatctcaggcatcctagcctctttgctgcatattaattgatcattgaatgtatttgctttcatcaactcactgtctgatttcccccatcatacctttgtccagtcctttttccccagccctaatctacagaccctccttgctttttcaggkcaccttataatatgatgtttttgaatgtctcttctcactttgaccccctgccacacccaggaggcacagcctctctttcctgatgtaactgaagtgctggttccagactttactctctaagggtagcaatgactttgcatctagccacacaatacaccaggaaaacagctacagtcaaacaagatatgaatcccgaggaacatcaagggaaaagttgaaggccctgctgatgagtgacaggaggtagtttgggaaggtggtcaggtgaggggagagtgttaaatgaaacagataagtaaagcccttgtgtgttcagaagcaagagcacccccccccccgccccttacctcactgttcaaagagaccacta

SEQ ID NO: 94074 - DNA, 677 bp, Homo sapiens
attcacctcaccctactctttacccagttactttcatttgcaattttctttttcttttcttttctttttttcttttttcttttttttttttttttacttgcagccaaaatcatccccagggtgaaaaaaacatggtcaattcaataaaaaaatttggggaaaactagttatccatgtgggataaatgttaaagtgagagtttgactttagaacaggcccaaggaagagcctatgggctaacacttcattgcggcaaggaggaagaacaaattactgagctggccacagctttgccaccaacacagctcattgcttgctctcacagcatgtcttcgggaaggccataggaaaccactgcatcttggaacaccatgggaaaaggaagcaatctaaatgctggcttttcccttcccctccttgctatcattagcagaagcccacctgctgaggctttaactccctggcacttcctggttatgtttcctgaccccttggagagctgctgaggaagttagaggcttcacaggtcccatgtggcctgtgtggcaaactctgcttgtcagtcaatgctgcacagggggctcttcggtctgtggcattgggggccataactttaygactatgaatgaaccattgccagggttgctctggtcaggaaacaaggcaggtggccagga

SEQ ID NO: 94075 - DNA, 1135 bp, Homo sapiens
cattcctctttacttaggatagaatttggaactaccttccacctagcttcaaccctgcagacatgactaaaacatgatctatggccatgtgaatggagccaatgttcctcttcaactgctcacattgggactattccatgagagaacataaactactttgtttaatcagctatatttgggggtctctttgctgaaatagcttgttccttccctgttagtattagtacacaattgtattagtacacaattcagtgacaagtataccttgtggttagagaattagaacattcccctctgtggagggcagcggagctaaaggttgagttcatcatcaatggccagtgatttaatcaatcaaacctatgtaacaaaacttccacaaagacccaaaagggcagggtttggrgatcttccaggttgctgacctcacagaggtgcctggaaggtggcactccctaaaagggcatggaagcgccatacccttcccacataccatgccccgtgtttctcttccaactggctgctcatctgtatgctttatcatatgtttattaatataacatctggtaaacataagtgtttccctgagttccatgagccacactagcaagtgaacaaacctgaagagggggttgtggaaacccccaatttatagccagtcagtcagatgttctagaggctaggaattgcagttggcattttcaaatggcaggtagtctcataggactgagcccttcacctgtgggatctgactctgactacaggtagacagtgtcagaattaaattgaatgacagaacacccccttggagtccagtggagaactgcttggtgtgtggggaaacttcacgcacatccggagtgagaagtgaagcaggatgcgctgtgttgagtaggatgtgttgtgagagtaggaaaaacactgtcttttttctatcccttacagtggtcaaagaactctctgtgatgtttttcttttaaataagagaaagtattcacacagtgtgcaatttttttttattttactttaagttgtgggatacatgtgcagaacacgcagatttgttatataggtatacatgtgccatggtggtttgctgcacctatcaacccatcatctaggttttaagccccac

SEQ ID NO: 94076 - DNA, 714 bp, Homo sapiens
tactaatacagaagggatggaggccaacctggatttacagataaggatctttcaaagagcaattagagccaatgcctgacagagctccagctgaagaaaattgttccttaagccctggggcttttcaacatcccagagaccttaagttaaacagttaatagtcttttcttagaggagaaaaatggaaatgaaagatacattatgttatatgatgtatatatctggatcatagaattttagaactggaaggggtattagagagaatctaatttgaatgtttcattttgcaatagaggccttgagaggtggaaataaattgcccaacatagattgtcaatggtagaattagacctagatttattaattcctgatgaaatgctcttcctattgaccttactctaggtgtttgttttaatttcaataggattttatggaacagktagtgtttggttacatgaagaagttatttagtgatgatttctgagattctggtgcacccaccacccaagcagtgtacactgtacccaatgtgtagtcttttatccctcatccccctcccatcctttcctcgagtccccgaagtccactgtataattcttatgccttggcatccttgtagcttagctcccaaatctaagttttttaatattatatttttaaattgttcccttatttaaagggtaatatcaggaaatcactatttttttaatttct

SEQ ID NO: 94077 - DNA, 1102 bp, Homo sapiens
agccctgaacaagctgcctgccccaccggacattctctcatgtcgctgcctcaaaattcctgcagattttgatgaggtatggacattcagaagcctgagaaactgctgcttcatcaaaattgtatctcctactttagtttgctattgtagactagagtgaaaatgacagaatttatatacctgagtcatcaagctgggacagttggtctggaagggctgttgctctaattgttggcctctatagacagcccaagctgaatgggacataaaaacgtgtgaccagccagaaagtgaaggctaaaggccaggggaaacatgggggcatggtttgtagttcatgtaattgacagggcataaaaagaagagaaggttggaaactagagtgaatagtggtaactatagttgtcgcctgttcaacgagctttcctatcctcttctcctgcttcctttgttgaactcctcctgtactccacatagtctgagtaaggctattaatcagagtatatctcttccatactccatccccactctgcaaaactacaaagctcacagggatgggcacatggctgtgcacctaggtcaggccaatgttctctttggaatgtctctgtgggagctagcacagaaggctgctaggaaaacatcatgaacagcagagacaaatggaagaaagagaaataggcgggtgggaagagrgagagaggagacaaagactgaattgatattgacattgttagagcttctggatccagccatgctagatctacctcttgacttcccagttatttgaatcaataaacttctttccccttgcataagatagattgagattgatttggacaaaatgtgtcctgatgaatttaccaaggtgggccagaggacaaatggagcaagattagatgatttaggaactgatgaatcaaatactgggcatgtttaggaatctctctactgtgagtcagagataactcaccaaaggagctctactttcttagacagaaacagagcttgtaaaacccaagactgtgaataggaaaaaaaaaaaaaaagagagagagagaggtcttcaaagctcattcaacttttgtttaattattccaac

SEQ ID NO: 94078 - DNA, 720 bp, Homo sapiens
cagtcaagctggagtcagacacaaccaggaaaaaccacctttagccccagcctggtcctccatggaccacacacaccaagggagttggaaaagcggctgataataatttttaacgagtayctacacagtggcatagtagaaggagcatgaaatttgaaattctgcaaaatctggacttgaatagctgctcagtcacttgttagcagttggttcttttttttttttttttttttttttttgagatggagtcttgctctgtcgccaggccagagtgcggtggtgggatcttggctcactgcaacctccgcctccaaggttcaagtgattctcctgcctcagcctctggagtagctgggactacaggcatgcaccaccaggcccagctaatttttgtatttttagcagagatggggtttcaccatgttggccaggatggtctccatctcttgatcttgcgatctgcctgccttggcctcccaaagtgctgggattacaggcatgagccaccgcacccggtcagcagttggttcttaaataaagtccataatgatttaaagcctctgtttttttatatttaaaatagagtagtgtacactttacagaacttccaggattaaaaatgaaaatatgtggagtgacttaaaacagagcaggagtttaagaaatcttaattcattacagtactgaacgtccaggtgtcatatcacacaagcctttcca

SEQ ID NO: 94079 - DNA, 720 bp, Homo sapiens
cagtcaagctggagtcagacacaaccaggaaaaaccacctttagccccagcctggtcctccatggaccacacacaccaagggagttggaaaagcggctgataataatttttaacgagtatctacacagtggcatagtagaaggagcatgaaatttgaaattctgcaaaatctggrcttgaatagctgctcagtcacttgttagcagttggttcttttttttttttttttttttttttttgagatggagtcttgctctgtcgccaggccagagtgcggtggtgggatcttggctcactgcaacctccgcctccaaggttcaagtgattctcctgcctcagcctctggagtagctgggactacaggcatgcaccaccaggcccagctaatttttgtatttttagcagagatggggtttcaccatgttggccaggatggtctccatctcttgatcttgcgatctgcctgccttggcctcccaaagtgctgggattacaggcatgagccaccgcacccggtcagcagttggttcttaaataaagtccataatgatttaaagcctctgtttttttatatttaaaatagagtagtgtacactttacagaacttccaggattaaaaatgaaaatatgtggagtgacttaaaacagagcaggagtttaagaaatcttaattcattacagtactgaacgtccaggtgtcatatcacacaagcctttcca

SEQ ID NO: 94080 - DNA, 2107 bp, Homo sapiens
gaaactgaagactttcacttgggaaattgccttttatttccattttaagcatatacctatttgaacattccttgtgtttacctaggtgttagacctgacttggaactgtgggaaacacggagggttttgtgaaattttgaaagattcccttttagctcaatggctaattaacataagagacaatgacatcagaatgagaggcattcgtaaagctgcatttgaattgtcatagctcaatgtttgtttgaaatttaatttttaaaaaattaattaattttacctgggagtcagaggttgcagtgagccaaagttgccaccactgcactccagcctgggcgacagagcaaggctccatctcaaaataataataataataataattattattattatttttatttatttttttgagtcaaggtctcactctgtcacccaggctggagcgtgaccatagctcactgcagccttgacctcctgtgctcaagtgatcctcctgcctcagcctcctgaatagttaagactgcaggtgtgtgccactaagtctggctaattaaaaaattctttttgtagagatgaggtctctctctgttgtccaggctggtctcaaactcctggcctcaagtgatcctcttgcctcagcctcccaaggtgttaagattaaagacatgagccactgtgcccagcctttaaatttaattttatctcttaggtatattttgcttgtggagtttttccacttgttctgacaaagcaaagcaaaacaaaataaaacaaaatgttgccttactgaaatgcaagctgattaattaattagttaattaattaaatgcatttatttaactcatacaggatgccagacactggggatacagaggatactgttacaaagtgataattggagaaacaaaatggacattagcttatttaggagaggtaaaattttaataaaaaattaaagatcagaaatgccagccctcttttatacatttttgctcttaatacaatattaggactttttctatgtgcaaactaataatrgactaacattggctgtctatttcaaatgaaagtagaaaaggtgtgtcaagtgcttgtttaaatatcagaagaaataatggagctgccatttatcccagagtaagtgcttggaaaactttggtatcctgaacaaggctgaaagaagttaccagcaaagaagttatctgggttaccaaaataggtgccttaatatcattgagctgttgtatttcactctagaagagcccgcaagtctgttccttggagcccagtgactgttgctcgacccgcggttgttacagatgcagtgctatggtttcctggtgcacagcaggctccttattgcaactgaccagaaaacaggagattgtgagtgggagacacacgtgcagcagcaaaagtgatgggtctgaaggtaagggagggacagaaagagtgtaaaaggcaggagacccagtaagaagtgtggccgtctgtggcaggtctcattgtccgttgtcccggctgggtctggagatggaaacaggtttgtctgtgggttcaggaatgcctgaagctgagagcctgagtttggaactttgaggacttccaggaaaagctgaggctgaacttggagagaagcctgatatagactggtttcaattgcaaggtgacaccagcagtcagagaccaggaactaactgggcccaaacggagatacgacgtttggaggaaccagagctggggcagagatctggagaagccaaataagtcctgctggggagcaccctacaagcaacagtcaccagggaagccctggtgggcaactgctggaaacccaagagctgtccctgttggcttctgttcctgctcatccccatcgctgatctttccttcgctagcactaagtcttaaagcatcagcatttggggaaacgttttacccaactggacaatggtgttcattttatgagtagttttatacatttgcccagaggcccctacagaatagatggccttaaaagccattgattattgctctggtacaggcactggtttaggtactaaggatgtagcagggagcaaaacagatacggtcgtgtgtcacttag

SEQ ID NO: 94081 - DNA, 1169 bp, Homo sapiens
tttgagagtgtcccataagtcctttaggctctgttcagttttattcattcttttgttcttttggctcctctgtctagataatttcaatttcctgtcttcaagttcactgatttgttctatctggtcaaatctgctgttggacttctatagtgaggttttcaattcagttattgtattcttcagtttcagaatttctgtttggctcttcttcatggtttttatatctgttgatattctcattttgttcattttcctgattttatttagttgtctgtctgtactctcttttaattcacattgagcatccttatggtggttatttttaaattcttcctctggtaattcacttatcttacttctttagggacagtttctgaatattaacgttcttttgttgggtcatgtttccttgtttctttgtatgccttgttatcatctgttgggacttcattcacgaaacagccacctattgcagtctttggagtctggtttcatacagggaggactttctccaattagatcaactagagttctggagacatataaagctttctaaggatccttcctgtctgggcttttgtatgttaagctcccagttgaactttactggcttctactcaggagccccacctggtgtctatctgtagtactgcagcctcgctggtggtttaataagacatagcactggagcgccgcctagtgtctatctgtgataatgcactctggtgcacatttaactctctttttctcagcagcccccaacctggcaccccattcttatcagtacttagctttagcaagacagacactagtcccatgggaagccaccgcccccactccagaaaagttagaatgttggatatattttccattyttctttccctactcagggagactttcccaactcagggagttgggagttctttcccaatcatgcccgctattttggaagaaagggctctggcaaatgaatgtcgtgttttctttgttaccacacttcaatttggttggcttcacactagcctgtgatgcagaaacttatttatttatttatttattattttaagatctgggatacatgtgcagaacgtgcaggttacataggcatacatgtgccatagtggcttgctgcacccatcaacggtcatctaggttttaagtccggcatg

SEQ ID NO: 94082 - DNA, 1043 bp, Homo sapiens
gtttctttactttggtagaacatcagaatcaaatgagggcttaaaatacagatgaccaggccccatcctaaaccaccttaggaatgtgcttttacaaaggcacctgaggggactctgaagcacagccagggctgagacagtaaacccaaacttgactcagataagcccctgctcttgttttctggcctcatctctttgccttcagtctccaaaggagcaaaagccatcttttttttttttttttttttgagacacagttttgctcttgtcgcccaggctggagtgcaatggcacgatttcagctcactgaaacctccacctcccagrttcaagtgattctcctgcctcagcctcccgagtagctgggattacaggtgtgcaccaccacacccagctaatttttgtatttttagtagagacaggtttcgccatattggccaggctggtctcaaactcctgacctcaggtgatctgcccacctccgcctcccaacctgctgggattacaggcatgagccaccatgcctggccgcaaaaggcatctttaagcactgaaatctgagtaagatctatcaaatcctggggaagagaacattagaggtgacaggtgatggaagaagtgggtctttctcattatctatccagtatcacccttctaatgccttcacatatattcagggccaataaagccatcactgctctgttttagagcagtgcctctaaatgatagagaaactatacctgcctctagggcacagtctcagtggggacagaaagattcagtcctagttagagaagagactagaaaaccctcagagggagactgcagacttgcagctacagatggaagagttaaccagaaggtatttatcaacctaagggctgccatgtatgatgtgcatacacagcacagtctctgcagcgggtggcccctggagtcaccctgtgcagcctgcacagcaatatgtgatagccctgcttaaaggggcctacaatgaaagcaccgcctgttaataacaaagttgttgcagctgaggtgaggaa

SEQ ID NO: 94083 - DNA, 1501 bp, Homo sapiens
acccaaatgagatagattttcccaaacctgctggctgggtatcatgttagattctaagatgcaaaaatgaacaagcttcatgctgggtttgtgctgtttgctaagagacagaaaagaaaaaagaagctacagcaaagggtatatgtgctttctgagatacaagaaatacagagtgctttgagacagcacaggatggaaatccctgctagtttacgctggcctcttggaggaagagatttatcagctgagacttgaaggaacagtaaaaagacagccaggtgtaaagggaagggcaagttttccagttagttggaacagtaaaaagacagccaggtgtaaagggaagggcaagttttccagttagttggaacagtatatctgaggacctgaacaagtcagagagagcttggttcacacgaagaacagatttctctcctagccgtgrcaataatatattgagcttatttgctaatacagcatccctgcctctccatatatacactatatcatgagaaacttgttttattcatttgaatgttgaatttcctaatctaggaatgggaactagggagctagggatgcaggatcctgggacaggatggggactttttaatctataccttttgttatttgctgattttaaaaaattctgtgaaagtattacataattaaaaattaaatatgtaatgaaccaaatggtagcaaatcccaaacattacaaaatgcacataaaatagggaaacatatcatctgtaatgccatcattcagagatgttcagtcaacaatttttgtgtgtttatatctctctaaacttctaactatgcatttgcatgtgtacacacacatctctgtttcaaaagctgcttttctcatttgaccttagaagatgaatataattttaatgtcaatatatgattgcatcaccatttctaatatctccatgatactcaatttcatggatatagaataattcttttaaccattgcccactttgataaatacttaggtttttttctggttgtctatggttacagtgctaattcaaaagagcaaggtacagagtagtttgtacagtgtgctaccatttaggtaaaaatggattgggaacctattgatcaatatacatattcacttggaaagttactgaattctttaccaagtgaatgttagaaactatttttagaatttcacaaaaattcaaatgaacatttattcccacaagagtgtgctatactagaaataacctataaaacccttttcacagagaagacaatcctcttcaacccctccactcttctccacctccagtccttgaccaccaaccagataactttttaaaaaaaacagattctccaacctgtccctttgccatcctctgccctgtaaccttctgtactttttttttttcatgaatcacctatcattaccaatcatcactctaagggggacagccctcatccgtgcacacactattcagtgcccagggcctgagtattttga

SEQ ID NO: 94084 - DNA, 655 bp, Homo sapiens
tgcatggaaaaggccctatccaggactgtataatccagaggccatgctccttcatttcatttttggctctgcccaaggtgaaattctcctagtgtgggacacaggaagaaactgcctcttctgatgatcatcttgttttcttttatcagtgaaggctatgagccaccatgggtctttcttctttaacttcactgccagaaaaawtcattctaatgtaaatattcatttacagtaattaacatataataaacatttaggatctgtattttccttcttgtagtgatttctgatttctcaccttaggaactgattcattgcaagattttattttatatatagtctaacattataaatgatctaaaagattttcttatgaatagtgaattagatattttacataagaaaacaaacaatttagaaccattacatttcctttaaatatatgaatgattaccttaaaggcagaatccattaagtcccttttttttctttcaatctttctaaccctgagtccagcatggatctaaaaccagtaagttctcaatttgggataaaacagatgtacagagtttgtccggggaaaatgtacatataccagctgcagttttacctttggagaatatgcctttggtaaacacaagaaagcctccccaaa

SEQ ID NO: 94085 - DNA, 1575 bp, Homo sapiens
  misc_feature (1)...(1575): n = A,T,C or G
catgcataagaaaactgttgcaacagggcaggtgaaaattttaacaaccacgtcacaatttaaaaataataatgatccgggtacggtggctcacgcctgcaatctcagcactttgggaggctgaggcgggtggatcacttgaggtcaggagttcaagatcagcctggtcaacatggtgaaaccccatctctactaaaaatacaaaattagctgggcatgttggcacatgtctgtaatcccagctactcgggaggctgaggcaggagaattgcttgaacccaggagttggaggtaacagtgagccaggattgcgccattgcattccagcctggccaacaagagcgaaactccatctcaatcaatcaatcaatcacaataatggagtaaccatttccttcaaaacaagtctttagggcagagattaaaggcttcagggaagaagtggcaagacaatggaagttgaaatatgaggtgggggaaaaaacgtgaaaatgatcaaaaaactgaaaagcaaattgatagcaccataaatgcaaagaaactctgttggaaacataacaaagaacaagaagcaaaggactaagagaaagcaaacaaaacagtgtggaagtttttaaaaatgaaatcagcctgggcgcaatgsctcacgcctataatcccagcactttgggaggccaaggcaggtgcatcataaggtcaggagttcgagaccagcctgaccaacatggtgaaaccgcatctctctactaaaaatacaaaaattagtggggcatggtggttcatgcctgtaatcctagctgctcaagaggttgaggcaggagaatcacatgaacccgggaggcggaggttgcagtgagctgagatggcaccactgcacgatctgcctgggcaacaaggcaagactctgtctcaaaaaaaaatacatatatatacacatgcataatgtgacccaaatgaatatagttcaaataaaaggaccaaaacatcattttaaaatgtaattcaataaatctttatagtaattaaacaaatttcggctgtacatattgaaagacaaactgttccatgaccgatagcagaaaaaaatccagtaaaattacagtcntcaaagtgaagaattttttttatccagctaggcaaaaatattgggtcacctaaagagagaaaaaactaaaaattggctaaatggtgagcaggctaaatgataattgggctaatgcaatgaattaaaacaaacaaacaaacaaaaaacagttaagttataagtgcttccaaagtccctgaggataagatgtgaccagtaataagacagcaggaaaatcttttatgatccaattaagaaattaagggagactagagtggagaagaatactgttgcccaggctggagtgcagtggtgtgattatggctcactgaagcctagacaacataggctcaattgactcttccacctcaatctcccaaatcgctgcaccaccatgcccagctaatttttgtatttttgtagagacaaggttttgccatgttgcccaggctggtctcaaacacctggtctcaagcaattcgtctgcctca

SEQ ID NO: 94086 - DNA, 1575 bp, Homo sapiens
  misc_feature (1)...(1575): n = A,T,C or G
catgcataagaaaactgttgcaacagggcaggtgaaaattttaacaaccacgtcacaatttaaaaataataatgatccgggtacggtggctcacgcctgcaatctcagcactttgggaggctgaggcgggtggatcacttgaggtcaggagttcaagatcagcctggtcaacatggtgaaaccccatctctactaaaaatacaaaattagctgggcatgttggcacatgtctgtaatcccagctactcgggaggctgaggcaggagaattgcttgaacccaggagttggaggtaacagtgagccaggattgcgccattgcattccagcctggccaacaagagcgaaactccatctcaatcaatcaatcaatcacaataatggagtaaccatttccttcaaaacaagtctttagggcagagattaaaggcttcagggaagaagtggcaagacaatggaagttgaaatatgaggtgggggaaaaaacgtgaaaatgatcaaaaaactgaaaagcaaattgatagcaccataaatgcaaagaaactctgttggaaacataacaaagaacaagaagcaaaggactaagagaaagcaaacaaaacagtgtggaagtttttaaaaatgaaatcagcctgggcgcaatggctcacgcctataatcccagcactttgggaggccaaggcaggtgcatcataaggtcaggagttcgagaccagcctgaccaacatggtgaaaccgcatctctctactaaaaatacaaaaattagtggggcatggtggttcatgcctgtaatcctagctgctcaagaggttgaggcaggagaatcacatgaacccgggaggcrgaggttgcagtgagctgagatggcaccactgcacgatctgcctgggcaacaaggcaagactctgtctcaaaaaaaaatacatatatatacacatgcataatgtgacccaaatgaatatagttcaaataaaaggaccaaaacatcattttaaaatgtaattcaataaatctttatagtaattaaacaaatttcggctgtacatattgaaagacaaactgttccatgaccgatagcagaaaaaaatccagtaaaattacagtcntcaaagtgaagaattttttttatccagctaggcaaaaatattgggtcacctaaagagagaaaaaactaaaaattggctaaatggtgagcaggctaaatgataattgggctaatgcaatgaattaaaacaaacaaacaaacaaaaaacagttaagttataagtgcttccaaagtccctgaggataagatgtgaccagtaataagacagcaggaaaatcttttatgatccaattaagaaattaagggagactagagtggagaagaatactgttgcccaggctggagtgcagtggtgtgattatggctcactgaagcctagacaacataggctcaattgactcttccacctcaatctcccaaatcgctgcaccaccatgcccagctaatttttgtatttttgtagagacaaggttttgccatgttgcccaggctggtctcaaacacctggtctcaagcaattcgtctgcctca

SEQ ID NO: 94087 - DNA, 695 bp, Homo sapiens
agccctctcatggtaggctccgcaagatgtgttcactatgcccctacattatttgaaggcacagttaggaactgtgagctccttgaggagtggagctatgcctgaagctcccttttaggctgagcagagatgctttcagatcatggctgctaatcccctcctttcatatctatgtcagccrggcattgactttgtcatcacgaggctgtcctgcatggcccaggtttgtcccactttatactgcatcaggttgcacgatgctggccaggcacttttgctagctcacatgccccatttcctcacttcccaggcagaatagaatgtgctccctaaacagaagtcagcctgctcaggggcctggcttcagactaattcttcaaagtcaacttctttatacaaaccctgtgaccacacgtatctcccagcctggtgattcaaggcttccaggctgctgccttaatgaaccatgaattccttagggttacatctgtgtctaccttcatcatcactagattcccagtgtagacgcatcacctgacaaacagcaggtgctgaaaaaaaacatgaacaattgcatgtggatatagatggagtatagaggctcaggaacttgtccacctatgtctgcccctccctgtgggtatctccctgctcagagtcaaccaacaatcccagagaactgacccagtgatgca

SEQ ID NO: 94088 - DNA, 695 bp, Homo sapiens
agccctctcatggtaggctccgcaagatgtgttcactatgcccctacattatttgaaggcacagttaggaactgtgagctccttgaggagtggagctatgcctgaagctcccttttaggctgagcagagatgctttcagatcatggctgctaatcccctcctttcatatctatgtcagccgggcattgactttgtcatcacgaggctgtcctgcatggcccaggtttgtcccactttatactgcatcaggttgcacratgctggccaggcacttttgctagctcacatgccccatttcctcacttcccaggcagaatagaatgtgctccctaaacagaagtcagcctgctcaggggcctggcttcagactaattcttcaaagtcaacttctttatacaaaccctgtgaccacacgtatctcccagcctggtgattcaaggcttccaggctgctgccttaatgaaccatgaattccttagggttacatctgtgtctaccttcatcatcactagattcccagtgtagacgcatcacctgacaaacagcaggtgctgaaaaaaaacatgaacaattgcatgtggatatagatggagtatagaggctcaggaacttgtccacctatgtctgcccctccctgtgggtatctccctgctcagagtcaaccaacaatcccagagaactgacccagtgatgca

SEQ ID NO: 94089 - DNA, 695 bp, Homo sapiens
agccctctcatggtaggctccgcaagatgtgttcactatgcccctacattatttgaaggcacagttaggaactgtgagctccttgaggagtggagctatgcctgaagctcccttttaggctgagcagagatgctttcagatcatggctgctaatcccctcctttcatatctatgtcagccgggcattgactttgtcatcacgaggctgtcctgcatggcccaggtttgtcccactttatactgcatcaggttgcacgatgctggccaggcacttttgctagctcacatgccccatttcctcacttcccaggcagaatagaatgtgctccctaaacagaagtcagcctgctcaggggcctggcttcagactaattcttcaaagtcaacttctttatacaaaccctgtgaccacacgtatctcccagcctggtgattcaaggcttccaggctgctgccttaatgaaccatgaattccttagggttacatctgtgtctaccttcatcatcactagattcccagtgtagacrcatcacctgacaaacagcaggtgctgaaaaaaaacatgaacaattgcatgtggatatagatggagtatagaggctcaggaacttgtccacctatgtctgcccctccctgtgggtatctccctgctcagagtcaaccaacaatcccagagaactgacccagtgatgca

SEQ ID NO: 94090 - DNA, 490 bp, Homo sapiens
caccacctccctcccacctcttccatgctagactttgtttcctgctgggctgcagctgcccctcaccagctggtgactcagagcctgggcaggatgacagtgccgattgggccctcgcaaccctctgagccttctgtgaatcagcytgcggtgaggctgcgcccgggctcccgggtggggcacctccaccccagcctggccctccttcctctcccctttaggtcttgctgatttctgtcctccaggtcttctcagtagaatgaggataatcctgaattcagaacatatttcctgagtacggtgagtgcccaggagatgggggctgagagctggctcctgcgctcctgagagcacagtttcctgggcaggagcagagagaaggcccagaggaagatgggagggaggcaaggcaaaggatgctgtggggagagcccagagctgggccgcaggtgagcaaagaccactgtgtgttaaggactggtcagggacc

SEQ ID NO: 94091 - DNA, 729 bp, Homo sapiens
cttaaagtagctccccttcctccctgtcaggcatctttgcataactctgaaragttttgaagatgcaaagtccttcctctctgcccattcagggaagcttctggccgccctcggggtgagtgggcagtggcgggtggaagttcctcaacttcattacagctgtgaggcctcggatcggctctcaccactctgggcatccttttttgtaaaatggagccagtaatttccactctcctggttattgtaggctggcaatgagggcatccgcggatggcacctggcccactcatcaaatggcagctaccctctctcgtgatgattgtcagcatctagtgtgaaagatgggaagagcctacatcaattcttttttttttttttctttaagagatgtaattgcccaggctggtcttgaactcctagactcaagccatctgcctgcctcagcctcctaaaatgctgggattacaggtgtgtgcccccaagcccagcctgcactggattctcattctgatgttacaaggtggatggggccatgatagaggtttgagccagcagggagggtgtggcacgaggcctgatggcttcttggaggaggaggtgtttgaactaggccatcggagacagaacagattcactgggaaagtagctgtgtgtgccaggtgcaccagccgggctgccaagtgctgatttgtagaaattctctggggggttctctgagtgaggaagaag

SEQ ID NO: 94092 - DNA, 729 bp, Homo sapiens
cttaaagtagctccccttcctccctgtcaggcatctttgcataactctgaagagttttgaagatgcaaagtccttcctctctgcccattcagggaagcttctggccgccctcggggtgagtgggcagtggcgggtgraagttcctcaacttcattacagctgtgaggcctcggatcggctctcaccactctgggcatccttttttgtaaaatggagccagtaatttccactctcctggttattgtaggctggcaatgagggcatccgcggatggcacctggcccactcatcaaatggcagctaccctctctcgtgatgattgtcagcatctagtgtgaaagatgggaagagcctacatcaattcttttttttttttttctttaagagatgtaattgcccaggctggtcttgaactcctagactcaagccatctgcctgcctcagcctcctaaaatgctgggattacaggtgtgtgcccccaagcccagcctgcactggattctcattctgatgttacaaggtggatggggccatgatagaggtttgagccagcagggagggtgtggcacgaggcctgatggcttcttggaggaggaggtgtttgaactaggccatcggagacagaacagattcactgggaaagtagctgtgtgtgccaggtgcaccagccgggctgccaagtgctgatttgtagaaattctctggggggttctctgagtgaggaagaag

SEQ ID NO: 94093 - DNA, 838 bp, Homo sapiens
ggacaagaggctacatgtcctacttcagtcgccagccccaagtcaagcagatttgaccatcttctcaccaccaccccaatctacccccaacagaaccttcagatgggttcagagagagaggaggcgttaatgtgtcaactctctatgtctgggccttgccttttgcccaggaaacatattgatagcccctgtgtgtatttggaggaggagatagtgtgtaaacatggggagacctaggatgcactggtaatgccacatgcttcctccttcgccagctggcacatatcagcagagactccacagtttctgtatctgccatgaaaatataaatttgaagctggaaaattccttagcagctaaggagtaggaatggccaagggctcctcttgtcactcatccagtcagtgggtcaacaagcgtttattgagtgcggccaargtctgggccatgtgctgtgggtaagatggagacaatttctgtcctcaaggagctggtattctagctgagggacagacaggaaacaaggtgttacagcattgagtgactgttctgacaagtgctgaagcagatggagaaggggctgtaagagtggatagcaaggcacctggcccagtggactggctggggtacagtcagagctggcttcctgagatgggaaaacggtggtaagagggacctgggagagtgtctaggcagatatacagtaggtacaaagacccagcggcagaaaggagtttggctcttccaggaacagagaagggacattgtgactagagaggagaaagcctgaggggtagggctggaggaagagcccccagggtaggcctggatgccagga

SEQ ID NO: 94094 - DNA, 701 bp, Homo sapiens
taaataaatctttctctctgaggaccaggactgtcctccttcgacatgacatcactagcgtcagtcgcaatgggagcttgagggagcacgtatgatgtgcagaacactatcctgggcactggaggggaacgtgacagtgagggacccacctggtccttgggacctcacaggtttgttcatagacctatactgaaacactcatgcctgcagtggccatgacacatcatggggtacaaagtcccttctatagtgcatgtgggcctctgctactgtgcagagcttctgcttgtaaacttccaggaagggggtgccttaccgccttcccaggcacaaattccgtggttggatccaacagcactgaagtcaggcagggggccgctgaagtgccagcagacaggcagggagtgagaaataacttcaggatgataaagataatggaagcgcccgttcattgcaggctcctgtgctcagttcagtgctttatagcttctgcctcattgaatggtcacaacttttggggaacacccactttacaggagagaaaactgaggcttcatgaggtataagtaagagatgaggatgagatcaggcacagtggctcacgcctgtaatcccaacactttgggaggctgaggcaggaggatcgcttgagcccaggagtttgagaccagcctgggcaacatagcaaaaccycatctcta

SEQ ID NO: 94095 - DNA, 701 bp, Homo sapiens
taaataaatctttctctctgaggaccaggactgtcctccttcgacatgacatcactagcgtcagtcgcaatgggagcttgagggagcacgtatgatgtgcagaacactatcctgggcactggaggggaacgtgacagtgagggacccacctggtccttgggacctcacaggtttgttcatagacctatactgaaacactcatgcctgcagtggccatgacacatcatggggtacaaagtcccttctatagtgcatgtgggcctctgctactgtgcagagcttctgcttgtaaacttccaggaagggggtgccttaccgccttcccaggcacaaattccgtggttggatccaacagcactgaagtcaggcagggggccgctgaagtgccagcagacaggcagggagtgagaaataacttcaggatgataaagataatggaagcgcccgttcattgcaggctcctgtgctcagttcagtgctttatagcttctgcctcattgaatggtcacaacttttggggaacacccactttacaggagagaaaactgaggcttcatgaggtataagtaagagatgaggatgagatcaggcacagtggctcacgcctgtaatcccaacactttgggaggctgaggcaggaggatcgcttgagcccaggagtttgagaccagcctgggcaacatagcaaaaccccrtctcta

SEQ ID NO: 94096 - DNA, 860 bp, Homo sapiens
ggttcaatgttcactacgtaggtgatgggtgcactaacatctcggacttcaccactctacaattcatccatgtaaccaaatcccacttgtacctcaaaagcttttatatatatataaaattcctaattgaattatatataataatatatattatatatataaaatatgtatatatatacmcacatacacacatatatataatatatatacatattctgtgtgtatatatatatatacacacatacacacatatatataatatatatacatattctgtgtgtatatatatatacacacacatagtctgtacatatgtacagaatatgtggagtgcattggaatattaatcagcctttaaaaagaagaaatcttgccatttacaacatcatcatagatgaacctggaagacatactacatgaaaaacaaggcatacacataagaacaaatactcatgataccatttatatgattaatataatatagtcagactcctagaagcagggtgaaatggtggtgctgaaatagagaaaaaaatgggcacatccatacttcataatacgttctccttttctagttttctaactctaattggcttttgttacttgccacctaaagaatattaacaaatataatgatcatttacaaatatacctgatcaatctgttaggagaaggcattactgatgttttctcatcacacaggtaatatattagttagggttaggtattgctgcatagcatagaaaaataaaacaaccttagttaaaatgagatggaactttatgtcctcttggataaaataaggctgagggtaggcaactcagggctgatacaacagttcttcagttatcagaaaacta

SEQ ID NO: 94097 - DNA, 860 bp, Homo sapiens
ggttcaatgttcactacgtaggtgatgggtgcactaacatctcggacttcaccactctacaattcatccatgtaaccaaatcccacttgtacctcaaaagcttttatatatatataaaattcctaattgaattatatataataatatatattatatatataaaatatgtatatatatacacmcatacacacatatatataatatatatacatattctgtgtgtatatatatatatacacacatacacacatatatataatatatatacatattctgtgtgtatatatatatacacacacatagtctgtacatatgtacagaatatgtggagtgcattggaatattaatcagcctttaaaaagaagaaatcttgccatttacaacatcatcatagatgaacctggaagacatactacatgaaaaacaaggcatacacataagaacaaatactcatgataccatttatatgattaatataatatagtcagactcctagaagcagggtgaaatggtggtgctgaaatagagaaaaaaatgggcacatccatacttcataatacgttctccttttctagttttctaactctaattggcttttgttacttgccacctaaagaatattaacaaatataatgatcatttacaaatatacctgatcaatctgttaggagaaggcattactgatgttttctcatcacacaggtaatatattagttagggttaggtattgctgcatagcatagaaaaataaaacaaccttagttaaaatgagatggaactttatgtcctcttggataaaataaggctgagggtaggcaactcagggctgatacaacagttcttcagttatcagaaaacta

SEQ ID NO: 94098 - DNA, 1541 bp, Homo sapiens
tgcttggttctttatttccttaggatgagctttcttctaggaggcttcttagaaacatgaaaatgatcttctaatggaccgtttcactaactcaacatacccaggaatgcctctaaacaaagcagagattcaagatgtgctccctgcttcatttttggggtaaccctcttccaattactatcacaaaatttgttgtggctgatgttcactaagcttgagaaaattccctatctatatttgcaaatctatttttcaaaaggctgtaaaatgtgtacctttaggaattattttatgtactctctgacctgttgcttagagcagcagtcaagaaaagacttgaattttatggaaattaccaaaagaagactttgtgcagaggataactgtgctgcctttaaggcaggatcttttggtgccagctttttttgaagccactaaggctatgaaatgtgcaaaacagcctagatgaactagttctctgagctgcagccctcccaggtgttgtgtacatgactgcagggaaagggagccttttcattgttgatgtggagaaagatataacacaatctgccatgttcgggggatgtatgcatgttaattgagtaatttccagccaacatgttccggaaagcagaactttccatgaaactctctgggggtgaggcataaaagactacacactggatacagtgtacactgctcaggtgatggatgcaccaaaatgtcggaagtcaccactaaaaaacttattcttgtaacaaaacaccacctgctcccccaaaaacctattgaaataaaataagaaaaaatgaaaaaaaaggcaaaataaaatgaccattaatatttgagtagagcttattagttgatgaaataattttatatcccttgctgatatatcttactgtgttttcgttgtcacaaccctctgaggtatatactatgattgccaccaacttaaggatgcagaatcagaaacacacaggagagaagtcaaatacctttcccaaatcagagagagtatatggcctgataaagaaccacatccaaacttcagttcaaattccctgctcctaccagtactcaacatgatctcattcttgttgcacccagctcatcttcgtccttattcctaaaaatgaaatgaaatcaggatgactattgctgatcctgaaaaagaaagcaattgcaaatagatgcttttaagtcatgttacatagyggaatggaagagtaaaatatagtgagttcacccaagggaaacatgcagcagttaaacaattaatatagcaacatagcaagatttgaaccatgcagttgagtgaaaaaaataagagacaaggtgagttctatagcatgataccatatatagaagttaagcgaacaaatacaaaaaacaatgtctgtaccatattcctattggagcatatttagatgaaacataacagaggaggtgcctggggagggcagcaggaggagaatggagatgttgacaagagactgtcatgaactaatgagtatggctaaacctctttgcacttcaaa

SEQ ID NO: 94099 - DNA, 1541 bp, Homo sapiens
tgcttggttctttatttccttaggatgagctttcttctaggaggcttcttagaaacatgaaaatgatcttctaatggaccgtttcactaactcaacatacccaggaatgcctctaaacaaagcagagattcaagatgtgctccctgcttcatttttggggtaaccctcttccaattactatcacaaaatttgttgtggctgatgttcactaagcttgagaaaattccctatctatatttgcaaatctatttttcaaaaggctgtaaaatgtgtacctttaggaattattttatgtactctctgacctgttgcttagagcagcagtcaagaaaagacttgaattttatggaaattaccaaaagaagactttgtgcagaggataactgtgctgcctttaaggcaggatcttttggtgccagctttttttgaagccactaaggctatgaaatgtgcaaaacagcctagatgaactagttctctgagctgcagccctcccaggtgttgtgtacatgactgcagggaaagggagccttttcattgttgatgtggagaaagatataacacaatctgccatgttcgggggatgtatgcatgttaattgagtaatttccagccaacatgttccggaaagcagaactttccatgaaactctctgggggtgaggcataaaagactacacactggatacagtgtacactgctcaggtgatggatgcaccaaaatgtcggaagtcaccactaaaaaacttattcttgtaacaaaacaccacctgctcccccaaaaacctattgaaataaaataagaaaaaatgaaaaaaaaggcaaaataaaatgaccattaatatttgagtagagcttattagttgatgaaataattttatatcccttgctgatatatcttactgtgttttcgttgtcacaaccctctgaggtatatactatgattgccaccaacttaaggatgcagaatcagaaacacacaggagagaagtcaaatacctttcccaaatcagagagagtatatggcctgataaagaaccacatccaaacttcagttcaaattccctgctcctaccagtactcaacatgatctcattcttgttgcacccagctcatcttcgtccttattcctaaaaatgaaatgaaatcaggatgactattgctgatcctgaaaaagaaagcaattgcaaatagatgcttttaagtcatgttacatagcggaatggaagagtaaaatatagtgagttcacccaagggaaacatgcagcagttaaacaattaatatagcaacatagcaagatttgaaccatgcagttgagtgaaaaaaataagagacaaggtgagttctatagcatgataccatatatagaagttaagcgaacaaatacaaaaaacaatgtctgtaccatattcctaytggagcatatttagatgaaacataacagaggaggtgcctggggagggcagcaggaggagaatggagatgttgacaagagactgtcatgaactaatgagtatggctaaacctctttgcacttcaaa

SEQ ID NO: 94100 - DNA, 1872 bp, Homo sapiens
  misc_feature (1)...(1872): n = A,T,C or G
ataattattggtagagtcatttagatttgagacgaaatgcccacatcactatcagaaccacatcactaagcctgccatgtctcttttgtcatgcctggaacacaattgcccttgttgcctanagctagagttcttaacattgggaaagaacagccatggataggcttcaggaaatgtatggataccctgaaatagmatgtaatgctaaatgaacattagatttctctgcagaagattttacctacatcaaaatgcatgttacaccattgaagaaactgactcaggagatcttgggtgggatttgggagtctgtatttttttaaaagaacctccctgataattttgataatatatctttaactggggagaatgttcatgacttttatcagagcctcaaaaaactctgtgacctcaagaaatttaagaaccccttgtatgaagtttggcatgctaggtgctttttaatctgacctcatctttctttttcaacactgttgtcctattgggggattgagggacctaataaatagcacccttctttcttagctgagttctaagacaattaagaaataaatgagtaaggtagaaaggagatgaacatattacctttattttctaagtggctaattgcaatggactgaacattttcaacgaattcatatgttgaaatcctaactcccaatgtgatagtattaggagataaggcctttgggaggtaatcaggtcataagggtggagactttacaaatgagattaatgcctttataaaagggaccctagagagctcattcaccctctttctgccatgtaagtattcaagaagtcagcagtatgcaacctggtagagagctctcagtagaactaaccatgctgaaaccccgatctcagatttccagcctgcagaactgtgagaaataagatctgttgtttacaagccattcagtctatgttactttgttatagcagcctgaactaagacattaatattgaagaatgtggcatataacttcaggctagtagagtaattaatactgaaaccccaaggttctacccacctagcctcaggtagtgtgggatgcaggagtagaacctgctcctgaaagctatgacgtgggggagcagggcagctcctgtcttgtccccaagcagctgactcccaaagaggaggaagggcaggtgctggaaagcacaggctaaacttcttccctaaactgcactggtagaatgaatgaagggataaagagaggccaggactgttactctaacagaattctgtctacatggaggcaagcatcaggaacagtgattactccctgactaacattttccattatttcttaataggtcacatgtttccctgcctctgtatcctgtttaacatctatcctgtctgaaatgccctttcagtgctcacttcagcagcacatatactaaaattggaaggatacagagaagattaacatggcctctgtgcaaggatgaaatgtcctctcaatcatcatcatttatctgaatttcatgtgtccttaaaaaccaggtggagtttgacttcctcagttgagtcttctctgactgctgctgtgggtaaactttccctgtaccaagagcaatctgcttggagtccccacagcagttccccaaagcctgattgacaccgacattacccacaggagagtttacccacaccaaaaccttggcctcactcttggagaatctgatcagatcttaagcggagtttaagaatctgtatttttaaaaagtctcttgggatagttctaataatctgccttgtccagaaaccaccgtccagtcattatttgcatgaaccttttgacactcacagccctggttgtaagaggggagaaatgcatc

SEQ ID NO: 94101 - DNA, 592 bp, Homo sapiens
aagaaaatcgtgatgcaaagtggtgagagtggaagccgcaatgggataggttcaggagagagtatgtggttaggagtgaaggctaccagttcatattcttctccagagaaagctgagtgctaaatataaggagaaaactaggttgacgacttaaatgggcagcatttaaagaaaagattttggggttgaggtatatgacagtcagcatctaaaacgatcccaataatcctcctcccaatgctcacatctttgtttaatctcctccccttgtgtatgggccagacctagtgattcacttctaataaatagaacatggcaaaatgaatgagatgacatgtctgagactgggttatgaaagaccatgacttttgtctgattgcgctctccttctttccccatttctctaatttttctcagttttactcactcagatgaagcaagctgccatgttatgagctcccctaaggagaggcccatatggtaaggaattgagaatgaccttcagccaacaaccrtcaaagaaataaggccctcagaccagcagcccacaaggaactgagagctgccagaccacatgaatgtgcttggaagc

SEQ ID NO: 94102 - DNA, 662 bp, Homo sapiens
tccccctgctctccaggtctggcccctccctcctcagtggtgtggccttggggccagcttcaactctycctgcctcagttttctcatctctagagcagggataatagtaagacctacttcacaggggcattacagcattaaaagggcatcaggtacttcaaatggtgcctttataataatcactcagtaaatgcttacagttcattataaatctaaaggaacccaaaggcgaagattgagcaaagttgatttggtctgcccagtgaagaatactttctgtattttgtagtaaggctgactttaaaaatagaggtagtggatgttgttgtttctctttctctgcccttccccatgtatgtgaggcccttcaggagcccaggcacacatgcagtgccaatttgctcccagatccaagggtgttcagaagtggacttcgaatttcaaatagctgtgattttatttaactttactgaattctagttttattatattaccaccagagagtttggcctttaagatctctaattctttgaaatgattaagttttcctttgtggccttctttataattgatttttgtaaatattctattgatgtgtgaaaaaaatacagattctctatttgaaggatgtactttctttctgtttatctaattcttccaca

SEQ ID NO: 94103 - DNA, 662 bp, Homo sapiens
tccccctgctctccaggtctggcccctccctcctcagtggtgtggccttggggccagcttcaactcttcctgcctcagttttctcatctctagagcagggataatagtaagacctacttcacaggggcattacagcattaaaagggcatcaggtacttcaaatggtgcctttataataatcactcagtaaatgcttacagttcattataaayctaaaggaacccaaaggcgaagattgagcaaagttgatttggtctgcccagtgaagaatactttctgtattttgtagtaaggctgactttaaaaatagaggtagtggatgttgttgtttctctttctctgcccttccccatgtatgtgaggcccttcaggagcccaggcacacatgcagtgccaatttgctcccagatccaagggtgttcagaagtggacttcgaatttcaaatagctgtgattttatttaactttactgaattctagttttattatattaccaccagagagtttggcctttaagatctctaattctttgaaatgattaagttttcctttgtggccttctttataattgatttttgtaaatattctattgatgtgtgaaaaaaatacagattctctatttgaaggatgtactttctttctgtttatctaattcttccaca

SEQ ID NO: 94104 - DNA, 662 bp, Homo sapiens
tccccctgctctccaggtctggcccctccctcctcagtggtgtggccttggggccagcttcaactcttcctgcctcagttttctcatctctagagcagggataatagtaagacctacttcacaggggcattacagcattaaaagggcatcaggtacttcaaatggtgcctttataataatcactcagtaaatgcttacagttcattataaatctaaaggaacccaaaggcgaagattgagcaaagttgatttggtctgcccagtgaagaatactttctgtattttgtagtaaggctgactttaaaaatagaggtagtggatgttgttgtttctctttctctgcccttccccatgtatgtgaggcccttcaggagcccaggcacacatgcagtgccaatttgctcccagatccaagggtgttcagaagtggacttcgaatttcaaatagctgtgattttatttaactttaytgaattctagttttattatattaccaccagagagtttggcctttaagatctctaattctttgaaatgattaagttttcctttgtggccttctttataattgatttttgtaaatattctattgatgtgtgaaaaaaatacagattctctatttgaaggatgtactttctttctgtttatctaattcttccaca

SEQ ID NO: 94105 - DNA, 1685 bp, Homo sapiens
tgtccagtacagtggagggctgatatggtttggctgtgtccccacccaaatctcttcatgagttgtagtttccataatccgcatgtgtggtgagagggacctggtgggaggtaattgaatcatgggggtggttcccccctgctattcttgtgatagtaagctctcacaagatttgatggttttataaggggcttctctttttgcttggttctcattcttctctctcctcctgctgtgtgaagaagaacttatttgcttctccttctgccatgattaaagtttcctgaggcctccccagccatgtggaactatgagtcaattaaaactctttcttttataaattacccagtctcaggcagttctttatagcagtgtgagaacagactaatataggggcgctaagtaacttggctgctctcatcatcagtttggctgttgcctaaaaaagggggtatgcagtcaagaaccaaaccactgagtcacttgacctgttttgtactttgttctttctcttgagtctcccagtacatatcttcacagttcatttgacaggttctggaaacacccttccaccttgtcacatattggaaatgaatatatggccaccatttccccctgggaacttcttcacagcatttagcctaacaaaacttgagctgggttcctggacagactctgactrtgtagccactcacccttaactttggctgagggtgggaaggaaaatgaaggaacaggggcatctttccctctgactataggaagcttgattttgtgttcctatctacttccttcttctgttattaccctcttcccaatctatcattgcaatcattttaatgccactaaaaaaatagcttctttttttctgcctgcagattgcataaacaatatcttggtctgctctctacctgtaattcattgagtaacccaaggcaggctctaattttttttttctgttagcatgtattacttgagaacattgctatcctttgagctcataaaagaacaaggttgaggttctttaataagagggaataaggaggcatgagaaacatatacttatgggtgcaagtcaattggtagacactggctctttcaagtcacaatgatgtcatttgctgcccgaaattagtggttgccaaatcatcagtgcttattaaaaacaaagattcttgggtaccttctctggagacgtggattcaatgcatctggggtgcatccagggaacctatattaacaagaacttcaggaagttcttaggttcagcaggtttcgaaaacccagtcttcaggcatacattgctgaatagtacccacaagatctgagagtaaacatcattgtgttttgtataaaatttttcttgtaaaaatttattgaaccagcattaaagaaaaaattaaaaaacataaactacctctatttttgctgttctaatacagtagtttcacttctctgcaattccttgtatactatactctcattttacatatttttaacataaatatttacaaatttatttatttatttattttttaagacaaagtctcactctgtcacccaggctggagtgcagtggcacaatctcggctcactgttacctctgcttcctgagttcaagcaattctcggccttaatctcctgagtagttggggatactggtgcatggtaccatttttgtattt

SEQ ID NO: 94106 - DNA, 1996 bp, Homo sapiens
aactggtaatacaaaatcaacgtttcatgcaagttcttgttacaccaggaatggcaaagggagctttgtttcagctctgatatcttgagatatctacctctatatttcctacttcacaaaaagggagagctcccagaggccggattcccttggctttgcagcccctgcccatttccagcatctgtcttcacagtcccatgggtctccaaaatgattcacaaatgtgaactgatggtcgctgctttcatggagcttacagcccagtagagcagacagaaataatcaagtaatcacagcactgaatatatactcacaatcgttatatgtaatatgataggaagaagttcaaggtattatggaagcttgtaaaaggaggaatttcatccaagctagggagtcaggaaagcccacaatcaatcccagatgcaggagcagcttcacatgagccagctgtatgagcacctgctgcccaaagtgaacaaacaagaaagcttccaccacaaggcagctgatgacatggtgcacgtggtcgggaaagaagggggattaccaggatgcatctacaactgacactcaagcaccagctcctctctctcgtagtatgcagttgctgtgtgccgcaaggaaattactgtaactttgtggcaaataacttactgacctatatatgacttttagcaggataggcagtatttcctgctttgttcaacctacactgacaaatgtagaacataatatcttaacatgttctttaaaataaaggcaagggaagactcagcaattggaagagttgaatgtaggaaggtaacagagcaggctttgtgcaattattgagactactagggatttttttataatgtgcccctcattcctctcacagtgagctgcagaaaatgtggctcattttagtaastttttgtatgccaacaacattttatattttttaaaaagagaaagaaactacagttcttttctattttgaaatatagcctgtaaatctatttagattttaggcatagcacaacaattcagaaatgatcattctgctgaaagctttatttttcttttcttgtgtttactcttctcctactacaaacaaatattataaaagataaactctctgtcacaggagaaatgaccccactttacatggcttgttcataactctccactgccatctccaatgtgtgtcctggcatgtggtatatttctgatgacatggttacaacggtgctttgttcatctgcaagccagtgacacatcaggcactaactggcttcatttatcctccattttccctggggaggtaggagatcagagggacttgttttccaagctccagtcacaagaccctgccgatcaaaacaggatctgatcaaaacaagatgcagcaaagaaacaggccaaaaccagctaaaaccaagaagacaacaaaagtgacctccagttgtcctcattgctcattatattgaaataatttaataatgcattaaaatgcaaaaagaaactctcaccagtgccacgacagtttacaagtgccatggcaactccaagaagttactttatatgcttttaaaaggggaggaaccctcagttctgggaactacacactcttttccagaaaactcacaaataacccatcccttatttaacatacaataaaggaatcgccataaacacagctagccagcaatccacgagggctgttgctactactctctctgtgtagcagccattttcctatactctgttgctctaataaatttgctttgctttgctccatctgcttgctcttgaattctttccagcacaaagccaagaaccctcttgagctgagctctaatgatgaggttcacctgtatcacctggacatagtctggaatattacagtcaccacatctaatattgagaggtgaagccggctcagcttctgggtcgggtggggatttggagaacttttctgtctagctgaaggattgcaaacacaccaatcagc

SEQ ID NO: 94107 - DNA, 1996 bp, Homo sapiens
aactggtaatacaaaatcaacgtttcatgcaagttcttgttacaccaggaatggcaaagggagctttgtttcagctctgatatcttgagatatctacctctatatttcctacttcacaaaaagggagagctcccagaggccggattcccttggctttgcagcccctgcccatttccagcatctgtcttcacagtcccatgggtctccaaaatgattcacaaatgtgaactgatggtcgctgctttcatggagcttacagcccagtagagcagacagaaataatcaagtaatcacagcactgaatatatactcacaatcgttatatgtaatatgataggaagaagttcaaggtattatggaagcttgtaaaaggaggaatttcatccaagctagggagtcaggaaagcccacaatcaatcccagatgcaggagcagcttcacatgagccagctgtatgagcacctgctgcccaaagtgaacaaacaagaaagcttccaccacaaggcagctgatgacatggtgcacgtggtcgggaaagaagggggattaccaggatgcatctacaactgacactcaagcaccagctcctctctctcgtagtatgcagttgctgtgtgccgcaaggaaattactgtaactttgtggcaaataacttactgacctatatatgacttttagcaggataggcagtatttcctgctttgttcaacctacactgacaaatgtagaacataatatcttaacatgttctttaaaataaaggcaagggaagactcagcaattggaagagttgaatgtaggaaggtaacagagcaggctttgtgcaattattgagactactagggatttttttataatgtgcccctcattcctctcacagtgagctgcagaaaatgtggctcattttagtaagtttttgtatgccaacaacattttatattttttaaaaagagaaagaaactacagttcttttctattttgaaatatagcctgtaaatctatttagattttaggcatagcacaacaattcagaaatgatcattctgctgaaagctttatttttcttttcttgtgtttactcttctcctactacaaacaaatattataaaagataaactctctgtcacaggagaaatgaccccactttacatggcttgttcataactctccactgccatctccaatgtgtgtcctggcatgtggtatatttctgatgacatggttacaacggtgctttgttcatctgcaagccagtgacacatcaggcactaactggcttcatttatcctccattttccctggggaggtaggagatcrgagggacttgttttccaagctccagtcacaagaccctgccgatcaaaacaggatctgatcaaaacaagatgcagcaaagaaacaggccaaaaccagctaaaaccaagaagacaacaaaagtgacctccagttgtcctcattgctcattatattgaaataatttaataatgcattaaaatgcaaaaagaaactctcaccagtgccacgacagtttacaagtgccatggcaactccaagaagttactttatatgcttttaaaaggggaggaaccctcagttctgggaactacacactcttttccagaaaactcacaaataacccatcccttatttaacatacaataaaggaatcgccataaacacagctagccagcaatccacgagggctgttgctactactctctctgtgtagcagccattttcctatactctgttgctctaataaatttgctttgctttgctccatctgcttgctcttgaattctttccagcacaaagccaagaaccctcttgagctgagctctaatgatgaggttcacctgtatcacctggacatagtctggaatattacagtcaccacatctaatattgagaggtgaagccggctcagcttctgggtcgggtggggatttggagaacttttctgtctagctgaaggattgcaaacacaccaatcagc

SEQ ID NO: 94108 - DNA, 715 bp, Homo sapiens
ccctccttgcccttgtgaaaagaaaaagtgtctccaaactttaccaagtatcccctgggggcaaaacttctcattgttgaaaatcactgcattagacatattgagacaatcttaatctggtcaattgtgttgacacaaactgttagaggaagaataattattaacatttgtgtctagtcaactgatctggtcacataaattctgtatgtgaattcattttgtttaccaccaaagcacaaagacttttcagataactttaaataatattgtacaagtataggggttcagaggagcaagtgaataattaaatttacctagaatgtggagaaattgggtttggaatattcatgacactagttctatttctaatgtttagtgactaccaytgaataatttatgtcttattattagaacaccaggagttatgacacatattttttgtgaagtttgccaactttggacttttcaagcatcaaaattcaactctgtatatttatagctaaactaggaaccaggaaatttagatgatttggccatgtccataaagtcacttcactgcaaaacaggaattgtggtctgatattctggcaaatactttgatcttatttccatgtacaataatatttctcaaagattagacagtggtagggtaatgagaagccattgatgaagtataaattgatccccaattcaacacttttatttcattctttgg

SEQ ID NO: 94109 - DNA, 2057 bp, Homo sapiens
tcctcagtgtctccttttttaatttatttattgacattcatttgttgttctgcttggacttgctgyaaatatttcttggaaaacttgatttagatatcacagatctcacatctttactgaaatgtatagtgtgtctttttcctacttttatttaattggaaggttccattgtcaggttttaacaaatgtggtccacacctaaaactgacacatgcttctgactatgagattttgcatctctggcaaatggtgagaccaagcctcggagatagcaccagaatgagatgtatgaagaatagtgaaactagagacacaatatctcacgaagcacatgacaaggtctaacccttgcaaaaaatgcaggtactataattaaaccaatacacacagtcctcctctcttggcttcatgagcttagggatttcttaagaacccaatgtttacatgggtaagtgatctaaaagcagtattggttttatattttaataaatcaatgttgcatacctttaaatggaatcttttaatttttgtcagaaagtaaggaaataagaatgcaccataataataaaatgctacgtgtactgttttatctttgtaatctattttcaaaatgatgacctcacacagccctgtagataagccactataccaacttgattctcattctcatgaaggacaaaactgagctgaaatcacttggatagaatcacagttaaccaaaacaagttgatatctcaggctcctcacattaaactgtaggcacttcctacaggttgttctcacaaaatcagccactgccttcaatgcattaaagtggaatctcagaggagagagttttaatcctgtaatgcttcttgttggataggacaaaaaccaactatatttaggactggttattaggtacactagacttgtcccaactttgccacaagtagcctggaggcctcaagccagtcgcttaaactccttgggtctataaaatgatttggatgacctttaaagtttttcacacttctaaggatgcttaaatctatgaagaggtttccaagagtttgtctgaacactaaataacataagtattctgaaaagtgtggataaatcaaacatttatcttggagaaaaagaattagtagatttcactttttgaaagccctggtgcagttcctggaggaaacagcacacatttgaaatgttaacagataccacatcacaaacccactaacatctgtgacatccttgttgcttgctgacatggcagcctgcagggatttttctttgcactagatagaggatccatataatcacaaaatgatgctccatgccaaatgcttcctcccaagaaacagaactaaacaaactcttattgaaagtgaaatcacctctggaatgagttacaaaatggaaatagtatttactagtttctggtcacatctacacaactgagtgaggaaaaacaatatttaggcatgtaggagctacattttcagtctctccttgggtatagaaagttgcagggaagaacaaatcagtgccttttgttttgaagtctgggcacacatggtgtgatagggaaatgaaggtctcataactctttataataaaatgtgactcaaattactgattaaactccctttctctctctcaggatgcattgtccaattaacctaagacttttctaaactattttagtgagctcttggctagcagggcccagtcacaaagacaattaactggtccctgtaggtgagagttgggggaaatgtagggattaagtagtaaagaataaaaatgatgagcagatgactatttccataggagatgatattaaaaagccacaaggatggaggtgttgagaggatatatttgtgaagttgtacctaattgggaccaattttgcccactttaaaaatgttgtactctgagatagaatgttgaaataagagccaaacagcgcaaagcagatttccttcactgtttctacatgaattgtgtgccaagcttgttgatcaggagctggcagtttcccttcactttggtgagatttggaaagtgtctat

SEQ ID NO: 94110 - DNA, 2057 bp, Homo sapiens
tcctcagtgtctccttttttaatttatttattgacattcatttgttgttctgcttggacttgctgcaaatatttcttggaaaacttgatttagatatcacagatctcacatctttactgaaatgtatagtgtgtctttttcctacttttatttaattggaaggttccattgtcaggttttaacaaatgtggtccacacctaaaactgacacatgcttctgactatgagattttgcatctctggcaaatggtgagaccaagcctcggagatagcaccagaatgagatgtatgaagaatagtgaaactagagacacaatatctcacgaagcacatgacaaggtctaacccttgcaaaaaatgcwggtactataattaaaccaatacacacagtcctcctctcttggcttcatgagcttagggatttcttaagaacccaatgtttacatgggtaagtgatctaaaagcagtattggttttatattttaataaatcaatgttgcatacctttaaatggaatcttttaatttttgtcagaaagtaaggaaataagaatgcaccataataataaaatgctacgtgtactgttttatctttgtaatctattttcaaaatgatgacctcacacagccctgtagataagccactataccaacttgattctcattctcatgaaggacaaaactgagctgaaatcacttggatagaatcacagttaaccaaaacaagttgatatctcaggctcctcacattaaactgtaggcacttcctacaggttgttctcacaaaatcagccactgccttcaatgcattaaagtggaatctcagaggagagagttttaatcctgtaatgcttcttgttggataggacaaaaaccaactatatttaggactggttattaggtacactagacttgtcccaactttgccacaagtagcctggaggcctcaagccagtcgcttaaactccttgggtctataaaatgatttggatgacctttaaagtttttcacacttctaaggatgcttaaatctatgaagaggtttccaagagtttgtctgaacactaaataacataagtattctgaaaagtgtggataaatcaaacatttatcttggagaaaaagaattagtagatttcactttttgaaagccctggtgcagttcctggaggaaacagcacacatttgaaatgttaacagataccacatcacaaacccactaacatctgtgacatccttgttgcttgctgacatggcagcctgcagggatttttctttgcactagatagaggatccatataatcacaaaatgatgctccatgccaaatgcttcctcccaagaaacagaactaaacaaactcttattgaaagtgaaatcacctctggaatgagttacaaaatggaaatagtatttactagtttctggtcacatctacacaactgagtgaggaaaaacaatatttaggcatgtaggagctacattttcagtctctccttgggtatagaaagttgcagggaagaacaaatcagtgccttttgttttgaagtctgggcacacatggtgtgatagggaaatgaaggtctcataactctttataataaaatgtgactcaaattactgattaaactccctttctctctctcaggatgcattgtccaattaacctaagacttttctaaactattttagtgagctcttggctagcagggcccagtcacaaagacaattaactggtccctgtaggtgagagttgggggaaatgtagggattaagtagtaaagaataaaaatgatgagcagatgactatttccataggagatgatattaaaaagccacaaggatggaggtgttgagaggatatatttgtgaagttgtacctaattgggaccaattttgcccactttaaaaatgttgtactctgagatagaatgttgaaataagagccaaacagcgcaaagcagatttccttcactgtttctacatgaattgtgtgccaagcttgttgatcaggagctggcagtttcccttcactttggtgagatttggaaagtgtctat

SEQ ID NO: 94111 - DNA, 2057 bp, Homo sapiens
tcctcagtgtctccttttttaatttatttattgacattcatttgttgttctgcttggacttgctgcaaatatttcttggaaaacttgatttagatatcacagatctcacatctttactgaaatgtatagtgtgtctttttcctacttttatttaattggaaggttccattgtcaggttttaacaaatgtggtccacacctaaaactgacacatgcttctgactatgagattttgcatctctggcaaatggtgagaccaagcctcggagatagcaccagaatgagatgtatgaagaatagtgaaactagagacacaatatctcacgaagcacatgacaaggtctaacccttgcaaaaaatgcaggtactataattaaaccaatacacacagtcctcctctcttggcttcatgagcttagggatttcttaagaacccaatgtttacatgggtaagtgatctaaaagcagtattggttttatattttaataaatcaatgttgcatacctttaaatggaatcttttaatttttgtcagaaagtaaggaaataagaatgcaccataataataaaatgctacgtgtactgttttatctttgtaatctattttcaaaatgatgacctcacacagccctgtagataagccactataccaacttgattctcattctcatgaaggacaaaactgagctgaaatcacttggatagaatcacagttaaccaaaacaagttgatatctcaggctcctcacattaaactgtaggcacttcctacaggttgttctcacaaaatcagccactgccttcaatgcattaaagtggaatctcagaggagagagttttaatcctgtaatgcttcttgttggataggacaaaaaccaactatatttaggactggttattaggtacactagacttgtcccaactttgccacaagtagcctggaggcctcaagccagtcgcttaaactccttgggtctataaaatgatttggatgacctttaaagtttttcacacttctaaggatgcttaaatctatgaagaggtttccaagagtttgtctgaacactaaataacataagtattctgaaaagtgtggataaatcaaacatttatcttggagaaaaagaattagtagatttcactttttgaaagccctggtgcagttcctggaggaaacagcacacatttgaaatgttaacagataccacatcacaaacccactaacatctgtgacatccttgttgcttgytgacatggcagcctgcagggatttttctttgcactagatagaggatccatataatcacaaaatgatgctccatgccaaatgcttcctcccaagaaacagaactaaacaaactcttattgaaagtgaaatcacctctggaatgagttacaaaatggaaatagtatttactagtttctggtcacatctacacaactgagtgaggaaaaacaatatttaggcatgtaggagctacattttcagtctctccttgggtatagaaagttgcagggaagaacaaatcagtgccttttgttttgaagtctgggcacacatggtgtgatagggaaatgaaggtctcataactctttataataaaatgtgactcaaattactgattaaactccctttctctctctcaggatgcattgtccaattaacctaagacttttctaaactattttagtgagctcttggctagcagggcccagtcacaaagacaattaactggtccctgtaggtgagagttgggggaaatgtagggattaagtagtaaagaataaaaatgatgagcagatgactatttccataggagatgatattaaaaagccacaaggatggaggtgttgagaggatatatttgtgaagttgtacctaattgggaccaattttgcccactttaaaaatgttgtactctgagatagaatgttgaaataagagccaaacagcgcaaagcagatttccttcactgtttctacatgaattgtgtgccaagcttgttgatcaggagctggcagtttcccttcactttggtgagatttggaaagtgtctat

SEQ ID NO: 94112 - DNA, 874 bp, Homo sapiens
tgaacagatcaccaaacaggctttgtgtgagcagcatagctgtttatttcacctgggtgcaggcaggctgagtccaaaaaaggaggcagcaaagggttgtgggattaccattggttcttataggttttgggataggaggtggagttaagagcaatgtttttggggcagagggtggatctcacaaagtacattcaagggtggggcgaattataaagaaacttcttaagggtgggggaaattatcaagaacattgatcagttagggtggggcagaaacaaatcacaatggtggaatgtcatcagttaatgctattttcacttctgtggatcttcagttgcttcaggccatctggatgtayacaagcaggtcactggggatatgatggcttagcttaggctctgaggtctgacacccggttcaagcgatcctcccacctcagcctcctgctgttgctgggatcacaggtgcataccacctggctaatgtttgtattttttatagagatggggttttgccatgatgcccaggctggtcttaaactcctaagctcaagcaatcagcctacctcggcctcccaaattgctggaattacaggtgtgagccaccgtgccagccgagccatgccttcttcatggcccagcctcgaggggtggcagatgcatggttctaagtgaccaccactcagtacatcattcttctattgaccacagttatgttgccagtcagtgcctgcaaaccacttggatttaaccaatgtgtccccagagcagtaagtgaaaatcctgggatatcaggtcaccaggaaggcaagtgtgatggaaagttgaggcgctatatacacagaggacaaatttttgatccctggttccaccac

SEQ ID NO: 94113 - DNA, 1312 bp, Homo sapiens
attgtaaccccatagcactcagcctatgaggaacctggggagggacttgcgcactaggggacaaattgcttgttgaaactgttctgggtgtgcctgcacgccagacacccgatcttgatctctcaagaccgtcattaaaagtctcactttcgctgttctccgggtctctgagtccattctttgggtttagatggatgagtttatttctcacataacagctgcagaggtggtacaggtgaatccctctcaagtcaagtgggttaacctcaaaattgacttaaggggtggtttgtgatcgcctggtagatggtggacggttacagcttttagaaagtgagtaaaagagatgatgcatacagaagccccactgggttgcttagcttctgcacatggagaaagaggctgcttttctgccttctaggtgtttagtaacttaatttttaatcctttgatgaaatagagtggaaaataaaaggagattttcttttaacaaaatagtgttaagatgcttgccaagtatccccctgtgaatttctgcttagcactgtgatatcagaattagaaattgtgcagggttctaatctggagatatgggatgttcagtagctaagaaggaagttattccttgaaagtaagtacagtgaggtagaaaaggatccattrggattgggagaataaaagttcattatttttatttattaaaaaaaacaaaacaaaacaaagaaatgaggttttggctgggtgcagtggctcacgcctgtaatcccggcactttgggaggccaaggtgggcagatcacgaggtcaggagattgagaccagcttggccaacatggtgaaaccccatctctactaaaaatacaaaaaattagccaggcgaggtggcaagtgcctgtatttccagctattcaggaggctgaggcaggagaattgcttgaacccagaaggcggagcttgcagtgagccaagatcgctccactgcagtccagcctgggcaacagagtgagactccatctcaaaaaaaaaaaaaaaaaaaaaaaagaaagaaagaaaaaagaaaaaaaaaagaagaaacgagcttctaccctagatggatcttggactctggagttcagagagcttgccatttcagaccagaaacttccttaaagaaccaagagaagtaattttctccctgctaaatttcagctgaggtgattgagatcttttcctcatttgtcattatatttgtcatttgtccttatgtttgtagttaaatagcttggattaagtttcagaatttgtcggtctctaatggaaaaagtgaccaccag

SEQ ID NO: 94114 - DNA, 641 bp, Homo sapiens
ctcatggcaatctgccccaactgggtgtggagaaaagaaatcagtttccccattgaacagatgaggaaactgaggtgcagacagattccatgccacacccaagttcaacagctctctttgttccagtgaagccatgtttttgttgttgtcgttgttttgctttgttttttggtttctgtgaagatttatttctactgtatcatgaagatggtaagaaatggtttattccggtgcatcaatggctttggtcaactcagtttccatacgtgccatcctaggtggcaaaatgttcaaaaaataaattgaggccgggcgcggtggctcacgcctgtaatcccagctctttgggaggccgaggcgggtggatcatgaggtcaggagatcgagaccatcctggctaacaaggtgaaaccccgtctctactaaaaatacaaaaaattagccgggcgcrgtggcgggcgcctgtagtcccagctactcgggaggctgaggcaggagaatggcgtgaacccgggaagcggagcttgcagtgagccgagattgcgccactgcagtccgcagtccggcctgggcgacagagcgagactccgtctcaaaaaaaaaaaaaaaataatgaataaaaaataaatcaattaattaat

SEQ ID NO: 94115 - DNA, 555 bp, Homo sapiens
cggtggtgtccaggcatgtgccggtgcaaggggggaacgagtgacctatccatcaatgcaaaggaaaatcgaagaccacctgggacccggcgggtgggggcgcctgtgcctgacccaagccacgttttcaaatgcctaccagaggagcaaagaggtttctgcaaaattctccccacccccaaccctccaccgcgctggtagccctgaggcaaattcggctgcacccagccccagccacagccacagccccagccccasccaagtccctttgggtccctgacattcgtttgagacggaagatcaagggagtctttccacccaggagcagaggagaggatgtccctcaagaaggagacaggccgccaagcgagaaaccgctttgtggtgcacagggcacattcggccaaagacacacacgcacatgggcactcacacacaaaccgacagaggggaaagaaacacacagagactgagagacagagagagaagggagaatgggagacacacacacactcacagacggacacacaaacacacacacacacacacacacac

SEQ ID NO: 94116 - DNA, 1111 bp, Homo sapiens
tatctggaaattcttctcaacgtcctttacatacgtgattaatcacatttccaaaataacataccaaaatgaataacagaaaatcattttaagttgtggttccttcatgcacaaaacatttcatgtgtgtctggcactcttccggccacagatttcatcttaacctaagtattgaaatgcttgtgccctttgattaatttttctatgtaaatactttgataataagctacactgaggccggtgcagtggctcacacctctcatcccagttctttgggaggccgaggccagcggatcacgaagtcaggagatcaagaccatcctggccaacacagtgaaaccccgtctcttcaaatatacaaagaattagccaggtgaggccaggctctggctcatgcctgtaattccacactttgggaggctgaggagggtggatcacctaaggtcaggagttcgagaccagtctgcccaacatggtgaaaccctgtttctactaaaaatacaaaaaattagcaggttgttgtgtcaggcacctgtaatcccagctactcgggaggttgaggcagaagaatcacttgaacccaggaggcggaggttgcattgagctgagatcatgccactgcaccgtccggcctggggacaagagtgaaactctgtcaaaaaaaaaaaacaaaactggtctatactaaaaatacaaaaattagaccctgaaggtcatgtccaaatgagaaagacattgtttggctcaaattgtctgacactaaggaatagtgcagactggacaaatgaggtgactgacacctgtaatcccagcactttgggaggccgaggccggtagatcacctgaggtcaggagttggagaccagcctgaccaacatcrtgaaactccatctctactaaaaaaaaatacatgaaaattagccggctatggtggtgcatgcctgtgtatcccagctactcaggagtctgaggcaggagacttacttgaaactgggtggcaggggttgcggtgagtggggatcacaccactgcactacagcctgggcaacaagagtgaaactctgtctcagaaaacagaatagtgcagagtaagagcagatttatatatgca

SEQ ID NO: 94117 - DNA, 540 bp, Homo sapiens
tgagtaaatgctacttccatttggaagagagaatatccaacattttgcatcaaatttcttccatattttaagrataatttcttaaaatgttatttaaaatcatcttttcatttaaaagtgttttgtgttggttaatgcatccattttctaattctttctacattatcagaatactttctaaatctttgcatgttttcggattatgttcaccaacatcccatttatgaaagaaaatggaagactttggctgtctctaaatatacatccttgcatctatttccaaaggagctatttgttattttaccaaaagtattccagtaaataagaaaattcaaaaatactgtgagcttctaaaaacaccatattcactgtggatatactgtgtcttcatcattgttcataaagattttgactaaagctctggaaagtcatgttggggagagcatatgtttctttcacacaattctagttttttaacggatgttattttgtctttacaatctataaatttactaaacaattcagagtaaatatatattc

SEQ ID NO: 94118 - DNA, 622 bp, Homo sapiens
aagactgcaacctggagaatacagctgagctgcgtggatgctgacgctctcatcccagagcagagcaggtgcctggcccagaggacaggtatactgatgcacggaaccagggcaggaccctgggctctgggcttcttcaggcgtggctggtacccagggcctgtggaggggatgggggatggggagccagcttcagccatcctgagtggagaggagaggggactgtctttacaccatgattgctgcatttaattgcccctgcagcggtattattataatcctattttcttatttttcaggctgagataggatagaaaatatataacctgattatgcaccatataacatattaagccaggaaggtyttataattaaaacatttagaaagaactatccagggaggtagttaaaatctgtttaaatccttatcaaataatgaaaatatcttcagaaaaaaaatcagcctcttagcatgtgttcacctccacgatcatctgtggttctagcatgaggctagagacatatttacatgaaaatactgagggcttaagagtacttttcatgcacagctgcacaaccagactgggtacagtgtggctccgaaaggctctctaactgcatg

SEQ ID NO: 94119 - DNA, 525 bp, Homo sapiens
gtaggtgcctcacttgaactgggggcagggaggacctggaggacaggactgtccgagcggtggtgtcgatagtgagggaccctcctctctagggcaagacgtttgtgtacagattatttccctctggatacctctggcctttatcagtgtctccttcattcaacaaaaagactcctgtagatgctggagatgaagtggagagaacagacctagtcttgacgtgtggacttcacacaccgctgcaggcatcagctaagcsgttggatgccagcactttctcaccctggggaggccccaccttaaaatcactgtgatgtgctttacacacattttattatctgatcttacaggtaatagcttggggaatgtggctcacatgcggtgggcaggacctacaggtgtagtgggcagagcacacagatgaggctgtcggttattaggtaagaaagccaggacagcagaaccaagggccctggatctggctggactctgtttataacctcgtccctgcagggtgccatcctg

SEQ ID NO: 94120 - DNA, 525 bp, Homo sapiens
gtaggtgcctcacttgaactgggggcagggaggacctggaggacaggactgtccgagcggtggtgtcgatagtgagggaccctcctctctagggcaagacgtttgtgtacagattatttccctctggatacctctggcctttatcagtgtctccttcattcaacaaaaagactcctgtagatgctggagatgaagtggagagaacagacctagtcttgacgtgtggacttcacacaccgctgcaggcatcagctaagccgktggatgccagcactttctcaccctggggaggccccaccttaaaatcactgtgatgtgctttacacacattttattatctgatcttacaggtaatagcttggggaatgtggctcacatgcggtgggcaggacctacaggtgtagtgggcagagcacacagatgaggctgtcggttattaggtaagaaagccaggacagcagaaccaagggccctggatctggctggactctgtttataacctcgtccctgcagggtgccatcctg

SEQ ID NO: 94121 - DNA, 616 bp, Homo sapiens
  misc_feature (1)...(616): n = A,T,C or G
tgctgtgacccatctcccatggggctgggggcagactgtgcatgtgggcggtgctgcctcttcctacctgggctgctcaccactccacctccagcccccacagcagtgtctgcatgaagatgaggctccatacgtgtggaatgcaggcatgagcatggttcagaggctcacaggactcggcacgtgaytccagtcagtccaaggggtactgatgtagctcaaaccagttccttcagaattcttcctgggaagcagaagggaagaaagcttcctctcccctttaggtcacgatctgtaaggacagagactttgggctgccagcagccgtctctccctccagatgaagaagcccatttgcggcccaagggcccagtggcagcggaaggagaggagtggcactgagggatgaagacttggaaggaggaagagacagccccggaatccagctgttgtgaaagctgcccttggaagtacaaggtccctaaatcaatcaatttgcctcttggctggggattccaatacttgcaactctntgtgttatggatatcatggtgtgcccagccttgagctaccactcgagagcgggcagggccccatcctgaagaaccattcgtcc

SEQ ID NO: 94122 - DNA, 597 bp, Homo sapiens
cctggccaaagagagactcttaaaaatttaactcatttaacagaaatgggcatttcttattgcagtcaaatttttatttttcttctctcttttttgtggtaatgtgattggctttctatttccattctggctgggcttcatattccagaatgacactgaattaagtcaggagctggggtgaggagagaggaaagagataaggagcgaagaggacagaagctgcctcacaggctggtccccatcaccgcgccaagtgagggtgatttactttgtgttcactcgtcttccccggcacagacacaatctaaaagcaatcagaactctgaccccacagtggcggcacctgtgccttataaggcggagcacmccacgctgttcccacagatgatccaaaaggcacaggaaaatctctgttgtccgcagagacgtcagccgccacgctaagggcgtcttgtggggtttctgcggtgagggcattgctcctgggcaatggaagtgatacccactgaattcacagggccgccggaaccaccatgccagcgtcatgggcttctcgctcaccgtcctgcatgaagagagcgaaggattgctgagaag

SEQ ID NO: 94123 - DNA, 809 bp, Homo sapiens
  misc_feature (1)...(809): n = A,T,C or G
acagagcacagtgttcggggaaaacagacaaaactatcattgtggtgcatttttgtgattgctaagaaagtatatatgtccagcgttagggaatcaaaacaaagaggccaaaccaaataaaagcattacactgacaaacaaaacccctgtgttccgtctttatgcccaggaagcaaggaaaggaccgtcggtcttcctaggcgaggccctcacacctcactggctacactctcagctctcccaagagagtgaccctctaattttcaactcaagggcaaagtatgrtagtggtcagggtcacagattcttgagccagtctgctgggttcaaatcccagctccgtcacatactagctgcatgacataagggatgctaaggaatctctctataccttcattcaaccacagatgcacctctgcagctccaggcagcctctgctgtggtgggagtcgcccagaatccagctgtcccctctacatccagacgcanatgaagtgctgtgcccagggcatgaggctctggctttcctagtaggtgccttgtacaaagggggttgggcagaagactggccttacctgagggtatcccactggcaccctgaactgggactaccagcttctagcactctgagaaaataaacattcgttgttgaagccagccagtgcttcccgcagaagttcagggacatcagcagcctatggggagaactctgaccaatggggaaactggacaatgaggaagaagcagagagacagaggccagctgtgtttccagtctagctaaggcctgcttggtaatgaaccatcttt

SEQ ID NO: 94124 - DNA, 648 bp, Homo sapiens
aggcaggaggtgctcgtgtatctaagcagagaggcaccaatgagaacaggaagagggagctttgaaaaataagggagaaaatattttaattgtccacagtgctgactgaactgctgattggggaagagaactggctcaacggccctgaggacatgggctcgtgggaagggccacccacacggtagagacgaacgtcccagacttcagcttcctctgcgatgactggagactcacaggaggtgttgtctctgctctgagctctgcttgccaaagagcctctgggtgggccttgtcttctcgtggggatctgcccctagamgcctgagcagccgtcggtcagggcaaaccctctgcttcccaggccaccggcctcgtcatcggaaaggaagcagtcagattgtacattggctctgagtgcagtgtggtgggacatatccccggagagccagagccactctcaggaggcagctgcattacggtcccctgcctgcctgtccagctaggggccagacccccatcaattcaactcccctgggagagacactggcagaggtgactggggtctccaggggactcacctctgcagtgcaatgggcagtgctccacctgatttccttctctatgccttgggagaagctgaagaggatc

SEQ ID NO: 94125 - DNA, 648 bp, Homo sapiens
aggcaggaggtgctcgtgtatctaagcagagaggcaccaatgagaacaggaagagggagctttgaaaaataagggagaaaatattttaattgtccacagtgctgactgaactgctgattggggaagagaactggctcaacggccctgaggacatgggctcgtgggaagggccacccacacggtagagacgaacgtcccagacttcagcttcctctgcgatgactggagactcacaggaggtgttgtctctgctctgagctctgcttgccaaagagcctctgggtgggccttgtcttctcgtggggatctgcccctagacgcctgagcagccgtcggtcagggcaaaccctctgcttcccaggccaccggcctcgtcatcggaaaggaagcagtcagattgtacattggctctgagtgcagtgtggtgggacatatccccrgagagccagagccactctcaggaggcagctgcattacggtcccctgcctgcctgtccagctaggggccagacccccatcaattcaactcccctgggagagacactggcagaggtgactggggtctccaggggactcacctctgcagtgcaatgggcagtgctccacctgatttccttctctatgccttgggagaagctgaagaggatc

SEQ ID NO: 94126 - DNA, 648 bp, Homo sapiens
aggcaggaggtgctcgtgtatctaagcagagaggcaccaatgagaacaggaagagggagctttgaaaaataagggagaaaatattttaattgtccacagtgctgactgaactgctgattggggaagagaactggctcaacggccctgaggacatgggctcgtgggaagggccacccacacggtagagacgaacgtcccagacttcagcttcctctgcgatgactggagactcacaggaggtgttgtctctgctctgagctctgcttgccaaagagcctctgggtgggccttgtcttctcgtggggatctgcccctagacgcctgagcagccgtcggtcagggcaaaccctctgcttcccaggccaccggcctcgtcatcggaaaggaagcagtcagattgtacattggctctgagtgcagtgtggtgggacatatccccggagagccagagccactctcaggaggcagctgcattacggtcccctgcctgcctgtccagctaggggccagacccccatcaattcaactcccctgggagagacactggcagaggtgactggggtctccaggggactcacctctgyagtgcaatgggcagtgctccacctgatttccttctctatgccttgggagaagctgaagaggatc

SEQ ID NO: 94127 - DNA, 678 bp, Homo sapiens
gagcgattctcctgcctcagcctcctgagtagctgggattaccatgtgccaccaagcctggctaatttttttgtgttttttagagatggggtttccccatgttggccaggctggtctcaaactcctgtcctcaagtgatctgtccactwtggcctcccaaagtgctgagattataagcgtgagccaccatgcccggcccatcctcacttttggggagttgggggaaggaaaactatttcttgaatctgtaggaatttagaggacgctgagctgcagactgctgtttgtcttgtgggattgagtgttcttgtaggccagtggtttgtggggtgtccagagctgaggtgacaagaactgctggtaggacccatggatgtgatgcgctcatactttgtcttggaggacagactaaagccagagctgtctggacccagtgcagtagcgcctgaatgggatgggccgcaggtggcctgtttgtggtcatgttgtctgtctcccactggactgtaggcagcatgagggcaagcaccatgcttctccagtgtctagctcacacagcacctggccaatccctgccgattgaatgaaagatgaatgaatattgtgggctgctgtacttggggccatagagcaagagcaccctctcttggtagggctggggtttctccggaaggatcc

SEQ ID NO: 94128 - DNA, 678 bp, Homo sapiens
gagcgattctcctgcctcagcctcctgagtagctgggattaccatgtgccaccaagcctggctaatttttttgtgttttttagagatggggtttccccatgttggccaggctggtctcaaactcctgtcctcaagtgatctgtccactttggcctcccaaagtgctgagattataagcgtgagccaccatgccyggcccatcctcacttttggggagttgggggaaggaaaactatttcttgaatctgtaggaatttagaggacgctgagctgcagactgctgtttgtcttgtgggattgagtgttcttgtaggccagtggtttgtggggtgtccagagctgaggtgacaagaactgctggtaggacccatggatgtgatgcgctcatactttgtcttggaggacagactaaagccagagctgtctggacccagtgcagtagcgcctgaatgggatgggccgcaggtggcctgtttgtggtcatgttgtctgtctcccactggactgtaggcagcatgagggcaagcaccatgcttctccagtgtctagctcacacagcacctggccaatccctgccgattgaatgaaagatgaatgaatattgtgggctgctgtacttggggccatagagcaagagcaccctctcttggtagggctggggtttctccggaaggatcc

SEQ ID NO: 94129 - DNA, 656 bp, Homo sapiens
acccttaagaaatgtcagctcttttctttgctcttattactacattagtgtaaacaatgtctcccatagaggctgctcctgaattagtagtgtattcttgccataaattacacttgggaatagcctgattaatagtcagagataagaggcctagggtgtaaactccaccaaattgttcaatgtgtgagactttgagttagaaggcttggcgaatgtcctgcctcgctatttgctgccttcatgggtataactaatrtaccttctcctcatctgtgaatggggataatgatgttcctgagctatggagaggaccaggcaagcactgtgtgtcagagcacctggcatagggcctggtacaggtcaatgcccacctattttctgtccttcctttcttcctgtttgttcaaaccaggtctgaggctaacagatgtgtcttggtgagtccaagagggtggctgggccataagggttgggggagtggagaagtggggctaccagttgctgctggcaatttgcaatatctaccctgtcccaggaattgtaccctggcctctcgggatgatttagtatggcagtcatggagctgaaagttacaaatggaggctccagtgatggagctggatttcctgttctatttagtccagagcccatgtgga

SEQ ID NO: 94130 - DNA, 845 bp, Homo sapiens
gaatttttcagcccctttataatgttattggaccactgttgtatgtgtggtccattatttacccaaatgtctttatgcagtgcatgactatatttcatttcattcttacagtgaccctgtgaattaggtaaatttactcagataaacaacaaaattaaaaagaaactagtaatttaaatctggctacaaatggcaatgaagggcattgagatatagcaaatgaagagttcagacaaaatttttcttttgtttgaaataagcagataactggtaaaagtgtattttagtttgattttttttgcgaggtagtgaaataatttattaattcatattgttcttgaccggaatacactgaaactaattgtatccacaagggraatgcagaaggtggggaaaaccttcttctgttccaaactctaggacatattatttttcacttgagggagaatggattgctatgtaagctatgagcaatgattaccctttcttatagctcctgagcaacctctgcatacctctgggattgtagcatttatcatgtatcagttgtttactgtctgtccatcatgctggacagaaagcttctgggatgtagtggatatgttgaactaactttgcttgttgagattaaacactttgaaatttgaaaactattaggaaattttgactttttaccatttgttctttttcatgttttaaaaactagatattttaccagaacaaattagttatcagctgcatgacactcattttaaaaaatcaccttattgccagtattctattgctcagtttcctccagctttacagtctgaatctttataaaatcatttcaacacttatagatt

SEQ ID NO: 94131 - DNA, 1408 bp, Homo sapiens
tcttcactgagtcagcatctttgaagaatcttcttcatccgaatcaactgtgagaacatcatcttgctcttgagctgtggaggtggaaggctgacctccatcattactgccattggttatgctttggcagcatcttcagcttgttttggccccactttttctggggcatcaccaacacttcaaattcaacatcctttcctaggtcttcactatgaaggatgttgatcaataaagtatagtcctggaggaagtaatctgcttgaagccagctgcaatttctcattccaaattctgacaacttcttgtgattattagcttctgtctctcccttttcagaagatattaggatcgttcctttcccatcttcaatttggacatctggtgctaccatagcaaattttgtttcactaccttgtctcgtaaggtgagaacagtcactttatggacattcagccgtacagtcacctggcttgctggcacatatgtaacaattggggttgggaggatccagtgcacaaggcacaagaaacttctttcttggatttgcttgtttattcaaaacaattgttctgcagtggtctatttttcctgataagatcttcaatctttccaatactgtcaacccagcaatcactgcattagtagtagcaatagcaggaataatattccctgccactgatttgatatcaaatctactcttcatattcatactgaaaatatgcatcctgaggtttgtagcagaggtaacaaaatccattgcatatgggtcatccttatcccatgtgagctcagctccatcccccttttctgctaaatgaactctcagagtctcagtgctgtgagctccttaagaaccttgtgctcaccggcttctcccacgtcgacctgattgatctggttactattgatgtcagcaacctcaacagtttttgtttcaaaagaaacatgttggaagatcaaaggcacaggttgccaggaaagtgcactgcagttttayctgaaagctaatatggttgcctaccatgacagcatcatgaaccctgactataatgtggcatatttttgacagtttatattggttatgaatgctttagataacagagctgcccaaaaccgtgttaatagagtgtgcctggcagctgttgttcctcttattgaaagtggaactgctgggtatcttggacaagtaactactatcaaagagggtgtgaccaagtgttacgaatgtcatcctaagccaacccagagaacctctcctgactgtacaatttgtaacacaccttcagaacctatacattgcatcttttgggcaaagtacttaagaagtatctcctgacagagctgaccctgaagctgcctgggaaccaacagaagccaaagccagagctagaacattctaataaagaag

SEQ ID NO: 94132 - DNA, 337 bp, Homo sapiens
gccatttcttcacacaggcacataaagcaggttcacaagtgataaagtatgacattactgaggacataagagaactttctccatttctacatgaaatgtgacatcaatcttagcaccatgaaggctcccatactttctggcatttcctcttggggaagcagcagagatgatgatgcttgattagagatagttgttctatggacaaggargtaaccagcagattcttatgggtagaggggagtctgctttttaaaaaacaacgaaaaaacccacatgagatatctctagaagagtttcagatatattagcaaggaatttcaatggagaatgaagccct

SEQ ID NO: 94133 - DNA, 1308 bp, Homo sapiens
attttgcctactacttaatttgatttttgcaaaatccctgagtggtagatatgcttatgtccatttcacaagcaagcaaaatagctaggaaatatcatatactttccaaaatatgataaaaactcatctaagatttaaatctgggtcagcctgaacccagatcccatgttttttgtttgtttgtttttttatgacatcatgtgatttgcttttgtgaaatgattaaccatccagctatcttaagtcctatgaatttctacatcttttgctttacaagaagaaggaaaaggaggaggagggagaaaagaaggacaaggaagataagaggatcaagaggatgaagaggagagataaagagaaggagagagaggtatgtgtttgtattagaatccatatcatgtgcaacaaagtaatgtgaatatcatcttattttacattaataagcaattaacatcaattacattttgattcagatgtttttgaatctttgatttagggttgaagatcattggtaaattacaccaattcattcatttaaaaattttccctatggagtaatgtttatggtgatatataactaaatgaatatagattatatttgagacatcaaaggacaccagtgtgtgctgcattagtggagattttattcattggaaaaagacataagccaactcaggctttcagcaaacatttgaaaagactggcacaaagatttggaggcaacggcttaaaacaggacttagaaccaaaacaggtgtgcagatatagccagcggttgaatttctggcagtgagaaacgaggtaaggatttaggtgcaggaactaggttgaaggtcaatgagtgaaccacagcaaaaatgataactgaatcactgggtagcaggattaaagctccttatattctccctcacaaaaggaatgaagagatttatagaatgacgaagacttggcaaaccttgagggctccaaagtatgttggataactgatccaagatcaacaaactgggctgttccttacagaagtgattatattctccatttgcytatggcccaaaccaattgcaatgtttattttgggttaacatagattatagcataagactctattatggaaaacacaaagattatatcactgcaatcaataatttttcttttacctgacttctacaaaatttgtgaatttctacacaattttgaacacctttctctagatctctaatttattttctggatatgttgaaccccttgcctaaatgcaactgaggcaaacttttttttccttttactcagatataccaaagaagcaaa

SEQ ID NO: 94134 - DNA, 1134 bp, Homo sapiens
  misc_feature (1)...(1134): n = A,T,C or G
attccttggacttaggaagaggtcacacggcttctcacaatggctgagacaagggtgggagtgggaaggtctttccgtttcttcatccaggcacttagtaaataaaaccagttcctcaaaatagcttttatacaaagaacataatcttttacctaagattctttatttggttttccatcatccagtcttttccttttttctcttttaaagctcgaagcccatggactttgagatttgttgcatctttatccacaaatctcctccctttaataaccagtcttctcagaacttaaattccatcaaagccaacaccttcaatacacgcggcccatttttcttcttcggatgctgactagaccgttttccagtcattctcattttatcaatatctccttcaatcttgagattccttcttaaccatttccttctaaaggtctattctaactgcctccaaatgatttcttcttcttcgtcattatcttaatgcttccttagccatgagcttgtttgtacaaatgtaaagataaatggtgactggcagaatgcctgtgcttgaaagatacaaacgggcatatttgccaatttcttctctcttatagaactgtggtcaaactactccgccttcattacaatcacaaatgtgtgagamtgaaggagaggccgaacatgcctgtaatcttggcattttgggaggctgaggtgggaggatcccttgagcccaggagtttgagaccagcctgggcaacatggcgaaaccctgtctctacaaaaaatactgaaaattagcctggcatggtggtgcatgcctgtggtcccagctactcaggaggctgaagtgggaggatcacctgagcccaggaggtggaggcttcagtgagccctgattgcatcgctgcaccccagcctgggtgacagtgaaacctcgtctcaaaaaaaaaaaagaataaaggagaatattcaaaatcaccatctgaaatttgaggattgagggactaatttggctactttgtaattgttaaattattattattannnnnnnnnnnnnnnnnnnnnnnnnnnnnnnnnnnnnnnnnnnnnnnnnnnnnnnnnnnnnnnnnnnnnnnnnnnnnnnnnnnnnnnnnnnnnnnnnnnngc

SEQ ID NO: 94135 - DNA, 681 bp, Homo sapiens
atacgatatcatttctattcttaaataagtatattaccttcaatgaatcacttgacctccccaaactttagttttgtaatcatcatgcaagaagtgaattagttgacttatttttttagacttcaaagtcacctctataagtatcaaacccagaaatgctttctaaaaagcatccagcatgggasaaagatgtaggccagaagactaaatcagtctagtctttccacgttcttctgtctgcttttattctggctgagctggcagctgattacatggtgcccacccagattgagggtgggtctgcctctcccagtccattgactcaaacgttaatctcctttgacaacactctcacagacacacccaggaacaatactttgcatccttcagtccaatcaagttgacactcagtattaaccatcacagggaaacatccatttcttagtcttttcttgcttctaaaggctgcctcctcatagttccttcctctgtcttcaaagccagcagcaaagatttgttctctgacttctgcttccatcatcatatctcattctccaccttccttttgtaaggacccttgtgattacattgggccactagataatccgggataacctctccttctcatgatccttcactcaatcacaactgcaaagtccctcttcccatgtaagatttata

SEQ ID NO: 94136 - DNA, 681 bp, Homo sapiens
atacgatatcatttctattcttaaataagtatattaccttcaatgaatcacttgacctccccaaactttagttttgtaatcatcatgcaagaagtgaattagttgacttatttttttagacttcaaagtcacctctataagtatcaaacccagaaatgctttctaaaaagcatccagcatgggacaaagatgtaggccagaagactaaatcagtctagtctttccacgttcttctgtctgcttttattctggctgagctggcagctgattacatggtgcccacccagattgagggtgggtctgcctctcccagtccattgactcaaacgttaatctcctttgacaacactctcacagacacacccaggaacaatactttgcatccttcartccaatcaagttgacactcagtattaaccatcacagggaaacatccatttcttagtcttttcttgcttctaaaggctgcctcctcatagttccttcctctgtcttcaaagccagcagcaaagatttgttctctgacttctgcttccatcatcatatctcattctccaccttccttttgtaaggacccttgtgattacattgggccactagataatccgggataacctctccttctcatgatccttcactcaatcacaactgcaaagtccctcttcccatgtaagatttata

SEQ ID NO: 94137 - DNA, 614 bp, Homo sapiens
gagggaccccagatattcactggggagggagaagacgcagcagaaaacttttactgtctctctttttatttttattttttgctgttttccttatagtcccttgaaacttggcaacttggcatgccagtttttttctggaagggcaaaagatgttatgaaaaccattgaaggctatttcccttttttaaactaaattttaatttttgtcyaagttatggaagtacacagatgaaaatatccaaactttattgctgaggcttaagaaagacagcagttccttgcctggaactttgcccaccctcaaatcctgataccaagaggaagctacttccacactttcagttgtttcttgagatagttctcttcctgtctcaaaaccgtgtgcttctattcccgtactttgatttttcactttttttatacatgtgaactttttgttgtgattagggttgccagatttagcaaatacaaatacagaacacccagttaaatttgcacttcacataaatgatggctactattttagtataagtatgtcccatgcaatatttggtccatacttatagtaaatggttatttgttgcttacctgaaattcaagtttaggtgagagtc

SEQ ID NO: 94138 - DNA, 866 bp, Homo sapiens
tcccctttgaacttttgtttatataagttatcttcttatattatatatttatcataggtagtataaaaattcttattttaggttcaagttttaccacttagaccctgacattagtgtgttaaattggcagcccttattttaactataaaatgttttctaaattaaataaaatctaaaattaatacctgaataaacattcattgtccaaaattcaaatgatacacagtatgtagaataaaaagtaaatgtccttgtrtagccccaccataggtaaccagttcaactgcaaactcttgaccacaagataataatgataaggaccaaggagtgcaaaatttattatcacataatttttgttttatttttaaatttttattttcacattttattatctacataccagtgatcttttcattgggaacatcttattttataatgccaaatgctcacacagggactaattctagtacaatagcttatatccactttgagatacagttttgaactattttctctggaagtgaacagagtgccatcttcgaatattctgattgctgagtagtttattcccatctgtttttggaagtctagatatgtatagctttcttagtatattgatctttacttaaagcaaacatattcttcaatggcaaattgccttttctccatttgtattgacctgtatgtctacaccaagctatctatatactgtcattacaatttggagactatcagttagatgcaaaatccttttgaggaacagagaataacccaaagtataattcagggtttgctcttgaagagcactttgtttcattcacattttcctaataggaaaatgtggcttgcattgacagtaaaaaatg

SEQ ID NO: 94139 - DNA, 866 bp, Homo sapiens
tcccctttgaacttttgtttatataagttatcttcttatattatatatttatcataggtagtataaaaattcttattttaggttcaagttttaccacttagaccctgacattagtgtgttaaattggcagcccttattttaactataaaatgttttctaaattaaataaaatctaaaattaatacctgaataaacattcattgtccaaaattcaaatgatacacagtatgtagaataaaaagtaaatgtccttgtatagccccaccataggtaaccagttcaactgcaaactcttgaccacaagataataatgrtaaggaccaaggagtgcaaaatttattatcacataatttttgttttatttttaaatttttattttcacattttattatctacataccagtgatcttttcattgggaacatcttattttataatgccaaatgctcacacagggactaattctagtacaatagcttatatccactttgagatacagttttgaactattttctctggaagtgaacagagtgccatcttcgaatattctgattgctgagtagtttattcccatctgtttttggaagtctagatatgtatagctttcttagtatattgatctttacttaaagcaaacatattcttcaatggcaaattgccttttctccatttgtattgacctgtatgtctacaccaagctatctatatactgtcattacaatttggagactatcagttagatgcaaaatccttttgaggaacagagaataacccaaagtataattcagggtttgctcttgaagagcactttgtttcattcacattttcctaataggaaaatgtggcttgcattgacagtaaaaaatg

SEQ ID NO: 94140 - DNA, 866 bp, Homo sapiens
tcccctttgaacttttgtttatataagttatcttcttatattatatatttatcataggtagtataaaaattcttattttaggttcaagttttaccacttagaccctgacattagtgtgttaaattggcagcccttattttaactataaaatgttttctaaattaaataaaatctaaaattaatacctgaataaacattcattgtccaaaattcaaatgatacacagtatgtagaataaaaagtaaatgtccttgtatagccccaccataggtaaccagttcaactgcaaactcttgaccacaagataataatgataaggaccaaggagtgcaaaattkattatcacataatttttgttttatttttaaatttttattttcacattttattatctacataccagtgatcttttcattgggaacatcttattttataatgccaaatgctcacacagggactaattctagtacaatagcttatatccactttgagatacagttttgaactattttctctggaagtgaacagagtgccatcttcgaatattctgattgctgagtagtttattcccatctgtttttggaagtctagatatgtatagctttcttagtatattgatctttacttaaagcaaacatattcttcaatggcaaattgccttttctccatttgtattgacctgtatgtctacaccaagctatctatatactgtcattacaatttggagactatcagttagatgcaaaatccttttgaggaacagagaataacccaaagtataattcagggtttgctcttgaagagcactttgtttcattcacattttcctaataggaaaatgtggcttgcattgacagtaaaaaatg

SEQ ID NO: 94141 - DNA, 866 bp, Homo sapiens
tcccctttgaacttttgtttatataagttatcttcttatattatatatttatcataggtagtataaaaattcttattttaggttcaagttttaccacttagaccctgacattagtgtgttaaattggcagcccttattttaactataaaatgttttctaaattaaataaaatctaaaattaatacctgaataaacattcattgtccaaaattcaaatgatacacagtatgtagaataaaaagtaaatgtccttgtatagccccaccataggtaaccagttcaactgcaaactcttgaccacaagataataatgataaggaccaaggagtgcaaaatttattatcacataatttttgttttatttttaaatttttattttcacrttttattatctacataccagtgatcttttcattgggaacatcttattttataatgccaaatgctcacacagggactaattctagtacaatagcttatatccactttgagatacagttttgaactattttctctggaagtgaacagagtgccatcttcgaatattctgattgctgagtagtttattcccatctgtttttggaagtctagatatgtatagctttcttagtatattgatctttacttaaagcaaacatattcttcaatggcaaattgccttttctccatttgtattgacctgtatgtctacaccaagctatctatatactgtcattacaatttggagactatcagttagatgcaaaatccttttgaggaacagagaataacccaaagtataattcagggtttgctcttgaagagcactttgtttcattcacattttcctaataggaaaatgtggcttgcattgacagtaaaaaatg

SEQ ID NO: 94142 - DNA, 866 bp, Homo sapiens
tcccctttgaacttttgtttatataagttatcttcttatattatatatttatcataggtagtataaaaattcttattttaggttcaagttttaccacttagaccctgacattagtgtgttaaattggcagcccttattttaactataaaatgttttctaaattaaataaaatctaaaattaatacctgaataaacattcattgtccaaaattcaaatgatacacagtatgtagaataaaaagtaaatgtccttgtatagccccaccataggtaaccagttcaactgcaaactcttgaccacaagataataatgataaggaccaaggagtgcaaaatttattatcacataatttttgttttatttttaaatttttattttcacattttattatctacataccagtgatcttttmattgggaacatcttattttataatgccaaatgctcacacagggactaattctagtacaatagcttatatccactttgagatacagttttgaactattttctctggaagtgaacagagtgccatcttcgaatattctgattgctgagtagtttattcccatctgtttttggaagtctagatatgtatagctttcttagtatattgatctttacttaaagcaaacatattcttcaatggcaaattgccttttctccatttgtattgacctgtatgtctacaccaagctatctatatactgtcattacaatttggagactatcagttagatgcaaaatccttttgaggaacagagaataacccaaagtataattcagggtttgctcttgaagagcactttgtttcattcacattttcctaataggaaaatgtggcttgcattgacagtaaaaaatg

SEQ ID NO: 94143 - DNA, 1370 bp, Homo sapiens
  misc_feature (1)...(1370): n = A,T,C or G
ctagtttggcactgtaatttatcaggtttcatgactctttgaaagctgagtgccatatctgtagctgtagatttttattggatgtgcatttgtactaacttcatctctggcttcaatatggccattttaaggccatattattgtttttctttctcatccattttttttctaaaaggaaatatcttcattgctttattcagttacaaagttaatttgtgctgcaagaaacaacattcaaatgatattaaaaattaaagaagaacctgaaatatcccaataatctcacactgacctctactccctgagaatgttagtgttctcatcaacttttaattagattttcatgtctgtcttaaagcatgtctttctaagctgccataatgtcttctgcaatatggtagtgtactactgaataatgaatgaaatgtttttaacattgcttcacaaataacaaagtgcttttcacggtttggttcatttaatcttatcagcgaagatcaacaatatcttctaaaaggtggtcattttattgttgccataaatctttctcatttttttcgtggctgaatttccattttccttgtcaatggtttttttttttttttttttggtcggtagttctctggtgcatccagttaggagaaannnnnnnnnnnnnnnnnnnnnnnnnnnnnnnnnnnnnnnnnnnnnnnnnnnnnnnnnnnnnnnnnnnnnnnnnnnnnnnnnnnnnnnnnnnnnnnnnnnnaataaatgttaccacctatgtagctgcttatacagaaactgaggatgatagttcaaaacaggcccgctttccttttgtttgaacactgatttcaaataaaaaataaaagttgggccgggcgcagtggctcatgcctttaatcccagcactttgggaggccgaggcgggcggatcacgaggtcagcagatcgagaccatcctggccagcatggtgaaaycctgtttctactaaaaatacaaaaattagctggtcgtggtggcaggcacctatagtcctggctactcgggaggctgaggcaggagaatcgcttgatcctgggaggtggtggttgcagtgagccgagatagcgctcaccgcatagaaaacagacgacagtaatttacccttgttgtgtttgctactgtgattttataagacatggacatccagcttccaggacttatttttggagaccttgaaacacagtcaaggaacttcagatgtaagtttagaatgagtacacaactgtactttatccgccagttttctgaggtatgcctgagagcagagagcacatgaactgccattgtactggatgatgtgataatgaacctcattcacagaatattttgatttcagaatggc

SEQ ID NO: 94144 - DNA, 1370 bp, Homo sapiens
  misc_feature (1)...(1370): n = A,T,C or G
ctagtttggcactgtaatttatcaggtttcatgactctttgaaagctgagtgccatatctgtagctgtagatttttattggatgtgcatttgtactaacttcatctctggcttcaatatggccattttaaggccatattattgtttttctttctcatccattttttttctaaaaggaaatatcttcattgctttattcagttacaaagttaatttgtgctgcaagaaacaacattcaaatgatattaaaaattaaagaagaacctgaaatatcccaataatctcacactgacctctactccctgagaatgttagtgttctcatcaacttttaattagattttcatgtctgtcttaaagcatgtctttctaagctgccataatgtcttctgcaatatggtagtgtactactgaataatgaatgaaatgtttttaacattgcttcacaaataacaaagtgcttttcacggtttggttcatttaatcttatcagcgaagatcaacaatatcttctaaaaggtggtcattttattgttgccataaatctttctcatttttttcgtggctgaatttccattttccttgtcaatggtttttttttttttttttttggtcggtagttctctggtgcatccagttaggagaaannnnnnnnnnnnnnnnnnnnnnnnnnnnnnnnnnnnnnnnnnnnnnnnnnnnnnnnnnnnnnnnnnnnnnnnnnnnnnnnnnnnnnnnnnnnnnnnnnnnaataaatgttaccacctatgtagctgcttatacagaaactgaggatgatagttcaaaacaggcccgctttccttttgtttgaacactgatttcaaataaaaaataaaagttgggccgggcgcagtggctcatgcctttaatcccagcactttgggaggccgaggcgggcggatcacgaggtcagcagatcgagaccatcctggccagcatggtgaaatcctgtttctactaaaaatacaaaaattagctggtcgtggtggcaggcacctatagtcctggctactcgggaggctgaggcaggagaatcgcttgatcctgggaggtggtggttgcagtgagccgagatagcgctcaycgcatagaaaacagacgacagtaatttacccttgttgtgtttgctactgtgattttataagacatggacatccagcttccaggacttatttttggagaccttgaaacacagtcaaggaacttcagatgtaagtttagaatgagtacacaactgtactttatccgccagttttctgaggtatgcctgagagcagagagcacatgaactgccattgtactggatgatgtgataatgaacctcattcacagaatattttgatttcagaatggc

SEQ ID NO: 94145 - DNA, 532 bp, Homo sapiens
gcacttccaacctggatgacagagtgaggccatgtctcttaaaaawtttttttaaaatttagcaaatggagtgtattttttaaatgtggcaacagggcaaacaattcgttttaggaaaaacaaaatgtaaaaagaagaaaacgcaataataatatactgttaggctctgcaataaacaatatttacatactcatagtaaacagaaacactgattactatttatcataaactgtgatgtacacagagggtgggagaaagggagacagaggttgtgtgagagctaaacactcatctatgccaatggtaacaggaaattaatagaaatgatgattaattttaaagaggaaatataatcagtcacattttttaaaagatatatgaagacaaataccagaatatacagctagtaaaaactgaaagtggggaaaggcccaggtagggcggtgggctggatgttttctcttagaagccttttaatgctctctgatccttgtctctgttttgattttttaaaatactattattgtaaaaa

SEQ ID NO: 94146 - DNA, 513 bp, Homo sapiens
ctgggcccgggcagaggatgctgcagggagaagccctgggatggactgggaggaccagagcccgagaggcgggatggactgggagggccagagcccgagaggcaggagccctggcctgggtccctgcctgtgcctgtctctcaccagatgcatcactggcacccgggtcccccgtttgacccagtgtcctcacctgaccaacaaggtgaacaactgctctgagtcatggagagaacatgtcaacagtgaaatccctgaggatgggaatagggatggacaaggctaaatcaaggggtccctgggctgagctcttcctgggagtcaggcacattggagtcataggagtagatggctcacctaacacagaccacaacatcctttccttggctacagtgaagaccccaaaatgtgggyccacctcttcattgacgtgtcttttgtttcctacatatttcctttattcgtatctttgaagacttacctggtgcattggggaggttgggatgcagattt

SEQ ID NO: 94147 - DNA, 701 bp, Homo sapiens
atccaatctcgctaatctgtgtcagagagagaatggcacagtaccaaagtttgtgaagttatgtattgaacatgttgaagaacatggtaagagaaggattttgatttttttttttaacattaagcaaaccagcttcttgttttgccatcaaaattcctagaatttttatgattttgagtgatgcaaacagaagttccttatagtcckaagatgttaagaaaataattttgtttacaaatacttacatgtttacacctgtttcaaattaagatctctccaggcatctgctgaatgtttggtactcacagttaattaagtatatgctattctttgatgccatttcatttaagcatttgcttaaaatgaagaaggtagtgattgtgaaattgagcttgtttttaagaaataatttgacaatgtataagatccgaggagattgtgtttacttactaagtttcttctgtcctaaaaatcagatgacattttaaatggttaagtcaaccacaaatgtctcacgagataaaaatttttatgtcattttctgtaaaataggacaaactaatttctattgtgattaatttaaacatagctataatatttatactagttttatatacattagtatattgtaatcacattaacttatctctgtatatcatgaaagagattttgtacaattaaaacacataattcaatttgta

SEQ ID NO: 94148 - DNA, 701 bp, Homo sapiens
atccaatctcgctaatctgtgtcagagagagaatggcacagtaccaaagtttgtgaagttatgtattgaacatgttgaagaacatggtaagagaaggattttgatttttttttttaacattaagcaaaccagcttcttgttttgccatcaaaattcctagaatttttatgattttgagtgatgcaaacagaagttccttatagtcctaagatgttaagaaaataattttgtttacaaatacttacatgtttacacctgtttcaaattaagatctctccaggcatctrctgaatgtttggtactcacagttaattaagtatatgctattctttgatgccatttcatttaagcatttgcttaaaatgaagaaggtagtgattgtgaaattgagcttgtttttaagaaataatttgacaatgtataagatccgaggagattgtgtttacttactaagtttcttctgtcctaaaaatcagatgacattttaaatggttaagtcaaccacaaatgtctcacgagataaaaatttttatgtcattttctgtaaaataggacaaactaatttctattgtgattaatttaaacatagctataatatttatactagttttatatacattagtatattgtaatcacattaacttatctctgtatatcatgaaagagattttgtacaattaaaacacataattcaatttgta

SEQ ID NO: 94149 - DNA, 982 bp, Homo sapiens
ccatattgtgaataacaataacaatatcactaaacaggaaaagtaggactagaggagaccatttaaaaattccaaatgtaatgtttcaatatatcctaaaagacagctatttttagcgacagcaatgagacctgggaagatttactcccaaaatgagaaaaaacccatgatttgataccttgaacatattccaacaacctactgaagatcaatttatctaatttcattttatattttgatgttgtgttaagacagttgacaaccaatttctttccccttgttaactgaaaatatcatactttgaaacagtccaatctaggctggcaaaaacatatatatatatatatatatatatatatatataaaamatattatctatctatctatctatctatctatctatctatctatctatctaaatatatttgagacagtgtctcagtgtccacattgcctaggctggagtacagtggtacaatctcggctcactgcaacctccgcctcctgggcccaaatgatcctcccatctcagcctcctgagtagctgggactacaggtgcacgccaccatgcccggctaatttttgtattttttggtagatggtgtttcaccatgttgatcaggttggtctcgaactcctgacctcaagtgatccacccaccttggcctctcaaagtgctgggattacaggcaggcatgagccaccatgcccggctgaggctggcaaaatactaatgttccgatttctttagaacgatatagttaagttccatgatggcaggaatgatgtctacctctagtgtctagcacagtaccttgcaaagagaataggcgcacaatacatatttatagactttatcaagtgacaatacgtttggaagcgattaagtataattgagtaataatcaatatttgtattcaaaaacaaagtatcatctaaacattaatttcttttttacctttatgttttagaaatgacatt

SEQ ID NO: 94150 - DNA, 982 bp, Homo sapiens
ccatattgtgaataacaataacaatatcactaaacaggaaaagtaggactagaggagaccatttaaaaattccaaatgtaatgtttcaatatatcctaaaagacagctatttttagcgacagcaatgagacctgggaagatttactcccaaaatgagaaaaaacccatgatttgataccttgaacatattccaacaacctactgaagatcaatttatctaatttcattttatattttgatgttgtgttaagacagttgacaaccaatttctttccccttgttaactgaaaatatcatactttgaaacagtccaatctaggctggcaaaaacatatatatatatatatatatatatatatatataaaacawattatctatctatctatctatctatctatctatctatctatctatctaaatatatttgagacagtgtctcagtgtccacattgcctaggctggagtacagtggtacaatctcggctcactgcaacctccgcctcctgggcccaaatgatcctcccatctcagcctcctgagtagctgggactacaggtgcacgccaccatgcccggctaatttttgtattttttggtagatggtgtttcaccatgttgatcaggttggtctcgaactcctgacctcaagtgatccacccaccttggcctctcaaagtgctgggattacaggcaggcatgagccaccatgcccggctgaggctggcaaaatactaatgttccgatttctttagaacgatatagttaagttccatgatggcaggaatgatgtctacctctagtgtctagcacagtaccttgcaaagagaataggcgcacaatacatatttatagactttatcaagtgacaatacgtttggaagcgattaagtataattgagtaataatcaatatttgtattcaaaaacaaagtatcatctaaacattaatttcttttttacctttatgttttagaaatgacatt

SEQ ID NO: 94151 - DNA, 982 bp, Homo sapiens
ccatattgtgaataacaataacaatatcactaaacaggaaaagtaggactagaggagaccatttaaaaattccaaatgtaatgtttcaatatatcctaaaagacagctatttttagcgacagcaatgagacctgggaagatttactcccaaaatgagaaaaaacccatgatttgataccttgaacatattccaacaacctactgaagatcaatttatctaatttcattttatattttgatgttgtgttaagacagttgacaaccaatttctttccccttgttaactgaaaatatcatactttgaaacagtccaatctaggctggcaaaaacatatatatatatatatatatatatatatatataaaacatmttatctatctatctatctatctatctatctatctatctatctatctaaatatatttgagacagtgtctcagtgtccacattgcctaggctggagtacagtggtacaatctcggctcactgcaacctccgcctcctgggcccaaatgatcctcccatctcagcctcctgagtagctgggactacaggtgcacgccaccatgcccggctaatttttgtattttttggtagatggtgtttcaccatgttgatcaggttggtctcgaactcctgacctcaagtgatccacccaccttggcctctcaaagtgctgggattacaggcaggcatgagccaccatgcccggctgaggctggcaaaatactaatgttccgatttctttagaacgatatagttaagttccatgatggcaggaatgatgtctacctctagtgtctagcacagtaccttgcaaagagaataggcgcacaatacatatttatagactttatcaagtgacaatacgtttggaagcgattaagtataattgagtaataatcaatatttgtattcaaaaacaaagtatcatctaaacattaatttcttttttacctttatgttttagaaatgacatt

SEQ ID NO: 94152 - DNA, 982 bp, Homo sapiens
ccatattgtgaataacaataacaatatcactaaacaggaaaagtaggactagaggagaccatttaaaaattccaaatgtaatgtttcaatatatcctaaaagacagctatttttagcgacagcaatgagacctgggaagatttactcccaaaatgagaaaaaacccatgatttgataccttgaacatattccaacaacctactgaagatcaatttatctaatttcattttatattttgatgttgtgttaagacagttgacaaccaatttctttccccttgttaactgaaaatatcatactttgaaacagtccaatctaggctggcaaaaacatatatatatatatatatatatatatatatataaaacatawtatctatctatctatctatctatctatctatctatctatctatctaaatatatttgagacagtgtctcagtgtccacattgcctaggctggagtacagtggtacaatctcggctcactgcaacctccgcctcctgggcccaaatgatcctcccatctcagcctcctgagtagctgggactacaggtgcacgccaccatgcccggctaatttttgtattttttggtagatggtgtttcaccatgttgatcaggttggtctcgaactcctgacctcaagtgatccacccaccttggcctctcaaagtgctgggattacaggcaggcatgagccaccatgcccggctgaggctggcaaaatactaatgttccgatttctttagaacgatatagttaagttccatgatggcaggaatgatgtctacctctagtgtctagcacagtaccttgcaaagagaataggcgcacaatacatatttatagactttatcaagtgacaatacgtttggaagcgattaagtataattgagtaataatcaatatttgtattcaaaaacaaagtatcatctaaacattaatttcttttttacctttatgttttagaaatgacatt

SEQ ID NO: 94153 - DNA, 436 bp, Homo sapiens
tgaatgacagtagactgaaygaatctctgtagttccagaaggcagggagaaggattgggagagtcgacacaaagtgtgcagccagggctgcgttggtatttttcctctgatgtgctccacagaatggcagctgacccactgtgggttgataatttcactggttcacagaagacagggaatataggactttagggaaataatgtgcctttgtctttgtctttctcttattctctatcaagggggaaaatgctgctctgggctggttggattcaagctcatggattggaccatgggataaagttttagtggcagatggctacttgcttgaaatagagtggagaaaaagggtggcagcattggtgagaagggacaggcaggaggcagtagggaagtgcagctttactctgaagagaagaagaggtgggggtggggaggg

SEQ ID NO: 94154 - DNA, 436 bp, Homo sapiens
tgaatgacagtagactgaacgaatctctgtagttccagaaggcagggagaaggattgggagagtcgacacaaagtgtgcagccagggctgcgttggtatttttcctctgatgtgctccacagaakggcagctgacccactgtgggttgataatttcactggttcacagaagacagggaatataggactttagggaaataatgtgcctttgtctttgtctttctcttattctctatcaagggggaaaatgctgctctgggctggttggattcaagctcatggattggaccatgggataaagttttagtggcagatggctacttgcttgaaatagagtggagaaaaagggtggcagcattggtgagaagggacaggcaggaggcagtagggaagtgcagctttactctgaagagaagaagaggtgggggtggggaggg

SEQ ID NO: 94155 - DNA, 468 bp, Homo sapiens
taaggctcatggtgagacattggcatccaatgattgctaccttgttagaagcacttgttgcatgctgggtactgtgctcagcactttcgtctattagctagtttattcctagaggtagatattatcaatccgtttcatagatgaggaatctaagaccctgagatggaaagcaacttgcccatagtcacacagctaattagtaacagggcccagttacaaactcaggtcatctaatgccagaacttgttctactaattccctccggcctcaggatgaggctgttctgatgataaaraagttggagtgctgtatgcagactttagtgacggaattgttcagggaacatgggtagaatgccccttgtcacattttatctgaatggagacagcaataaatgccactctgcacaggattgcttgtgtccttccacggcaccccattcccttcaagatagagctaaagcctcgg

SEQ ID NO: 94156 - DNA, 586 bp, Homo sapiens
cctgtggtgccatctgctgctggctgctccaggtgaccacctgccagcgaagcccaggctccgggacccatctattttgtgaaaagcccacatgcacaaagcaacccccaaatgccaaaggagccaagagaccaaagaaggaagcagacaaatccagtttgttggtattgagtgatttattgaggraacttttaagcaggcgggtggtctcgggtggccacaagacaggcagatctctgcactgttactctcggacccaaggcttatataccaagggaaaaggatatacatgctccagcaagacagtgaaaggtagtgtgccagagcaggcaagaacgccatgtgcatcatagcccagaatttgcatgataacatcaagcttgctttgatctaaaagcaggagtacatattcttacactcgggacagtaaataaagtaggagtcaggaggcattcatgggactggggctaatcagaagtcaacatgggaaaattagcatccaagatggagtcacttttgtcttcccatcaccccagaaagatgtcattgttcaagcttcccaaagaattgggggcctcaggccccc

SEQ ID NO: 94157 - DNA, 586 bp, Homo sapiens
cctgtggtgccatctgctgctggctgctccaggtgaccacctgccagcgaagcccaggctccgggacccatctattttgtgaaaagcccacatgcacaaagcaacccccaaatgccaaaggagccaagagaccaaagaaggaagcagacaaatccagtttgttggtattgagtgatttattgagggaacttttaagcaggcgggtggtctcgggtggccacaagacaggcagatctctgcactgttactctcggacccaaggcttatataccaagggaaaaggatatacatgctccagcaagacagtgaaaggtagtgtgccagagcaggcaagaacgccatgtgcatcatagcccagaatttgcatgataacatcaagcttgctttgatctaaaagcaggagtacatattcttacactcgggacagtaaataaagtaggagtcaggaggcattcatgggactggggctaatcagaagtcaacatgggmaaattagcatccaagatggagtcacttttgtcttcccatcaccccagaaagatgtcattgttcaagcttcccaaagaattgggggcctcaggccccc

SEQ ID NO: 94158 - DNA, 586 bp, Homo sapiens
cctgtggtgccatctgctgctggctgctccaggtgaccacctgccagcgaagcccaggctccgggacccatctattttgtgaaaagcccacatgcacaaagcaacccccaaatgccaaaggagccaagagaccaaagaaggaagcagacaaatccagtttgttggtattgagtgatttattgagggaacttttaagcaggcgggtggtctcgggtggccacaagacaggcagatctctgcactgttactctcggacccaaggcttatataccaagggaaaaggatatacatgctccagcaagacagtgaaaggtagtgtgccagagcaggcaagaacgccatgtgcatcatagcccagaatttgcatgataacatcaagcttgctttgatctaaaagcaggagtacatattcttacactcgggacagtaaataaagtaggagtcaggaggcattcatgggactggggctaatcagaagtcaacatgggaaaattagcatccaagatggagtcacttttgtcttcccatcaccccagaaagatgtcattgttcaagcttcccaargaattgggggcctcaggccccc

SEQ ID NO: 94159 - DNA, 532 bp, Homo sapiens
tgacccacaagagctagggttcaggctgcgtgccttgcgcagtagttctcaaatgtgtctatgtggaagcttgcctccaagggcttaccagcaaatccagaccccacacagctgccctgcaagaaggaggtgacagtggctgcgttcttgcctgcacagaggacgggtgtccatagagctcccagctggagttgagcagtttctggtcaagcaatgttctctgattttacatgtctggaagctaccattacaatcaggtcttcttaaatgtcctccctccctccgtcttcctttcttcctttctttctttgtcagatgctgtgtgtggacttgtgctgggatctggaggcggagamaagagctgtgacctagacataggggagtggggaacaaaggtgctcaggcagacaaccaactaggctgctacatctgcctctgcagcagagcatgggagggtggtaggaatttgtcatggcagcagggacatcggagctggggtgcaacagaggagcagccgctttccaggtagtca

SEQ ID NO: 94160 - DNA, 532 bp, Homo sapiens
tgacccacaagagctagggttcaggctgcgtgccttgcgcagtagttctcaaatgtgtctatgtggaagcttgcctccaagggcttaccagcaaatccagaccccacacagctgccctgcaagaaggaggtgacagtggctgcgttcttgcctgcacagaggacgggtgtccatagagctcccagctggagttgagcagtttctggtcaagcaatgttctctgattttacatgtctggaagctaccattacaatcaggtcttcttaaatgtcctccctccctccgtcttcctttcttcctttctttctttgtcagatgctgtgtgtggacttgtgctgggatctggaggcggagacaagagctgtgacctagacataggggagtggggaacaaagstgctcaggcagacaaccaactaggctgctacatctgcctctgcagcagagcatgggagggtggtaggaatttgtcatggcagcagggacatcggagctggggtgcaacagaggagcagccgctttccaggtagtca

SEQ ID NO: 94161 - DNA, 532 bp, Homo sapiens
tgacccacaagagctagggttcaggctgcgtgccttgcgcagtagttctcaaatgtgtctatgtggaagcttgcctccaagggcttaccagcaaatccagaccccacacagctgccctgcaagaaggaggtgacagtggctgcgttcttgcctgcacagaggacgggtgtccatagagctcccagctggagttgagcagtttctggtcaagcaatgttctctgattttacatgtctggaagctaccattacaatcaggtcttcttaaatgtcctccctccctccgtcttcctttcttcctttctttctttgtcagatgctgtgtgtggacttgtgctgggatctggaggcggagacaagagctgtgacctagacataggggagtggggaacaaaggtgctcaggcagacaaccaactaggctgctacatctgcytctgcagcagagcatgggagggtggtaggaatttgtcatggcagcagggacatcggagctggggtgcaacagaggagcagccgctttccaggtagtca

SEQ ID NO: 94162 - DNA, 532 bp, Homo sapiens
tgacccacaagagctagggttcaggctgcgtgccttgcgcagtagttctcaaatgtgtctatgtggaagcttgcctccaagggcttaccagcaaatccagaccccacacagctgccctgcaagaaggaggtgacagtggctgcgttcttgcctgcacagaggacgggtgtccatagagctcccagctggagttgagcagtttctggtcaagcaatgttctctgattttacatgtctggaagctaccattacaatcaggtcttcttaaatgtcctccctccctccgtcttcctttcttcctttctttctttgtcagatgctgtgtgtggacttgtgctgggatctggaggcggagacaagagctgtgacctagacataggggagtggggaacaaaggtgctcaggcagacaaccaactaggctgctacatctgcctctgcagcagagcatgggagggtggtaggaatttgtcatggcagcagggacatcggagctggggtgcaacrgaggagcagccgctttccaggtagtca

SEQ ID NO: 94163 - DNA, 1670 bp, Homo sapiens
  misc_feature (1)...(1670): n = A,T,C or G
catgacacgtaaccaccattatagtatcacacagaatagtttcatggccctaaaaatcctccgtgtcttacctatttatcacctcctttcctgttaaaccctggcaaccaccgatctttttaccatccccgtagttttgccttttccggaaagccatgtagttggaataatactgtaagttgtctttcatattggcttttttcacttaataataagcatttaaagttcctccatttcttttcatggcttgacagctcatttctttttagagctgagtgatattccattgtctggatgtgccaaaatttatttatccactcacctactcgaggacatcttggttgcttccaagttttggcaatgatgaataaagctactgctgtaaacatccatgtgcaggtttttatgtgaacataagctttcaactcctttgggtaaatatcaaggagtacttttgctggattgtatggcaatggtgtgtttagttttgtaagccactgccaaacttcagccgattcctggtttccctattctcggcaggctggcctcacaaagttcgtctcctgcagagctccaaggaagctggttttggctgaatctgaagatgatcaacactggtaggatgctgctgtgtcatagactggaaccccagctcctgatcatgctggagtggggctgctgctccctgcaaccccacctgcctcccccttgagctggaagagaagggctgacggccagagttctgccataccccactacgatcagatcaagctctgatcccaccaggccaggggctgtgcttccttgatcatataagcccaaggtccggggtcgctctcctggagtctgacatcagcccggctaggtcccagtgcgctgctctggaagggtcagaacgcttgttcctgagcttatctctgtggattttccctgatgaactctgatctagcaggcagtgtatgggctgctaagtacttttcccttgtttgctcaaggagtttgcggccccaagatcatttccaaagccttttgcttcagcttgctaaagggaagctgctgtcactctcttcagcttgctaaagggaggcggagttctgaggaaggcaggcaccttaagggatgttgaaagttgcctctgtttgctgtgcctaccacctacttctagtcctcctctcgccgcccagatcatcccctacaatgcattacccatgcctgccccccaccacccagaagctatgggggctctggtccaagccccacacttgtccgaaagaggtgcctgggccccacagaagccttgtcagatgatggcagctstcttctgatagttcaatggatctgccacctacacagagaggtctccaagtagctaactctctttgagtacncagctaaccatagtagtcaaatgaagggtttgaaccagaatattttcaagaatttgtgctcttctaagagtccatggtttttttaaaagttaatttaagttttaaaatttattttttattttatttaaacatttttatttattttttaaaatctttaattttaggtttncagggtacatnnnnnnnnnnnnnnnnnnnnnnnnnnnnnnnnnnnnnnnnnnnnnnnnnnnnnnnnnnnnnnnnnnnnnnnnnnnnnnnnnnnnnnnnnnnnnnnnnnnnctg

SEQ ID NO: 94164 - DNA, 648 bp, Homo sapiens
cttgagcctgggaggcggaggttgcagtgagtcaagatcatgccactgcactccagcctgggtgacagagcgagaccttatctcaaaaaatattggtaargaaaagaacctgaatctgtctcctggaaggtgcctgtcccctatccctgcaaaggagacgttcttcaaggatggttgttactatgatctgactgtttctgtctcccccaaatttgtaagttgtacctgccactgaccttcatgtctatggccacaatctcgggcttctcagacttgcattttgcaccttgttatgtggttgattaactagtgtaggtcttccttactagactggactattccctgaggataggggtctacatcttatttttgtacccctagcgccagcccaatgtgtgacacctagtagacatgcagggaacagttgaatgaacatggagttgttgaagagggggtgcatgacctttgtgaaaggcaaattcagccttttgtcaaagttggtcttggaatgggggggtggaggggagagaggcattcaacttcatttaatctcaatgctagatggttgtgtggcctcaggcaagttactgggtctcttagagccttagtttcctatctatgaagtgaggtacataatagtatttgtcc

SEQ ID NO: 94165 - DNA, 740 bp, Homo sapiens
tgtttctaaaaaattaaacaaatagaagtacaaactagacatgttactttatggtttatttccttctragtatagtcagtgatgaattataaaatgaattggcggctgggcgcggtggctcacgcctgtaatcccagcactttgggaggccaaggtgggcggatcacgaggtcaggaaatcgaagccatcctggctaacacggtgaaacaccgtctctactaaaaatacaaaaaattagctgggcgtggtggtgggcacctgtagtcccagctattcgggaggctgaggcagaagaatggcatgaactcgggaggtggagcttacagtgagccgagatcgcaccactgcactccagccagggtgacagagcaagactctgtctcaaaaaaaaaaaaaaaaaaaaaaaaaagtggccgggtgtggtggttcacatctgtaattccagcgcttggaaggctcagtcaggagaatcgcttgagccttggaggtcaaggctgcagtgagccatgatcataccactgcactccagcctggatgacaatgtgagaccctgtctcaacaacaacaacaaaaaataataataatttaaaaaaatcaaagtttgggaaaatcaatgtgttttcttctttatgataccttaattcaggactttcataattgttgctgttgactattgccttctaagtagtttgtttctattttaacctttcatctaattcatgttccatactatagtaag

SEQ ID NO: 94166 - DNA, 740 bp, Homo sapiens
tgtttctaaaaaattaaacaaatagaagtacaaactagacatgttactttatggtttatttccttctaagtatagtcagtgatgaattataaaatgaattggcggctgggcgcggtggctcacgcctgtaatcccagcactttgggaggccaaggtgggcggatcacgaggtcaggaaatcgaagccatcctggctaacacggtgaaacaccgtctctactaaaaatacaaaaaattagctgggcgtggtggtgggcacctgtagtcccagctaytcgggaggctgaggcagaagaatggcatgaactcgggaggtggagcttacagtgagccgagatcgcaccactgcactccagccagggtgacagagcaagactctgtctcaaaaaaaaaaaaaaaaaaaaaaaaaagtggccgggtgtggtggttcacatctgtaattccagcgcttggaaggctcagtcaggagaatcgcttgagccttggaggtcaaggctgcagtgagccatgatcataccactgcactccagcctggatgacaatgtgagaccctgtctcaacaacaacaacaaaaaataataataatttaaaaaaatcaaagtttgggaaaatcaatgtgttttcttctttatgataccttaattcaggactttcataattgttgctgttgactattgccttctaagtagtttgtttctattttaacctttcatctaattcatgttccatactatagtaag

SEQ ID NO: 94167 - DNA, 633 bp, Homo sapiens
ttttttttttttcttaagagtcttgctctgtcacccaggctggagtgcagtggcgcaatcttggcttattgcagcctccgcctcatgggctccagcgattctcctgcctcagctcccgagtagctgggattacaggtgctcactaccacaccagctaattgttttgtatttttagtagagatggggtttcaccacattggctaagctggtcttgaacccctgacctcaagtgatccacttgcctcagcctcccaaagtactgggattacaggcgtgagccatcatgcccagctgcttttctttacctttctctcaaaacattcttttaaaaaatcattttattatgacctggcaatttgatattcaacttaaaccaatctaatctctgaattagtaaataaaataactgttgtgacctattgtgttactatgaaattagacgtgtgatcagtcaacagtccaggatgaatggaatgttacagttcataataactttakgttatcatggacagttaatggcctttgaaaagaaacactactcaagcttcaaattccagctgaactctgcatggcataagggcaggagaacttcgaccagatgagttcctttcacaagcacatgtcacgctgtgt

SEQ ID NO: 94168 - DNA, 538 bp, Homo sapiens
aaatggagactgtatctctgcctttattactagatctggttgatattgttgttatctggagtttgagaactctcttcccttatcaggtgagctgcataaataaaatggtatttagtctgtatagagtgtgtaccgtgtgtgcaattctgtctaagtattttcctgttattatgccacataaacttgctgataaccctatagagtaggtagttattattcctattctaccaatgtaaaaattgaggcacagaaaatttaagtaatttttagagcatgaagctagtagtaggtagtgtctgaaaccagctatttcaaaastcatgctcttaattattactgcaaactgcatgctaataataaagatgtaaaaaaatcaagatggaaaaagaaaaacccaataatttttatcaatatgtctatagaggtgaaagcactaaagaatttgtgttacaagttccctaaacctatctttttgttgtgtattctattactccaaattcaaagtttaccaggcattatggatatttcatatttactt

SEQ ID NO: 94169 - DNA, 579 bp, Homo sapiens
tattttattttctaatatctgcctgtgccgcatcatttaagattgttttgcttgcaatagcatatctctaatctttaactgattcttccagtagtctctttttgctgttggcattctaatcaattaaagttttctattgtgctgcctcctgattttccttcatccattttttgctccataaagaatgaaatacatgacgaggtgaaagcctatgtttatayaggtatacctttattttatttctcacacttgaataggtcctttcattttatttttcttacattttcttatatcaggtcaaatttccccagcatcatatgcttagtggtatttcctttcaatccaagcaaaccaaaaagtacattccagagtttttacagctattaataaaatatctctagtgcttatcaggccattttgtgcaataatgttatcaacatatccttaatgactctatgtgataaacaatgttactgctaggcaccaagtgcctaaataatcctttaacagccatataaaatttgagtgaagtagctgaaagttggtggatatctcagctccacagttcagattccctat

SEQ ID NO: 94170 - DNA, 644 bp, Homo sapiens
tattttccacccagtgcatagcacaaggtacaatatcagtgtaatggggaaagattgcaggacagaaggaaagaatatcatctcggccgggcgtggtggctcacaccygtgatcccagcactttgggaggctgaggtgggcagatcacctgaggtcaggagttccagaccagcctggacaacatggtgaaaccccgtctctactaaaaatacaaaaagtagccgggtgtggtggtgcatgcctgtaatcccagctacttgggaggctgaggcaggagaatcacttgaacctggtaggcagagtttgcagtgagcctagatcgtgccattgcactccagcctgggcaacatagtgagactacatctcaaaaaaaaaaaaaaaaagagtatcatttcagaaaactaattgtttcatttttcacttctatttttgaaataatctcagatttataaaaaagttgctataaaggtgcaaagaattcccatgtaacctttacccagcttccccaaatattagcatcccattaatccacattacaatgaccaaaaccaagacattaacaatgatacaatactactacctaatctaaataattgttcacattttggtgagtgttccattaatgtcctttctgtagctcagga

SEQ ID NO: 94171 - DNA, 706 bp, Homo sapiens
tgcagcctggtgcctgtgacaaagcactggccctgagtaaccggtaaaatgccaaatatgatttgtgagtagttaatggagttcttcctaagagatggcaaggttccagggctagcatggacaccagttatttagttttttggattaatgaaggtttcacagtaaattaagcattttaaactatggcatgagtcactgggctttgatagatacagatgattaaaataaagggtgaaggtgccttggaaacagcctggatttaggcatagatgtgaggctccaaagcaagcaggtggccatgaaatcacagggctccaccggtgtcccctgtctgcaaatgatatttccagagagggaggatttggacattagtgggcagtggtaacttccctayttgtcccagaaggaaattctcaaaatggaacaaactccatcaaggggatgcttgaaaaagcatggtatttttaatcataaattaaatctttcattcccattccattaggcatttactaactcctgagtcttgcactaagtttaagatgatccgcaagttgccgcggttgactaaatgttcaaatgcaacgtaggttatcaggggaagctggtggcgggttgtacaaagacaaaggtccaaaggtttctcttctgcctcagccaccagaggagggcaccctgctgtcaggtatttctccggaagaaacccccc

SEQ ID NO: 94172 - DNA, 1909 bp, Homo sapiens
agccttttctccagcttctgggcccactgagctacccgtcagcacctcctggccagtgctgaatactcctgtgcatattgaacaggcttccttttatgctcatgcccagaattccagaagagataaggacttccagggcaccagtgagagatgaaactctgggagtgggcactgggccagctctaaaatgagttatgttgagtcagcagagtcaaattgactttcccaagagactcacactagaacgttgctcagttcctggaaagttaaaactgcaaagaacacccatacccaccaatggcttctcctccagcatcctgagacttgggtttcacaagaaaaacagaaaatgtttccaacaattgtcccattgacttgttcacttaggcctgagaaaggcatcttcagactccctgtcgacttggcagaattttaactctggcacaattcacttaatgtgaattttttttcataaacttccttkcagaaggttcttagatatgtatgaatccctcacatgcacacgcttctgtgtgtacagatgctatgtgcttctcaaaggaagaagttggtcaaccaaggacagaccaacatttgcccaatctttagactgaaaatatggctagcattggttaccagcctgctaggcactatgacccattctatagcatctctgacccttattgcagctctgcaaggaaaacatggaaaccaggacatagcagaggaagaagctgatactcaaagaagtgagctgatagatccaagactactcagccagaaagtgctggaactgggatccacatttatgcatttccagctgcaaaacttgtaccttatgcctgtgcctctggagtgctaaggagagttagggatgagcgagtaaaatctgcccattacacagggggagaggtggggcttgaaggacttctgtgtcctgctcaaagtcaaacaaacagcaaatgtgggactaacctaaatggagcagacttgctttcctgcctgaattgcttcctaacagctgaaacatcgcaggctaaggaacgggagaagctgctctgcctcccattccatcttccataccaaccacgatgcactgactcctggcccaatcccatcaagcaggcttccagaagtatggagagagtcggcagcaactctctgcactgttcaatatgacttggaaagttaaattaaataacacaaaaaatgcagttcctccattacagtgactacatttgtttttgttttttgttttgttttgttttttgcttgttttgttttgttgagacagattttcgctcttgttgcccaggctggagtgcaatggcgccatctcggctcaccgcaacctccgcctctcaggttcaagagattctcctgcctcagccttccgagcagctgggattataggcatacgccaccacacccagttaattttgtatttttagtggagacggggtttctccatgttggtcaggccggtctcgaactcccgacctcaggtgatccgcccgcctcggcctcccaaagtgctgggatttcaggcgtgagccaccgtacccagcagtgactgcatttcaaagactcaacagccaccactggccagcagctgccagatcagatggcactgacgtagcacgctcctgtcatggcagaagcttctcatggacgactaccagtggtctgagctggccccgcactctaatgccccttatgacctgggacacttcacttggatctactcaggaaaggtggaacacacccagtctatttgctctgggtcccaggaaaggcaacaaattatttctatgagccacctgccagaaattgtagcagagagtcatggaaaatttgttatttacttgaaaggtgttttgggatttttaaactgtttctcttgagttaa

SEQ ID NO: 94173 - DNA, 1909 bp, Homo sapiens
agccttttctccagcttctgggcccactgagctacccgtcagcacctcctggccagtgctgaatactcctgtgcatattgaacaggcttccttttatgctcatgcccagaattccagaagagataaggacttccagggcaccagtgagagatgaaactctgggagtgggcactgggccagctctaaaatgagttatgttgagtcagcagagtcaaattgactttcccaagagactcacactagaacgttgctcagttcctggaaagttaaaactgcaaagaacacccatacccaccaatggcttctcctccagcatcctgagacttgggtttcacaagaaaaacagaaaatgtttccaacaattgtcccattgacttgttcacttaggcctgagaaaggcatcttcagactccctgtcgacttggcagaattttaactctggcacaattcacttaatgtgaattttttttcataaacttccttgcagaaggttcttagatatgtatgaatccctcacatgcacacgcttctgtgtgtacagatgctatgtgcttctcaaaggaagaagttggtcaaccaaggacagaccaacatttgcccaatctttagactgaaaatatggctagcattggttaccagcctgctaggcactatgacccattctatagcatctctgacccttattgcagctctgcaaggaaaacatggaaaccaggacayagcagaggaagaagctgatactcaaagaagtgagctgatagatccaagactactcagccagaaagtgctggaactgggatccacatttatgcatttccagctgcaaaacttgtaccttatgcctgtgcctctggagtgctaaggagagttagggatgagcgagtaaaatctgcccattacacagggggagaggtggggcttgaaggacttctgtgtcctgctcaaagtcaaacaaacagcaaatgtgggactaacctaaatggagcagacttgctttcctgcctgaattgcttcctaacagctgaaacatcgcaggctaaggaacgggagaagctgctctgcctcccattccatcttccataccaaccacgatgcactgactcctggcccaatcccatcaagcaggcttccagaagtatggagagagtcggcagcaactctctgcactgttcaatatgacttggaaagttaaattaaataacacaaaaaatgcagttcctccattacagtgactacatttgtttttgttttttgttttgttttgttttttgcttgttttgttttgttgagacagattttcgctcttgttgcccaggctggagtgcaatggcgccatctcggctcaccgcaacctccgcctctcaggttcaagagattctcctgcctcagccttccgagcagctgggattataggcatacgccaccacacccagttaattttgtatttttagtggagacggggtttctccatgttggtcaggccggtctcgaactcccgacctcaggtgatccgcccgcctcggcctcccaaagtgctgggatttcaggcgtgagccaccgtacccagcagtgactgcatttcaaagactcaacagccaccactggccagcagctgccagatcagatggcactgacgtagcacgctcctgtcatggcagaagcttctcatggacgactaccagtggtctgagctggccccgcactctaatgccccttatgacctgggacacttcacttggatctactcaggaaaggtggaacacacccagtctatttgctctgggtcccaggaaaggcaacaaattatttctatgagccacctgccagaaattgtagcagagagtcatggaaaatttgttatttacttgaaaggtgttttgggatttttaaactgtttctcttgagttaa

SEQ ID NO: 94174 - DNA, 956 bp, Homo sapiens
tgcattgagagctaaggagaagggatggctgggtgggaaggacatgtgtgctcagctgaaggactcaaaggcagatagtttgttgggaaggtattccaggcaacgacatcccctatccctcgctctctctccttatatcctagcagccatgctatagagcacggtccacttactctcagacctctggccagtcccatgtccaggcccttcccctgccccttacctctcctctgtcactgtcctccttgtgcagcaccaagcagctgttggccgatatcatacagttccatcctggggacaccctcaaggagatcctgtccctctcggcttccagagagcaagtgagtagccgggctggcccacaggttctgtctcattcatcccccacctcatcccacctgcaccgctgctgtttccctcctctgaacctcacccacatcagccagaagcagacacctgtgctcaccagtaatgagaactctggaggcctacaggatgagggatacagctttagccttgggaagcctcgggctacagagtcatggggccccacccctctccccacttcacacactgaaacaagcaccaacactagggctatggggggcackgagagaccgtctgggaatgctcccctggaaggcctgcactcagaagagtggtctgctagaatgcctggaggcaggagaaggtagtaggcaggtggggggccaggggcaggttgggcccgctggagtgaagactgaaccagggtcttcccaaagaaaaggtggggatggccagtagaggtatgtcccaaaacagaacagacaggtaaatgcccccaaacatcctgtgccgtcagaaagatccattgttgggaagtcacagctagtgtctgtccggaatcctttatgccatggcctgggtttggttctcctttgggccactcttcgcctgtggtgatctatgaggcc

SEQ ID NO: 94175 - DNA, 1127 bp, Homo sapiens
gaagtgacaaaaataattgtattcgagtggtggaatgggcgatgcgctttcattgatctagaatctaaattttatttagtatgctttttaaagtaacgcttttattttagaatcattttagatttacagaaaatttgagaagacagtgtaaagaattcctatatatatatcctatccccagtttctgttattatgaacatcttacattagtgggatacatttgtcgcaagtaaatgagccaataacttaatggtattgtagtttctttctttctttctttctttttttttttttgagagtcttgctctgtcatccatgctggagtgcagcagcacagtcacagctcactgcagccacagcctcccaggctcaagctgagcacgatctcggctcactggaaccttcctctcctgagttcaagcaattctcctgccttagcctcccagatagctgggattacaggcacccaccaccatgcccagctaatttttgtatttttagtagggacggggtttcactgtgttggccaggctggtctagaattcctgatctcaggtgatctgcccacttcggcctcccaaagtgctgggattacaggcatgagccaccgagttggtctgcagtttcttaatgtagtttctaaaactaaaaaaacttgttttgtaatccaaataaacaacatagaagacaatgtcattattttcataacttctaactccaacttagtatcctaatatttattatttttcttatttttattgtattaccttagactcctcttggcatggattcttggctacaaactggaacccaattttttttttttttcttttggtggcagggtctggctctrtctcccaggctggagtgcagtggcacgatttccattccctgcaacctctgcttcccaggtttaagcgatcctctcacctcagcctcctgagcagctgggaccatgggaccacaggtgtggttaatttttgtattttttgtagagttcaggttttgctgaccttggcctcccaaagtgctgggattacaggtgtgagcctccgtacccagctggaacaaatttttgctttatcttcatttgccatatgcttgtgcatgtcgttaaagtaattaaa

SEQ ID NO: 94176 - DNA, 1127 bp, Homo sapiens
gaagtgacaaaaataattgtattcgagtggtggaatgggcgatgcgctttcattgatctagaatctaaattttatttagtatgctttttaaagtaacgcttttattttagaatcattttagatttacagaaaatttgagaagacagtgtaaagaattcctatatatatatcctatccccagtttctgttattatgaacatcttacattagtgggatacatttgtcgcaagtaaatgagccaataacttaatggtattgtagtttctttctttctttctttctttttttttttttgagagtcttgctctgtcatccatgctggagtgcagcagcacagtcacagctcactgcagccacagcctcccaggctcaagctgagcacgatctcggctcactggaaccttcctctcctgagttcaagcaattctcctgccttagcctcccagatagctgggattacaggcacccaccaccatgcccagctaatttttgtatttttagtagggacggggtttcactgtgttggccaggctggtctagaattcctgatctcaggtgatctgcccacttcggcctcccaaagtgctgggattacaggcatgagccaccgagttggtctgcagtttcttaatgtagtttctaaaactaaaaaaacttgttttgtaatccaaataaacaacatagaagacaatgtcattattttcataacttctaactccaacttagtatcctaatatttattatttttcttatttttattgtattaccttagactcctcttggcatggattcttggctacaaactggaacccaattttttttttttttcttttggtggcagggtctggctctgtctcccaggctgragtgcagtggcacgatttccattccctgcaacctctgcttcccaggtttaagcgatcctctcacctcagcctcctgagcagctgggaccatgggaccacaggtgtggttaatttttgtattttttgtagagttcaggttttgctgaccttggcctcccaaagtgctgggattacaggtgtgagcctccgtacccagctggaacaaatttttgctttatcttcatttgccatatgcttgtgcatgtcgttaaagtaattaaa

SEQ ID NO: 94177 - DNA, 1604 bp, Homo sapiens
ccacagtgccagcagccgcgctcttagtgagggcttgacttaggggtaccatgaggaactttctcatgcaagtgaagtggtgactcttgttcatcgcttccgagttttcttgtgggagcacttgcaaacaaaccctttccttttaagttcttacctcctattgaccattttgttccaacttaaaaaacttaaaaattatacctttagtttgaccatgagccgtctctttatgagcattagagtattggaaattgtgatgttcagcaaaatctagaacacatggctgctttataaaaatatgagattcatggccaggcatggtgactcacacctgtaattctagcactttgggaggccaaggaagcaggatcactggagccctggagtctgagacctgcctggacaatataacaagaccccatctctaaaaatatgaaaaaattagtggcttgtacctgtagtcccagctacttgggaggccgaggcaggaagattgcttgagtccaggagttcgaggttacagtgagctatgatagcaccactgcactccaccctgggtgacagttagattctgtctctaaaaacaataataatcagaaaaatatgagaatcagtcatccaatttaatacttatctgtagccttgaggtcacatggcatgcataggcttcccacttcctgctgaaagtactgtcttaaaattatcagagtgggagcagcctccagatcaggtgggagctgtgacctctcagactgtgctaaatagctgtgtttgttgtactgcttttgtaagtcaaccaagccacaggttgtgcattgtgagtggaccgtgttgcatctgcctcctgcctctgaatacrgtggtcccagcaatagatgctcaattctcagagcgtctgcatgaccccccatggtcagtactgcttcactgtgctcctttcattgatcctgttgttgctgccacgagagcaaaataaaattaatataaatatatatgctacacacacacacacacacacacacacacacacacacacatttttagagggcttgtggtttctgaagatgatgaaagaaaaaaaagctgtgaaaagcaaaaatgcccaaaagttcatcttctgccctgacccatcacccttcttcagaggtacccagtacctccaattcccaagtctttctggggttctgctgaaccaacacgtagccgtttatcccttcatgtaagcttagggttctacattttccaatatgctaactaagccccatccattagccttacagctcctaaaatgttatctttcatttgctgtagtctcctctattgttattcttgttatctgagtgatttgaagactttttatgtctttgctggcattttggtggggttttagaagagcgtcgaggctgcatagatgtgttcgatctgtcttatttatttggacatttcagcagcctcttttaaaagaataatcagtccccagtccagaaacccctggaaccacttggtacttcttaaacctgccttcccttcacataggctgaccgctcaacctgacttcaattcctcactccaaacccagcccaaatttagggaacctatggaaa

SEQ ID NO: 94178 - DNA, 1604 bp, Homo sapiens
ccacagtgccagcagccgcgctcttagtgagggcttgacttaggggtaccatgaggaactttctcatgcaagtgaagtggtgactcttgttcatcgcttccgagttttcttgtgggagcacttgcaaacaaaccctttccttttaagttcttacctcctattgaccattttgttccaacttaaaaaacttaaaaattatacctttagtttgaccatgagccgtctctttatgagcattagagtattggaaattgtgatgttcagcaaaatctagaacacatggctgctttataaaaatatgagattcatggccaggcatggtgactcacacctgtaattctagcactttgggaggccaaggaagcaggatcactggagccctggagtctgagacctgcctggacaatataacaagaccccatctctaaaaatatgaaaaaattagtggcttgtacctgtagtcccagctacttgggaggccgaggcaggaagattgcttgagtccaggagttcgaggttacagtgagctatgatagcaccactgcactccaccctgggtgacagttagattctgtctctaaaaacaataataatcagaaaaatatgagaatcagtcatccaatttaatacttatctgtagccttgaggtcacatggcatgcataggcttcccacttcctgctgaaagtactgtcttaaaattatcagagtgggagcagcctccagatcaggtgggagctgtgacctctcagactgtgctaaatagctgtgtttgttgtactgcttttgtaagtcaaccaagccacaggttgtgcattgtgagtggaccgtgttgcatctgcctcctgcctctgaatacagtggtcccagcaatagatgctcaattctcagagcgtctgcatgaccccccatggtcagtactgctycactgtgctcctttcattgatcctgttgttgctgccacgagagcaaaataaaattaatataaatatatatgctacacacacacacacacacacacacacacacacacacacatttttagagggcttgtggtttctgaagatgatgaaagaaaaaaaagctgtgaaaagcaaaaatgcccaaaagttcatcttctgccctgacccatcacccttcttcagaggtacccagtacctccaattcccaagtctttctggggttctgctgaaccaacacgtagccgtttatcccttcatgtaagcttagggttctacattttccaatatgctaactaagccccatccattagccttacagctcctaaaatgttatctttcatttgctgtagtctcctctattgttattcttgttatctgagtgatttgaagactttttatgtctttgctggcattttggtggggttttagaagagcgtcgaggctgcatagatgtgttcgatctgtcttatttatttggacatttcagcagcctcttttaaaagaataatcagtccccagtccagaaacccctggaaccacttggtacttcttaaacctgccttcccttcacataggctgaccgctcaacctgacttcaattcctcactccaaacccagcccaaatttagggaacctatggaaa

SEQ ID NO: 94179 - DNA, 1604 bp, Homo sapiens
ccacagtgccagcagccgcgctcttagtgagggcttgacttaggggtaccatgaggaactttctcatgcaagtgaagtggtgactcttgttcatcgcttccgagttttcttgtgggagcacttgcaaacaaaccctttccttttaagttcttacctcctattgaccattttgttccaacttaaaaaacttaaaaattatacctttagtttgaccatgagccgtctctttatgagcattagagtattggaaattgtgatgttcagcaaaatctagaacacatggctgctttataaaaatatgagattcatggccaggcatggtgactcacacctgtaattctagcactttgggaggccaaggaagcaggatcactggagccctggagtctgagacctgcctggacaatataacaagaccccatctctaaaaatatgaaaaaattagtggcttgtacctgtagtcccagctacttgggaggccgaggcaggaagattgcttgagtccaggagttcgaggttacagtgagctatgatagcaccactgcactccaccctgggtgacagttagattctgtctctaaaaacaataataatcagaaaaatatgagaatcagtcatccaatttaatacttatctgtagccttgaggtcacatggcatgcataggcttcccacttcctgctgaaagtactgtcttaaaattatcagagtgggagcagcctccagatcaggtgggagctgtgacctctcagactgtgctaaatagctgtgtttgttgtactgcttttgtaagtcaaccaagccacaggttgtgcattgtgagtggaccgtgttgcatctgcctcctgcctctgaatacagtggtcccagcaatagatgctcaattctcagagcgtctgcatgaccccccatggtcagtactgcttcactgtgctcctttcattgatcctgttgttgctgccacgagagcaaaataaaattaatataaatatatatgctacacacacacacacacacacacacacacacacacacacatttttagagggcttgtggtttctgaagatgaygaaagaaaaaaaagctgtgaaaagcaaaaatgcccaaaagttcatcttctgccctgacccatcacccttcttcagaggtacccagtacctccaattcccaagtctttctggggttctgctgaaccaacacgtagccgtttatcccttcatgtaagcttagggttctacattttccaatatgctaactaagccccatccattagccttacagctcctaaaatgttatctttcatttgctgtagtctcctctattgttattcttgttatctgagtgatttgaagactttttatgtctttgctggcattttggtggggttttagaagagcgtcgaggctgcatagatgtgttcgatctgtcttatttatttggacatttcagcagcctcttttaaaagaataatcagtccccagtccagaaacccctggaaccacttggtacttcttaaacctgccttcccttcacataggctgaccgctcaacctgacttcaattcctcactccaaacccagcccaaatttagggaacctatggaaa

SEQ ID NO: 94180 - DNA, 1604 bp, Homo sapiens
ccacagtgccagcagccgcgctcttagtgagggcttgacttaggggtaccatgaggaactttctcatgcaagtgaagtggtgactcttgttcatcgcttccgagttttcttgtgggagcacttgcaaacaaaccctttccttttaagttcttacctcctattgaccattttgttccaacttaaaaaacttaaaaattatacctttagtttgaccatgagccgtctctttatgagcattagagtattggaaattgtgatgttcagcaaaatctagaacacatggctgctttataaaaatatgagattcatggccaggcatggtgactcacacctgtaattctagcactttgggaggccaaggaagcaggatcactggagccctggagtctgagacctgcctggacaatataacaagaccccatctctaaaaatatgaaaaaattagtggcttgtacctgtagtcccagctacttgggaggccgaggcaggaagattgcttgagtccaggagttcgaggttacagtgagctatgatagcaccactgcactccaccctgggtgacagttagattctgtctctaaaaacaataataatcagaaaaatatgagaatcagtcatccaatttaatacttatctgtagccttgaggtcacatggcatgcataggcttcccacttcctgctgaaagtactgtcttaaaattatcagagtgggagcagcctccagatcaggtgggagctgtgacctctcagactgtgctaaatagctgtgtttgttgtactgcttttgtaagtcaaccaagccacaggttgtgcattgtgagtggaccgtgttgcatctgcctcctgcctctgaatacagtggtcccagcaatagatgctcaattctcagagcgtctgcatgaccccccatggtcagtactgcttcactgtgctcctttcattgatcctgttgttgctgccacgagagcaaaataaaattaatataaatatatatgctacacacacacacacacacacacacacacacacacacacatttttagagggcttgtggtttctgaagatgatgaaagaaaaaaaarctgtgaaaagcaaaaatgcccaaaagttcatcttctgccctgacccatcacccttcttcagaggtacccagtacctccaattcccaagtctttctggggttctgctgaaccaacacgtagccgtttatcccttcatgtaagcttagggttctacattttccaatatgctaactaagccccatccattagccttacagctcctaaaatgttatctttcatttgctgtagtctcctctattgttattcttgttatctgagtgatttgaagactttttatgtctttgctggcattttggtggggttttagaagagcgtcgaggctgcatagatgtgttcgatctgtcttatttatttggacatttcagcagcctcttttaaaagaataatcagtccccagtccagaaacccctggaaccacttggtacttcttaaacctgccttcccttcacataggctgaccgctcaacctgacttcaattcctcactccaaacccagcccaaatttagggaacctatggaaa

SEQ ID NO: 94181 - DNA, 1604 bp, Homo sapiens
ccacagtgccagcagccgcgctcttagtgagggcttgacttaggggtaccatgaggaactttctcatgcaagtgaagtggtgactcttgttcatcgcttccgagttttcttgtgggagcacttgcaaacaaaccctttccttttaagttcttacctcctattgaccattttgttccaacttaaaaaacttaaaaattatacctttagtttgaccatgagccgtctctttatgagcattagagtattggaaattgtgatgttcagcaaaatctagaacacatggctgctttataaaaatatgagattcatggccaggcatggtgactcacacctgtaattctagcactttgggaggccaaggaagcaggatcactggagccctggagtctgagacctgcctggacaatataacaagaccccatctctaaaaatatgaaaaaattagtggcttgtacctgtagtcccagctacttgggaggccgaggcaggaagattgcttgagtccaggagttcgaggttacagtgagctatgatagcaccactgcactccaccctgggtgacagttagattctgtctctaaaaacaataataatcagaaaaatatgagaatcagtcatccaatttaatacttatctgtagccttgaggtcacatggcatgcataggcttcccacttcctgctgaaagtactgtcttaaaattatcagagtgggagcagcctccagatcaggtgggagctgtgacctctcagactgtgctaaatagctgtgtttgttgtactgcttttgtaagtcaaccaagccacaggttgtgcattgtgagtggaccgtgttgcatctgcctcctgcctctgaatacagtggtcccagcaatagatgctcaattctcagagcgtctgcatgaccccccatggtcagtactgcttcactgtgctcctttcattgatcctgttgttgctgccacgagagcaaaataaaattaatataaatatatatgctacacacacacacacacacacacacacacacacacacacatttttagagggcttgtggtttctgaagatgatgaaagaaaaaaaagctgtgaaaagcaaaaatgcccaaargttcatcttctgccctgacccatcacccttcttcagaggtacccagtacctccaattcccaagtctttctggggttctgctgaaccaacacgtagccgtttatcccttcatgtaagcttagggttctacattttccaatatgctaactaagccccatccattagccttacagctcctaaaatgttatctttcatttgctgtagtctcctctattgttattcttgttatctgagtgatttgaagactttttatgtctttgctggcattttggtggggttttagaagagcgtcgaggctgcatagatgtgttcgatctgtcttatttatttggacatttcagcagcctcttttaaaagaataatcagtccccagtccagaaacccctggaaccacttggtacttcttaaacctgccttcccttcacataggctgaccgctcaacctgacttcaattcctcactccaaacccagcccaaatttagggaacctatggaaa

SEQ ID NO: 94182 - DNA, 634 bp, Homo sapiens
ctgcagtatcaactccaaaccccacagcagggcacaaaggccttctgcaccttgacccttgtctgtctctccatcatcgtcccctgccactgttctctcatatcttacactccatcaatatccatgccaccccaacacgagccttcatgcctcagtaagtaacactgcctccttctccatctcgtctgtgcagagatctcttactcactctttcagaccccactggagggtggactctgctgtgaagaaytccctgatttctgtagacaatgaatcatccccctcttttgtggggcttcttacattagccaccatagaagctgctgggatgtcaggcctcctctagactacaaacttctagaggtacatcacacaggtatgatgtacacatgtagattccctgtggctggcatattgtacatgctcagtaaaatgtttatcagcaccttgggaggccgaggtgggcagattgcttaaggccagaagtttgaaaccagcctggccaacatggtgaaaccctgcctctactaaaaattagccaggcttggtggcatatgcctgtaatcccagctacatcaggaggccaaggcacaaaaattgcttgaacccaggaggcggaggtttcaatcagctg

SEQ ID NO: 94183 - DNA, 1069 bp, Homo sapiens
tagcaaaaatggacaacactatcatgaaatgtgatactttcaaagagtatttactattgacaatcagtaataaatgttgatttgttatatttataataattcatcatcagcagcaacatttattgcattgatcagtttgatctgttttcgaagttatgtgagatcagggcttcaggcaaaattttaaaagtcatttttgttatttaggaaagaagtgctatcaaaaagtattcattattttattattttgagtttttttggtgatgaatctgtataatatcaagatacagatattagaaaccaaagtcaacttcaaatgaactctttccgctgwcagaaatctcttggatctgtttggagctggttttcacttatactgaatagatttgagaaatgactgtaatgcaggggtcttaagtagaacagagaaaggagtctctctgaagctctctttggggagttacatccaccctgatgatgatacaaaatactgatggattccagagtttctgatgatgtgtttttctaagccaaacaatggttgagtaaaattccctatcaatgacacagacatctcgagatggggagaattctgagctttctgatgctattaactctctctttttcaatttagttgcaccaactatcacatttctcgaatctccaacctcagaccaccactggtgcattccattcactgtgaaaggcaaccccaaaccagcgcttcagtggttctataacggggcaatattgaatgagtccaaatacatctgtactaaaatacatgttaccaatcacacggagtaccacggctgcctccagctggataatcccactcacatgaacaatggggactacactctaatagccaagaatgagtatgggaaggatgagaaacagatttctgctcacttcatgggctggcctggaattgacgatggtgagtaactgacacttttgtatgtggggagaagataaagtctatcattcacctgttgacaaaatcatgtatacaataagccatcccccaacctagtggcttaaaactccattatttagtgttgctcat

SEQ ID NO: 94184 - DNA, 486 bp, Homo sapiens
cacggaatctttttttccagaaggtggaaatatccaaaatgcataaaaccgtgtgggtgcaggcagtgatccgcccgccgccagtggtgcaataaacatcaacgccccttccagtcacttctcagtgtgaggagggaccttcccaggaccgagaaccgttgtctgttccccttcagccttcactccccaagtggagcctccggcagaaactgccagcatcccccccacctctttcccaccacccattcagctacgggccgctttagagtgtcttttccagcggcccaggctccttgatgttaggaattctgtcaggacgacatgtgacagatgctygccaaaccaaagggaagtgccagcgcgggcccaagtccctacgccaagaccccttaaatagcatccgcttcccacttcccgggggctgcatcagaggcatttgggacggcagtgccagatctgtgcccatcgtccagctctaccctgaac

SEQ ID NO: 94185 - DNA, 551 bp, Homo sapiens
tattttattttgagacggagttgttgcccaggctggtgtcgttcaggcatgagccactgcccccagccaatttcttctatttttagtrgtaaaaactttaattactttgaaggatagagctcttttcacacctgtaattccagcactttgggaggccgaggtgggtggatcacctgaggtcaggagttcgagaccagcctgaccaacatggtgaaaccccgtctctactaaaaatacaaaaaaaattagctggggttggtggaggacgcctgtaatcctagctacttgggaggctgaggcaggagaaacactttaaccaaaaggtggaggtttcagtgagccaagatcatgtcactgccctccagcctgggtgacagagtgagactctgtttaaaaaaaaaaaaaaaagttttgtcaattttaataatgaaaataactgcaaatctctattgcgactgcacaaaatgactctttccacaaactgatcgttttatggggcaaagtaaaatcaaacaggatggctcctcttgatgctgaagccagcatctcca

SEQ ID NO: 94186 - DNA, 903 bp, Homo sapiens
gtgattctcctaatgcctgagttagcaccttgcaactcataggtgctaataagtatgttgatatgtgtccgctgagaaaagtactagcaaaaaagcatgataggcacattgaaactgtgaaggtaccatccagctctttgaaaattagtctaaagtaaataattagtacaaacatttactgagaaactactatgcacaggcatggttcaaggttctagaaattgcaacaaagaatataccaagtcccttccatcagtgagcttatatttctagtggagagacatacaataaacaaattaatatttaataaaatgtcatgtaatgccaacttctaggaagaaaagcagagaagggtgagaggacattgggctgatattttgaaggtagggtgaccagagaaggcttctgagcaaagttctgagtaaacctccccgagatgacatggggcagatggaaccccatgagaaaaagccctggagagaagtcttgcttagtaggcttgagagagagccagarggctagcatggttggagtgcactgatggagaaggagtaataggagacaggattgtcaagggataagggtttggataatgtcagatcttataaggtataccagatgttcagtttaattctaagtgaaatgaatgcctttgatggactttgattagggtaatcatctgacgtgatatatactgtaagataattactttgtcttctgtatggagaagagattttgagggagcaagactggaaggaggaaaaccagagaagaagctattacagtactaatagttcaggcgaagtgtgatggtagcttggtctagaacattggtggagaattgggaagaagcggttgggatctgtatacattttaaggtagaagcaacctgtagagtttgca

SEQ ID NO: 94187 - DNA, 903 bp, Homo sapiens
gtgattctcctaatgcctgagttagcaccttgcaactcataggtgctaataagtatgttgatatgtgtccgctgagaaaagtactagcaaaaaagcatgataggcacattgaaactgtgaaggtaccatccagctctttgaaaattagtctaaagtaaataattagtacaaacatttactgagaaactactatgcacaggcatggttcaaggttctagaaattgcaacaaagaatataccaagtcccttccatcagtgagcttatatttctagtggagagacatacaataaacaaattaatatttaataaaatgtcatgtaatgccaacttctaggaagaaaagcagagaagggtgagaggacattgggctgatattttgaaggtagggtgaccagagaaggcttctgagcaaagttctgagtaaacctccccgagatgacatggggcagatggaaccccatgagaaaaagccctggagagaagtcttgcttagtaggcttgagagagagccagaaggctagcatggttggagtgcactgatggagaaggagtaataggagacaggattgtcaagggataagggtttggataatgtcagatcttataaggtataccagatgttcagtttaattctaagtgaaatgaatgcctttgatggactttgattagggtaatcatctgacgtgatatatactgtaagataattactttgtcttctgtatggagaagagattttgarggagcaagactggaaggaggaaaaccagagaagaagctattacagtactaatagttcaggcgaagtgtgatggtagcttggtctagaacattggtggagaattgggaagaagcggttgggatctgtatacattttaaggtagaagcaacctgtagagtttgca

SEQ ID NO: 94188 - DNA, 1369 bp, Homo sapiens
tgcactcttgagttttcttttagtatgattcttgctagcaactaatagtgcattttgggcagttgcagggctcaaaagcagtatatatactgtaaaacaattttaaaaagccttgaattatagtaaaaagagaactaatgaaaagggacctaagaaatataatgaaaataaatagttcttcctcttccaacttccctccagggagcaggttatgaaagatcgctagaatagtagaatagtggaataaaattattccagggtagaaagtaattaggggtgagtacatgaaagcccaggtttaattgttctttttaatacagtgaaaaaagtcattcatcatacaactttaaatgagtgtcccattaatggagtattcccccaatggaatattataaattaatatttttatatgtcctgtaattattctctgagtagcacatttgtagggcactgcacttagaggtatgcattaaaagcattatcaggtaaatgtcatcatttaaaatataccaaaattgttaatattgcatttaagcacttattttttaatattctaagaccctcatgcagatcaacaataatttcttcagcttctgaaaggatctatttcttgctctaatcacttcactccctgatagagatttctaggtttctctagaatgttcattcggggtcattctttggatctaaccagtggaggagatagtgaattttgtttacaacttcaagtctttgttggctcatcggcgcctgtaggctacacaataaacatccacgacttccctgccttcattatggcagcaaaatgtgctttactttctcttacactaaattcttctagagtaagtagggactttgtgaggcacatgacatcttcctgggcacagtgccacgtagacataaatggtggccttaggatacttttgaagatctgattataaatatcttcttgctgctaaatactcatctgagatggcaattgtgttcgctaggttaaattaagaatgcgatgcgctgtttcaccatgttaagctgtctttttctttccctaagaaattcccatattcttctgcagttagtataaatgtacccaccacctggattgtgacttgaaatgaagtttcctttcaaattcatcctagaggaaatgtgacctcgatatcacctggacataagtcctgaatcagacactgaytctccatgtgaccttggacaagttattcaccctctctaaacttcagtttcctcatctgtaaaatggcaatgataatagtacttgaatctttagtacttgaatctttgagacttattgggagaatcataagttaatgttcacaacgtgtttagcatggatgcagtcacttataaa

SEQ ID NO: 94189 - DNA, 1369 bp, Homo sapiens
tgcactcttgagttttcttttagtatgattcttgctagcaactaatagtgcattttgggcagttgcagggctcaaaagcagtatatatactgtaaaacaattttaaaaagccttgaattatagtaaaaagagaactaatgaaaagggacctaagaaatataatgaaaataaatagttcttcctcttccaacttccctccagggagcaggttatgaaagatcgctagaatagtagaatagtggaataaaattattccagggtagaaagtaattaggggtgagtacatgaaagcccaggtttaattgttctttttaatacagtgaaaaaagtcattcatcatacaactttaaatgagtgtcccattaatggagtattcccccaatggaatattataaattaatatttttatatgtcctgtaattattctctgagtagcacatttgtagggcactgcacttagaggtatgcattaaaagcattatcaggtaaatgtcatcatttaaaatataccaaaattgttaatattgcatttaagcacttattttttaatattctaagaccctcatgcagatcaacaataatttcttcagcttctgaaaggatctatttcttgctctaatcacttcactccctgatagagatttctaggtttctctagaatgttcattcggggtcattctttggatctaaccagtggaggagatagtgaattttgtttacaacttcaagtctttgttggctcatcggcgcctgtaggctacacaataaacatccacgacttccctgccttcattatggcagcaaaatgtgctttactttctcttacactaaattcttctagagtaagtagggactttgtgaggcacatgacatcttcctgggcacagtgccacgtagacataaatggtggccttaggatacttttgaagatctgattataaatatcttcttgctgctaaatactcatctgagatggcaattgtgttcgctaggttaaattaagaatgcgatgcgctgtttcaccatgttaagctgtctttttctttccctaagaaattcccatattcttctgcagttagtataaatgtacccaccacctggattgtgacttgaaatgaagtttcctttcaaattcatcctagaggaaatgtgacctcgatatcacctggacataagtcctgaatcagacactgattctccatgtgaccttggacaagttattcaccctctctaaacttcagtttcctcatctgtaaaatggcaatgataatagtacttgaatctttagtrcttgaatctttgagacttattgggagaatcataagttaatgttcacaacgtgtttagcatggatgcagtcacttataaa

SEQ ID NO: 94190 - DNA, 608 bp, Homo sapiens
tttcctcccctcccctccccctcctctcctcttcacttctctctctctcttctcttctttmtctctctctctctgctcactctcgctgtctctgtctccctcccccaccaagttggactagcttttccagcatgtgtttgggtgagaatgctcccaattttcaggtgaaggccctcagtgtttaataattgtaatccaatatgtacataccattctcttgaccataatttaagattgagaacattaagaacatgatgtatttccagatggtcacagtcaattggtcagaatttctggggcttttgaaactagaatagaacctaaaagtagctcaaaaaaaggttgacgtcttcttggaggttaacaccaaagaagcatatctgagaaaggaagagaaaaagatatctctccctggtgaaaacctgaaaacgactcaagaattggatatcagatattaaacttctatgggaaccttcagtatatgaagccataaatttatttgactgtccaaactggttttaatcatttatttctgtcactgtcaacatagatttctaactgttatagatggaaataagtttccccccatgtaataacaagtcatcctt

SEQ ID NO: 94191 - DNA, 685 bp, Homo sapiens
ttaaaatttcttaacaacttttataacttcaattttatattacatcatcataaaattaatttatttctactttgacaaagcataaatacaaaagctgtgcccctgtggcaataataaaattattggtataaaataataatggtatagtataaaattttgaaatccaaaagtgctgtattgctgggtgactcacacctgtaagcccagcacctttggaggccaaggtgggagaatcacttgagcccagaagtttgagacaagcctgggcaacatggcaaaactacgaaactgtacaaaaaatataaaaatgacctgagtatggtggcacatatctgtagttccagctactcgggaggctgaggtgggagratagcttgagcccaggtggttgaggctgcagtgagctgtgattgtgccactgcactccaatctgggcaacagggcaagaccctgtctcaaaacaaaataaaataaaaatgctaaggaatcaaaagtaactttcaatctatataattgtccttaattgtcttgaatatgtacaccatatcataaaacatcatatatttgaagtgtcatttaaggagaatttatgcagtgcttcgttgttaagactggtgaaatggcagactctggtcataccaaatatgcaggtggaagtggtttttcatttcctgggtaaagaata

SEQ ID NO: 94192 - DNA, 637 bp, Homo sapiens
ccatgctgtgtgagcagggttggcactcccagctccaaataaggtgccatctgggagtcctgggtagtacattatttggtccctggctgctgcagtaattgcagcattgtttggagtccaggagggatctcgtcctttgcacacacaggcataagcatggagactgtgctaccagagtgggtaagatcatcacccacagtcccagacaggcagccctccagctcacccaccccagtccctggcagcatcaacagcattatggctacagtggtatgcagaagcaaggaagggaccctgctcactttctacatgtgagccagagtacaaatgctgctctgctatggagggtggggttgctgctcccagccccagacagtcagttttcaggcttgcccacctccactcccagtggcaataactgctgtagcagtatgcrgaaagggaaaaggaacccattgttagataaacccaaacagaatctgtgctgctgctgctgggggtggggtcacttttcatagccccagacaaggagctttgggggtctccagatcagtgcccatgctagttttagtattcatgtgcacagaggaggcttcttatggtcaggattgcagccgtcaatagtggaatgcaatgg

SEQ ID NO: 94193 - DNA, 1051 bp, Homo sapiens
aactgatagaactacaaggaaaaatagacaaaattaaaaatatagacagatatttcaatacccccttttaataatgaataaaataattagacagaaaatagaaacagatattgaagacccaaataacttaattaacatttacatagcacttcatccaaaacagcagaatatacagtctacgttttgtatatacagaatataatttgtgtgacttgaatccttttaagctcatgacttgtttttatggcgcagaatgtggaacatgttctgccttggtaratgttccttttgttcttgaagagactgtatattttgctgttttgcatggagtattatgtaaatgttaagctaactccagaaataagacaaggacattcattttacctatgtttacttaacattatattcgaggttctacaccaaattgaagaatgcgaataagttggggtatattctttactttattcacagataatataaacatctatgtagaaaatttgaaagaatctacaaaagctagaattgagcttatcaagttcacagaaagggacaccaatatacaaaaatctattttatttctagatactaggaaaaataatcaaaaaatcaaatttaaaaataccatttacaattgcatcaaaaatatgaaatatttagagttaagtatgacaaataatgtgaaagatctgtacagtgaaaactataaaacaccactgagggaaataaaagaaaactaaataaatggagagatacattatattcatgggtcaaaagggaaatattgttagaatgtaaattctcctcatattaataaattcaacatcatcttaatcaaaataccacaaagtttttaaaattaaaattgataaattgaatctaaaatgtatatggaaattcaaaggatctagaaaagctaaaccaaatttgaaaaagaacaaatttggagagaaaatactacctgatttcaagacctactgtaaagctacagcaatgaagactatacggtatttatgtaaaagacacttaggtcaataaaacataacagagggtc

SEQ ID NO: 94194 - DNA, 666 bp, Homo sapiens
tgtgatttcttggtaattttgcacatcagataactattcttatatttacatgtaaaactagcattgcttgatataaagaggaatggtaaaatccgcactaataattttaaattttaatttgtatttacttagaaacatattaaataccaaataaaaaagcccatggaagttaraagaccacagaagaaaggaaaaagctttatttatttattatatttaatttatttatttatttatttatttatttatttatttatttattttagagacagcttatcgctctgtcaaccaggctggagtgcagtggcatgatcatggctcactgcagtctcaaattcctgggctcaagcaattccctctcatcagactcctgagtagctaggactgcaggcacatgccatgacatctggctaatttttttaaaggctttttagatatggagtctcactatgtcacccaggctggtctagaactcctgggttcaagcaatcctcctgccttagctttccaagtacctgagattacaggtgcaagccactatgcctggccctttatcttttaatgctatattacctttctaggtctgccatagcaaaactcagttgcctttctatatctgtgggaaattggttccagcacccctacaaataccaaaatgcagggata

SEQ ID NO: 94195 - DNA, 1216 bp, Homo sapiens
catctagctacagaaatatgacaaagaggttaaatgacaaattaagatgaaatatatataaagttatttaaataatgttatttaagggtgatatcgatgtccatatttaaaagtaagcccttcccattatcaaactcttcagggagaaattaaagggcatatattaaaccatcttacaaattaaggtcctaaagtgttaaagtccaagtctgaaatcaaatttccttgtcattgtgggttaaaagtcaaaaatttgaaaggtccataaataagcctcccaagtgtcttatttggttcattctcagtggcagggttgtctgtacctcagtgggactgaggtctcctttaatacttgctacttggctgtctctcactgatgtgagtgtaggtcttccagggcctcagatgtcttatcagtttaatgcaagtctctcataaatcatgtttttaaagagtccaaatagttaataatatttaacagcattagccccagtaccaagaaatttagaaagtgagccaactcccagcccttggagcaattaaactaggcaagattttgttccaagaatccagtatagaatgtggtcaaagaacgtagcaggaactcaatggcatttgagagaaagataaagtccgtttggttttggcctcactaggaggtccatcagtttatgtcacttacttgaaatttttgacctgtgaacttagaagttggaagattctttgagcatgaggttaatttaacaccatgaatttgtctttcagtcttcaattatacttcctttttgatcactctcttgcttacactttagtactgaactgattatgggttctacctaataatattgcatctgcagcctctggtgtgtcaagtttatagtcctatgccaaaatagatgttttcactgcctcctgctattgactcatatggaacaaataaagctgctttttagagaacatttttctctcatgtaatgaacaggttcaagattagcttgagtctacttggtaaagggagtcactcaagcctacagcaagccacaygtgtcaatgccaacaagtcctgatttccctacaactgagtctgtctctcagtcaagccttcttaggaaaagctttgcctgaaaagtaagctaaggcaggcagctgcccaagattttcttgcccaacagactcttaaacccctaaagcccagtgccaagtctctgtgtaataa

SEQ ID NO: 94196 - DNA, 717 bp, Homo sapiens
cccttaggtatgtatagtatattatgaggcagcaatgagattcatagtgagagagtggccttaagtcagagaaaaagagaaggccactttagcaacattgcccttgcacacctgtgaatcagtgtgtataccttgtcagtagatatcttcttgatgaaaaatatgtgcaaagagcttcactgtttggcacttgctcatactcgtaacttgaacaatatcattcctccgttatcaagatcatgatttgcatgtcttctggaattgtcttaggcaatatttgttttaaaagtcccaccaccatcaccacagtctgctaaacagacttccaccagctggaacagcgttctgggcccttcagtccaagcttctctccatttcctttcagagctcaagtaaaagctaattttttattctttctacactttttaaacctaaatatgtaaatrtttttcagtctattatttcttaattctctattgatccaaatgaataattccaggtcaagaatctcttgaaggtgattatgggaagctgtagacaaatcacatgtctgttactatcatgaatgggatctatatagttttattctttaagaaaatcattcagcattttcttattgctattttttttactcacttgacaacacagttcttatctcatgaaaaaaaaagaagagaatatgatttatgtattcccttcagagaagctgcctcaaaa

SEQ ID NO: 94197 - DNA, 717 bp, Homo sapiens
cccttaggtatgtatagtatattatgaggcagcaatgagattcatagtgagagagtggccttaagtcagagaaaaagagaaggccactttagcaacattgcccttgcacacctgtgaatcagtgtgtataccttgtcagtagatatcttcttgatgaaaaatatgtgcaaagagcttcactgtttggcacttgctcatactcgtaacttgaacaatatcattcctccgttatcaagatcatgatttgcatgtcttctggaattgtcttaggcaatatttgttttaaaagtcccaccaccatcaccacagtctgctaaacagacttccaccagctggaacagcgttctgggcccttcagtccaagcttctctccatttcctttcagagctcaagtaaaagctaattttttattctttctacactttttaaacctaaatatgtaaatatttttsagtctattatttcttaattctctattgatccaaatgaataattccaggtcaagaatctcttgaaggtgattatgggaagctgtagacaaatcacatgtctgttactatcatgaatgggatctatatagttttattctttaagaaaatcattcagcattttcttattgctattttttttactcacttgacaacacagttcttatctcatgaaaaaaaaagaagagaatatgatttatgtattcccttcagagaagctgcctcaaaa

SEQ ID NO: 94198 - DNA, 717 bp, Homo sapiens
cccttaggtatgtatagtatattatgaggcagcaatgagattcatagtgagagagtggccttaagtcagagaaaaagagaaggccactttagcaacattgcccttgcacacctgtgaatcagtgtgtataccttgtcagtagatatcttcttgatgaaaaatatgtgcaaagagcttcactgtttggcacttgctcatactcgtaacttgaacaatatcattcctccgttatcaagatcatgatttgcatgtcttctggaattgtcttaggcaatatttgttttaaaagtcccaccaccatcaccacagtctgctaaacagacttccaccagctggaacagcgttctgggcccttcagtccaagcttctctccatttcctttcagagctcaagtaaaagctaattttttattctttctacactttttaaacctaaatatgtaaatatttttcastctattatttcttaattctctattgatccaaatgaataattccaggtcaagaatctcttgaaggtgattatgggaagctgtagacaaatcacatgtctgttactatcatgaatgggatctatatagttttattctttaagaaaatcattcagcattttcttattgctattttttttactcacttgacaacacagttcttatctcatgaaaaaaaaagaagagaatatgatttatgtattcccttcagagaagctgcctcaaaa

SEQ ID NO: 94199 - DNA, 551 bp, Homo sapiens
tgcttctggaatcagggctccccagtgccgggagggactcactgtgcagatggggaaatggaaatccacagggatctagctcatcgagggcggagttgggaccacttctggggccccctgacccatggctgtgtgcttctatctcctccagatggcccaatggaggagtccaaaccaaagcccaggtgagtggggaggcacctgggtagagccgggagcagaggctcagggagagaggatgatgatggaacrgggtgcagtatggtgcagtggacacgggctgggggtttggtgggcacagagcaccacagtacagttgtacaagttgtgtactgcacaagcgtctcttcctaagggagtgagtgagggctgaattccacccaacactccatcaccaatcgtgcaccctagcagggatggggctatgttcttctagaggaagggccctgaacggacactctcctctctcacagtatggccagaacaccctcctccatggccgaggtgggaccttgggattaagggaagcaaattgtggggagccaaacaat

SEQ ID NO: 94200 - DNA, 671 bp, Homo sapiens
ggcagagcctcccgtctgcagtaccccatttctatggccggggcctcctgcggaaagcctctgccaggtgccttcttattaggatcgccaataacaagcaaaggaccgggcacctgccccatctgtgttcagtaaggccctgggcttcaggctgctcccaaagggtcggagtctccctctgaccaggcttgagtcaggagccacgggtcacttgcggctctctctgccagacacagctgcgacttcatcgctgcccctttgaatcccatcacggctctgccctttgaagcccaaatcaaatgctctcatctccccaacaaccctcccagatgtcccagctgggggtgacacctccttccttgagctcttagagrgaattgtgcctcctttgccatttagtgcatcatgctaagtgattaggtgcactgtgggctcttggcttcagcagcaggcctgccacagtgctctgaatatgagaatggctcaacaaatgtctatgcagtcgatccacattccacttaggtattctgttctgacattcctgggaccagatgcctctctcggcacctttctgttcccgctcccctccactctttccaggtcatatcaccctactagaggctgtcccccaggccttgactttaggccctgctggggttggggctgggcct

SEQ ID NO: 94201 - DNA, 611 bp, Homo sapiens
tcagcccagcccccagcccaaaggagaaccctttgtgctcaggtactcaagttttcatgtccttgcaagtgaatattctggcctgaacatccaacctctgagcacacgtgtgtggacacctgcctggattcccacttgctttgttcacccactgaactcccaacttccaaaatctgcgtatggctcttaccacacttaccacactgttgtccacatgtctgtgctcagctaccccttgagcccagggtacatactggacagttggtcagtcctcaggaagagacctacaggaagtgggtttgggatgtttgggcagtgaattctgggttttggggtgtcacaagcatgatctagaaggaggggtacaggcccaaggtgggcacaccccctctgcagaaacggacycagcagagcaggaccagtgtggactctctaaaggccagcccatcctccttctttcaggctgagggcctccctggccaggcccatgacccaatgtctggcctcatttcctgctgtatgatgccagcctttgttagtcacttgcaatccccaatagcaacctctgtcttatatccccatggacccattttttattatatgcctgactg

SEQ ID NO: 94202 - DNA, 611 bp, Homo sapiens
tcagcccagcccccagcccaaaggagaaccctttgtgctcaggtactcaagttttcatgtccttgcaagtgaatattctggcctgaacatccaacctctgagcacacgtgtgtggacacctgcctggattcccacttgctttgttcacccactgaactcccaacttccaaaatctgcgtatggctcttaccacacttaccacactgttgtccacatgtctgtgctcagctaccccttgagcccagggtacatactggacagttggtcagtcctcaggaagagacctacaggaagtgggtttgggatgtttgggcagtgaattctgggttttggggtgtcacaagcatgatctagaaggaggggtacaggcccaaggtgggcacaccccctctgcagaaacggactcagcagagcaggaccagtgtggactctctaaaggccagcccaycctccttctttcaggctgagggcctccctggccaggcccatgacccaatgtctggcctcatttcctgctgtatgatgccagcctttgttagtcacttgcaatccccaatagcaacctctgtcttatatccccatggacccattttttattatatgcctgactg

SEQ ID NO: 94203 - DNA, 578 bp, Homo sapiens
actgggtaccatagcctagccaggtcgacacataaaatcagccatctcactgtcttgtgatatttctcctccctcytccttaagacacttgctgatttctgaacccttagcacaggtttatacacctattaccaagatatcccctgtgtaaaccagcattgtcacacagtatatttggtaaatgagtgttccagctttctgagccccaaagagtggctcagaacaatacaatcacacactattattacctctcctcattctgtggcttgactgagcttagccggacagttctcaccaaggtctctcatgtggttacagtcagacggtagcaacggagagacatcttcaagaagcctttgaggtttcctcattcatatgtctggctcctgggcttgaaagactcaaacttctggaagctgccactggtgaggcctctcacccattcatctatgtattcctgtcacccagcagccccagcatagctggacttcttacaggacagctggaggtccctagagcaaatgtcccaagagaaacaggcacagctgtgtgggctcagctcaccaagcctcagaagt

SEQ ID NO: 94204 - DNA, 578 bp, Homo sapiens
actgggtaccatagcctagccaggtcgacacataaaatcagccatctcactgtcttgtgatatttctcctccctcctccttaagacacttgctgmtttctgaacccttagcacaggtttatacacctattaccaagatatcccctgtgtaaaccagcattgtcacacagtatatttggtaaatgagtgttccagctttctgagccccaaagagtggctcagaacaatacaatcacacactattattacctctcctcattctgtggcttgactgagcttagccggacagttctcaccaaggtctctcatgtggttacagtcagacggtagcaacggagagacatcttcaagaagcctttgaggtttcctcattcatatgtctggctcctgggcttgaaagactcaaacttctggaagctgccactggtgaggcctctcacccattcatctatgtattcctgtcacccagcagccccagcatagctggacttcttacaggacagctggaggtccctagagcaaatgtcccaagagaaacaggcacagctgtgtgggctcagctcaccaagcctcagaagt

SEQ ID NO: 94205 - DNA, 578 bp, Homo sapiens
actgggtaccatagcctagccaggtcgacacataaaatcagccatctcactgtcttgtgatatttctcctccctcctccttaagacacttgctgatttctgaacccttagcacaggtttatacacctattaccaagatatcccctgtgtaaaccagcattgtcacacagtatatttggtaaatgagtgttccagctttctgagccccaaagagtggctcagaacaatacaatcacacactattattacctctcctcattctgtggcttgactgagcttagccggacagttctcaccaaggtctctcrtgtggttacagtcagacggtagcaacggagagacatcttcaagaagcctttgaggtttcctcattcatatgtctggctcctgggcttgaaagactcaaacttctggaagctgccactggtgaggcctctcacccattcatctatgtattcctgtcacccagcagccccagcatagctggacttcttacaggacagctggaggtccctagagcaaatgtcccaagagaaacaggcacagctgtgtgggctcagctcaccaagcctcagaagt

SEQ ID NO: 94206 - DNA, 578 bp, Homo sapiens
actgggtaccatagcctagccaggtcgacacataaaatcagccatctcactgtcttgtgatatttctcctccctcctccttaagacacttgctgatttctgaacccttagcacaggtttatacacctattaccaagatatcccctgtgtaaaccagcattgtcacacagtatatttggtaaatgagtgttccagctttctgagccccaaagagtggctcagaacaatacaatcacacactattattacctctcctcattctgtggcttgactgagcttagccggacagttctcaccaaggtctctcatgtggttacagtcagacggtagcaacggagrgacatcttcaagaagcctttgaggtttcctcattcatatgtctggctcctgggcttgaaagactcaaacttctggaagctgccactggtgaggcctctcacccattcatctatgtattcctgtcacccagcagccccagcatagctggacttcttacaggacagctggaggtccctagagcaaatgtcccaagagaaacaggcacagctgtgtgggctcagctcaccaagcctcagaagt

SEQ ID NO: 94207 - DNA, 578 bp, Homo sapiens
actgggtaccatagcctagccaggtcgacacataaaatcagccatctcactgtcttgtgatatttctcctccctcctccttaagacacttgctgatttctgaacccttagcacaggtttatacacctattaccaagatatcccctgtgtaaaccagcattgtcacacagtatatttggtaaatgagtgttccagctttctgagccccaaagagtggctcagaacaatacaatcacacactattattacctctcctcattctgtggcttgactgagcttagccggacagttctcaccaaggtctctcatgtggttacagtcagacggtagcaacggagagacatcttcaagaagcctttgaggtttcctcattcatatgtckggctcctgggcttgaaagactcaaacttctggaagctgccactggtgaggcctctcacccattcatctatgtattcctgtcacccagcagccccagcatagctggacttcttacaggacagctggaggtccctagagcaaatgtcccaagagaaacaggcacagctgtgtgggctcagctcaccaagcctcagaagt

SEQ ID NO: 94208 - DNA, 834 bp, Homo sapiens
atactgacatggaaaaagagcacattctaaaatctcacagtcctttacttttgctcatcagccctcaaaaggactgtgagtgttgcactaaataaagattgacctgaccaacatggagaaacccatctctactaaaaatacaaaattagctaggcgttgtggctcatgcttataatcccarctactcgagaggctgaagtgggagaattgcttgaacccatgaggcggaggctgcggtgagctgagattgtgccattgcactccagcctgggaaacaagagtgaaactccgtctcaaaaaaagaaaaaaaatcgttgaggtcaaaatagctgtactttctactgtcctccttctccttcaactgcatttcttcctttaaaaagaaaaaatagcacagtgcttaccaatagggtgtagaatcagactgactgtactcaagtcttagccatgggagcctaggcaagttgtttagtctctcaaagtctcagtttcctcattcataaaatgggaatagcatcactaattttaaaggtttgttgatggaattaaataagggaatttatgcaaagtattgggcttaagctggcactgaacttaaaataacttattatttcaaaataattattttaaatgtttgatggtttcctttgattcttacatttgtaattgaccttcatcatacatttactagtaccaacaagtgctatgacagtttcttggaacttaatttttaccaggtctcttttcatacacagtatcttatttattctacaacaaccaaccacaaaaggtagaccttatcagtcccaaaacacaaaagagggaacggagact

SEQ ID NO: 94209 - DNA, 834 bp, Homo sapiens
atactgacatggaaaaagagcacattctaaaatctcacagtcctttacttttgctcatcagccctcaaaaggactgtgagtgttgcactaaataaagattgacctgaccaacatggagaaacccatctctactaaaaatacaaaattagctaggcgttgtggctcatgcttataatcccaactactcgagaggctgaagtgggagaattgcttgaacccatgaggcggaggctgcggtgagctgagattgtgccattgcactccagcctgggaaacaagagtgaaactcygtctcaaaaaaagaaaaaaaatcgttgaggtcaaaatagctgtactttctactgtcctccttctccttcaactgcatttcttcctttaaaaagaaaaaatagcacagtgcttaccaatagggtgtagaatcagactgactgtactcaagtcttagccatgggagcctaggcaagttgtttagtctctcaaagtctcagtttcctcattcataaaatgggaatagcatcactaattttaaaggtttgttgatggaattaaataagggaatttatgcaaagtattgggcttaagctggcactgaacttaaaataacttattatttcaaaataattattttaaatgtttgatggtttcctttgattcttacatttgtaattgaccttcatcatacatttactagtaccaacaagtgctatgacagtttcttggaacttaatttttaccaggtctcttttcatacacagtatcttatttattctacaacaaccaaccacaaaaggtagaccttatcagtcccaaaacacaaaagagggaacggagact

SEQ ID NO: 94210 - DNA, 560 bp, Homo sapiens
aagccttattctggtctttgtggtcagctgttctgtaagtttattaaactcctccaagctctcaggcagagcctagctgtgatgcaacagatccctacaccataccagtgaatgaaccctgaagtaggccagaaggtcaggggagagtctgcacttctgcacccaaagcaaccaaaaaccaaacacttctgcagccagaccagggagcatgaggggaacatgcagggccatagcatgagccctggtcagagcctcagctgcactgctggttcctgtggtgttgggaagttacctccctctctgatctgaaaatgggataagcacgcttgctcttcwatgccgctgctaagttcatatgagctgctgttgtggcctgcctatgcgatcttttgggtctatctaacatctgggtacgctgaggttgttataggggctggcacaactgtggccatctctaaaggcagcttcatgtttggtccctggggaaggaatgcctgtctttgcaagtttaagctttgattttaaatttctattcagacttcaagatctcttctgggtct

SEQ ID NO: 94211 - DNA, 735 bp, Homo sapiens
ttggtaggaccattgttgtctacagtaaaactgttttttaaaaaatcattaatgtgttttatgtgtacacatcttgcctatatgactaaattggtttggtatgagagataaagcaacatagaggtgtgattattggtgagaagttgttcattgattttggacagaaggaaaaggaccagtgtctggaatggctgacccagcaggatagtcaggaaaggaagggttctgcctcagccaagctggctttagttagaagaagagactcaaatgttttcacacgcggtgaacagggctgtgtcagagctgctgtgtccaccagctgctacccacccatgggcaagctcaggaccctacaggtccagctaggctggcctcacatctagggccagggtgtcttcccagagccagtcttctatcccgacccaggtgacttctgtgcctcaggcctatctcctctctttgcatgtcatttgttcatgcatctctctctgaaccttctcctttggggctgaattatgcagctttttctccctgaacacatggaatgccttcatcttccagctttgacagagatcttgacagctccctgtgatcttctgcttcagggtttccccgccagctctctgcactcatggttaaatgggcccttcccttccagaccaaatcacccaagccccgaggctcctggcccctcctctttctgttgagaattccctggacagarcagcgggatga

SEQ ID NO: 94212 - DNA, 755 bp, Homo sapiens
tgtcttaggacaacttttcttctcactgaaccttgtctctggattcacttatctactcccatttgtggatcatatatgtgctgataactttgaaatgtaagtctccctctcggtgctcccggaattcaaactctcaactggaaagctccacttaaatattcctttggcaacaaaaccaatgtgttctgaagctgaactcattctcttccccgccctgctcctccaaacaacctgcctcttgtctcttataaaaaggacagggggcccctctacaaggtggccccagcagggtctccctgcacattgtcctcccacagcattgcaccccacatccacacagtccagggtccaagcaactctgccctctaaactctctcccatgcttctttccctccrtatcctcctgctgcctcagcctaggccactcacctcaacttccctggtcaagattgagacccctgcacacactcctgtgatgccctgtgattaacccactcagagcccttcccacgctgaattctacttgccctttgctgacccatctctcaccccagaagataatctccaagaaagggccaggtctttgtcctcatccccatggctacagtttggtaggcactcaaaaagtatatgctgaataagtacatatttgtagcagcaacttgaaattctaatgatgctcaggtgaaactctatgtttgggttatccagggggaaaaaatggataagcactaataaaaacaatgagtgatgct

SEQ ID NO: 94213 - DNA, 1372 bp, Homo sapiens
cattccccaagagagttggtggacatcactaccgagttcagtaccattgggtgtttcagtgtttgtcaggcagttaaagagttaggattatgagggtctctgttgatgattgaattttcatcagtttgacttgtattagttgaggttggttagtgagagggatcagctaccgatcaagtcatacaagtaagatactgggaaagaaggacaatttagtggacatgagccattgaactatgacgtcactgtaatgatmaaaacatagctgatttatacagatctcatttatcactgaggtgaggaataatgcccatacgtatggcttatcacatagaattttttttaaagcactccctttttagctataggagagcaatatcctaattctgcactataatcatgaagagctcctgatagggggtagggagcatctcaattcaatccattaaaacaaacagtaattgattacatattttgttttgtccccgaagttccttatgctcagcatgtccaaaactgagttatcatctacctcacagcctggtgccctctccatggggaaggagaacacttgatatcccggaagtttccctccctgccctacccccatgcccaaccattactaagttcttaaatctgtccacatctctaaccttccttgttaccatgccactctgcactgacgtcacctctcactgcatgaccttaatgtcttccatagtttctacattttcttccaagccattcctcatgtagaaatgagaatcatttttttcaaaacacacatctttgcacctcaaccttctatctccagtctgcttaaagctgctcaatggccacagtttactttcacctatgaaagacatattccttaacattgtcgctagaccttgcatgttctggcttttgctgcctcacctctaaaatagggataacaacaatgaggattaatgaatgtaaagtgcttaggaaagagcctaggatttactgagtgttcaaaaatgttctctatgatcatcctcattattgctattattactactctagcttcagcctatatcacctcccctcgttctctctgttgtttcagcatcactcatcttacttccctttctcaaacatggtgtgctctttcctgccacgttgttctctttctctggaaggctccttgctacccacttgccttcttagtgcttagtgctatctgtctttgagatcacagcttaaatatgacttccttggggaaattccctgccatccagagtaggccaagtatccttaaggtgagctcttgtttatttgtgtcattctttcattaatgtctcttatccacatttttctcactatttttttcccgcatgattaaatccct

SEQ ID NO: 94214 - DNA, 561 bp, Homo sapiens
tgcacacagcaagtatgcaatgcatatttttaatgagtaagataggcaacaattctaattagccccaagtcaatcaaggagctagggatcagccaatgagttctcctatggtttagggagtttgggtgaagcaggcctcatgtacagtaggagtcttcccagtggagrtaacatatcagctggtcttgaaggacgaagaacagtctgcaggttagagaaggtggagtcatatcaggcaaaggaacagcatgcacagaggctcagagatgagccctgcagggtgttgagtatggcagccttggcagaaggacgggtcagatgtccctcctggtcttcagagaccccacctcctccagacagccgttgtatgctctggccagtcgggccccagccatgaccaaggcttctggacagtagctaggccgtgtccctctgcctgctttgcagtttcccctcgctccatggtcccggagtgtttcacccgcactccttgccatctggggcttgctgacatgggcagcctctgccactcttgtctctgttatactctcccttctgctg

SEQ ID NO: 94215 - DNA, 648 bp, Homo sapiens
ggtactgagagagtgtgtgccctgtatgtttgctggctttctgcccttgggtcattgtaccaagggacacttgctggtgttcatcctgagcccatgagagagcaaatccttatgtgtgtgtcacttaggaacatcagccccacaagtctggtctttttttcctcactgtcttatggctcctcactataattttaaccttttagagaaataaggataccacctcaccctcttctgtcttctcagctacctctgtgttgagcccatggtaaatgcctagataagtcttggtgtgagtgagagggaaccaataatcttgtatgttgcatagtttggtgcagggaagcataaatggtgatgttgcaaatcccttaattcattaccagaggctttcctctgccccaagtaggatagaaggatacccagaggcagaaaagaacattgagtgaaatatacataactgtctgaatcactgcgttcttgggagagttagagcaaccgtcaaagcccccsaagtatccatttttattggttttgatgttgatttgatgttgttagagattcaggtctcatcttcgcttctgagatcatctgagtaacatcggtgttggagaagggaagagcagagatgaggcatccacaggcagccct

SEQ ID NO: 94216 - DNA, 673 bp, Homo sapiens
ccagctgtggggatgtgagggcccgggcgtcagcccaccacactctgaggactgcagcacagtagctggtaagaccacccatgagaagctgaactagacacttccaaggttggtgacctttgtcggtgctagtgccacatattctacctgtgctttatgaacaagaccagctgcctttctggggcatctactgcctgctaggcgctgtgctgaaygattatatgactgtctcatttattcctcactgagacaccatgaggtgggtgctactattaccccactttataatggactaacattgagtttgaacctcaggaccacctcttgaggaagtcaaagaaggggttattaatgtacccattttgtagaagggaagcctgagtacacaaaggttgggtaacttgctggagacacacagcaagtaaatggcagagcaaaaacttgaaaccagatctcaggcaaccagtatgctactcgctctactccttaatgtgggtgaatttgttgttttattgaagtttctgtcccatggaaagtgggatgtcctcaatttagccactgaattggaagaaaatggttttaggttttttctctgggctcagaaagtactggggcctccaggaaggggccccagggaaggggctgagggctgggggccttccctccctactgc

SEQ ID NO: 94217 - DNA, 673 bp, Homo sapiens
ccagctgtggggatgtgagggcccgggcgtcagcccaccacactctgaggactgcagcacagtagctggtaagaccacccatgagaagctgaactagacacttccaaggttggtgacctttgtcggtgctagtgccacatattctacctgtgctttatgaacaagaccagctgcctttctggggcatctactgcctgctaggcgctgtgctgaacgattatatgactgtctcatttattcctcactgagacaccatgaggtgggtgctactattaccccactttataatggactaacattgagtttgaacctcaggaccacctcttgaggragtcaaagaaggggttattaatgtacccattttgtagaagggaagcctgagtacacaaaggttgggtaacttgctggagacacacagcaagtaaatggcagagcaaaaacttgaaaccagatctcaggcaaccagtatgctactcgctctactccttaatgtgggtgaatttgttgttttattgaagtttctgtcccatggaaagtgggatgtcctcaatttagccactgaattggaagaaaatggttttaggttttttctctgggctcagaaagtactggggcctccaggaaggggccccagggaaggggctgagggctgggggccttccctccctactgc

SEQ ID NO: 94218 - DNA, 673 bp, Homo sapiens
ccagctgtggggatgtgagggcccgggcgtcagcccaccacactctgaggactgcagcacagtagctggtaagaccacccatgagaagctgaactagacacttccaaggttggtgacctttgtcggtgctagtgccacatattctacctgtgctttatgaacaagaccagctgcctttctggggcatctactgcctgctaggcgctgtgctgaacgattatatgactgtctcatttattcctcactgagacaccatgaggtgggtgctactattaccccactttataatggactaacattgagtttgaacctcaggaccacctcttgaggaagtcaaagaaggggttattaatgtacccattttgtagawgggaagcctgagtacacaaaggttgggtaacttgctggagacacacagcaagtaaatggcagagcaaaaacttgaaaccagatctcaggcaaccagtatgctactcgctctactccttaatgtgggtgaatttgttgttttattgaagtttctgtcccatggaaagtgggatgtcctcaatttagccactgaattggaagaaaatggttttaggttttttctctgggctcagaaagtactggggcctccaggaaggggccccagggaaggggctgagggctgggggccttccctccctactgc

SEQ ID NO: 94219 - DNA, 1259 bp, Homo sapiens
taaaggtagcatttctttgcgcctgtctctcttgagtccatcccacttccttttcttgagtgtgtgctttttcctttgcaacaaatctctgtattttcactattttctgacttgtccttgaattcattctcccaacggtttcaagagcagggacaccagctggaggtgccactggcctttggggacatcccccagcccaccggtatcaagacaactctggggagggactgttgagatacaactgaaagaaccaggcgtagtcagccatgcaatgacaggggtgggaagggcatcttttgagactgaggaaacagcaggtagagaacggtggtgagaaggagcttaagtgtctgcagcagatagacgcgtattgggactgcagctgagtgaacgggtaaaggacaccacaggtgacccgggtgaggctgtgggaggagtctgggtttcatggaagggcacaggagagatttaagtgcaggactgacaagctctgacttgtatttttaaaagatccctctggaaggctgggcgtggtggctcacgcctgtaatcccagcactttgggaggccgaggcgggtagatcatgaggtcaggagatcaagaccacagtgaaaccccgtctctactaaaaatacaaaaaaaaaaaaattagctggtcacggtggcaggcacctgtagtcccagctacttgggaggctgaggcaggagaatggcgtgaacccgagaggcgcagcttgcagtgagccgagatcacgccactgcactccagcctgagcgacagagcgagactccatctcaaaaaaaaaaaaaaaaaatcctcctagctgctggatggggaccagatatgaggggcgagaggtgaatcagggagacccgtggctgggaggctggggtgcaaggaggcaggcaagcaaggatggggtcttgggtcatgatgatactgcagagctagagggaaatacatgggtttrggatcattgtaaatgagacagggcaggccaatgactaggagtagaaaggggagagaggagtccacagcctctgcgacagccccaccatgaccactgctgtccccatcttgactgagaccatcatattaaagaaaagaaaaggattcccatgtcagctgccacactatctactgacctgagcccaaagcccttagtctgggctattaacgctataaaaatctccaacaactgattcctttaagctactgtagaagggttcttgcgggaggcatgagctaggctatgca

SEQ ID NO: 94220 - DNA, 725 bp, Homo sapiens
cctcctaggctcagaactgaaagcctgcacagctgttgcgggaggatgggtgatatggtttacaatccatcccccttccccaggaatggttttggaagacagacagaggagcaaggtgtttccctaccctgaagccattgtcttccaaagaacaagatcaattactggttctgaggcaaattggagatggcactggggtaaatttgttgctatgggcctggcgggtggaagcctgcacaaagtaaccattctctcattcccagggctgccggcgtggctcagggttgggcaaaagagaaagttcctacatgcctgcgtacctcctagattcaccaccaaaagtagctcaggaaaaatcaaaatcctctcccagctgggcagaaatcacccaccccagcctgaccccagaatccctgacagatgggcctccagctcaccagctccagagatggggtgctcaatccttcccccaggcatgccagccatctgtctccaagtggcatcctcctagggttccaaactctgcctctcagacatttatctccagccccaggacagccctgcaaaaatatgcacaaacagctcccccaacccaccctycagtgtgcaggaggagaagccaaggtttgtgctctgttttcacagagtggaatatttgtcctcgaaaagagtgtaactggccattttaacctgggatctatggttagaaccgtaaccattccttt

SEQ ID NO: 94221 - DNA, 639 bp, Homo sapiens
aattaggttggtgcaaaagtaattgcagttttaccaaagttaatggcaagactgcaattatttttgcaacaaccaaatagattagaccattttcccagccaaaccccccaacccctgtcttctccaaggcctgttctgaggtctgatctgcaccatcagaggtgcctagaccacccaattcctagactcctggcctgagctgaacaggccacacagcggacgtcaagggcacctgcgagggccaggcaccattgtaagcactacaggggcaggcaaacatggagcagactcaatcctggcttcaggaggttctcgcaggtaagtagacacgttccagccacaactcgctgcctgtccctccccagccagtgcaccaagagcctcctacatgctcggctctgcccgcgctgctccctgggcctgcagtgcccggcccgtgctcttctggtagctaatcctcccccaactttccagcaccagctaaaatacctaccttagtacaagtttattccgsgttctggtgcccttacctccacagagaagcctggctgagtgtgagcctcctggaaggcccgccttagcctcggatatgcttgcagccacggggcagggagctcacagagaggcttccagggagca

SEQ ID NO: 94222 - DNA, 1358 bp, Homo sapiens
cataaagatacagatatagaaaggttgaaaataaaatgatggaaaaagatatactatgtgaacagtatgagaaggaagctggcataactatattaaaatcagacataatactttaaggcaaaaatcattattagagttagaatgaggttgtttgtgatgatagaggctcaaatcaagaggaatgttaaaaaggaagagggataactcaagggaaggtcagcgaagattgtggaggaaattgtgtgtttccaggaagctccaggctcctcacattttccccaccagccagcagatagatattccatagtttaatttctttagcttagtgctttattgtatagttaaaattaaaaaaaagaaagcaagaaaggaaggagccatcaagttatgaaaggacattgaagaaacttaaatacatattactaagtgaaataagttgtattagtccattttcatgctgctgaaaaagacatgtctgagagtgggtaatttataaagaaaaagaggtttaattgactcacagtttcacatggctggggaggcctcacaatcattgcagaaggtgaaggcacatcttatatggcagcagacaagagagaccttgtgcggggaaactcccatttttaaaaccattagatcttgtgagactgattcactatcatgagaacagcactgcaaagacccgcaaaagtcattattagagatagaatggggttgtttgtgatgatagakgctcaaatcatttttccccatgattcaattacctcccaccgggtccctcccacaacatgtgggaattgtgggagctacaattcaagatgagatttgggtggggacacagccaaaccatatcactagtccgtctgaaaaggctacataacatataattccaaatatatgacattctggaaaaggcagagcaatggagacagtaaaaaaaaaagatttctgggtgtttggtgaggggtagatgaacaggcaaagcacagaggatttttagggcagtgaaaatactctgtctgatactataatggtggatacatattatcatatatttgtcaaaacccataaaatataccatactaagagggaaccctaaagtaaactacagtgataatgacatgtcaacataggttcatcgattttaacaaatgtacctcactagtgtgagacattaataattgggaagctgtgtgtgtgtgaacatcttactttcttctcaattttttgtaaagctaaaactgctctgaaaaataaaactattaattaaaaaaattaataggagtctgtgtacagagattctttttgtacaaggaaaaaaaccaactcaaattaagccaaaaacaaaagtaaatgca

SEQ ID NO: 94223 - DNA, 1358 bp, Homo sapiens
cataaagatacagatatagaaaggttgaaaataaaatgatggaaaaagatatactatgtgaacagtatgagaaggaagctggcataactatattaaaatcagacataatactttaaggcaaaaatcattattagagttagaatgaggttgtttgtgatgatagaggctcaaatcaagaggaatgttaaaaaggaagagggataactcaagggaaggtcagcgaagattgtggaggaaattgtgtgtttccaggaagctccaggctcctcacattttccccaccagccagcagatagatattccatagtttaatttctttagcttagtgctttattgtatagttaaaattaaaaaaaagaaagcaagaaaggaaggagccatcaagttatgaaaggacattgaagaaacttaaatacatattactaagtgaaataagttgtattagtccattttcatgctgctgaaaaagacatgtctgagagtgggtaatttataaagaaaaagaggtttaattgactcacagtttcacatggctggggaggcctcacaatcattgcagaaggtgaaggcacatcttatatggcagcagacaagagagaccttgtgcggggaaactcccatttttaaaaccattagatcttgtgagactgattcactatcatgagaacagcactgcaaagacccgcaaaagtcattattagagatagaatggggttgtttgtgatgatagatgctcaaatcatttttccccatgattcaattacctcccaccgggtccctcccacaacatgtgggaattgtgggagctacaattcaagatgagatttgggtggggacacagccaaaccatatcactagtccgtctgaaaaggctacataacatataattccaaatatatgacattctggaaaaggcagagcaatggagacagtaaaaaaaaaagatttctgggtgtttggtgaggggtagatgaacaggcaaagcacagaggatttttagggcagtgaaaatactctgtctgatactataatggtggatacatattatcatatatttgtcaaaacccataaaatataccatactaagagggaaccctaaagtaaactacagtgataatgacatgtcaacataggttcatcgattttaacaaatgtacctcactagtgtgagacattaataattgggaagctgtgtgtgtgtgaacatcttactttcttctcaattttttgtaaagctaaaactgctctgaaaaataaaactattaattaaaaaaattaataggaktctgtgtacagagattctttttgtacaaggaaaaaaaccaactcaaattaagccaaaaacaaaagtaaatgca

SEQ ID NO: 94224 - DNA, 859 bp, Homo sapiens
tgcataggctcccttgagccttggggactgggacattgcattactgatgcttgagcaaccgcgtgtcttcagatctcttttagttatgccctttaagaaccatccacatgtgctggaactaatggctgaggcgggacagcagggtacccctcgtaagtcagagagagctgaagaagcccaagactcacagccagtctgtgatagagaaattgtccttaggccctgggacgatgtctgcaaaactgaagccacaggcagagagcagagctggtaggtgtgaagtcaagtcctaacactggggtctgtgaaaggtgttaaaataattatcgcctagaacgcagaacagattcattttaacaagcaacactctaaataggaatcagcaacactctaggacttgatcttcagacccaaacctcaggcagctcagccaagcgggagctcagagagcaccccctggcctggsaccacctgccacctctcataaggttcagggggtgtcttcctggggactcaggctcactggcaattttgcacttttcttacaaagtgaggaatagtcaggtcacctctgagtaggtgacactggagaacactgacaaaattatcttctggcaaaaagaagtctcccctggtggaaggagcccagcattcctgtaaggcaggattcttaacctttcctgtgcattgtgatagaaaagtagaatcttgggaccccaaactcattatgctaaaggaaaagttaagcttgggaattgagtcgcccaaaaactacctttcttttgttcccagatagttgtaatttcacaggcttgctttatcctatgtaaaatgcagatttactaagcacaagaaaaat

SEQ ID NO: 94225 - DNA, 661 bp, Homo sapiens
tggttttgttattttaagttcactataagagcctgaataaagaaattcttaagccccttcaacggtccatcttgacaatggggtttataagctgagcagcttcagaaaaaggctaagaggaattcctttggtaatgttcagatcccaggaaacaagggaaagatggggcctttctcccccaggttccggagactcatcccagccccttaagaaactggtcccttagtgagcagcaatggacccacatgtctgtgtgtctgcgccactctataaccacctgcacctggacacaacatgctctttatcaaatggggcccatatattgtcacatttgatgggcacggctcccatttttgcaggtgagagttctgagcttcagagaagtttaagtaacctgctcaaagtcacccagctagaaagttgcagcgccaggactggaatctgggccttctgattctgaacctggtgcccatccactcagytctaatgagctgctctgcctggctttgggtggctcctggtctggtgttggtggaaagtcaaggcttaccagtgtgtcttcttatcacctgtgatgattgtctctgcttttgccaggatgtctttcagtgacttcctgaggcactattcccgcctggagatctgtaacctgaccccagac

SEQ ID NO: 94226 - DNA, 749 bp, Homo sapiens
gctctaagtaagcataagccctgatggtagccaagagactatacatctaggatgaaaatctggcttagcaaggacagtagggaggaagggacaacacacagcccaccctgacagaagcagccagactttggacgtgctggcaaatagcctaacacacccaatatgaagtgcgaacaaggagatccactgccatgtgtgggaggagagtgcaagagaaaataactcaaatgtccatcctttggaggcaggataaatccgacagagtgtaacacttggaatggttcacagagaacgaagttctttatagactgttatggaaagatcccccaaatactttattaagtgaaatgacaccaaataatggcaaggtgccaaacagtgttgatagtgtgctgccttcaatacaagaagggatattyagaatatgtacttagatttgcttgaatttgcacaaagaaacacggagggaatttttcgcatggctgcaaggcagtgagcaacggagtcagtggcgtcaactggagacagtgggaaacagacttcaccgggtgcctttcagttgctttaatttttatactgtgtgtattcaaaataatgatgaaataatcacacagaactctatgaaaaagacatcattttcattatacaaatcaactgttttaaaaaaatcccagcctggacgacatggcaaaaccctgtctctacaaaaaactacaaaaaaattagctgggtgtggtggtgcatgcctg

SEQ ID NO: 94227 - DNA, 645 bp, Homo sapiens
cattgctgagttgtcctcaagcctgagaattcatataggaaagagactctcctcaaaggagagggaaaagctttgttccctaaggtaaacacattttccttaggaacaaaaaggaaaggagtttgtggattctcaccttttggaatctaagtatctatctctactgggaagataaaatcagcctctttgaggcttttctccacttttgacttgcaaactcatggagagatagttctctacattctttcagagatctttctagggaggaggggaagttccctatcctggaatgtaaggctctgcctccaggtaagagaagttttattatcctttaagtggaagccagtgtctctataatgaaggttgtagagaacaaatatttatgggggaaatgaaagcaagcattttcattttcatagtagattaatatctgtggttcaagagcctgagtttgcaggaacactcagtaatacagagaaaatgtatttcccacagactatagtgcaaaacttcagaatarataaaagttgacttcagtaacacatgggtatcccttctgccctccttccctcccatttactgcatctttagttagatctatggtgctctcaccggactctagcctgtacttctatataggggtat

SEQ ID NO: 94228 - DNA, 955 bp, Homo sapiens
aggaccctccttggcatttttcaatgccaaggaccctccttggcatttttcagagtacgtgttagaagtttgtattttgcataggaaataactccttaagtatgcagacaaacagtgtgtttaagaataccctgacaattttttggcttcacattagtatctttaaagcctccattttcatgtttagttaaagagggaaaattgtaaatttgagttagatacacctagtgggtgtgaaagtttgcatatgatttaaagatataaagacttactaataatattatcagctgaatttgaggcatgaatgcaaatccagcctgactgggtattgactgccctttgtacaccggaataccttgtagttggatctcttctcaataacgtgtgaatgtggccatatcaagcagtggcaattgtgcagtgagtgtatttgggcctgtatggcgataatattggataaactgagaggccaaacatgaaatctgagaggagagactaaactacagaatggaagtgaaatgtaagaaaaaatggtgaatgtgtacagcttcttggccctgaacaatggtggccgtttaatgcacatgatattccttacaaagtcgtgttgcagccggtgtggtagctcatgcctgtaatcccagcactttgagagactgaggcaggaggatcctttgaaggcaggggttcaagaccagcctgggcaacatagcaagaccccatatccacacacacasaaaaaatttttttaagtctcctgttaaaaaaaaaggggtggggccaggcgtggtgactcacgtctgtaatcccagcacttccgaggcaggcggatcatgaggtcaggagatcgagaccattctggctaacacagtgaaactccgtctctactaaaaaatacaaaaaattagcctgtcgtagtggcgggcacctgtagtcccagctactcggaaggctg

SEQ ID NO: 94229 - DNA, 663 bp, Homo sapiens
ccgtggacaaccatggggtatctcagtaaaaaggggccagaaggacttagtaaaggattgggcttgtgttaggttattttgagaagggtttaaagaagcaggctctgctctggattggatgctatcagaaagtaggaataattgagtatgaggagtgaagactataaggagtgaagactagaattaggctaaagctatgattgccaaagaagtagcagtcactcatattatcagactaggggaatgtttaggcatttctgagatttgaataatgttcacatttttgtctgtttatgtaagatcagaggagtgttcttgtttttgtcttgctccattatggtcacagagtttcctctgttgtgygaagttgtttctgtttaacagaacaccaaaacctctctatgagtgctgggccagctagtagcaacactagggcctagcagtggtatcagggcagctcccagatgtcaggggctgctttctttttctcactatgcatatttgaaaacaaataaatgaagggatgtctcatttaactcttactgcaattctgtaagggagctgtatttccatgttataaattaagaaactgaagctcagagaggttcagtaatttgcaaaaagttgcagaactattcagtagaagagctgggattttaattt

SEQ ID NO: 94230 - DNA, 1060 bp, Homo sapiens
  misc_feature (1)...(1060): n = A,T,C or G
tgggnnnnnnnnnnnnnnnnnnnnnnnnnnnnnnnnnnnnnnnnnnnnnnnnnnnnnnnnnnnnnnnnnnnnnnnnnnnnnnnnnnnnnnnnnnnnnnnnnnnnaaattgaacatcatgatatcccgtaaacatagggtcttttcagtcataaaatatcaggactccttggtttaaattatctttaaggcttttaccaaattacttcctgtctaaattactggaatatcatcagataaaatgaaggaccaggaaacataagaactgaaacttatccctgtctctttttgaacttggtagtagcccccacaccaaattttctatacatctctgaaatgtcacctaacggtcatttatttaatcatccagtcattcatattaccaacattggtcaaggaaagcaatctctatatatcaggtatttttctggatcctgcaatatagaaaccaaagttacaatcttgcctttacaaagctcaccatcttcttgaagaaagggactgccaacaggcaccatgatgcagcatgtggaggtaggcccaggacacagtagagcacccaggcagacaccaacctagatcygggaagtgagttgtgggagaggaagttgggaaggatttatagaaagaggcaagtgactccagggtggaatttaaaaagatgagtagaaattagccactcttccgtatattcaataaatattcaaagagtaccctctgcaccatatactgagataaggcattctaagtacagagttggtggaaacagaaaaagtccctgctatggtttgattgtgacccccaaagttcaggtgttggaaacttaattttcaatgcaacagtgttgagaggtaggccctttaagaagtgattaggtcatgagggttccacctcatgcatggattaatgtcattattgtgcagggtgggtttgttctaaaaggaagtttagtccctctcacgtgcacacatgcttgctctcttacccttctgccttctgccatgggatcacgcagcataaatcctcaccagatgtagactcctcaacctggacttctcatcc

SEQ ID NO: 94231 - DNA, 1060 bp, Homo sapiens
  misc_feature (1)...(1060): n = A,T,C or G
tgggnnnnnnnnnnnnnnnnnnnnnnnnnnnnnnnnnnnnnnnnnnnnnnnnnnnnnnnnnnnnnnnnnnnnnnnnnnnnnnnnnnnnnnnnnnnnnnnnnnnnaaattgaacatcatgatatcccgtaaacatagggtcttttcagtcataaaatatcaggactccttggtttaaattatctttaaggcttttaccaaattacttcctgtctaaattactggaatatcatcagataaaatgaaggaccaggaaacataagaactgaaacttatccctgtctctttttgaacttggtagtagcccccacaccaaattttctatacatctctgaaatgtcacctaacggtcatttatttaatcatccagtcattcatattaccaacattggtcaaggaaagcaatctctatatatcaggtatttttctggatcctgcaatatagaaaccaaagttacaatcttgcctttacaaagctcaccatcttcttgaagaaagggactgccaacaggcaccatgatgcagcatgtggaggtaggcccaggacacagtagagcacccaggcagacaccaacctagatccgggaagtgagttgtgggagaggaagttgggaaggatttatagaaagaggcaastgactccagggtggaatttaaaaagatgagtagaaattagccactcttccgtatattcaataaatattcaaagagtaccctctgcaccatatactgagataaggcattctaagtacagagttggtggaaacagaaaaagtccctgctatggtttgattgtgacccccaaagttcaggtgttggaaacttaattttcaatgcaacagtgttgagaggtaggccctttaagaagtgattaggtcatgagggttccacctcatgcatggattaatgtcattattgtgcagggtgggtttgttctaaaaggaagtttagtccctctcacgtgcacacatgcttgctctcttacccttctgccttctgccatgggatcacgcagcataaatcctcaccagatgtagactcctcaacctggacttctcatcc

SEQ ID NO: 94232 - DNA, 751 bp, Homo sapiens
ttttgccttttccccctatttccaactaagctattataatttgttttcataatgccaaacacaatggagaagctaccaatgttactctaaccttttccttaatccaaacattatctagactttcattgagtcaacactcctattgttacacctgcaagttgtacatagagggaggcatacttcagaattaatgagtgcagctgtggtctctcttacattcagcacttgtaaaatagacctctttaaagtgccattatcacaatattgatagagttatttatagcactgcaaacgcatccagtcataacagaggacttgttatccacagcgagttcatgttgctgtcatcccctggacttcatccagmgcccaggagtaggcaccaggtggaccatctttcaaaaatgagcgctaaaagacaaccgaaaactttttctcgaagtgaatctggtagccaggagtctatttagtggatgagtacctgtaagaaacatagcaagtcagcctgagcccagataccatgaacgctggcccatggtagcagggcaggctattcaggtatatacgggatgtcacccacgagctgaccctacatggttctgctggaaagttggaaactccaggtgcaaggctggtgctatttcttcataagcaattcgaagagatgtcgtgcagaagggcaacatcaggaggaattacccttgcttacactcttccactccacagaggatgctttgctcctctttactgt

SEQ ID NO: 94233 - DNA, 736 bp, Homo sapiens
catgtacgagacactctcatgtcttgttggtttctggactcatgtatcaggttacggtgactgcaggtttagggcatacactgcagcctgcaggaaagcagtgcttatttacacagtattgtttctcagcttcaataactaaaccttcagcaggccattccatcattcaataaagcccattccatcattcagtcaagcccactgcttctgaatattgaggtatgaagtatgaatcatgaattccaagggcaattctattgccacaccccttttgctgtgaaatatgtttcctggttacaggtgatattgcaggggatgccatggtgatgattaaggctttgttcactatgtaaatggttcgggcatggaagacaaaactgtccccasaatattattctgtccctataaagactaacattgcttactctatgctcaaaggagtccagagtaatcactatgctactagtccagccagacgcctggaaatagtgccaaatcacatgctaaccttggtgagagaaatgtcataatgctgagcccattcatagtttccatccctgcttccatgttaaatttctcataggctcaatgagcaagcctgctggcaaaagagattgactgattacctactagatgagtcatcttatctaccataccaccaagatccatctctgcagtggatgccctctcatgggcatttatgtcagacagatatcttcatgatctgtgcactttt

SEQ ID NO: 94234 - DNA, 759 bp, Homo sapiens
cagctcactgactcaaatgtaaatctcttttggcaataccctcacagacacacccaggatcaatgctttgtatccttcaatccaatcaagttgacacccagtattaacaatcatacctaccttttagtatgtatattgaagtattccatacaatgtacactgataatagaagcatcaatgtcattttaacttatatttcatacaaaataatctgcccatctctttccaatgatgtagaaaatatgactctctgatcataaatgaatgaaatagttcaatctgttccactattctggtagagctatgcaatgtgcctatgaaaaagttgattaattcctgagcaacatttaggataataatatctaaattgaggtaagtgatgattatactatatcctgcactggtcagaccacatgagtaatatgtcrtggaaatcaaattttaagacagacatagaaaaacaaaaaatccagaggggagctgaaggtactgaactactaaatggtaccactgaaggtactgagtagcctttgaaccatgccaattataatgaataaagggggaactaaagaagaaaaagagatgcctcagaaggatgtctcttgtccccaaaagtctgtattattataaaagagagaccaggaatgcactgtgttactctaaaatgtaaagcaaagattagggaggagaagtctcaaaggaagctgatcttacagaactgtcatctcatagtaagaatgccttctgcagttcacgaaa

SEQ ID NO: 94235 - DNA, 781 bp, Homo sapiens
tccatctacatacatgtaataagaccaactatgtaccaggaactatgggattctgttgccttcatctcttttctctcacaggggctctccctgctccctgccaaggtggtggtgcctgtgtggtagaagggaagagcgagttggggctgcacaggcacaatctggaaatgaccagaataaaaatgccccagcccaaccagcaagcaggactccccaatcagatttttatttctaggcaatgctgctagggaaaaactctttcccctggagaaatcaaacaaaaacacagcttggratgattcatacaaaggttctcaaacttagctgtactttttaaatcatctgggaagctttaaaaacctacttatgcctgggccccaattaaatccaaacatcttggggtagaaccaaggcacttatagtttttaaaagctcccaaagtgattctaatgtgtagccagggttgagaattactgatttacacagtcctgctcttcatatgcagtttaggcttgtggttacagttacttagctgctcacctgtctgcactaatatatacactactatgctttgctgctgggaaagaaatatggcaaggatgaaaaccagttctctcggtaaacacctggttctattaagatgtccagctggtgccaggcatggtggctcatgcctgtaatcccagcactttgggaggacaagggaggtggatcacgaggtcaggggttcaagaccagcctggctaacatggtgaaaccccatctctactaaaaatacaaa

SEQ ID NO: 94236 - DNA, 549 bp, Homo sapiens
tgaggaaagccagagctttgtcacaccatgcacagtttatggtgatagaactctagcaactttctycttctctactctctcctatttgccagattataaacatttcttctacatgcaaagatcctctgactccccaattgtagttgatacttatcttcttttacctggatatttatggtgtctcctaaagataagctatgatgttgtattttgccaaaggtgttcacctcccttgaatgtgaatttctccagcataattctttagtatttcaaacgcaaatgagagttatctgaaaaataatctgcaagacacctcccctcattctgaggctttcctcttttcatgtgttaatggattgatacatttgttgtggaaggtaaggaaatagatgtttcttcatactactcggcccccacctaaaatcatgagggtctccaaaactccacctacctacggcagcaaccctggataaatattaccaggagtctcaattgtccacatgtgcaatgtttgatgtatacactttatatcataattaataggtacat

SEQ ID NO: 94237 - DNA, 678 bp, Homo sapiens
tgctgtggtatctgtctatccatcactttttccttgtgatcaaacctttgttttttgaaagagggaagtttaaggctatttaaactaaaaggttaaatccattgcttgtaggcctatataactttctgttcttttttgttttgcstgctaagcatgaaacactttgtttgtattctgtttgccaagtgagggctaaaatgggcagttatccatgagaacggcacatgtttatactcctccacagaggcagatatttaatgagcgtatgaacatttggtgaacacataattatcttataaacatttgttttgtggtgtttccaacaaaaataatacttttaaagaaagcaagagaattacattttgtactttatcactttaattatattatttcatgccaagattaaagaggcaaaagttgatgttcttcctatctgccatgccataactacttatttcaaaatgaatccttttttgatagatctttcaagaagctgtgttcaatttttcactgtatccatataacaccaggtatctaagcacttaggtttcagatgtcagggccggagaatccagattacaggtttaatatcatgaaaaattgtatatgttattaaatagcaagcagatattaaatgttgtcaaggtttatgagtataataaatgaaaaaatgggcca

SEQ ID NO: 94238 - DNA, 717 bp, Homo sapiens
aatgtcttgaaaattcttgtgatttttctgtgtgtttttcttttactttttaaagaacctacttcaaagccttcttaaaagtcaccgttactgccttctaatgtattgtaaacaaagagaacgtcctttcttcaaatatgcagggctcctaagagatgtccactggcgtgtcaaacaaaaatcaagaacttgctcttttatcagcattatcaagcccatccagtagtgaaagactagtggcaaaggcacatgatgggccaaaattcagatttattttaccaaattcactcctctcatatttcaaggaacaaaatcatgcaccagtagaaaccaaatttccttctgctttttatcttatttcctctttttgattcatagctcctgtcagctttgggtagagatttgctgaaccataaaatatctgcctgctactgtggttcattatataggttcagtgcatggtcggcratctacaaggtcttcctgattccaaataactccctcgactggcctggactagtacctgactaaaaaacaccttccccaccactgctccatcgtgaagtagaatatatgaccaataaaaagtaaaatgtaatattctttaatagacattagtacattgaatttttcagatcatttaaatttaagttgtgaaaaggccttagataacacaacaaagagagaactgaagggatagctttcactattagggga

SEQ ID NO: 94239 - DNA, 717 bp, Homo sapiens
aatgtcttgaaaattcttgtgatttttctgtgtgtttttcttttactttttaaagaacctacttcaaagccttcttaaaagtcaccgttactgccttctaatgtattgtaaacaaagagaacgtcctttcttcaaatatgcagggctcctaagagatgtccactggcgtgtcaaacaaaaatcaagaacttgctcttttatcagcattatcaagcccatccagtagtgaaagactagtggcaaaggcacatgatgggccaaaattcagatttattttaccaaattcactcctctcatatttcaaggaacaaaatcatgcaccagtagaaaccaaatttccttctgctttttatcttatttcctctttttgattcatagctcctgtcagctttgggtagagatttgctgaaccataaaatatctgcctgctactgtggttcattatataggttcagtgcatggtcggcaatctacaaggtcttcctgattccaaataactccctcgactggcctggactagtacctgactaaaaaacaccttccccaccactgctccatcgtgaagtagaatatatgaccaataaaaagtaaaatgtaatattctttaatagacattagtacattgaatttttcagatcatttaaatttaakttgtgaaaaggccttagataacacaacaaagagagaactgaagggatagctttcactattagggga

SEQ ID NO: 94240 - DNA, 933 bp, Homo sapiens
tgcatgtaaagcacttaggaagccgcctggcccatgtaagtgctcccaaatgtcagttattacctctgatgcctgttactgccaccaatgtacagaggaggcaatggaggctgagagaagtgaagtaacttgcccatggttgcactggcagaaaatgtgacaggttgggggtttctaggattagaaaccctagcagtctgtgctcttaaccaccaagttccactgggcaaaaagcccctcctggggctcaaatctaagatgtgtttgcaatgaaatcaggcatggtgggagggacctactggatctttgaagctaaggggtaagttcagggctgggggaccaagtgcaaagcccatggaggtacagccagccctggactaggagtcagaaaaccccgcacttcctcactgtgccctcgggcaggtcccctctcctctgtaaatgtcctcacctgtgcacctgatgcccaaccccaggccacccaccagagggagatcagctaatgctgcagagacaggaggaatccatagtcatcggcttctctgccctttgtccaggaccrgctgacagctcatattattttaagaaaaagtcaataggtaagtatccaagcctctgataggcttctgatttcttgtaaagggactgaggcccatcacgaatcctaaaccagtgcctcagctggtccagggggcaacgggatagtcgatgtcacagtgccaggcttggaaccaagaaagtccaaacagacaacgctgatattttgtaacgccagctcctacacctccaattatttcctcaaaccaagcagcaaggaggcccatacgagacaggcaggctgagcaggtgcactgctcgccaaggaaaaccaagcccatcccacagaggcacctcccagggtgcacagcaaattaatgtgctgcagagaacatg

SEQ ID NO: 94241 - DNA, 547 bp, Homo sapiens
tcagaagtaagtatgtatagaggatggtgatgggagaaggttcttaagtatctaaaactgaaaattcactaaatggtagcctaagcatagtatttagaaatatggatggaaccatctgaagacataggcaacaatagtaagtttttacttgtggggtgcctgaattgggagtagggagagctagacaaggcctctatttttgcttacatgtcaatgggtatctattttaaatagtgttctagtaccaataaaaattgaatgagaagtagaaaaaatcaatttctcttctacaaacagcagtaacctagatggtacaataatattaatgatactaattacaggaatttattttayttttcataccaaaaaatataaaatacatcaaaataactctgcaaggtaggattagagtccatctaaataagaaaaacctgaaaggctgttacattaaataaaaaaggttcaactagttggttccctttgcctggagcactcttccttcagatattagactggctagtggtgtccccagcatcaggccccggct

SEQ ID NO: 94242 - DNA, 720 bp, Homo sapiens
aggcggaaatgtttgttgtgatgtaaattttatttggtttgtaggcagttcaatttcaaaattgctaaaatgtgtttgagctttagactctaacatttgttgtaataattgctaggttgaagttcaccatgtaaaaacaaggggcatggatttacattgcaaaagttgtccacactgtattagcaacattctttcattgacagttgacataattcattcagagtgaaatattttaagccaaaaaaaatcccctttttaaaaagggaggtttaaatactattagcatttttatggttcctttaaatgccctggctattcccagagggttktttttttgtttggtttggttttggttttctgtttttctttttctttacatttttttcatttgagtcttagcacccgtttaagttatgcttctgaccttgtatggtctgtaagcttgcccagaaataagaccaccattttgaactaccataaaagtataaatgagtatttcaatgccataatctttcctgttgcctgtggagtctctgctgagatgaatcaggattcgagctctaggatgagacagaaaatgaaagcatgctgtttgccaggacactgtggatttatattgatgtgtatctagttgatttggaacactggactctcattttattcttctggttttctgtttttgttttatcttttgtaaaggcaatgagctagtcccaggaa

SEQ ID NO: 94243 - DNA, 2174 bp, Homo sapiens
tcttcctctttcctccttataattttttcctacttacttttctctgtggcattccgtgccacttcaccatttttctaacttttctagttgttccattcttattctacatttgaggttttaaaaaatttcttttctcggttctttctcctacttagtatcacaaatgacgttctaattaaagttacaaaagaaactgtagaaaaaattaatataaagctttgacaaattatatttgttgatacgaatactgcctactttttttctagactgtaatctcctagctatgtcaaaacattatgcctatgctaatagcagagaagctattaaaaaacactcaagtctaataaataatgtttggtgacaataatagtacgacaaagcagagaccaaagagatttcatataaccttatgacatatacacagtaattcataattctaatacaaacaaaatcttttacctaaactcaaaatgcatagatataaatatctcaaagttcagctgctttcagtactaatgtggaaaaagttaaaactccttagcttttattttaattggaaaataataatcctcttcatactaaaaaagacttaaattatttttgaccaaaaaaaccatgtaattttgtcttctttctttctttgggggcatttatagaagttgaagaagcaactttaatcattcctttcttccaagacttcattcaagaacctcaccttggccaggcatggtggtccacgcctgtaatcccagcactttgggaggctgaggtgggaggatcacttgaggtcaagaggtggagatcggcctggccaacatggtgaaaccccacctctaataaaaatacaaaaattagctgggtatggtggcacatgcctgtaatcccagctactcaggaagctgaggyaagagaattgcatgaacttgggaggcggagtttgagttgagccaagatcatgccactgcaccccagcctgggtgacagagtgagtgaaactctgcctcaaaaagaaaaaaagaaaaaaagaaaaacctcatcttgtctccacaaaaaaaatttttttaattagcaaggcatggtggcatgtgcctatagtcccagctacttgggaggctgaggcaggtggatcacttgagcccaataggtcaaggctgcagtgagctgtgatcgtgtcactgcactcccacctgggcaacagatatcctgtctcaaaaaaataaaaaataaaaaacttttaaaaaagtatctttaaaactcttttctctttaaagtaggaaacaaaggtaatgacccataacgatgtatgtactgactatttacatcaacagctatcctgcgattaaagtgggtcccaacatacataattctttaaagtattttaagtaatattatatgcatatttctgaagtgctgagtctgtcccatttgtgtatttttattcttttctccctccaacactcttaactagattttttcacccacaatatattttaaaataatgtcacagcctgcctatgataagtacttgaatttgtatcttaagggcattagttcatttgaaaattaaaactgaaagaaaaaagaaatatgataaaaattttttctcttggctagtttatttttttttaagtaacctattattacataagacagacacttatgcagatgattccaaggatataaaagaaaagtaaacatttcataaaagccatatgaaatatccatcttaccaatatcatcagcaagggaattaggatcagatgccccaagggtagcttcaaactcctcttggagacgataggctctttgcagcagagcttcgagtttatggataaattcagtactaataatatcctacaaggagagaaaaagtacacagaacaaattaaattctaatgttaaaattctaaatatttttcccacttttaaataaaaggcaaagaaagtgagtaatataaaaaaacaactgagagatggtggaaagagtacagcagcagaagtcaagaggcctgggttctagctgtgtctttggcaaaattaccttagttcttagtgattcagtttctttacctataaaattaaggagttagactagattggcagttctcaaagtaaggtccttgagccagcagcttcattatcacccaagaacttggtagaaatgcaaattctta

SEQ ID NO: 94244 - DNA, 2479 bp, Homo sapiens
tattgtttagaatgtatctctgtcacttaacaatatgttggctatggaatactttctgagtcaacacacagaaatctagcataatttttcttaattagtataatttttattagcataattttaaaaattaaccttcgaaggttagaaatgtatgtttttctcctaaatttggagtgtttacaaagtctgaaccaatagacacccttgtataacaccttttgaaaatgtgtctaattcatttatgcagccaaaagacacatgaaaaaatgctcatcatcactggccatcagagaaatgcaaatcaaaaccacaatgagataccatctctcaccagttagaatggcgatcattaaaaagtcaggaaacaacaggtgctggagaggatgtggagaaataggaacacttttacactgttggtgggactgtaaactagttcgaccattgtggaagtcagtgtggtgattgctcagggatctagaactagaaataccatttgacccagcaatcccattactggctatatacctaaaggattataaatcatgctgctataaagacacatgcacacgtatgtttattgaggcactattcacaatagcaaagacttggaaccaacccaaatgtccaacaatgatagactggattaagaaaatgtggcacatatacaccgtggaatattatgcagccatgaaaaaggatgagttcatgtcctttgtagggacatggatgaagatggaaaccatcattctcagcaaaccatcgcaaggacaaaaaaccaaacaccacatgttctcactcataggtgggaattgaacagtgagaacacatggacacaggaaggggagcatcacacactggggcctgttgtggggttgggggagggggtagggatagcattaggagatacacctaatgttaaatgatgagttaatgggtgcagcacaccaacatggcaatgtatacatatgtaactaacctgcacgttgtgcacatgtaccctaaaacttaaagtataattaaaaagaaaaaggaaaacaatgtcaaagaaaacaaaacaaaacaaaacaacaaaaaggaaaatttgtctaattatttccttaggacaaaatactagaaaatgaattgctgaatcaaagggaatatagttttaaggcttttggcagccttgttttctgctgccctccactatcataccaattgctaaatatttgaatatctagaataatataatatgaaaattatattattttgtattcaatgcatttttttatactaatgttgggtgcttgttatttctaaagcatggagtcaatgactattggttgcttttcaaagctaattgatgtttgacacagattcctacacttttctaaaaagcaatctctctaaaataaatttacaagggatattcttattctcatttatagatgggaaamctgagaagaaagaacattaaaggtactgactttattgactcagaagaaattagtttctttccaacctagaccaggcactgatcaaaagtactggctggctctcaccaaatggaagagtgccagatattctaacattggtcactttttgtgattcttcttcttctctcctttttaattttttttggagtttgcagatatttagttttacttttattaaaaatggttttataaataaatttttttattcacaaatactatgtgttcaatactgatgttaggtacacttgtaacaattccatcctgtttcacctgcctgaagtacaaaaacaagctcacattcttctctctacagttattactgcatcacatgcacaagtgtaagaaagatttatacaatgcaattaaatgaaaaaacattctttctcacttttccgtccctacttccaatctacggaagcaacttgtttttcgttttgtttcttttcttttgccatttattataaaccatgtaaatctacataatgtaccaaaatccttattgatttaccaatttagactatagcttttgacttcatgttctaactatagtttatttatatcactttccacctctcctcttttctcccgtattttgttggatattgctgcagctgtttttataactattacccattctgtatttctttgttttccttattaacagaggcaatgtgtccagctataaacacattctaaggctccatatgaaatatcagaaactctgagagatcttccacttcctaattcagataatacccctcctacttgatgaaatgtggaggcaatgcttgcaggtacaaccgtcatgttatagccgtgagttgacaaatataacagtgacatggtaaaaataatagagcagaaaaagagtgcccagctcccaggcacatcattagaaagctggcctgctctaactgcctccatctagatcttttgtaggtggagaagacaaacccctttagtttaagctactgctaataaggctgtttgttagctgtagctga

SEQ ID NO: 94245 - DNA, 2479 bp, Homo sapiens
tattgtttagaatgtatctctgtcacttaacaatatgttggctatggaatactttctgagtcaacacacagaaatctagcataatttttcttaattagtataatttttattagcataattttaaaaattaaccttcgaaggttagaaatgtatgtttttctcctaaatttggagtgtttacaaagtctgaaccaatagacacccttgtataacaccttttgaaaatgtgtctaattcatttatgcagccaaaagacacatgaaaaaatgctcatcatcactggccatcagagaaatgcaaatcaaaaccacaatgagataccatctctcaccagttagaatggcgatcattaaaaagtcaggaaacaacaggtgctggagaggatgtggagaaataggaacacttttacactgttggtgggactgtaaactagttcgaccattgtggaagtcagtgtggtgattgctcagggatctagaactagaaataccatttgacccagcaatcccattactggctatatacctaaaggattataaatcatgctgctataaagacacatgcacacgtatgtttattgaggcactattcacaatagcaaagacttggaaccaacccaaatgtccaacaatgatagactggattaagaaaatgtggcacatatacaccgtggaatattatgcagccatgaaaaaggatgagttcatgtcctttgtagggacatggatgaagatggaaaccatcattctcagcaaaccatcgcaaggacaaaaaaccaaacaccacatgttctcactcataggtgggaattgaacagtgagaacacatggacacaggaaggggagcatcacacactggggcctgttgtggggttgggggagggggtagggatagcattaggagatacacctaatgttaaatgatgagttaatgggtgcagcacaccaacatggcaatgtatacatatgtaactaacctgcacgttgtgcacatgtaccctaaaacttaaagtataattaaaaagaaaaaggaaaacaatgtcaaagaaaacaaaacaaaacaaaacaacaaaaaggaaaatttgtctaattatttccttaggacaaaatactagaaaatgaattgctgaatcaaagggaatatagttttaaggcttttggcagccttgttttctgctgccctccactatcataccaattgctaaatatttgaatatctagaataatataatatgaaaattatattattttgtattcaatgcatttttttatactaatgttgggtgcttgttatttctaaagcatggagtcaatgactattggttgcttttcaaagctaattgatgtttgacacagattcctacacttttctaaaaagcaatctctctaaaataaatttacaagggatattcttattctcatttatagatgggaaacctgagaagaaagaacattaaaggtactgactttattgactcagaagaaattagtttctttccaacctagaccaggcactgatcaaaagtactggctggctctcaccaaatggaagagtgccagatattctaacattggtcactttttgtgattcttcttcttctctcctttttaattttttttggagtttgcagatatttagttttacttttattaaaaatggttttataaataaatttttttattcacaaatactatgtgttcaatactgatgttaggtacacttgtaacaattccatcctgtttcacctgcctgaagtacaaaaacaagctcacattcttctctctacagttattactgcatcacatgcacaagtgtaagaaagatttatacaatgcaattaaatgaaaaaacattctttctcacttttccgtccctacttccaatctacggaagcaacttgtttttcgttttgtttcttttcttttgccatttattataaaccatgtaaatctacataatgtaccaaaatccttattgatttaccaatttagactatagcttttgacttcatgttctaactatagtttatttatatcactttccacctctcctcttttctcccgtattttgttggatattgctgcagctgtttttataactattacccattctgtatttctttgttttccttattaacagaggcaatgtgtccagctataaacacattctaaggctccatatgaaatatcagaaactctgagagatcttccacttcctaattcagataatacccctcctacttgatgaaatgtggaggcaatgcttgcaggtacaaccgtcatgttatagccgtgagttgacaaayataacagtgacatggtaaaaataatagagcagaaaaagagtgcccagctcccaggcacatcattagaaagctggcctgctctaactgcctccatctagatcttttgtaggtggagaagacaaacccctttagtttaagctactgctaataaggctgtttgttagctgtagctga

SEQ ID NO: 94246 - DNA, 530 bp, Homo sapiens
gaaactgctgggcacagtggctcacacctgtaatctcagcactttgggaggccaagacaggaggatcacttgagtctaggagttcaagaccagcctgggcaacatagggagaccctgtctacaaaaaatttraaaattagctgagtgtggtggcactcacctgtagtctcagctactcaggaggctgaggggagggatcgcttgagccagggaggttgaggctgccgtgagctgtgatcctgccagtgcactcagcctgcgtgacacagtttggaaaactgtctctctctatgtatgtatctgttcagggaaatggcagcgtgagattttatggcagttcttgagacttcagaaacacttcggcaccagccaaatccccccaagagagcaaggaacacttttccagttgcttaaaaaatttaaagttataatgaaaaatgttgtaaaaagaactacagaggctgggtgtggtggctcacacctgtaatcccagcactttgggaggccaaggcgggtgggtcacgaggtca

SEQ ID NO: 94247 - DNA, 677 bp, Homo sapiens
tcagaaaacttaatttcatcactattaagtattctaaaagaayatcttcagagtggccctgaagacagtcatggatgagggttacagacgtgagctgagcagggcagccacgaaggagcaaggcagggccccgtgggagacttggaaggtggcaatgtttatgtagagatataaataggttttgataagtttggtctaaaagaaatagtcatctcaatttgcagttaagcgttctatgcttctccccaaaacttcattgctgtgcccagcagggtgcatgttttacacagatgatgggcaaacattcttaagtgcaaaaggaaaccagacaaaaagtccccatgacgagacagccgagtgggagtgcatctgactctgactgcaggcccaaaaagatggaggtgaggaccaggacaggagctggaccactggggaagcagtcaatctaattttttaagattaaataaaataagtccaagatgaaagcctccttgagctgtcgtccatacataataccccttaaacaaaaaaaaagcggggttggtggtggggactaatattactgaaaaaacatactgagaaatgtaaaatttggtctttagtctttgaaaaacaaaataaacttggcatctgactttggttttctcacatcagagtctacttacagcgaggcaatt

SEQ ID NO: 94248 - DNA, 677 bp, Homo sapiens
tcagaaaacttaatttcatcactattaagtattctaaaagaacatcttcagagtggccctgaagacagtcatggatgagggttacagacgtgagctgagcagggcagccacgaaggagcaaggcagggccccgtgggagacttggaaggtggcaatgtttatgtmgagatataaataggttttgataagtttggtctaaaagaaatagtcatctcaatttgcagttaagcgttctatgcttctccccaaaacttcattgctgtgcccagcagggtgcatgttttacacagatgatgggcaaacattcttaagtgcaaaaggaaaccagacaaaaagtccccatgacgagacagccgagtgggagtgcatctgactctgactgcaggcccaaaaagatggaggtgaggaccaggacaggagctggaccactggggaagcagtcaatctaattttttaagattaaataaaataagtccaagatgaaagcctccttgagctgtcgtccatacataataccccttaaacaaaaaaaaagcggggttggtggtggggactaatattactgaaaaaacatactgagaaatgtaaaatttggtctttagtctttgaaaaacaaaataaacttggcatctgactttggttttctcacatcagagtctacttacagcgaggcaatt

SEQ ID NO: 94249 - DNA, 677 bp, Homo sapiens
tcagaaaacttaatttcatcactattaagtattctaaaagaacatcttcagagtggccctgaagacagtcatggatgagggttacagacgtgagctgagcagggcagccacgaaggagcaaggcagggccccgtgggagacttggaaggtggcaatgtttatgtagagatataaataggttttgataagtttggtctaaaagaaatagtcatctcaatttgcagttaagcgttctatgcttctccccaaaacttcattgctgtgcccagcagsgtgcatgttttacacagatgatgggcaaacattcttaagtgcaaaaggaaaccagacaaaaagtccccatgacgagacagccgagtgggagtgcatctgactctgactgcaggcccaaaaagatggaggtgaggaccaggacaggagctggaccactggggaagcagtcaatctaattttttaagattaaataaaataagtccaagatgaaagcctccttgagctgtcgtccatacataataccccttaaacaaaaaaaaagcggggttggtggtggggactaatattactgaaaaaacatactgagaaatgtaaaatttggtctttagtctttgaaaaacaaaataaacttggcatctgactttggttttctcacatcagagtctacttacagcgaggcaatt

SEQ ID NO: 94250 - DNA, 1800 bp, Homo sapiens
cagattcaagatgtcaggcattttgaatgttgttgctccactattttagtatgtgactttctactcatggttcaatatggtggcatggtctccagccctcacatctccattgcagctagcagcaaaaggagagggaagagttcacattcacttttttacaaaattaaagagatttttatggtcttaatacattcctacttacttctcatgagctcaaagttcatcatacagtcacacagagctgcaagggagtctaggaaaaacagtctcaaaaagtagaggtggacagcttctcagggatctcccaagttctgatgactctctcaactctctgcttctctctgggttccagactagattctctcagaaaaagtcttggaatataggatggaaaaaaaaaatccagctgctgcagctatagattcacagtctgagcttctcccaccaccctctcagtctttgctgatcaaattcaggggaaggttaactagcctgtyttgaaccatatgtctatctctgggataatctctgcacctgagaaaggctggcttctcagagcagatgattttgttgttgttgttgttaaactttaaaagatgaatcagatgttacaatgactcagggctgggcaggcaaactcagggaactaggaaattgatgatggagtcagagattgaggtgctgggtgtgatgtgatgaagtacagacagagaggccacatctttccatgtgtgaatttatgaaagatttcagacacttaggtaaggatcctgaactattctctgcagttgatgagaaaccaccaacattttgtgaccagtcatgtcaacatttatgcttatacatattaaataggtctaaatgtgtttagacctattaccttggaacccatgcataggatggatgagaagggatggcactgaagatggaagcctggagactctggcatgggatggatggtggtaatggagtctttgaacctggagcatggagtgggaaggaagaagtgagaaggcattcaaagtcaccagtgaggctgggcaccatggctcacacctgtaatcccagcactttgagaggtcaagacaggcagatcacttgagctccggagttcaagaccagcctgggcaacatgatgagacccccatctctattaaaaatagaaaaaatagccaggagtggtggtgtgtgcctgtagtcctagctactaggggagctgaggtgggaggatcacttaagcccaggaggtggaggttgcagtgagctgagattgtgccactgcactccagcccaggtgacagagtgagacattgtctcaaacaaacaaacaaattaaaataacacaaacacacacacaaaaacaaaaaaacaaaaatacaaaaacaaacaaaaaacagtcaccacagaagcaaactgttgtgtctctttgatgttgagggaaaaatcaaacgtgacttcagagctctaacctgaaaggttgagtgggaaacaaactcccaataaaagaacataaattatgtctgggggagaaaagaagacaaagttgagttcagcctttgctttattgattcttcttctgaaggaggttcttctaaaacagggagtcacatttagcctttgctcgttcttctcctcttcccaaaggggttcttctaaatgttgggctgaactagggctcaaacataagcttccttctctctccaggggatctcactcagccccaggacttgacacatccactcaaaatcctaaattcccatctctggctttgacatcttttctctacttcagattcatgca

SEQ ID NO: 94251 - DNA, 1800 bp, Homo sapiens
cagattcaagatgtcaggcattttgaatgttgttgctccactattttagtatgtgactttctactcatggttcaatatggtggcatggtctccagccctcacatctccattgcagctagcagcaaaaggagagggaagagttcacattcacttttttacaaaattaaagagatttttatggtcttaatacattcctacttacttctcatgagctcaaagttcatcatacagtcacacagagctgcaagggagtctaggaaaaacagtctcaaaaagtagaggtggacagcttctcagggatctcccaagttctgatgactctctcaactctctgcttctctctgggttccagactagattctctcagaaaaagtcttggaatataggatggaaaaaaaaaatccagctgctgcagctatagattcacagtctgagcttctcccaccaccctctcagtctttgctgatcaaattcaggggaaggttaactagcctgtcttgaaccatatgtctatctctgggataatctctgcacctgagaaaggctggcttctcagagcagatgattttgttgttgttgttgttaaactttaaaagatgaatcagatgttacaatgactcagggctgggcaggcaaactcagggaactaggaaattgatgatggagtcagagattgaggtgctgggtgtgatgtgatgaagtacagacagagaggccacatctttccatgtgtgaatttatgaaagatttcagacacttaggtaaggatcctgaactattctctgcagttgatgagaaaccaccaacattttgtgaccagtcatgtcaacatttatgcttatacatattaaataggtctaaatgtgtttagacctattaccttggaacccatgcataggatggatgagaagggatggcactgaagatggaagcctggagactctggcatgggatggatggtggtaatggagtctttgaacctggagcatggagtgggaaggaagaagtgagaaggcattcaaagtcaccagtgaggctgggcaccatggctcacacctgtaatcccagcactttgagaggtcaagacaggcagatcacttgagctccggagttcaagaccagcctgggcaacatgatgagacccccatctctattaaaaatagaaaaaatagccaggagtggtggtgtgtgcctgtagtcctagctactaggggagctgaggtgggaggatcacttaagcccaggaggtggaggttgcagtgagctgagattgtgccactgcactccagcccaggtgacagagtgagacattgtctcaaacaaacaaacaaattaaaataacacaaacacacacacaaaaacaaaaaaacaaaaatacaaaaacaaacaaaaaacagtcaccacagaagcaaactgttgtgtctctttgrtgttgagggaaaaatcaaacgtgacttcagagctctaacctgaaaggttgagtgggaaacaaactcccaataaaagaacataaattatgtctgggggagaaaagaagacaaagttgagttcagcctttgctttattgattcttcttctgaaggaggttcttctaaaacagggagtcacatttagcctttgctcgttcttctcctcttcccaaaggggttcttctaaatgttgggctgaactagggctcaaacataagcttccttctctctccaggggatctcactcagccccaggacttgacacatccactcaaaatcctaaattcccatctctggctttgacatcttttctctacttcagattcatgca

SEQ ID NO: 94252 - DNA, 1239 bp, Homo sapiens
ccttcccctgtagttctgaccccatggggctggcagtagatacatccaactttgtctcccctagactagacagccctctagatcaggcctaggagtggacagtaaaatttagagagtgcaacaggtgaagagagacgtgactgactccctcctctttagcttcccttgacaacttcctctcagactgccccagctgatatcctgcccaaaaacacacatgcttgcaaatccagccactaaccattgacctgtcttggactcaagtgtgaagagtcagccaagaatgcagacctggaagcctagggtgtatgtgtgtgtatttgtagtcaagtgaaaatcccacccaagctccagacagaccctggtggcccattctgcagatgttggtgaggttggtawttctgtggaggtgtcagcaaaggttgaatgtgccaggcatgaggcaaaggccaaggtttagggggacttctacacacacaacttcccccttgcctcgtccagccagaaagcagagagcagtggcatctgcccagcacagaggcagatggatggatccactcacccgaggatagagcagggaagacgggacaggagaaatccaagagggcttctcaggggaggaggcatgtagtttggcttagatacagaggctagacaggggcctgagcagatgagtaggggactgggcatttgaagccaagggtcttgcacctccctacccctttctttgcaccctcatactcgagcatttattagcaacttgtgctaaccactgagctaagctgacctccaagtaattagaaagcttaagtaaaccaacatctgtagatgagaaaggtgactgaggacctactgttacaaaggcaaggtaatttgaggctgcaatgagctacgagcaactgtgttccagcctgggagacagaatgtaaaaaaatagtaataacagaaagtatacatcaatctcaattttttttaaaaaggcagatggttttacagttgttttatcaaaactcaaagaacaggaaagcccaaattatttcaacaaagtcagaccttttaaacagatgatagctgcccaagtcatttttatgaaacttctttatatcaaaacctaagtctaaaaagagaaaagtgttgaccttgatacgggctgtgttaggcagagatttcaatgaagtcctctctgaagaggtgacatttgatctgagacctgaagcaccagaaagaggcagccaagcc

SEQ ID NO: 94253 - DNA, 539 bp, Homo sapiens
tgtgtttataagagctttatggttgcaagttttgtgaattatttctgtattatttagtaccacactttttgtattatttagtacactaaatatattttgtattatttagtataaatacaaaataatacaaaataaaaatattttttattatttagtacacactatttgtattatttagtaccacactttttgcaaaccgtgagcatacatccaagcttccctaaatatacacayactcgaggttgtgtttataagagctttatggttgcaagttttgtgaataatctttaatccttttgagttaaagtgttttttttggtaccacaagagtcctgtattatttagtaccacaagagtcctgtattattcttttgcatatggatatctagttttggaaaccttccccattgtgttgttttggtggtgttttgaaaaatgtgttcactctgtgtaaatttgtgtttattattgagcgctctcattttgctcactggtctgtgtttctctgtgtatgccagtaacatatggattggttaact

SEQ ID NO: 94254 - DNA, 768 bp, Homo sapiens
tgtcttaacaatcgaatacttaaaagttaatgccctcataatatgcaaaatttttawtaagcacattggtccctgtgttcaagtagttggtaatcaaattagcgaagtatggtaagtcttttgaagagcattaaacagcagagaatgtaagaaatttgtctctataatagtgtgggccttctgtgtttcctaagggcacattcatatgatctaataactgagcagagagaagcctaaaggatagtttttggtttcatttgtttgtttttccaattaacatacatttctagattaaaggtcaactatcttttccttgggagtcaactataggagaagatagtgaagaggcaaggaaaattacagcagctcaacagctttaccctggaaatatctgtattgtgtaccgctatagcctacctttatcagtcagataacaatgtcaaagaggcaagcttggcaccattgctcttagtgaatccctgctgccagccttttatcctaagtgctctccaaagacccatttaatggaccttcctgaaattgtgctcaggatcaatatgaggctcattgatacagcatttttggaactcaccatttgcttatttattaaacctgggatagttgcccgacttctatcatctgaaatcctctccatgactttcaaagttaccaacattggttccaacatcattcctagaaaacatttcagtggagtatattatctgacattgactgtattatagcagtagaatctatggtgattcctcc

SEQ ID NO: 94255 - DNA, 768 bp, Homo sapiens
tgtcttaacaatcgaatacttaaaagttaatgccctcataatatgcaaaatttttaataagcacattggtccctgtgttcaagtagttggtaatcaaattagygaagtatggtaagtcttttgaagagcattaaacagcagagaatgtaagaaatttgtctctataatagtgtgggccttctgtgtttcctaagggcacattcatatgatctaataactgagcagagagaagcctaaaggatagtttttggtttcatttgtttgtttttccaattaacatacatttctagattaaaggtcaactatcttttccttgggagtcaactataggagaagatagtgaagaggcaaggaaaattacagcagctcaacagctttaccctggaaatatctgtattgtgtaccgctatagcctacctttatcagtcagataacaatgtcaaagaggcaagcttggcaccattgctcttagtgaatccctgctgccagccttttatcctaagtgctctccaaagacccatttaatggaccttcctgaaattgtgctcaggatcaatatgaggctcattgatacagcatttttggaactcaccatttgcttatttattaaacctgggatagttgcccgacttctatcatctgaaatcctctccatgactttcaaagttaccaacattggttccaacatcattcctagaaaacatttcagtggagtatattatctgacattgactgtattatagcagtagaatctatggtgattcctcc

SEQ ID NO: 94256 - DNA, 768 bp, Homo sapiens
tgtcttaacaatcgaatacttaaaagttaatgccctcataatatgcaaaatttttaataagcacattggtccctgtgttcaagtagttggtaatcaaattagcgaagtatggtaagtcttttgaagagcattaaacagcagagaatgtaagaaatttgtctctataatagtgtgggccttctgtgtttcctaagggcacattcatatgatctaataactgagcagagagaagcctaaaggatagtttwtggtttcatttgtttgtttttccaattaacatacatttctagattaaaggtcaactatcttttccttgggagtcaactataggagaagatagtgaagaggcaaggaaaattacagcagctcaacagctttaccctggaaatatctgtattgtgtaccgctatagcctacctttatcagtcagataacaatgtcaaagaggcaagcttggcaccattgctcttagtgaatccctgctgccagccttttatcctaagtgctctccaaagacccatttaatggaccttcctgaaattgtgctcaggatcaatatgaggctcattgatacagcatttttggaactcaccatttgcttatttattaaacctgggatagttgcccgacttctatcatctgaaatcctctccatgactttcaaagttaccaacattggttccaacatcattcctagaaaacatttcagtggagtatattatctgacattgactgtattatagcagtagaatctatggtgattcctcc

SEQ ID NO: 94257 - DNA, 768 bp, Homo sapiens
tgtcttaacaatcgaatacttaaaagttaatgccctcataatatgcaaaatttttaataagcacattggtccctgtgttcaagtagttggtaatcaaattagcgaagtatggtaagtcttttgaagagcattaaacagcagagaatgtaagaaatttgtctctataatagtgtgggccttctgtgtttcctaagggcacattcatatgatctaataactgagcagagagaagcctaaaggatagtttttggtttcatttgtttgtttttccaattaacatacatttctagattaaargtcaactatcttttccttgggagtcaactataggagaagatagtgaagaggcaaggaaaattacagcagctcaacagctttaccctggaaatatctgtattgtgtaccgctatagcctacctttatcagtcagataacaatgtcaaagaggcaagcttggcaccattgctcttagtgaatccctgctgccagccttttatcctaagtgctctccaaagacccatttaatggaccttcctgaaattgtgctcaggatcaatatgaggctcattgatacagcatttttggaactcaccatttgcttatttattaaacctgggatagttgcccgacttctatcatctgaaatcctctccatgactttcaaagttaccaacattggttccaacatcattcctagaaaacatttcagtggagtatattatctgacattgactgtattatagcagtagaatctatggtgattcctcc

SEQ ID NO: 94258 - DNA, 768 bp, Homo sapiens
tgtcttaacaatcgaatacttaaaagttaatgccctcataatatgcaaaatttttaataagcacattggtccctgtgttcaagtagttggtaatcaaattagcgaagtatggtaagtcttttgaagagcattaaacagcagagaatgtaagaaatttgtctctataatagtgtgggccttctgtgtttcctaagggcacattcatatgatctaataactgagcagagagaagcctaaaggatagtttttggtttcatttgtttgtttttccaattaacatacatttctagattaaaggtcaactatcttttccttgggagtcaactataggagaagatagtgaagaggcaaggaaaattacagcagctcaacagctttaccctggaaatatctgtattgtgtaccrctatagcctacctttatcagtcagataacaatgtcaaagaggcaagcttggcaccattgctcttagtgaatccctgctgccagccttttatcctaagtgctctccaaagacccatttaatggaccttcctgaaattgtgctcaggatcaatatgaggctcattgatacagcatttttggaactcaccatttgcttatttattaaacctgggatagttgcccgacttctatcatctgaaatcctctccatgactttcaaagttaccaacattggttccaacatcattcctagaaaacatttcagtggagtatattatctgacattgactgtattatagcagtagaatctatggtgattcctcc

SEQ ID NO: 94259 - DNA, 1346 bp, Homo sapiens
tcctgaacgctgaatgatctggaactatggtgactgactgcaaagttcagctgtgcgtgcgtgggcccgtgagcgcagggcgtggattctgcctcccaggtctaacgtaaccggggcgcggacatctgcgaggcgcttattttaccgtggcggcctccggctaccgatctgcagttgcgtcctttcctgccagtgcccttccctccccgaggtcactcgcgccccttccccgccccgttccgagagagggtcaagcgccctggtctggggctgcggctccaatagcctccgctcggtccccctgcggctcgcaaggagaggacgcgacagaaaagggtttctgtctctctccaggagcgggccggctgagggagagaagctgctgggactgaggttcccgaaagtgacgggtcagccccgaccctgagcggcagctaggcccagcgcgcgcacgaaggggcgggggccgcgtaccaggctgtccctgcaggcgctccgtactcgtccgagcccacgagcaagaaaaccgtcacacccctcagcacgcgacttccttccgggccgtcgcttcgatgacgccatcaattcacgcgagaagaccacacccccgccccgcgctcgtctggcccccgcccctcgcgctcccagcggtcaatggccgtagtggccgccagggatcgcccgcgacttggtcggtgcggtcctggacctcggtcttgggtatccgtcctggggctggggatgagggcggtgttggtgggagctccccgagagcgagcggcaggacgcgcatgccccggagtactgagacccagggcgaacctttccaaggcgttgactttggggattgctccggatttccttytgcattaggccgaacctggttcgttttggtttttttagagacaaggtctcgctcttttgcccaggctgggagtgcagtggcacgatcatagctcactacagcctcgaactcctgggcttaagcgatcctccccacctcaccctgctgagtagctgggaccacaggcgcacgccacgacacttgacaattttatttttagtaaagacagggtcttggtatttctggtctcaaactctggcttcaagcaatcctcctgcctcggcctcccaaactgctgggattacaggcatgagccaccatgcgcggcctttttttttttctctccttgataaggtactggcgagttgcaactgtttgctttcctatagcacagctgaaatgaaacagtcttttcaatgtacagattagcatcattacctcaccaatcaaaaatccctaccttgagttgttctttatatttttttgggagctttggcccttg

SEQ ID NO: 94260 - DNA, 1346 bp, Homo sapiens
tcctgaacgctgaatgatctggaactatggtgactgactgcaaagttcagctgtgcgtgcgtgggcccgtgagcgcagggcgtggattctgcctcccaggtctaacgtaaccggggcgcggacatctgcgaggcgcttattttaccgtggcggcctccggctaccgatctgcagttgcgtcctttcctgccagtgcccttccctccccgaggtcactcgcgccccttccccgccccgttccgagagagggtcaagcgccctggtctggggctgcggctccaatagcctccgctcggtccccctgcggctcgcaaggagaggacgcgacagaaaagggtttctgtctctctccaggagcgggccggctgagggagagaagctgctgggactgaggttcccgaaagtgacgggtcagccccgaccctgagcggcagctaggcccagcgcgcgcacgaaggggcgggggccgcgtaccaggctgtccctgcaggcgctccgtactcgtccgagcccacgagcaagaaaaccgtcacacccctcagcacgcgacttccttccgggccgtcgcttcgatgacgccatcaattcacgcgagaagaccacacccccgccccgcgctcgtctggcccccgcccctcgcgctcccagcggtcaatggccgtagtggccgccagggatcgcccgcgacttggtcggtgcggtcctggacctcggtcttgggtatccgtcctggggctggggatgagggcggtgttggtgggagctccccgagagcgagcggcaggacgcgcatgccccggagtactgagacccagggcgaacctttccaaggcgttgactttggggattgctccggatttccttttgcattaggccgaacctggttcgttttggtttttttagagacaaggtctcgctcttttgcccaggctgggagtgcagtggcacgatcatagctcactacagcctcgaactcctgggcttaagcgatcctccccacctcaccctgctgagtagctgggaccacaggcgcacgccacgacacttgacaattttatttttagtaaagacagggtcttggtatttctggtctcaaactctggcttcaagcaatcctcctgcctcggcctcccaaactgctgggattacaggcatgagccaccatgcgcggcctttttttttttctctccttgataaggtactggcgagttgcaactgtttgctttcctatagcacagctgaaatgaaacagtcttttcaatgtacagattagcatcattacctcaccaatcaaaaatccctaccttgagttgttctttatatttttytgggagctttggcccttg

SEQ ID NO: 94261 - DNA, 701 bp, Homo sapiens
acttctgtgttttaacgaaactttctttatataaacaggctctggttggatttatcctgcagactgcagtttgtggatccatgttccagggcagcaggttcctggggcgaaaagcaccaggattttgagaaaggagggctgtcttgtgggatggttccctgatcatggatatgccgagacacatccactgtactgcagtctggttgaattacaggacattttaaaacaaatttttttgagacagggtctctctgtttcccaggctagagtgcagtggtgtgatcatagmtcacagcagccttgaactcctgggctcaagccatcctcccgtcttagtctcctgattagctgggactacaggtgcgcaccaccacgcctggctaactcctaaatatatacttttttgtagaaactgagcctcactatgttgcccaggctggtcttgaactactgggctcaagagatcttcttatcttggcctcccaagtgctgggattccaggcatgagtcactgtgcccaggcccagacattttttctttttcgagacagagttttgctctatcacctaggctggagtgcagtggtgtgatcttggctcatcgcagcctctgtctcctgggttcaagtgattctcctgcctctgcctcctgagtagctgggactctgggcctgtaccaccacacctggctattttgttttt

SEQ ID NO: 94262 - DNA, 583 bp, Homo sapiens
tccgcatctggctgaccgcagggccctggctcttacttttttttttttttttttttttttgagacctagctcttaacattttaagcacagagaagcaactagagaaccaggaaggctaagctgcaaaaaacagactacagcgggacatcagagaagagagcaagtgtgtgggctggggttggttaggggagaggaatcgggagatggtgacctgggaggaaagaatgtcccagataaagactgggggttaagaagggtgaactgagtctcagctgtgtgtgtctgcttgaaggkggaggggggtgactctctatttgactctcagcttcattcatagctactcccacctgatgggctgattccaagcattcttttgggaagctaaagaacttcaacttgctgcgtaggagatacaagtgtttacatgtcatgggtacatatgtggcagagtggagaagaatttgtttggaattggatttaaatcggacactgccaactactcactgtgtgtctttgggagtctctcagttgcactgagttcagtcgtattgcctttaagaactggatagtaataattagatta

SEQ ID NO: 94263 - DNA, 1885 bp, Homo sapiens
aaacagacccttaaaagcagaatttctgggtcaaaggttatgaacattgtttaagtcttttgatgaatattccagatcactttccggaaagcaaacacacgcacttctcagccttcttgccacatttctgtttcctgggcttccgtggcatttcgtttgaatctttcatctagcagtgactgcatctcctttataataatttatttgctctctgtctcctcaactagactgtaagctgttagaggtaagggccatgtctaattcatctttgtgcctccctagagacctagtccatggcaggtgcccagtgagcatttgctgagctggactgaattgatcatgagttgtcagttcctttccacattgggctggaaatcaggaatccagatgtttgctaataaatcagaaggccccaaatgtctaagaggaaaaccccagcactcactgcatgctggtaggggtctctctctgtccatctctgtctctgtctgtcttgggctctcttgtttgtgtcttccctacctgatagttgaataagagaagagcccaatttaaaagctatattttctaactcagaaacagaaagtaaatgctgcatattcccacttataagtgggagctaaataatgtgaacacagggacagaatgtggaaggataggcattggagactcaaaagggtgggaggaggggaggggcatgaggggtgagaaaatactactttttttcttttgagacaggatctccctgtatcgcccaggctggggtgcagtggcatgatcatggctcactgcagcctcgacctcctgggctcaagcaatcctcctgcctcagcctcccgagtagactggcaccaccacaccaggctaatttttgtattttttatagagatggggtcttgccatggtgcccagtcttgtctggaactcctgggctccagaggtccacctgcctcagcctcccaaagtgctgggattacaagtgtgagccactgagcccagtggagaagttacttactaggtgcaatgcatatttttcgagcgatggctacactagaagcctaggcttctgatgaaccagcggctgatgggggccctggactcaggaaggcctggctcacagtttcctttagggggtaccctcaggaccctgcctcctttcctttgccccatctccttccctttgcccccccaaccccgctgccctcactgggggtgtctgttctcaagctcaccccgggtctggggcattcctgtggccagggctctgcagagccctgctggccccctccctctgaaggctgttttactggacactgccttgttctgggctggacactgagcagcttagaacctgcagytcaaccttttgaaagcagctgggacaaagcccctgtgtccccggagagcccctgggggccgcctctgagagcccgggagtgtttgccatttgctcaggagagtgtcgctcaaagctgagctgggctgtttcccctttccaggatgtttggcttggaaaagcggtgagggcttcatctggaccctcctgttttgagatggagacctggatgacccctggcctggcttcctgtggcctatttgcgctttctctgtcacactcctgcgtgtatgacacatgcttgctcagtgttctaagtgcattacaaatagtaactcatttcatcatccctcaaacccagtgaggtaggtgttattatcctcagtttatagacaggaaactgaagctcagagacacaaccaagctagccagaggctgggccaaggcttgaaccaggtgatctggtttcagagttcagagtcctagccttggtgtcgggtctgtgggtcctggttaggcaatgtgagcctactggtgtgtgtatgtgtg

SEQ ID NO: 94264 - DNA, 754 bp, Homo sapiens
cctccaagttagaggactacatttacagcagcttagatgaacagaaaggactagaagtgagagtgatggtaacaagggcagtcacyttccatctatagtgctctggagttgatgacagtgctccgtgtattaggtttcctgattaaaaactgtttattttgtagcagaggctactgagggccggaggttgttaaatgacttgcttgaggtcacgcaggtagtgagtgataaagtcagcctcctaaccagggttttccagtcctaactctgatacaaagtaactgtgtgaagacattgcccatatctaggccccagtctcccaatctgtgaaatgggtggattgttccactggcaataagatgtggtgttttgttttgttttgttttgttttgttttgtgacagggtctctctctctgttgcctgggctggagtccagtggcatgattccagctcactgcagcctcaaactcctgggctcaagcgatcctcctgctgcagtctcctgagtagctgggactacaggtgcacaccaccgtgcccagctaagttttttttttttagtttatatggggtctcactatgttgcccaacctagttttgaactcctggcctcaagcgatcctgccttggcctccctgagtgctggagttacagatgtgagccaccgtgcccagccagatgtgtgatcttatggtttgccttttgctcccacacgtcagaactggtgatctgcttgcccttggaatgccaggg

SEQ ID NO: 94265 - DNA, 895 bp, Homo sapiens
  misc_feature (1)...(895): n = A,T,C or G
atgcattctttgagctctttgctctgggactgtggtcaaacagacaacttcatggctttgaaggcaataatttccaactccctttctgcctttgcagtgagtcatggagtcaccaaaggaaccattaggatggtcctctagtgtgtggtattattctttatatagaagtatttgtttacaagttgctaacataagcaccccaaaaaagtttagagtgcaagtaagccaccaactactgttgctatcaaaaacacaccatctttaatgtgatttaggggtcaggaggyatgactactgagatccaagtgctacaatgttctcctctctgccctcctccccatcaatcccctggcagattaaattactgaaatgtatactattgaaaactatatttaagaaaatgtaatcattnatatatttgtctcagatctataagcagcttgagtcagaggactatatctttacatttttgtttctcaaatcaatgttcaaaaagtacttggcacatggaatttccttaacatatattgactgatgaatgagtagtattagtgtattctgatcttagacatggcaccaagaaatatacaaccttagtcaaatcacttcatatttatgagcttctgattccacatctcaaaaataaaagagcttccccaaatgatttttgaagttccttctagcttcaacatttaaaaatccttttgcttatttagagatgtctgaggttaggttttacccagatttgattactatacaagggaaacagtaaaactggagataagacttgtctcaagaaatattaacaataagttgggtcagtggcatttctaaggtgcattaagaattatagcatctttctccatggtgagtagtgccaatagcattgttaatt

SEQ ID NO: 94266 - DNA, 906 bp, Homo sapiens
gcttcttggctgcgctcaggttttcctatgatcagagtgggtcacacttcccttgcttccctttgctttctcctgcacacaagctaagaccatggaggtcttatagctgttattgctttgtctttaccctcttgtatcttgaggtccatgaagatatcttgtcacctggttttatgtaaatgttcgtgggtttttggttttgttctccagtcacttttttatgtttatgtgtacaattcagaaaaattaaaaaactttgccaccatcttcctagaatcctcacttaacaactttatggaaaaattttaaaatatatattctgtggctattaatcctgtattcttagaatgcttgcttttgccttttgaggctagggcacctctgttcctttagtctcaaatggaatagtttcagtttcaatagcactttgcctctttgaagaacttttataaaattcttatgtttgatttattttcactataatttgccctcgatacctaaatgttattttttttctacttttcttattgaatagcatttatttattgggtatataaccaatattatttgaatagatcatcttcttaaagtgggagtaccagaaccaaaactaatttagctaatatgtattaaacttacacagatagaatgctctattaggtgcgggtgatacagcaatgtaatatttatagatattggccatatttttttatttatgaattcaattaggtagtaaatgatagggaaaaggaaaattatttggatatactctttaagattaaacaagtgtatgagcaaggcactgttaggttctaaagatagaatggtttacaagacacatttcttgtatttmttagtgtgttgtgaggggacagctgagtaaaacaggcaattaccatgtttatt

SEQ ID NO: 94267 - DNA, 567 bp, Homo sapiens
cttattttttattttaaaaattgtttaaacattctttctataattatataagtacattcgcaacaaaggcagcttaatgtctttctattcttttggatatttgatttctaaaagtgaactacaaagaaaggtcaaaattttatatgaaagttacaaactatttattttgcaactttaggcatccaggagaaaaatattcggaggagatactctttgctggagaaaaatcacactgaattattacttatcctaacggaggtgtctgggtttgctatatagccaacttcccttgccatacattgtttgatagtttccagatcaattctcatcagaagcagattgcagttctcctagtctcaatttttgttttacttagctgttgtgtcaattccagcctatgcagcaatttcagtgtatgtgggattgaggtgtctatggcaagtcacccgggtgaccacagactcattaagttacaatgctcctgttatttccctgactccattattttattcttctgatttgctctacacrcaatagtcataatcattctttaaatacaaatatgat

SEQ ID NO: 94268 - DNA, 569 bp, Homo sapiens
tccagcctgggtacagagtaagactccgtctcaaaaataaataaataaataaattaattaaattgaagaaataacccagttttttagtttcactagctacatctcgagcagtcagcagccacatgtgaccagcgtctgctatactgaacaacacagacatggaactctcccataatttcagaaagttctattggacatgttaattttttaaaataagcattttttggaatcataaacaatatttacatctaatagaaaacagatgttccccttcctgtgtccaagtgttctcattgttcaattcccacctatgagtgaggggcctgtcatggggtggggggagcggggagggatagcattaggagatatacctgatgtaaatgacgagttaatgggtgcagcacaccaacatggcacatgtatacatatgtaacaaacctgcamgttgtgcacatgtaccctagaacttaaagtataataaaaatatatatataaataaataaaaataagtaaataaataaataaaaaagaaaaaaacaggaaacagagaacaaataatagatggggaa

SEQ ID NO: 94269 - DNA, 661 bp, Homo sapiens
gccttctacatggacctcctgaagagaacaccttttgttcagctcttttcctcttcataaagtgccttgtttcttaataattaagaccacacagcagtacaaaccaggatctcccagggagccctggggtttatctcatgatctcagccttcaccagctctgtagccccagcagctccagagcagctggagagacatttggggaccagcagcccctctgtggctctgcctttgcttgccagtggcctgtgggccacagctgcctactcggaaccctgcggagygttctgtctctaatgctcacaagtgcctggcaaccaggatagaagatcagttgtgctgggggaggggagccagccaggttgtagaaacagcatccctgactttgttctgctaactgtgcagagagaggtgatagtctccgcccaggccatgagggacctggaaatggctgatgacacggtggagctcggccacaccaggcccagctggccccacagcaaaccagagggtccaagtgggtccatgccctgtcccttcctgtccacaagggcctctcaggggacagtggtggggcccatccctgggtgaggctcagtttcctgatttcaagtttccttccgcacagggaagctgggtcctgcccaccaaggtcccaggga

SEQ ID NO: 94270 - DNA, 660 bp, Homo sapiens
tcagaaaacttaatttcatcactattaagtattctaaaagaayatcttcagagtggccctgaagacagtcatggatgagggttacagacgtgagctgagcagggcagccacgaaggagcaaggcagggccccgtgggagacttggaaggtggcaatgtttatgtagagatataaataggttttgataagtttggtctaaaagaaatagtcatctcaatttgcagttaagcgttctatgcttctccccaaaacttcattgctgtgcccagcagggtgcatgttttacacagatgatgggcaaacattcttaagtgcaaaaggaaaccagacaaaaagtccccatgacgagacagccgagtgggagtgcatctgactctgactgcaggcccaaaaagatggaggtgaggaccaggacaggagctggaccactggggaagcagtcaatctaattttttaagattaaataaaataagtccaagatgaaagcctccttgagctgtcgtccatacataataccccttaaacaaaaaaaaagcggggttggtggtggggactaatattactgaaaaaacatactgagaaatgtaaaatttggtctttagtctttgaaaaacaaaataaacttggcatctgactttggttttctcacatcagagtcta

SEQ ID NO: 94271 - DNA, 660 bp, Homo sapiens
tcagaaaacttaatttcatcactattaagtattctaaaagaacatcttcagagtggccctgaagacagtcatggatgagggttacagacgtgagctgagcagggcagccacgaaggagcaaggcagggccccgtgggagacttggaaggtggcaatgtttatgtmgagatataaataggttttgataagtttggtctaaaagaaatagtcatctcaatttgcagttaagcgttctatgcttctccccaaaacttcattgctgtgcccagcagggtgcatgttttacacagatgatgggcaaacattcttaagtgcaaaaggaaaccagacaaaaagtccccatgacgagacagccgagtgggagtgcatctgactctgactgcaggcccaaaaagatggaggtgaggaccaggacaggagctggaccactggggaagcagtcaatctaattttttaagattaaataaaataagtccaagatgaaagcctccttgagctgtcgtccatacataataccccttaaacaaaaaaaaagcggggttggtggtggggactaatattactgaaaaaacatactgagaaatgtaaaatttggtctttagtctttgaaaaacaaaataaacttggcatctgactttggttttctcacatcagagtcta

SEQ ID NO: 94272 - DNA, 660 bp, Homo sapiens
tcagaaaacttaatttcatcactattaagtattctaaaagaacatcttcagagtggccctgaagacagtcatggatgagggttacagacgtgagctgagcagggcagccacgaaggagcaaggcagggccccgtgggagacttggaaggtggcaatgtttatgtagagatataaataggttttgataagtttggtctaaaagaaatagtcatctcaatttgcagttaagcgttctatgcttctccccaaaacttcattgctgtgcccagcagsgtgcatgttttacacagatgatgggcaaacattcttaagtgcaaaaggaaaccagacaaaaagtccccatgacgagacagccgagtgggagtgcatctgactctgactgcaggcccaaaaagatggaggtgaggaccaggacaggagctggaccactggggaagcagtcaatctaattttttaagattaaataaaataagtccaagatgaaagcctccttgagctgtcgtccatacataataccccttaaacaaaaaaaaagcggggttggtggtggggactaatattactgaaaaaacatactgagaaatgtaaaatttggtctttagtctttgaaaaacaaaataaacttggcatctgactttggttttctcacatcagagtcta

SEQ ID NO: 94273 - DNA, 729 bp, Homo sapiens
ccttccaattgcaccattctctgtattttctcagtaagtgtctgcaggatgagtgagtacatttatgaatgaatcttccatttaaatattgagttccttatctcatacctgcagtgcaagagaaagcccctcgtgttgcagtcagaaaaccattgctgaccttggttgaccttagatgggtcacctaacctttcgaggctcaactccttcattcataaaaatgaatggatgctttcttgaggttgctgtgaggacatccctgagatgatgcctgtgaagaaagtctgcaaactgtgaagcactatacagattaacacagcaacatactgcatgtgcatggctgtgcatgcgtgtatgtgggtgtaaatgtgaggctttttgttcttggcaactgttcataactgtacctcggtgaactcttaggtaggtcaggaagctaaggtttactattgtgcagtgttcagcatgcaactgytttttggaatgtcactgtctttctgaatgttccttttggtttattaggttagttcacattaagaagaacttggtgaggaagccacatggaagaaatggaaaggctttctttggcagctctaccctaagagggcaaaggggtcagttctgcgagagaacccccacaaggaggctggcccgggacaagcattccaggcctgtctcaagtctgaatacaaataaatcccttctcaggtggttttcttcataaggatc

SEQ ID NO: 94274 - DNA, 575 bp, Homo sapiens
ctctctctcctgagctgaaaggttggtttctttgaggtttccaaatggcagcttatgtcttctcagaagggctacagcccatttgttggaagccaaaaaccttacctcaatggcccaggtgagaggacatggctcagggttgcagtctgagtgtgaagcacataaacatctcccataataggcttggtggctgggcctggtggctcaagcctgtaatcacggcactatgggaggccgaggtgggtggatcacctgaggtcaggagttcaagaccggcccagccaacaaggtgaaaccctgtcgctactaaaaatacaaaagaaaaagaagaagaagaaaaaaaattygctgggtgtggtggtgcacacctgtcatcccagctacttgggaggctaagtcaggagaatcacttgaacccaggaggcggagatatcagtgagccaagatcgtgccactgcactccagcttgggcaacagagcaagactccacctaaagaaaaaataaataggcttggatatggcagagggtgagagacaagtagctaggatctcaaggaagaaggaaaatagagatg

SEQ ID NO: 94275 - DNA, 575 bp, Homo sapiens
ctctctctcctgagctgaaaggttggtttctttgaggtttccaaatggcagcttatgtcttctcagaagggctacagcccatttgttggaagccaaaaaccttacctcaatggcccaggtgagaggacatggctcagggttgcagtctgagtgtgaagcacataaacatctcccataataggcttggtggctgggcctggtggctcaagcctgtaatcacggcactatgggaggccgaggtgggtggatcacctgaggtcaggagttcaagaccggcccagccaacaaggtgaaaccctgtcgctactaaaaatacaaaagaaaaagaagaagaagaaaaaaaatttgctgggtgtggtggtgcacacctgtcatcccagctacttgggaggmtaagtcaggagaatcacttgaacccaggaggcggagatatcagtgagccaagatcgtgccactgcactccagcttgggcaacagagcaagactccacctaaagaaaaaataaataggcttggatatggcagagggtgagagacaagtagctaggatctcaaggaagaaggaaaatagagatg

SEQ ID NO: 94276 - DNA, 535 bp, Homo sapiens
cattttacaataaacctgctgttaccagcagatactgataaatgttcctattcctctttacaaacttcatcaatccattctaggctgttacttcacattgccactaagagggaaccacaaggatcaggaattacttttgtgaaaatctgaatataatttgggtacctccacaatcacccgcctgagtctccgtaattcttccaatatactgctgagagcagtggaacagaattgtcattgatcttggcayagaccatcctatttcccaagactcattctccctagggttttgttcttacggcattgaggctgctgcatcctttccagtttaaaggccattctcctcaatggaagaaaaagagatgaaatggggcttaagacttgagtaaaaccaactgccttggagtaattgattcccactgggggtctatttcctgctcgtttgtcttatccttccacaacaatatcttctcttgctctctttggcatcttttccaagccagaaattttctgggctttgcacctcctggtaaaa

SEQ ID NO: 94277 - DNA, 1119 bp, Homo sapiens
ttcccccactgaagatcctgatttatttgggcaagggagtcgctgggcaagaacctacctttttttttttttaaaaaaacaaacacaggtgatgctaatacaatagtctctagactacatatattttgagaaaatagacctaaactataaagggaaattaagaaatccttagtaccacttagaagttgccatatctatttctgtgatgctaaaggaaaattttactgtaagttgttttttttggcatcaccccagagcataacacacaattagtatctaactcaatcatttctcttcttaaaagcactttgctgtccctcttggatgggcagggccactttccaatgtgctgcaatagcattttgttaaaaccaacatctcatgttaacacaactatttgtgggcttacacaacaagaatagatggagaaatatatcccgggaaggaaaatattattattaaagaaaaacctcaactgactagccacatttttatcctgtagggatagcagaattcacatcatggaaatttttatgttttcctttagaaaaactacttacggagccctttggttataaaacaaaaaggcccrgacccatctagattagagaagaagaaagggagctaaactgatcttcatgatgaacttcaacggagtcattcctgaggatggagggaatgatctatgctggaaagggctatgtgagttttctttaaccaggctccagaaggaataggtttccaatccctggaacttagagaagccagtgcagaaatgggctgaagcaacgtgatgaaagagtgagatgctacagaagagacaaccagggagaggttccctggggcagagaatggtggatgagatttaggatcagtgttgccagattctgtctgttgcagattattgcctttttatcctagtcctttgtatacaatagccttgtgttagtgggtcatgttttaaagcacaagaacaaggcagattggacagacctaaagcagtataaggaggtagagtcagatggcccaaaatgatgaaagagaggattggagtaggagtcgggtctgggactcctcagaattataggtgagtgtgctggatatcctcattcatatgca

SEQ ID NO: 94278 - DNA, 1119 bp, Homo sapiens
ttcccccactgaagatcctgatttatttgggcaagggagtcgctgggcaagaacctacctttttttttttttaaaaaaacaaacacaggtgatgctaatacaatagtctctagactacatatattttgagaaaatagacctaaactataaagggaaattaagaaatccttagtaccacttagaagttgccatatctatttctgtgatgctaaaggaaaattttactgtaagttgttttttttggcatcaccccagagcataacacacaattagtatctaactcaatcatttctcttcttaaaagcactttgctgtccctcttggatgggcagggccactttccaatgtgctgcaatagcattttgttaaaaccaacatctcatgttaacacaactatttgtgggcttacacaacaagaatagatggagaaatatatcccgggaaggaaaatattattattaaagaaaaacctcaactgactagccacatttttatcctgtagggatagcagaattcacatcatggaaatttttatgttttcctttagaaaaactacttacggagccctttggttataaaacaaaaaggcccggacccatctagattagagaagaagaaagggagctaaactgatcttcatgatgaacttmaacggagtcattcctgaggatggagggaatgatctatgctggaaagggctatgtgagttttctttaaccaggctccagaaggaataggtttccaatccctggaacttagagaagccagtgcagaaatgggctgaagcaacgtgatgaaagagtgagatgctacagaagagacaaccagggagaggttccctggggcagagaatggtggatgagatttaggatcagtgttgccagattctgtctgttgcagattattgcctttttatcctagtcctttgtatacaatagccttgtgttagtgggtcatgttttaaagcacaagaacaaggcagattggacagacctaaagcagtataaggaggtagagtcagatggcccaaaatgatgaaagagaggattggagtaggagtcgggtctgggactcctcagaattataggtgagtgtgctggatatcctcattcatatgca

SEQ ID NO: 94279 - DNA, 588 bp, Homo sapiens
cacatcagtgaaatcaggagtaatactaagaaagaaagggcagttagtttctttgcttagagctgcttgtgttagctttagaaagtatagatagagtaaaaacaatattggagttccaaaaaaaaaagaatgagtaaaaatgtactcctgtacttcaggaatgcaataactccattattcatcatcaggaagatttctaaaggctggtccattgttccatatgcattaattgtgactacacttagaaaattgcctaatattagaaaaactgcactctaaaataggtttcccaatatctctgatatgaatcaactggaagtgtattaaaacaagacaaagcaaatttctaacttcttcacttggaaatcctgacaatctgtttatctatttgtttcaataagctctcctttccctcatgttctgtgattcctctcatgagagaaatttgggagcaattactctaaaactactcggaagataaatatagctcaatagcttactaaatctgtaaagcatgmtgaaagcttgaatgataaaaatgtgcttttaaaaatagttgtaataattataacagttaagattcaattc

SEQ ID NO: 94280 - DNA, 316 bp, Homo sapiens
gtcttaaagattatttgggtgggtagcaatgaagacatgagatggggaccccaaaaatgtaatctaaggctcaaaagttaggtgccatacrataaactcagaggctatgaagagggaggcatgcaacttaatgaaattctttatgatgaacagttaacaggttatcctagtactcaaaaggaataccaattgccacaggatggtaatagagctgagagtctctacaattcaatagatgcccttaacaggacaaaggtaaagaatacacgtaccttttgagaatatgcacattaggattctcaggttcttgactctg

SEQ ID NO: 94281 - DNA, 316 bp, Homo sapiens
gtcttaaagattatttgggtgggtagcaatgaagacatgagatggggaccccaaaaatgtaatctaaggctcaaaagttaggtgccatacgataaactcagaggctatgaagagggaggcatgcaacttaatgaaattctttatgatgaacagttaacaggttatcctagtactcaaaaggaataccaattgccacaggayggtaatagagctgagagtctctacaattcaatagatgcccttaacaggacaaaggtaaagaatacacgtaccttttgagaatatgcacattaggattctcaggttcttgactctg

SEQ ID NO: 94282 - DNA, 587 bp, Homo sapiens
tgcttctttgtacttggaacacagtttatttgagctagaggaaaggaaagttctagaattcctgtttcctcagcctgcactgtatcagatccaggatatgtctgcatttcatcaggatcaagtaagatacataaccttatatctgtaggagccagaaaaaaaaaaatctattcctgataggcatggaaacttagtccacatgaaagacagaagacatctaacagctgtctgtcttgggagcattaaaacccagacaccaagacacactagacagtccatctctgggttgtgatctctcagaaacatcttagtagttaatgcactgttcatttagggagtccccatcctggtccaggccaccctcctagaagctgggcggcagctggacgggcctrccttggtggcattcaagcaagcctaattggattaggttggtgcaaaagtgattgcggtttttgccattgcttttgatggcaaactaactttaagtcattaaaataagacccaacgcttataaaagagttcatatccacctcccaataacttctttagttccatgcagcctcaatcagttcctccattcaaag

SEQ ID NO: 94283 - DNA, 631 bp, Homo sapiens
agcacacccaggaggccggccctgaccacactgttctctgctggttcccgaagctgatgggctctgtcttaggtcttcttactttgaaaggtctcccggcaggctgtggcaagctgcgcggatacacttttctaaacgtctgcatttatttcctaaaagcacaaatggcctggactagctagtgggtgtggaaccgagcccctagttcacagctgtaccccaaggctggagagggggttgccggtggtggcaggagctctgggctcccagttcaggatgggccacagggcgtcaagcagctgtgagcctttaccattgagctcactgcttggaaataaaacccttcctctgggccttgggcatccacygggagcttttctcccctttcctgggaggacagcaagccttttccaaccttctgccttcaaagagaagcagggtcatagaagtgctcagtgtcccttccccagtggctggacacttgctcctccagccttcaccccctggagagaaggggagtctgcggagccagtgcctccctgcccagctgggccacacgatctggtctgcgggtgtctgggaggaacctgcttcggagaggctgcgacctcccagctagactctcccctta

SEQ ID NO: 94284 - DNA, 570 bp, Homo sapiens
caagccagaaaacaaccagagcatagaaaatgtgagtcatggtctgggcacggtggctcacccctgtaatcccagcactttgggaggttgaagcgggtggaacacctgaggtcaggagttcaagaccagcctggccaacatggtgaaaccccgttcctactaaaaataaaaaaaattagctgggcatgatggtatgtgcctgtaatcccagctacttgggaggctgaggtacaagaatcgcttgaacccaggaggcagaggttgcagtgagccaagatcaaaccactgtactctagcctgggcgagagagtgagactccatctcaaaaacaaaaaaaakaaaaaagaaagtgtgggtcattgcaagaagttcagaatagccagaacgtgaatttctatgggctcttgaggccatgtaaagaagagaatcacattgttttattagatagcattggtgaactattacattcaatgaaattctaaatgcactggaagctgtcatcttgatgatatccctcataggacccaattccagacttccgtctcagtgctatacatagactctgctatg

SEQ ID NO: 94285 - DNA, 2608 bp, Homo sapiens
tggaccttacacctgtgtccacttcttcagatgtgtcctggcctcagtgctcctctgtccttcccgtgacaggtgtccctgtgaacagcagagtgtcctccaaaatccagcagcttctgaacaccctgaagaggccaaagcgccctccactgaaggagttctttgtggatgattttgaggaattgttggaaggtaagagttgtccaactttgagcttttctgtttgtatgaaaagggtggccacgaagttgagaaacacaggcaaatgtatattatacatggatattgctatatatattctgtttccagactcagtggtcactgggtgtaatggtgaatttagaatcacatgactgcttcctttatttgagcaggtagaaaatttgctgctcatattcaagtgacttggcatttcataaaaattcttctacggttttatttaacttacattatttaaatgtttaatttaaactttaactctgaaatacttaccttcttgtggttttaaagtatttaattttcagcatagatttggctgcttttcagaattttagcctctcatatgtgaatgaaatacgtatttaggaagaatacacacatattttttaaaagagaaaactagcaagcagaaaccagaaatgaagccagtacaaacatgtgagtgtgtcgttagggccacaggggccccatgctggtcctactcgcagaccttggctgtttgtacagtgacactgctgacagccgaccagcccagagtctcctccacacccgaggattagacatagctttcaggagattatttccccgttgtaatcagatagtgtgtattagtcagggttctctagagggacggaactaataggatagatgtatacatataaagggargttcattaaggcatattgactcacacgatcacaaggtgaggtcccacagtaagccatctgcaagctgagagcaaggaagccagtctgagtcccagtgctgaagtacttggaatccaatgttctagggcaggaagcatccagcacaggagaaaggtgtaggctgggaggctaggccagtctagtctttccacgttcttctgcctgctttattctggccgtgctggcagctgattaaactgtgcccacccagatttagggtgggtctgcctttcccagtccactgactcaaacgttaatctcctttggcaacaccctcacagacacacccaggaagaatactttgcatccttcaatcccatcaagttgacatcaatattagccatcacacagtgcctttcaaattcagagtttattggtatgaatgcatcttagagcagtgtttcttaccacttgggcaaattttggttatacagctcctagaaaaagattaattctttttaaagtaaaaaacaagattaaagtaatctttttccaggagctatataatcaaataatctttttttttttttttttttttgaggcagagtctcactctgtcgcccaggctggagtgcagtggtgcgatctcgaatcacttcaagctccacctcctgagttcacgccattctcctgcctcagcctcccgagtagctggtactacaggcgtccaccaccacacctggctaatttttttttgtatttttagtagagacagggtttcaccatgttaaccaggatggtctcgatctcctgacctcatgatccacccgcctcggcctcccaaagtgctgggattacaggcatgagccaccacgcccagcctataatcaaataatcttttaattctttttctttgaacatagtgatagttgtttggatccctaggctgaagtggtggttctgcttgctttcctcctgtgtgagtgggccaccaggtcctatctccaggctgtggatacctggctgttcaccgctgtggtgccgggggtagcagaggtgccacagtcctgtccagaagttgggaaagtgggaaccactccaaggtcacctttgtctgtgaggttgtggtcaccaggatggtgggttgtttttaactttatttcacagccgtcatcatccatgactaaagctcctttaatcctttggttagttgtcggtgactgtgatgcaaaaatcgaaacaaattattgtaagcttttttatagttgggattaaaaaacaatattataaactatgaatgcttaaaaacagaatgtgttcgtggtgctctgaattgctgattttaaagttttgattttgcttgtagttcagcaaccagatccaaatcagccaaagcctgagggaagcgagacgagtgtgctgagaggggagcctctcactgcaggtgtcccccgaccgccgtcgctgttggccaccttgcagcgctggggcacaacacagcccaaatccccctgtctgactgccttggatacaactgggaaagccgtctacactctcacctatggcaagtgttaacagaaagcagttgtgcttctgggttagctgtagaatgtcacacacataacacagcatagacatacagcttgataaatattcctgagaaaccagcacagctggcagataaatagaacattgacctataccaggtacccatcccaccggaggggaccactcactgatgc

SEQ ID NO: 94286 - DNA, 2608 bp, Homo sapiens
tggaccttacacctgtgtccacttcttcagatgtgtcctggcctcagtgctcctctgtccttcccgtgacaggtgtccctgtgaacagcagagtgtcctccaaaatccagcagcttctgaacaccctgaagaggccaaagcgccctccactgaaggagttctttgtggatgattttgaggaattgttggaaggtaagagttgtccaactttgagcttttctgtttgtatgaaaagggtggccacgaagttgagaaacacaggcaaatgtatattatacatggatattgctatatatattctgtttccagactcagtggtcactgggtgtaatggtgaatttagaatcacatgactgcttcctttatttgagcaggtagaaaatttgctgctcatattcaagtgacttggcatttcataaaaattcttctacggttttatttaacttacattatttaaatgtttaatttaaactttaactctgaaatacttaccttcttgtggttttaaagtatttaattttcagcatagatttggctgcttttcagaattttagcctctcatatgtgaatgaaatacgtatttaggaagaatacacacatattttttaaaagagaaaactagcaagcagaaaccagaaatgaagccagtacaaacatgtgagtgtgtcgttagggccacaggggccccatgctggtcctactcgcagaccttggctgtttgtacagtgacactgctgacagccgaccagcccagagtctcctccacacccgaggattagacatagctttcaggagattatttccccgttgtaatcagatagtgtgtattagtcagggttctctagagggacggaactaataggatagatgtatacatataaagggaagttcattaaggcatattgactcacacgatcacaaggtgaggtcccacagtaagccatctgcaagctgagagcaaggaagccagtctgagtcccartgctgaagtacttggaatccaatgttctagggcaggaagcatccagcacaggagaaaggtgtaggctgggaggctaggccagtctagtctttccacgttcttctgcctgctttattctggccgtgctggcagctgattaaactgtgcccacccagatttagggtgggtctgcctttcccagtccactgactcaaacgttaatctcctttggcaacaccctcacagacacacccaggaagaatactttgcatccttcaatcccatcaagttgacatcaatattagccatcacacagtgcctttcaaattcagagtttattggtatgaatgcatcttagagcagtgtttcttaccacttgggcaaattttggttatacagctcctagaaaaagattaattctttttaaagtaaaaaacaagattaaagtaatctttttccaggagctatataatcaaataatctttttttttttttttttttttgaggcagagtctcactctgtcgcccaggctggagtgcagtggtgcgatctcgaatcacttcaagctccacctcctgagttcacgccattctcctgcctcagcctcccgagtagctggtactacaggcgtccaccaccacacctggctaatttttttttgtatttttagtagagacagggtttcaccatgttaaccaggatggtctcgatctcctgacctcatgatccacccgcctcggcctcccaaagtgctgggattacaggcatgagccaccacgcccagcctataatcaaataatcttttaattctttttctttgaacatagtgatagttgtttggatccctaggctgaagtggtggttctgcttgctttcctcctgtgtgagtgggccaccaggtcctatctccaggctgtggatacctggctgttcaccgctgtggtgccgggggtagcagaggtgccacagtcctgtccagaagttgggaaagtgggaaccactccaaggtcacctttgtctgtgaggttgtggtcaccaggatggtgggttgtttttaactttatttcacagccgtcatcatccatgactaaagctcctttaatcctttggttagttgtcggtgactgtgatgcaaaaatcgaaacaaattattgtaagcttttttatagttgggattaaaaaacaatattataaactatgaatgcttaaaaacagaatgtgttcgtggtgctctgaattgctgattttaaagttttgattttgcttgtagttcagcaaccagatccaaatcagccaaagcctgagggaagcgagacgagtgtgctgagaggggagcctctcactgcaggtgtcccccgaccgccgtcgctgttggccaccttgcagcgctggggcacaacacagcccaaatccccctgtctgactgccttggatacaactgggaaagccgtctacactctcacctatggcaagtgttaacagaaagcagttgtgcttctgggttagctgtagaatgtcacacacataacacagcatagacatacagcttgataaatattcctgagaaaccagcacagctggcagataaatagaacattgacctataccaggtacccatcccaccggaggggaccactcactgatgc

SEQ ID NO: 94287 - DNA, 2608 bp, Homo sapiens
tggaccttacacctgtgtccacttcttcagatgtgtcctggcctcagtgctcctctgtccttcccgtgacaggtgtccctgtgaacagcagagtgtcctccaaaatccagcagcttctgaacaccctgaagaggccaaagcgccctccactgaaggagttctttgtggatgattttgaggaattgttggaaggtaagagttgtccaactttgagcttttctgtttgtatgaaaagggtggccacgaagttgagaaacacaggcaaatgtatattatacatggatattgctatatatattctgtttccagactcagtggtcactgggtgtaatggtgaatttagaatcacatgactgcttcctttatttgagcaggtagaaaatttgctgctcatattcaagtgacttggcatttcataaaaattcttctacggttttatttaacttacattatttaaatgtttaatttaaactttaactctgaaatacttaccttcttgtggttttaaagtatttaattttcagcatagatttggctgcttttcagaattttagcctctcatatgtgaatgaaatacgtatttaggaagaatacacacatattttttaaaagagaaaactagcaagcagaaaccagaaatgaagccagtacaaacatgtgagtgtgtcgttagggccacaggggccccatgctggtcctactcgcagaccttggctgtttgtacagtgacactgctgacagccgaccagcccagagtctcctccacacccgaggattagacatagctttcaggagattatttccccgttgtaatcagatagtgtgtattagtcagggttctctagagggacggaactaataggatagatgtatacatataaagggaagttcattaaggcatattgactcacacgatcacaaggtgaggtcccacagtaagccatctgcaagctgagagcaaggaagccagtctgagtcccagtgctgaagwacttggaatccaatgttctagggcaggaagcatccagcacaggagaaaggtgtaggctgggaggctaggccagtctagtctttccacgttcttctgcctgctttattctggccgtgctggcagctgattaaactgtgcccacccagatttagggtgggtctgcctttcccagtccactgactcaaacgttaatctcctttggcaacaccctcacagacacacccaggaagaatactttgcatccttcaatcccatcaagttgacatcaatattagccatcacacagtgcctttcaaattcagagtttattggtatgaatgcatcttagagcagtgtttcttaccacttgggcaaattttggttatacagctcctagaaaaagattaattctttttaaagtaaaaaacaagattaaagtaatctttttccaggagctatataatcaaataatctttttttttttttttttttttgaggcagagtctcactctgtcgcccaggctggagtgcagtggtgcgatctcgaatcacttcaagctccacctcctgagttcacgccattctcctgcctcagcctcccgagtagctggtactacaggcgtccaccaccacacctggctaatttttttttgtatttttagtagagacagggtttcaccatgttaaccaggatggtctcgatctcctgacctcatgatccacccgcctcggcctcccaaagtgctgggattacaggcatgagccaccacgcccagcctataatcaaataatcttttaattctttttctttgaacatagtgatagttgtttggatccctaggctgaagtggtggttctgcttgctttcctcctgtgtgagtgggccaccaggtcctatctccaggctgtggatacctggctgttcaccgctgtggtgccgggggtagcagaggtgccacagtcctgtccagaagttgggaaagtgggaaccactccaaggtcacctttgtctgtgaggttgtggtcaccaggatggtgggttgtttttaactttatttcacagccgtcatcatccatgactaaagctcctttaatcctttggttagttgtcggtgactgtgatgcaaaaatcgaaacaaattattgtaagcttttttatagttgggattaaaaaacaatattataaactatgaatgcttaaaaacagaatgtgttcgtggtgctctgaattgctgattttaaagttttgattttgcttgtagttcagcaaccagatccaaatcagccaaagcctgagggaagcgagacgagtgtgctgagaggggagcctctcactgcaggtgtcccccgaccgccgtcgctgttggccaccttgcagcgctggggcacaacacagcccaaatccccctgtctgactgccttggatacaactgggaaagccgtctacactctcacctatggcaagtgttaacagaaagcagttgtgcttctgggttagctgtagaatgtcacacacataacacagcatagacatacagcttgataaatattcctgagaaaccagcacagctggcagataaatagaacattgacctataccaggtacccatcccaccggaggggaccactcactgatgc

SEQ ID NO: 94288 - DNA, 562 bp, Homo sapiens
ggtggcagcagcttgctgatgacttgttttaaaactttcatcctaaataaccttttgatacttgaatatttktaagttttatacatagtttctaatttttttccgaacagatccagatacctaataagatgctggaatgtaatccctggacaatccgtgtcctggcagcatttggtcttcctctaagcacctggctccgctgttctcaggagtgggttctgaagtctctggagaacaggatacgtggagggttaggaaggggccaggcctagagacgggagactccctcccggagcaggtggaggcacaggaccattcgctaccccatctgccgacacctgcgggggagcccaggcattctttgtaagccctcctgaccacctggctcaaagaaaacagaagcatggagaccgccaagtattttcaagaaataaccccatgaatattccatcacttttttagaaagaggggcttggggcaggcagaggagagaagggagagcaaactgagagccaagtttccagacagtcctgcaggaggagaggatgcagctgcccagagg

SEQ ID NO: 94289 - DNA, 562 bp, Homo sapiens
ggtggcagcagcttgctgatgacttgttttaaaactttcatcctaaataaccttttgatacttgaatatttgtaagttttatacatagtttctaatttttttccgaacagatccagatacctaataagatgctggaatgtaatccctggacaatccgtgtcctggcagcatttggtcttcctctaagcrcctggctccgctgttctcaggagtgggttctgaagtctctggagaacaggatacgtggagggttaggaaggggccaggcctagagacgggagactccctcccggagcaggtggaggcacaggaccattcgctaccccatctgccgacacctgcgggggagcccaggcattctttgtaagccctcctgaccacctggctcaaagaaaacagaagcatggagaccgccaagtattttcaagaaataaccccatgaatattccatcacttttttagaaagaggggcttggggcaggcagaggagagaagggagagcaaactgagagccaagtttccagacagtcctgcaggaggagaggatgcagctgcccagagg

SEQ ID NO: 94290 - DNA, 562 bp, Homo sapiens
ggtggcagcagcttgctgatgacttgttttaaaactttcatcctaaataaccttttgatacttgaatatttgtaagttttatacatagtttctaatttttttccgaacagatccagatacctaataagatgctggaatgtaatccctggacaatccgtgtcctggcagcatttggtcttcctctaagcacctggctccgctgttctcaggagtgggttctgaagtctctggagaacaggatacgtggagggttaggaaggggccaggcctagagaygggagactccctcccggagcaggtggaggcacaggaccattcgctaccccatctgccgacacctgcgggggagcccaggcattctttgtaagccctcctgaccacctggctcaaagaaaacagaagcatggagaccgccaagtattttcaagaaataaccccatgaatattccatcacttttttagaaagaggggcttggggcaggcagaggagagaagggagagcaaactgagagccaagtttccagacagtcctgcaggaggagaggatgcagctgcccagagg

SEQ ID NO: 94291 - DNA, 562 bp, Homo sapiens
ggtggcagcagcttgctgatgacttgttttaaaactttcatcctaaataaccttttgatacttgaatatttgtaagttttatacatagtttctaatttttttccgaacagatccagatacctaataagatgctggaatgtaatccctggacaatccgtgtcctggcagcatttggtcttcctctaagcacctggctccgctgttctcaggagtgggttctgaagtctctggagaacaggatacgtggagggttaggaaggggccaggcctagagacgggagactccctcccggagcaggtggaggcacaggaccattcgctaccccatctgccgrcacctgcgggggagcccaggcattctttgtaagccctcctgaccacctggctcaaagaaaacagaagcatggagaccgccaagtattttcaagaaataaccccatgaatattccatcacttttttagaaagaggggcttggggcaggcagaggagagaagggagagcaaactgagagccaagtttccagacagtcctgcaggaggagaggatgcagctgcccagagg

SEQ ID NO: 94292 - DNA, 702 bp, Homo sapiens
ccagcaggctttagacccaaggaaaaccaatgtttgtttcagtttgagtcggacggcaagcagagatgtcccagctcagcagtcaggtgggaggggctccctcttacttagcctttttgttctattcaggtctacagttgatgagatgaggtcctcccacattagggaagttaatctgctttagacagtccattgagtaaaatgttaatttcatccagaaacaccctcacagagacacccagagtgatatttgaccaaaagtctgggcaccccatgatgcagtcagaagacacataaattaaccatcacactaagagtgattcatctttttaggtaaatgaagaatcaatcacattattgatagcattcatgataggtagtgtggtatctgagttgccaaaatgacatacccaaatgaagagygtttgtagctgtgaaattcagtgattcaacttagagatgtggatttctgaccattctgcctgaaaatttacatattgaaatttatatttattaaaaatggtttttatattatagttgctgtgttaagtagatatttttggaagatatatctaataaataagttatttctgaatttcatttcaggataataaaggtatattttcaatagtttttaaagaaaggggatgaggcatgatagttcacacctgtaatcccagctactcgggaggctcattggga

SEQ ID NO: 94293 - DNA, 716 bp, Homo sapiens
atggtacagkggggcaagctgctggccacaggacatgtgtgtgcaaggccactatgcccacacctcaggggaaccagggcagagaacagcctgttccctttggcagtgggacagacaggagacaagcatgaaggggaaacaggggcatgtgacaaactggtcagaagccctaggctcctagaggacagactgggaccagagtgacacaggcgtcccagagccagtggagtgggatgaagggccagcgaaaggagggagacagggctcaaggggaaggaggctgggctaggcagagcctctgaggagagctgatcctgcaaagttactggcacctcccctgggccagccctgtgttcctggccagggacgggaggagacagtgccctgtctggcagaggaaacagattcatgtgcatgactatcagtgtgccatggccacagaaagcaccggaggctgtgggcatgaggaagggcagttgggggcatagaacctggggtgaggatggccagggcaggtgctgatgggggactgcagcaggaaggaccgagaggagaccagggacaggcaggtgcttgagaaggaaggtgggccctgtggatcaggcagggtatctgccccagggggctctgcacaccagcagtcctacacgtacagggtggggatgaaaagagactaagggtcagggagcttggtagctgggcctgcatgagggaca

SEQ ID NO: 94294 - DNA, 716 bp, Homo sapiens
atggtacagtggggcaagctgctggccacaggacatgtgtgygcaaggccactatgcccacacctcaggggaaccagggcagagaacagcctgttccctttggcagtgggacagacaggagacaagcatgaaggggaaacaggggcatgtgacaaactggtcagaagccctaggctcctagaggacagactgggaccagagtgacacaggcgtcccagagccagtggagtgggatgaagggccagcgaaaggagggagacagggctcaaggggaaggaggctgggctaggcagagcctctgaggagagctgatcctgcaaagttactggcacctcccctgggccagccctgtgttcctggccagggacgggaggagacagtgccctgtctggcagaggaaacagattcatgtgcatgactatcagtgtgccatggccacagaaagcaccggaggctgtgggcatgaggaagggcagttgggggcatagaacctggggtgaggatggccagggcaggtgctgatgggggactgcagcaggaaggaccgagaggagaccagggacaggcaggtgcttgagaaggaaggtgggccctgtggatcaggcagggtatctgccccagggggctctgcacaccagcagtcctacacgtacagggtggggatgaaaagagactaagggtcagggagcttggtagctgggcctgcatgagggaca

SEQ ID NO: 94295 - DNA, 597 bp, Homo sapiens
cattttgcccacaaatcctgtggggcaagtgctgtttccctggagagtcgagggaccactcagcgagcttcagtggctatttgctaaacatccaccagggccagaccccatttaagccctggggcttgagcagtgaacgtgtctgcgtccttctcctcatggatctcacattccattaatagaagggggagctgacagtaacccatgtaaacatggaacatatcggatgttgatggatgycatggaaaaaataaacagggtaagagtgggggtgtgtgtcattatgagtaggatgctgagggaagactccctggaggaggtggcatctgagcagggagctgtaggaatgtgcaaggcatgaggagaagggtgttctcactggagggaagagtgagggcgaaggctccaggtgggacaatgcatggggttcagactggagagcaacgggccagggtgggtgcagtgagcaggaagagcaggaggtcacgacagaggggagcatgggacactgggaaggctttggctcttaccgcaggtggattgagttgttggagagttttgagcagaggagaactgtgatctgacttacgtcgtaaa

SEQ ID NO: 94296 - DNA, 597 bp, Homo sapiens
cattttgcccacaaatcctgtggggcaagtgctgtttccctggagagtcgagggaccactcagcgagcttcagtggctatttgctaaacatccaccagggccagaccccatttaagccctggggcttgagcagtgaacgtgtctgcgtccttctcctcatggatctcacattccattaatagaagggggagctgacagtaacccatgtaaacatggaacatatcggatgttgatggatgccatggaaaaaataaacagggtaagagtgggggtgtgtgtcattatgagtaggatgytgagggaagactccctggaggaggtggcatctgagcagggagctgtaggaatgtgcaaggcatgaggagaagggtgttctcactggagggaagagtgagggcgaaggctccaggtgggacaatgcatggggttcagactggagagcaacgggccagggtgggtgcagtgagcaggaagagcaggaggtcacgacagaggggagcatgggacactgggaaggctttggctcttaccgcaggtggattgagttgttggagagttttgagcagaggagaactgtgatctgacttacgtcgtaaa

SEQ ID NO: 94297 - DNA, 597 bp, Homo sapiens
cattttgcccacaaatcctgtggggcaagtgctgtttccctggagagtcgagggaccactcagcgagcttcagtggctatttgctaaacatccaccagggccagaccccatttaagccctggggcttgagcagtgaacgtgtctgcgtccttctcctcatggatctcacattccattaatagaagggggagctgacagtaacccatgtaaacatggaacatatcggatgttgatggatgccatggaaaaaataaacagggtaagagtgggggtgtgtgtcattatgagtaggatgctgagggaagactccctggaggaggtggcatctgagcagggagctgtaggaatgtgcaaggcatgaggagaagggtgttctcactggagggaagagtgagggcraaggctccaggtgggacaatgcatggggttcagactggagagcaacgggccagggtgggtgcagtgagcaggaagagcaggaggtcacgacagaggggagcatgggacactgggaaggctttggctcttaccgcaggtggattgagttgttggagagttttgagcagaggagaactgtgatctgacttacgtcgtaaa

SEQ ID NO: 94298 - DNA, 627 bp, Homo sapiens
tggcatctaggaagacttgccatgacttagagctagcacgtgtcctgcagaaagtgggttgagaggcctgtgtcttggcataagtgccactctctgatttttctcctgcctctgtggggtggcagggggcaggagaaaagtcagtgtgggtgtgacatggggaatcccagctaagtctgctggtctctggtcagaggagctccacgctagtcaagctattgtcgccattttatatacaaggacaccaagggttgtaaaggatcagggagtcargtatctgagacacaactcagccacactctaaaatcttcctattccaaatccagtgtcctttccatttttccttcttacaaccccaggtctaggtaggacagctgatttttacagtaagatagtggtgaaaaaaaatcgaccaatgggtagttcctgagtgactgctctgtaagtgaaggcagcagttcagacggaggctatgtgatgctcagtgggattagaggtgttttcggattcagtgcacagagcccagtgggtgagcagcagagagtggctgtgaagtgggggtttgagaggctctcccacttcttctaatctccagtgggctccatagctggcccctggggctataag

SEQ ID NO: 94299 - DNA, 671 bp, Homo sapiens
gaccaaggacactaggactaaacatgggaggccccgccctcctgagtgactctttatctatacaggattgtattctctgccaaatagaccaaaaggaaggaaggccggcaagacattagctcttttcttagctctcaaatagctgacatttcaggaaactgaaattctgaatgggaccagaggtgatttcaattcattgtgcctgtctgcagagtcagtctatatgaggactccattatataggacgtacttctagaagttcagcgaaacccttgtcaataaatctctttcaaacttatctactcatgcttggaaattcgtcattagagctttacttctttggcacaagccaaatgtgggtttttgtcttttawaaaagacatatcagtcatatcagtcatctcagtgtgaatggagtatactggtcctttcctgggagcaggctcatacgaagagaagactagaacactgaagacttgtagcctctgaaactagaagagggaagatgggcagtgtgtggaagagaaaggatgtagagggaggtggagctggtgaaggctttccacctgaacagtcaggtatgatctccaaagtacccaacaaagctacatgtaggccaggtacagtggctcatacctataatcctagccctttaggaggctgaggcagga

SEQ ID NO: 94300 - DNA, 652 bp, Homo sapiens
gccatgaagcccagaggtaagggctgcccacagccaggaacaggacccagaagccaggccatggcactcctgagactgtattcttttgcagtgacttcccgctgctgggctgaggagcccccctcagaggctgtgcatgttggatataattctgccctttctcctatttatagctatgccctttgccttctgtacgagagagaagcttccttggacagaatttgctgagtcagcagaggatgggcccaccaccagattctgtcagaaggtaggacattaacggtgcctctggcagcagctgccaaatatgtgcaagtcacagagcatgaccacagctgccrggtttggcctttcaccatggaaaatgcacccatttggtgcttgttttgccagataagattagataagactatctgccactttttttttagcgtactcttagaattggggcgtgtaaggctccagaagggccattagctttttcaggcaagggagctgcagcccagggagggtggtcggaggtgacttttgtagcaagtcccacagctggcaagtggcagagctggcattcagggaccagagaagccagtttctcatccagagctctgcatgctccactgcagtttgcttgagtcacagaagcttcgatgca

SEQ ID NO: 94301 - DNA, 1912 bp, Homo sapiens
cgcctgtaatcccagcactttgggaggctgaggcgggcagatcacgaggtcaggagattgagaccagcctggctaacacggtgaaaccctgtctctactaaaaaaaatacaaaaaattagccaggtgtggtggcgggcgcctgtagtcccagctactcgggaggctgaggcaggagaatggcgtgaacccaggaggcagagcttgcaatgagccaagatcgcgccactgcrctccagcctgggcgacagagcaagactccatctccaaaaataaaaaatatattatctggatgtgatggcttatgcctgtagtcccagctactccataggctgaggcaaaaaggatcacttgagcccacccagcagttcaggctgcattaagctctggtcgcaccactgcactccagcctgggtgacagagcaagaccctatctctaaaattaaaaaaattctatggcaggataaaagtagatgcatagatcatggtgcaggtaagctggggtagaatgtaaaatgaagccaagcagtcagtatccagaaatgtaaacctgaatctctctgtacattgaataaaggtatattccagtgtaagattaagcagggaagatcatcagttccaaaatgcatagtgttcttaagttaaaatagcaattgtgtggatttccctggcactcagatacaggagacactattagatgatatcctcgacaacatccccatacaaaatacccttttatggtccctcaagtagttttaaagtatcctgttatcttagcactgtttttgacatttgaaaatgcaaaatatggccaggcacattggctcatgcctgtaatcccagcactttgggaggctgggccagggggatcacttgatcccaagagtttgggaccaccctgggcaacacagtgagaccctgtctcatatatgtgtgtgtgtgtgtgtgtgtgtgtgtgtgtgtgtgtatgtgtgtatgtatgtatatatgtatgtatatatatgtgtgtgtgtgtgtatatatatatatatttttttttttaaaggaagaagaggaaatatgtgtatgtgaaactcaggatgaggtccctgaaatggtgcttatcgggtcagagggtgtgcatctgaggttaagctgggaaggcagggagcttttgttctccttctcattccgacagctgcaagccaagcactggtggccagtgctgcaggatagggcatcagctgcaggatatggcatgttggtcaaaatgctgttggcataagtgagaaaaataacaatactccaaaatatgtccccagttttataaaaatggacccaaattataaatgatacaagcaaatacagagagtaatggtcaaacccatttcactacattcaaaatgacttaattcttagaagttttggtgggagaatgtggtgtagagctctgcacaagcagacattgtgcttttggggcttcaacatgaccacccaatcactgatgggactgtttgaaatctgttttgttggctttggcatataatagccatctttggaaaactggtctctgtatggaatatggtcttgtgtcactgtataaaaatgagaacccaaaagaagctctcacatgattgggtcagaaaattgcccataactattgctaggaaagtttttgaaatctctgaattcaatgtaattgaatttctttagacacctagccctctaggttgaaggaaaaccagttttttaaacttatcgtatactttttttttcctgtactgtttgtgtgtggattgcattcatcatgctcctctaccccataatacttttgtatttcctaagaacaaagataggtagatggccttagttggtattcgtattatagcagtggcatccaagcacctctgcctttgtgtatgtgtgaaattgtcc

SEQ ID NO: 94302 - DNA, 1101 bp, Homo sapiens
tctcaaggtcatgaaaaataaggaaagatggaaaaactatcataagtcagaggaggctaaggaggcagtacaactaaatgcaatgtgggaactgggattggatcctgcaacagataaaggacattaacagaaaaagtggtgaaatctgaatacattcaaatatttactttttaaaaatattaaatatcagtagcataattaagaatttcatataatgttacgtttactctaaagctgcttccttgtaagtttggcctacaggtttctctgtaaatagagaactgtaacctaactggatatgtaaacagtctgtaatctactcttttaacacatggcttggtctcagccaatgacagaagctatgtttcaaccactcacagccagccaactgtccaaataaggcaaacaccaagctgctaccaattcagctgtttctgtacctcacttccattttctgggagtcactttccttttctaactgtaaatcctctccaaccacacggcaatgccagagtctgtctaaacctgttctggtttgggagggctgcctgattcgaatcatgtttttgcccaattaaactctgtgaaatttaatttgcctatgttttttctttcaacaatactaaattgttgatctgagtctgtcagttcttaatttcttgtgggaatgtcactggcttccactaattataagagtgtttatgtagagcatggctgtactacttggtaagcatcaaataaagactgtgccaaatgctttaacaatggcttgggacaaaggtctttgttctattttgaaccttaataatcagttgtagaaacataaacatatcccatggctctcactgtcaacccagatgtgtacttgctttctctctgtgtttttaattagttttaattgccctaaagtgatcatagaagtgatgaaagtgtaaatattttactggatttcaattttacatctaattacacctccgatgactcttacatacatatagcgtacctagggctctgggtgattaaaagttatcgcttgattacatcgagaaaaattacaaactggcctacagcttcacatagcaatgcagcacrttcactcta

SEQ ID NO: 94303 - DNA, 526 bp, Homo sapiens
tgcattttacactctcagtgccttcaaatgataagttcttaataaatatttcctgattgggtgatttggtgaatgcactttcatccaagagattttctggagagtttttattatactgccaaaaccaaacactattcaatcccagggtaaacactgcaggaaaaaaaatgtcacagggcaacatagtcataagtgggttctccccatgctcacacgcccttcattctaagctgggggaggctgctgtagtaacacagatgcaaaaaataaactttgactaaatggcttcatgttccagatgattggatgcctcgttaaagcacccaaagatgaagctactgctccrgcaaagttgctgacctaattttgagaactaaaagacagagctaagtgtgttttcatggcatcccacattcctttcttaattcatcatgattcatgggaaccaggatctcaggctgcccctcccccaggtagcagttaagctggtggaattgttctctctagtccataaggacatggaaac

SEQ ID NO: 94304 - DNA, 893 bp, Homo sapiens
tatattttaaaaactaccaaatggaataattatcttacttattaccaaagggggggattttatagtgcttcatatgaagttttgaattgtcattgacacttgcagatcatggaaattcacagcaaaagaggcataaaatataaaactatctgcttgggaagtctcttcatgatatataaaggttttatacagttttgtgctagaaaacatattttcaaaaaatgaagtgttaaatgcgcagatacgatcttcaattggatgtgaaacataagcaaaggggttcttcaaaatactaaagtctgtgataggaaatatttttttcttgggtccatgtaaggcatttttctatgtgctagggactctgtacaatataacatttaatataaataaaatttagatatttgttaacctgtataaattatagctgcccccagaaacaccccaagttgggtcaaggaatttgatttctgagttaatgttttattttgtactatttatgaggaaagggacaagaattaatctgtttcaagatttatatacaagcatacctcagaggtactgtgggttcagttccagacccccataaaaaaacaaatattgaaataaaaagagccgcactttttttgttccccagtgcatagagaggttatgtttgcactatactatatcaagtgtgcaatagcgttatgtctaaaaaatgtacataccttaacttaaaaatacttcattgctaaaaaaaaaaaaatacacactgaggctttagcaagttgtawtctttttgctaatagatggtcttaccttgatgttaatagctgctgactgatcagggtgagggttgctgaaggttggggtggctgtaacaatttcttacaataaggcaaaaatgaagtttg

SEQ ID NO: 94305 - DNA, 567 bp, Homo sapiens
tcccaggcagaagaagaatttaagtacagactgaaagattcattcactcgactttttcggcatttgttatgtgaagctttttctgttcatgtttaatacktaaaacttgttttgagtttttaacacctgaatatggtgcaaaatccaaaaggcacagaagggtaaactgtgaaaatgacctcccttccttgtttcccagccaaccaacaatttcttgagtatccttctagaaacatgttatgcaaatacaaatacacctcatttcctattttacacaaatggtagcataaaatgcacacaggtctgcatcttgctttttttcacttaacaataaagtccgaagatcgctttctctctccctttaaaaaagtatgaaatatggaatgacaatttcttcaacattaggttgtttccagtgttttcctgtcataaataatgctgcaatgaatgtctttctacgtggcttttgttcacatgtgcgtgtataaatttacttctgaaattgctttctttaaatcaagggcagccttcttagcagcatctttatatcaggcgtttcctaattta

SEQ ID NO: 94306 - DNA, 567 bp, Homo sapiens
tcccaggcagaagaagaatttaagtacagactgaaagattcattcactcgactttttcggcatttgttatgtgaagctttttctgttcatgtttaatacttaaaacttgttttgagtttttaacacctgaawatggtgcaaaatccaaaaggcacagaagggtaaactgtgaaaatgacctcccttccttgtttcccagccaaccaacaatttcttgagtatccttctagaaacatgttatgcaaatacaaatacacctcatttcctattttacacaaatggtagcataaaatgcacacaggtctgcatcttgctttttttcacttaacaataaagtccgaagatcgctttctctctccctttaaaaaagtatgaaatatggaatgacaatttcttcaacattaggttgtttccagtgttttcctgtcataaataatgctgcaatgaatgtctttctacgtggcttttgttcacatgtgcgtgtataaatttacttctgaaattgctttctttaaatcaagggcagccttcttagcagcatctttatatcaggcgtttcctaattta

SEQ ID NO: 94307 - DNA, 567 bp, Homo sapiens
tcccaggcagaagaagaatttaagtacagactgaaagattcattcactcgactttttcggcatttgttatgtgaagctttttctgttcatgtttaatacttaaaacttgttttgagtttttaacacctgaatatggtgcaaaatccaaaaggcacagaagggtaaactgtgaaaatgacctcccttccttgtttcccagccaaccaacaatttcttgagtatccttctagaaacatgttaygcaaatacaaatacacctcatttcctattttacacaaatggtagcataaaatgcacacaggtctgcatcttgctttttttcacttaacaataaagtccgaagatcgctttctctctccctttaaaaaagtatgaaatatggaatgacaatttcttcaacattaggttgtttccagtgttttcctgtcataaataatgctgcaatgaatgtctttctacgtggcttttgttcacatgtgcgtgtataaatttacttctgaaattgctttctttaaatcaagggcagccttcttagcagcatctttatatcaggcgtttcctaattta

SEQ ID NO: 94308 - DNA, 567 bp, Homo sapiens
tcccaggcagaagaagaatttaagtacagactgaaagattcattcactcgactttttcggcatttgttatgtgaagctttttctgttcatgtttaatacttaaaacttgttttgagtttttaacacctgaatatggtgcaaaatccaaaaggcacagaagggtaaactgtgaaaatgacctcccttccttgtttcccagccaaccaacaatttcttgagtatccttctagaaacatgttatgcaaatacaaatacacctcatttcctattttacacaaatggtagcataaaaygcacacaggtctgcatcttgctttttttcacttaacaataaagtccgaagatcgctttctctctccctttaaaaaagtatgaaatatggaatgacaatttcttcaacattaggttgtttccagtgttttcctgtcataaataatgctgcaatgaatgtctttctacgtggcttttgttcacatgtgcgtgtataaatttacttctgaaattgctttctttaaatcaagggcagccttcttagcagcatctttatatcaggcgtttcctaattta

SEQ ID NO: 94309 - DNA, 567 bp, Homo sapiens
tcccaggcagaagaagaatttaagtacagactgaaagattcattcactcgactttttcggcatttgttatgtgaagctttttctgttcatgtttaatacttaaaacttgttttgagtttttaacacctgaatatggtgcaaaatccaaaaggcacagaagggtaaactgtgaaaatgacctcccttccttgtttcccagccaaccaacaatttcttgagtatccttctagaaacatgttatgcaaatacaaatacacctcatttcctattttacacaaatggtagcataaaatgcacacaggtctgcatcttgctttttttcacttaacaataaagtccgaagatcrctttctctctccctttaaaaaagtatgaaatatggaatgacaatttcttcaacattaggttgtttccagtgttttcctgtcataaataatgctgcaatgaatgtctttctacgtggcttttgttcacatgtgcgtgtataaatttacttctgaaattgctttctttaaatcaagggcagccttcttagcagcatctttatatcaggcgtttcctaattta

SEQ ID NO: 94310 - DNA, 602 bp, Homo sapiens
aacatctacctggcgaggatgagtgaacaaataggaaaatggcttaatatttcccaaaacaggcatgatgcaacaatattattattggctgaaacaggtttaaaaaaattatgccaaccaggcgtggtggctcacgcctgtaatcctaacactttgggaggccgagacaggtggatcatctgaggtcaggagttcaagaccagcctggccaacatggggaaaccccatctcyactaaaatacaaaaattagccaggcgtggtggcaagtgtctgtaatcccagctactctgaaggctgaggcaggagaatcactggaactcgggaggcacaggttgcagtgagccgagatcacaccattgcactccagcttgggtgacagagactccatctcaacaacaacaacaacaaaaagaataaaaccatgggtagaaaaaatgggagtctttctaacgaaataagaatgaacttaatctcattgttaatgtcatgtgctgccagagatatagccaaaatgttcaaggtcctctctaagtctgtgtgtgtccttggaatctcagagtgaagtgtatgggaacacatggaaattctctggggtctgcta

SEQ ID NO: 94311 - DNA, 988 bp, Homo sapiens
tgcatgcagggcttaatacctaggcaataggttgacaggcacagcagaccaccatggcacacatttacctatgtaacaaacctacctgcacgttctgtacygtatcctggaacctaaacttaaaaaaaaatccttgtaatctaatgaggatcagtttatcaaactatatacataaatttttattttttgctacgaaacaaaaatggattcaactcagatttgatcactgttgtgttaattctagtattttactgtgcttctatgttcttttattatcacttctctatgaatacagtcaaattctatatttgcataattttcttataatggaaaaagctattcttaaagaaataagcaattgactcaggattagcatagtgctctgtatcattttatacattgttgcacatcataattcatgatgaatggaaagagaaaactagcaaatttatcttcacagttattcaaatggaatacttacatatagcatccttcctttattgctttcttcttcaataaaattatgtggatgaatttcctttttctttctttctttttttttttctttgagacagagtctcactcccaggctggagtgcagtggtgcaccacttcaggggttcaagcgattttcctgcctcagcctcccacatagctgggattacaggtgcccaccaccacgcccagctaatttttttttttttcagtagagacagagtttcgctatgttggccaggctggcctcaaactcctgacctcgtgatcctcccacctcagcctcccaaagtgctgggattacaggtgtgagccaccgcacccggccctttttttttttcttttctttttttttttttttttgagacaggctttcgctgtattgccaaggctggagtgcagtggtgccatcatggcttgctgcagccttgacctcctgggctaaagtgattctcacacctcagcttcctgagtagctgagaccacagatgca

SEQ ID NO: 94312 - DNA, 738 bp, Homo sapiens
attagatggtgcccacccagattgaggatgggtctgcctctcccagtccactgactcaaatgttaatctttagtaacaccattacaggcacacccagagatgacactttgcatccttcaatccaatcaagttgacactcaatattaaccatcacacagggaaagatagacactaaactaaataaaactgttagtatattagaattgcaagtgttaaggcaacccaaaatgtagagaaggaggatcaggtattatttttttaactgggggggtaagagaggacactrctgagaaggggagactggggtagacctgaaggaggtaatgaggaggtaaggagccatgaggacatggtggggagaattggagccacagggacacgaggggaggcatccaaactatgaggacatagggggtgatattcaagccgtgaagatatgagaggatcctggatccatgagaatattggggatggagacattcaagccatgaggatatgggagtagggaggcatttgaggcacagagaacagcacgtgtaccctaaatggggggataatgccaggcaagtttgaggaaagagacaagtgaagctcaagtggagggaggtaacttgaaatagaaggacatagagtcagagagacaagaatgatgatgatgatgaagatgatgaaggtgattaagatactgttgagtgcttactttgccagtactgttgcattatctcacgtgatccacac

SEQ ID NO: 94313 - DNA, 359 bp, Homo sapiens
tacaagcaaaaattgagctttccctgagaagaaaaaatatactgctttaagaccgtatcatcaactcctgcctgagttgacgagctgctggcttgccctacagatttccgacttgtmagccccaacgattgtgtgagccaatttcttaaaataaatttctttatgttgatctatatctatattcaaatctaaatctgtacatctatttcttgttgtttctgtggagccccgtaactgatattgattttggtaccaggaagtgagatgctgctaaaacaaatacctaatactatgcaaatggtcttggaattcactaacgggtaaaggctggaggagtttttagatgtgtgatgtaaaaa

SEQ ID NO: 94314 - DNA, 485 bp, Homo sapiens
tgtgcattagaattatagagatgaagagggatttcattccaatccctcttttactcattaggtaaaaggaggcacagagaatttaaatgacttgttcagaatcacatagccagtttttgttacattgggattagaaaaccagcaattgtttgtactatgactacatcaactcctactttaataacaatatttatcctttccagagtatttgttgacctctatctaatatagggtactgtgccagtcattggttatgaggagctgaataagacagagacagccctggcatcatggaacttactcaaagcaatctggtgggacagtaaaaaatggtacyattcaatgcggtatggtgctcataagatgacaatcaaattaaacttttcttagcatagtcttacttattgaactgatgggacagccagcatagtttcctttaggatactctgattccctaacattctaaggggagaaaatttactctt

SEQ ID NO: 94315 - DNA, 940 bp, Homo sapiens
cagtgtaagaacaaaaaactttttttctatctacaagtgaggaaaaaaatattgacagtgtgcccaagcttcatggtaggatgggtgttaattgggaatggcatgtaattctcttctggaatccagtgtctgggcaagtcctgcctctcagattaaggcaccagcattcagcataagagggtcctgcctctcagattaaggcaccagcattcagcataagagggagtaattgacattctacatggcaaaagacccttgaaagataacagatgaatgtctcatggccagtagcttggtttttttgcatggtgtagatttagaatataacttttacagggaagaaaggggttaaaatgtctggtgccatctgtcacagtaatgagttgtgcaaagcccaatgaaccttgtagaaacaacatcgtgcccagaaatagcctagacctcagagtgacatcagggggcrgggacctgatagatgtggtcctgcaaaaggacgaagtcttctttaacaattcaaattgaataggaaccatttttaatttgggggtaactccgtcttcaccattaatggccattcttcaaagctactttcattcctgtgagggatggccagacacgagaaagccaagcagggattttcagttacaggtgagcatccgatctgcagccagggctttttctaccgggcacatctttgtgcgcacgctggtttgagctgatctgcacataaacaggcactctgggtgtggatgggggcatctgtgtactctttatggctatatttccagaatatgcttttaaagactgtggtcacatttaccttggttagggaagatagtgacttataaaaacctcaaacatttatgtttccctttccaatataaaaagtgttaataatttacccacttaaaaggttaagatcaaagagatcataaacaca

SEQ ID NO: 94316 - DNA, 940 bp, Homo sapiens
cagtgtaagaacaaaaaactttttttctatctacaagtgaggaaaaaaatattgacagtgtgcccaagcttcatggtaggatgggtgttaattgggaatggcatgtaattctcttctggaatccagtgtctgggcaagtcctgcctctcagattaaggcaccagcattcagcataagagggtcctgcctctcagattaaggcaccagcattcagcataagagggagtaattgacattctacatggcaaaagacccttgaaagataacagatgaatgtctcatggccagtagcttggtttttttgcatggtgtagatttagaatataacttttacagggaagaaaggggttaaaatgtctggtgccatctgtcacagtaatgagttgtgcaaagcccaatgaaccttgtagaaacaacatcgtgcccagaaatagcctagacctcagagtgacatcagggggcagggacctgatagatgtggtcctgcaaaaggacgaagtcttctttaacaattcaaattgaataggaaccatttttaatttgggggtaactccgtcttcaccattaatggccattcttcaaagctactttcattcctgtgagggatggccagacacgagaaagccaagcagggattttcagttacaggtgagcatccgatctgcagccagggctttttctaccgggcacatctttgtgcgcasgctggtttgagctgatctgcacataaacaggcactctgggtgtggatgggggcatctgtgtactctttatggctatatttccagaatatgcttttaaagactgtggtcacatttaccttggttagggaagatagtgacttataaaaacctcaaacatttatgtttccctttccaatataaaaagtgttaataatttacccacttaaaaggttaagatcaaagagatcataaacaca

SEQ ID NO: 94317 - DNA, 940 bp, Homo sapiens
cagtgtaagaacaaaaaactttttttctatctacaagtgaggaaaaaaatattgacagtgtgcccaagcttcatggtaggatgggtgttaattgggaatggcatgtaattctcttctggaatccagtgtctgggcaagtcctgcctctcagattaaggcaccagcattcagcataagagggtcctgcctctcagattaaggcaccagcattcagcataagagggagtaattgacattctacatggcaaaagacccttgaaagataacagatgaatgtctcatggccagtagcttggtttttttgcatggtgtagatttagaatataacttttacagggaagaaaggggttaaaatgtctggtgccatctgtcacagtaatgagttgtgcaaagcccaatgaaccttgtagaaacaacatcgtgcccagaaatagcctagacctcagagtgacatcagggggcagggacctgatagatgtggtcctgcaaaaggacgaagtcttctttaacaattcaaattgaataggaaccatttttaatttgggggtaactccgtcttcaccattaatggccattcttcaaagctactttcattcctgtgagggatggccagacacgagaaagccaagcagggattttcagttacaggtgagcatccgatctgcagccagggctttttctaccgggcacatctttgtgcgcacsctggtttgagctgatctgcacataaacaggcactctgggtgtggatgggggcatctgtgtactctttatggctatatttccagaatatgcttttaaagactgtggtcacatttaccttggttagggaagatagtgacttataaaaacctcaaacatttatgtttccctttccaatataaaaagtgttaataatttacccacttaaaaggttaagatcaaagagatcataaacaca

SEQ ID NO: 94318 - DNA, 624 bp, Homo sapiens
actggtggcgggcaggkgcaactgccccgggagatgtgtcttctagctggggtggtgggcaaacagatgcgggagtcccaagccctggatgactgacactactgagtggggcaggattctgggctcagatgacaccctaccctgtacctccccctctctcccctgcccagttctatctctcagactctgacttccaagatatctttgggaaatccaaggaggaattctacagcatggccacgtggaggcagcggcaggagaaaaagcagctgggcttcttctgaacccaagccctctcgactgcccctatcccctggaccccaacatacctacaatgctggggaggccctgcttccactcccctcagaggcttttggtcatcctctgcgtgtcagtaaaagcaggcagcccatacgagctgtggtatgcgtgctttcaagcccgggccactcagcaggtccacctctcaggggaaggggcctccagggctggcgggtgtgagctctcagtgccaccccacagagggtttatttctgttggtctctccagatacccctgccctactcaactatgtgcaaggaaggtggagagtgaggtgctagggctccagcactctaggacatg

SEQ ID NO: 94319 - DNA, 722 bp, Homo sapiens
tattttaaggaaccaaggcatgcttcatcatcctcctcctgaactgttttttccaataaccaaaacattggtctaggcaggcttttttcttgctaaaatttccagagtttttttgttccttcagacatattaattatagtctcttttttctctagcctattagtaatgctgattttattgttccggttgaaatcgatggaactatacatcaggtaagaaactgaagctaaatttgagtttcaattaagattttttagtacttacatttcctatgaactttatttctaaattctcatttcagtaataactttattacggaatcaaaaggaagcatactgtaataaatacaatgtttttctttttttcactccaatgaatttattttatactgagattataaggaaactatagtcgtaaatattagatgcggttgcaagttcaaatagatctttgatttgaatttcagaagtttcygtatcccccactggcctagcttgatggtctaattaacttccttgtgtaattgctttcggctactctcctagcaggcaacaggaaaatgccacaagtcacccacttatggtggactctcgggaaaaagtgtccattttcaatgccagctgctccagactgatcttatcattcctgcatcgttttctccagagaatctttagcaaatacccaccccaaaagaaaaagggggaagggtgtgagttttcgga

SEQ ID NO: 94320 - DNA, 722 bp, Homo sapiens
tattttaaggaaccaaggcatgcttcatcatcctcctcctgaactgttttttccaataaccaaaacattggtctaggcaggcttttttcttgctaaaatttccagagtttttttgttccttcagacatattaattatagtctcttttttctctagcctattagtaatgctgattttattgttccggttgaaatcgatggaactatacatcaggtaagaaactgaagctaaatttgagtttcaattaagattttttagtacttacatttcctatgaactttatttctaaattctcatttcagtaataactttattacggaatcaaaaggaagcatactgtaataaatacaatgtttttctttttttcactccaatgaatttattttatactgagattataaggaaactatagtcgtaaatattagatgcggttgcaagttcaaatagatctttgatttgaatttcagaagtttccgtatcccccactggcctagcttgatggtctaattaacttccttgtgtaattgctttcggctactctcctagcaggcaacaggaaaatgccacaagtcacccacttatggtggaytctcgggaaaaagtgtccattttcaatgccagctgctccagactgatcttatcattcctgcatcgttttctccagagaatctttagcaaatacccaccccaaaagaaaaagggggaagggtgtgagttttcgga

SEQ ID NO: 94321 - DNA, 563 bp, Homo sapiens
gacgggagatggaggctgagtcactctgctcattgctggaggccggggtgctgcctttctaacgtgaccattcggctctcagctctcacccctgccggtttgattctgttttccctgggtcctgaatacctagagacccagcagaatgtcagccagtgctgctcctgttaaagcacttctgactgatttctgttagtttagctactgttcactagttgatgytgaaattgctcttattaaagttagatagcattaggattgtatggtactattggtactatttttcaaataaagattgtttaatacgattcttacgaatacatgacttccacatctctggaccctccagaagtacataggataagtattgtattttcatttagagaaagggtctctcagctgggtgcagtggctcatgcctataagcccagcactttgggagaccgaggtgggtggatcacctgaagtcagaagttcgagaccagcctggccaagatggtgaaaccctgtctccactaaaaatacaaaaattagctgggtgtggcggcacacacctgtaatcc

SEQ ID NO: 94322 - DNA, 642 bp, Homo sapiens
cttcagcgatgaactggtcagcctggtgctaccatttgttttcccctttggcatctgggaaggcttgacagtgccaccccgggctatttgacagygtgcttggggggggaaatgttagcttctgagggatggccttgtgtgcttgctgggatcatagggacttggccagcgtttctccaacctgcttactttttctctttagctccggtctgatatacaaaaacgactgcaggaagaccccaactacagtccccagcgcttccccaatgcccagcgggcctttgctgatgatccttagctctttgctctatggcccttcctcatcaggggaccgtttcccccctcttccttcacagtatttaagaaataaaagtcggatttttctggctgctttctctctacattgtctccattaggtagtgtgtcccttaatcttgtgtgaacttttttaaattaatacttccttggaacactgttgtgttctactcagcacgctaaattgtacaagccagttttgatgtttgtttttttttttttttgagacagagtattgctgtctcccaggctggagtgcagtggcccgatctcgagctcggctcactacaacctccacctcccgggttcaagtgattctcactcatg

SEQ ID NO: 94323 - DNA, 714 bp, Homo sapiens
tttaaatttcaccaaaaatccacactttcctccaatactataatgacatttcccccaatactataatgacatttcccccaatactgtaatgacatttccgttgtttggtgagaagctcctcagctccctggtatacagcctcccattttgcaactaactgataaatctgacttcatgggactatacatttgctcctgcactcttggtcgattggactagggtacaagtgactctccagacccctctccatgctaatagtctagtggcccttcttccgtcaattctaatcctcctcgtgatctatcttctcaggaaagctctgcccatttccatgctcagtcactcacaggcaaaacctcagtcctactgacaatccaacaccaaccatgactacagccagggaaatgagcatgatggcctggggctgtaaatgtccactcagtttgatcacatgtttggatgtgtggctcacgctaactgtatttgtgcctgtggacattgggcctgtttactgggaggtgttgctggttggctcacgggtggatcctgtagtggtcctgaagctgggggctgaggtggtagatgatgctcccatagtggatgtacccaggtcagaggtgtttgagactattccsgtcacaggatggctgcagcagaggccatggagtccattccaggggccatggtgacagagctaggggcggtaggactggt

SEQ ID NO: 94324 - DNA, 729 bp, Homo sapiens
aatccaggttcagcagctgagagaaaaactgtatgtcaaaagacaaagtgtgtttctcattaacagttccaacatcaggagtcttaggctggatagagtgactccgcggtgttggagaccccagctccttctgtcttgctgctctgccattgcatcgagggctgctctctcttgaaaggttgaaatggctccccacatctgctgggtcagcattccagccagggaaagawggaaaggggaaactaatgccacccatgctgtttgagggcagaacaaaaggttgcttatgttgttctgattcagatccgttggccaaaagttagtctcacagccacacctggctgcaagggatactggaaaatgtagtcttgtttcaggctggccataagtccagcaaaaatttgggagtcttactaatcaggaagaagaggagaatgaatatttggtgataactgcaatttctgccacaaagcgcaaagtgggaaatcagaggtcaccacacacctcaattcccattgagggtggctggtctgtaaatagcataaagtacgggaagaaatctcaaatttaaataaagtttaaagtttctactattacatgagattggaccatttaattacttattaaactccttggggaattggagtaacccaatgaccttagattacctacaaatgactagaaagttcatggggcttgctccaaatttcatcttggggcaaaaggaga

SEQ ID NO: 94325 - DNA, 628 bp, Homo sapiens
aggctcatgtgctctggagaaaagagagaaacagtaaatgctccactgggtgcagagtgctgcttttcattccctgaggatttctccctcctcagaaactccgaaatcagattcaccctttctctgagggaagaactgacgcccccactttttcctccctcccatcctagtttctccagcctccaccagtctcctcctgtgattccctcaacaatgatacctgccctgtgcccaccatccaccatgtggggaatgaaagggcctcatgactaaaggacaagaatcagatccaggagggaacccggggccctcccctcctcccaagccccaccagcctagacacagtgggaaacctccccaaagagaggatggtcctagctccgtgtcctaccaggcctgggctgggtcacgcacgcggtccttctccctctcagtccccaggccctcctcacctacagaggcacttgcacaacagggcasaccctgcacactgggctccccgctccacctgcagctcagcgttccaccctccgagccctgagcagccagcccctaactgcagagcccatcaagaagcctgggggctcggcacaaaaacacgtggctgccaccgggtctgcacctgact

SEQ ID NO: 94326 - DNA, 628 bp, Homo sapiens
aggctcatgtgctctggagaaaagagagaaacagtaaatgctccactgggtgcagagtgctgcttttcattccctgaggatttctccctcctcagaaactccgaaatcagattcaccctttctctgagggaagaactgacgcccccactttttcctccctcccatcctagtttctccagcctccaccagtctcctcctgtgattccctcaacaatgatacctgccctgtgcccaccatccaccatgtggggaatgaaagggcctcatgactaaaggacaagaatcagatccaggagggaacccggggccctcccctcctcccaagccccaccagcctagacacagtgggaaacctccccaaagagaggatggtcctagctccgtgtcctaccaggcctgggctgggtcacgcacgcggtccttctccctctcagtccccaggccctcctcacctacagaggcacttgcacaacagggcagaccctgcacactgggctccccgctccacctgcagctcagcgttccaccctccgagccctgagcagccagcccctaactgcagagcccatcaagaagccygggggctcggcacaaaaacacgtggctgccaccgggtctgcacctgact

SEQ ID NO: 94327 - DNA, 802 bp, Homo sapiens
cactgaatcaggtatgagaaaggcgagttgaggtgaagtctagtcatcattccagtgtcctcttgtcatgggaaaaatcgtatgtcaggtcatactagcacctttccctgatccagcaggaaaaaagaggayactctctagtggggacactcctttttccacactcatgtctggtgtgagcccactcatgaacgtgtgtaagcccgcccttcatgcttatgtctccccactcctgctttatacaagtaatgtgtcatttgactatttttattctctatgaaactattcctctgagcaaaatatttttctgaacattgttggacattttgggcaaatgtgtttcctggtgtgaagaaatgtgactcagtgatgcaaatggttgcaatatctcccgtccaggttctattatagtgctctaagcatttgcatctgagatgaagtacggatttatcttagaagcctgctagacctccctaacatggaaataaaggaaaatgttgagttccttcaagagaaattccaggcacctagccagccctgaaaagcaagtgagtgaccttataagcaagcaggtaaaaatagcttaaacaatagccaaggaagttagagtcccaagatgtttgattctctatagaaactaaagagaacatcttaacatatgtccttgagtagtttttcaggaacccagactctcaccaaacagagccactgatagggagacctcagataaggggaaaatgaggactcaatgctgactgtgactctttgttctaaattttttcctgaggggcctggaaagagt

SEQ ID NO: 94328 - DNA, 802 bp, Homo sapiens
cactgaatcaggtatgagaaaggcgagttgaggtgaagtctagtcatcattccagtgtcctcttgtcatgggaaaaatcgtatgtcaggtcatactagcacctttccctgatccagcaggaaaaaagaggatactctctagtggggacactcctttttccacactcatgtctggtgtgagcccactcatgaacgtgtgtaagcccgcccttcatgcttatgtctccccrctcctgctttatacaagtaatgtgtcatttgactatttttattctctatgaaactattcctctgagcaaaatatttttctgaacattgttggacattttgggcaaatgtgtttcctggtgtgaagaaatgtgactcagtgatgcaaatggttgcaatatctcccgtccaggttctattatagtgctctaagcatttgcatctgagatgaagtacggatttatcttagaagcctgctagacctccctaacatggaaataaaggaaaatgttgagttccttcaagagaaattccaggcacctagccagccctgaaaagcaagtgagtgaccttataagcaagcaggtaaaaatagcttaaacaatagccaaggaagttagagtcccaagatgtttgattctctatagaaactaaagagaacatcttaacatatgtccttgagtagtttttcaggaacccagactctcaccaaacagagccactgatagggagacctcagataaggggaaaatgaggactcaatgctgactgtgactctttgttctaaattttttcctgaggggcctggaaagagt

SEQ ID NO: 94329 - DNA, 986 bp, Homo sapiens
tgcatgctattagaagttcttctatcttcaacatgtgattacaagatcaatttgcttcaaccaatgatgaagggtttcaagaagggctgaagttcaaggtctctttaatctgtgaggtgactgtttcatttatcacaacttatattcctttgtcaagaccctagtcacatggctacatctaactgcaaagagggctaggaaatgtggtccggccaggtctcagctatactttatttgtttgagagaaggaaaatggattttgtggtcagttagaagtcattacacagaccagcaatggtcaccaataatccacatatactctacttttcacatttagaaaaaactcacctcaccccctagggaaatatctcatccagttatgacatccagctcaaaatccaggatctttaggtgacatgcagttttctattggatatacacttgagtcctcatggcccagtgacccataaagtaataaaatctaaattatcactctctaccacgtaaacacagataatatacaatggtgaagtgagaacaggataatggcaaaagaaactcttatttaaaaaacagaaacacacaatcattggcccacagcaatgattaaatcttactgggtaggaatcctaaattatccttgccctctcaatggagtaagttccaagcttagtccatctgactatcactggtcctctctgtgggaggaactcctttgtttgtcatcctgaccactggctttgctttctggaagattctttcttctccattatctaccatagccaatataagaagaagtgaggagtactcatttcttaggattgccccgtacagattttgcagcctgacttctgtggttgcaatttgagggcctatgagttattttaagcttaaccacaggcttttttatgttaggctttatggcttccttgggaatayaatttcttcaaaaactaaaagggcttcttgtttatttgtttcatgca

SEQ ID NO: 94330 - DNA, 613 bp, Homo sapiens
cagggtggactggactggactaagagaaacagcagagttgtggattatttaggccacccggaggccaaattctttctccttacttacatgatcacccaggcaatagacccaggcatggaaaattgtgtttatgttttatgtttttttgagtgtgttctgtgttcacttgtggccaacagataacgggagttcaacaagtacttgttgaatgaatgagtgaccaaacatgagtgtgtgtgtctgtgccatggatcaggtgtgtctgaagtttgcatttgagggaatgattgtacaaacagtgtgtatatgtgttaatgtttgcatgtttagaagtgtgtctggtgtgtttggatgggagtctgagtatgtatatattygagtgtgtaagtgtaactgagagctcctgtttgtgaataaattcgtgtttacatatattcaggctgggtaaatgtatgtggcatgccattttatctgtcattaaatgaatgtgtgctggttttagttgtttatgcattgtgcttatgaattatgttttagtacaagtctgtgtgtggatgtcttaattagttaattagcagttgatagtgagaattctaatatatctttgaacaca

SEQ ID NO: 94331 - DNA, 711 bp, Homo sapiens
agggaggctgaggcaggagaattgcttgaacctaggagacagaggttacagtgagccgacatcacaccaccgcactccagcctgggcaacagagtgagactccatctcaaaaacgaaaacagaaaacaaaaaaacacacacacatttattgtcacactgtttctgtgggtgggaaattttggcacagcttcactgggtcctcagcttaggtactcacaagactataatcaaggtgttggctggactaggttcttatccggctcagttggggaagaatctgcttccaagctcactcrggttgttggcagaattcaggttcttgcagccacaagactgagggcctctgcttgttgttggctggaagctgctcttggctcctaggaggggctctaaaagggtgggccagcaaggaggagttctatacaatgcaacacagttgccagagtgacaccctatcacctttgccttattccattcattagaagcaagtcacagatcccacttacactcaaggggaggggaccaaacaagggcatgaattccaagaggtgaggatcacgaagggaggctgtctttgagtctgtcttccacaacaataataaataagtgccaggtgagtggtacagacaacaagtactgcaggaactcagctgggctccacatgtgaggtggtgtcactgctgatgagctcgggccattcagaggcctgga

SEQ ID NO: 94332 - DNA, 711 bp, Homo sapiens
agggaggctgaggcaggagaattgcttgaacctaggagacagaggttacagtgagccgacatcacaccaccgcactccagcctgggcaacagagtgagactccatctcaaaaacgaaaacagaaaacaaaaaaacacacacacatttattgtcacactgtttctgtgggtgggaaattttggcacagcttcactgggtcctcagcttaggtactcacaagactataatcaaggtgttggctggactaggttcttatccggctcagttggggaagaatctgcttccaagctcactcgggttgttggcagaattcaggttcttgcagccacaagactgagggcctctgcttgttgttggctggaagctgctcttggctcctaggaggggctctaaaagggtgggccagcaaggaggagttctatacaatgcaacacagttgccagagtgacaccctatcacctttgccttattccattsattagaagcaagtcacagatcccacttacactcaaggggaggggaccaaacaagggcatgaattccaagaggtgaggatcacgaagggaggctgtctttgagtctgtcttccacaacaataataaataagtgccaggtgagtggtacagacaacaagtactgcaggaactcagctgggctccacatgtgaggtggtgtcactgctgatgagctcgggccattcagaggcctgga

SEQ ID NO: 94333 - DNA, 711 bp, Homo sapiens
agggaggctgaggcaggagaattgcttgaacctaggagacagaggttacagtgagccgacatcacaccaccgcactccagcctgggcaacagagtgagactccatctcaaaaacgaaaacagaaaacaaaaaaacacacacacatttattgtcacactgtttctgtgggtgggaaattttggcacagcttcactgggtcctcagcttaggtactcacaagactataatcaaggtgttggctggactaggttcttatccggctcagttggggaagaatctgcttccaagctcactcgggttgttggcagaattcaggttcttgcagccacaagactgagggcctctgcttgttgttggctggaagctgctcttggctcctaggaggggctctaaaagggtgggccagcaaggaggagttctatacaatgcaacacagttgccagagtgacaccctatcacctttgccttattccattcattagaagcaagtcacagatcccacttacactcaaggggaggggaccaaacaagggcatgaattccaagaggtgaggatcacgaagggaggctgtctttgagtctgtcttccacaacaataataaataagtgccaggtgagtggtacagacaacaagtactgcaggaactcagctgggctccacatgtgaggtgrtgtcactgctgatgagctcgggccattcagaggcctgga

SEQ ID NO: 94334 - DNA, 2891 bp, Homo sapiens
gggatcctacaggggcctaatgttaccctgcagattgggtagccacttggagatcaggtatcaacctggggactgtggttgacctgcaggctaatgtccacctggggactggttattcacctgaggcctgatgcgcacctggggccgaatgtccccctcagggtgaattccacctcaggcctgtatgtccacctggggcctgatgtctgccttagatctgtgtcccactggggccttgtgttcaccggggactggtatccagctgtggcctgatgatctaccgcatcctgttgctcacctatgggctggtgtctacctggggcttggtgatcacctgggagccagatatcaacttggggcctgggtgtccacttaaggcctgatgtgggcctggggcctgattgcccacccggggactgggtgtccacctggggtctgatgtccacctgaagttaggtatctacctaaggcttggtgtctacctgtggcctgatgtccacatgagtctggggttcagttggggcctgctgtacatgtgggaccttggtgtctatctgagtcctgatggctacctggtgactgccatcctcttgaggcctgatatccacctgggaatggtttatccatggaaacggttatgtccacctggggctggatgtcgcccaatggctagatgtccacctgtggccccgtgtccacctagtgcctgatgtccacctgggacatggttttcacctgagacccgggtgtttacataggacctgatgtccagctggtgcctaggtgcccaccgggggccttgtgttaacctggggactggtatccagctcggtcctaatgaacacctgggttgaattattcacctagaatttggtattcatttagggcttgagtgtcagccttggacctggtgtccacctgggccttgggtatcaaactagggatttggtgtccagttgagacatcatgtgcacctggggtctgagtgttcacatgaggccagatgaccactgggggcctgaatgtcaacctggtgtcaaattcactgggagcctaggtatccacctggggcctgatgtccacctgggactaggtgtcaacgtgtggcctgatgtaaacctctagttcagtgttcaccttgggcctgatgtccactggaggactgatgttcccctttgatctgatgtccacctggaaaccgtgtattcacccatggcctgatggtcacctggggttgaatgtccaactgtggccagatgtgcacccggaacctgggcatccacctggggcctgatgtttagctggggcctggagttcacctgaggcatgatgtctacctgaagcttaatgttcatctgagtgctggatgttcacctggcgcctgatgtccacctggagcctgaggacccttctcaggcctgatgtccacaattggcctggtattcatctgggacctttgtgttaatgtggcctaatgtactcctgggttctagggtcctcttgggacctgatgtctaccaggatcctggtatccacctggggcctggtatccacctagggcttgatattcacctggggcctgggaatccacttgataactggtgcccatcgcggtcctgatgttcaccttgggactgggtaaccacctgaggcctgatgtccacttagggcataagtgtttatctggggtctagtgttcacatggggcctgatgtcaaccttgagcttaggtattcacaagaggactagtgtccagctggggccagatgttcacttggggcctggtgtcaacttgaagcatggttgtcaacctgggacctgatgtccagtccagtgtcygccttgggactgttttctacccagggcctgtgtgtccacatagaccctcgtgtcaatgtggggcctgggtatttaccaggggcctggatattcattggtacattatgtctactggggtctttgtgtcaatctgagctctgatgtccacctagagattgggtatccacctaaggcccggtgtttacatggggcctgtaacacgaggttccagatgaactcagatgtccacctgaggcctcatgtccacctgagttctgagtgttcacatagggcctgctgtcaacttggaacctaagtatttacctagggcctgggtgtccacctggggcctgacttccaactggatcttgtgtcaacatggggcctgatgtccactttgggcctaggtaacttcctgacgactaatgcccacatggctccgaaggaccatctgaggcctggtattaatttagagactggtatccacctggggtccaggtatccacttgggacctgatgttcacctggagtgtaggaattcacgtggggcctggtgtccaccttgagtgtgtgtatccaactgagtgctggtgtccacctggagtccagtgtatacctgggacctgatgtacatatgggacctgggcatccatctaggacctgatgttcacataagggctggcattctcctggcctggttcccatatggagcctgggcgtacacttggagcctgatgtcccaggtagatcgctgggccccagttgtcatcagatcctaggaaactctcaggccccaggtgcacataaagctccaagtggccacctaggccacaggttgatacacagggtccaggtggacactgggtgcaagatgaacaccaggtctctggtgaacgccaagcctcaggggtctacctagtcctcaagtgaacaccaggcactagattgacacacaggtaccaggtggatatcaggccacaggtgaacaccaggccccaggtggttgggttacttatagcataggtggccatcaggtcccaggtctatagccactccccacctgaaaatcagga

SEQ ID NO: 94335 - DNA, 2891 bp, Homo sapiens
gggatcctacaggggcctaatgttaccctgcagattgggtagccacttggagatcaggtatcaacctggggactgtggttgacctgcaggctaatgtccacctggggactggttattcacctgaggcctgatgcgcacctggggccgaatgtccccctcagggtgaattccacctcaggcctgtatgtccacctggggcctgatgtctgccttagatctgtgtcccactggggccttgtgttcaccggggactggtatccagctgtggcctgatgatctaccgcatcctgttgctcacctatgggctggtgtctacctggggcttggtgatcacctgggagccagatatcaacttggggcctgggtgtccacttaaggcctgatgtgggcctggggcctgattgcccacccggggactgggtgtccacctggggtctgatgtccacctgaagttaggtatctacctaaggcttggtgtctacctgtggcctgatgtccacatgagtctggggttcagttggggcctgctgtacatgtgggaccttggtgtctatctgagtcctgatggctacctggtgactgccatcctcttgaggcctgatatccacctgggaatggtttatccatggaaacggttatgtccacctggggctggatgtcgcccaatggctagatgtccacctgtggccccgtgtccacctagtgcctgatgtccacctgggacatggttttcacctgagacccgggtgtttacataggacctgatgtccagctggtgcctaggtgcccaccgggggccttgtgttaacctggggactggtatccagctcggtcctaatgaacacctgggttgaattattcacctagaatttggtattcatttagggcttgagtgtcagccttggacctggtgtccacctgggccttgggtatcaaactagggatttggtgtccagttgagacatcatgtgcacctggggtctgagtgttcacatgaggccagatgaccactgggggcctgaatgtcaacctggtgtcaaattcactgggagcctaggtatccacctggggcctgatgtccacctgggactaggtgtcaacgtgtggcctgatgtaaacctctagttcagtgttcaccttgggcctgatgtccactggaggactgatgttcccctttgatctgatgtccacctggaaaccgtgtattcacccatggcctgatggtcacctggggttgaatgtccaactgtggccagatgtgcacccggaacctgggcatccacctggggcctgatgtttagctggggcctggagttcacctgaggcatgatgtctacctgaagcttaatgttcatctgagtgctggatgttcacctggcgcctgatgtccacctggagcctgaggacccttctcaggcctgatgtccacaattggcctggtattcatctgggacctttgtgttaatgtggcctaatgtactcctgggttctagggtcctcttgggacctgatgtctaccaggatcctggtatccacctggggcctggtatccacctagggcttgatattcacctggggcctgggaatccacttgataactggtgcccatcgcggtcctgatgttcaccttgggactgggtaaccacctgaggcctgatgtccacttagggcataagtgtttatctggggtctagtgttcacatggggcctgatgtcaaccttgagcttaggtattcacaagaggactagtgtccagctggggccagatgttcacttggggcctggtgtcaacttgaagcatggttgtcaacctgggacctgatgtccagtccagtgtccgccttgggactgttttctacccagggcctgtgtgtccacatagaccctcgtgtcaatgtggggcctgggtatttaccaggggcctggatattcattggtacattatgtctactggggtctttgtgtcaatctgagctctgatgtccacctagagattgggtatccacctaaggcccggtgtttacatggggcctgtaacacgaggttccagatgaactcagatgtccacctgaggcctcatgtccacctgagttctgagtgttcacatagggcctgctgtcaacttggaacctaagtatttacctagggcctgggtgtccacctggggcctgacttccaactggatcttgtgtcaacatggggcctgatgtccactttgggcctaggtaacttcctgacgactaatgcccacatggctccgaaggaccatctgaggcctggtattaatttagagactggtatccacctggggtccaggtatccacttgggacctgatgttcacctggagtgtaggaattcacgtggggcctggtgtccaccttgagtgtgtgtatccaactgagtgctggtgtccacctggagtccagtgtatacctgggacctgatgtacatatgggacctgggcatccatctaggacctgatgttcacataagggctggcattctcctggcctggttcccatatggagcctgggcgtacacttggagcctgatgtcccaggtrgatcgctgggccccagttgtcatcagatcctaggaaactctcaggccccaggtgcacataaagctccaagtggccacctaggccacaggttgatacacagggtccaggtggacactgggtgcaagatgaacaccaggtctctggtgaacgccaagcctcaggggtctacctagtcctcaagtgaacaccaggcactagattgacacacaggtaccaggtggatatcaggccacaggtgaacaccaggccccaggtggttgggttacttatagcataggtggccatcaggtcccaggtctatagccactccccacctgaaaatcagga

SEQ ID NO: 94336 - DNA, 2891 bp, Homo sapiens
gggatcctacaggggcctaatgttaccctgcagattgggtagccacttggagatcaggtatcaacctggggactgtggttgacctgcaggctaatgtccacctggggactggttattcacctgaggcctgatgcgcacctggggccgaatgtccccctcagggtgaattccacctcaggcctgtatgtccacctggggcctgatgtctgccttagatctgtgtcccactggggccttgtgttcaccggggactggtatccagctgtggcctgatgatctaccgcatcctgttgctcacctatgggctggtgtctacctggggcttggtgatcacctgggagccagatatcaacttggggcctgggtgtccacttaaggcctgatgtgggcctggggcctgattgcccacccggggactgggtgtccacctggggtctgatgtccacctgaagttaggtatctacctaaggcttggtgtctacctgtggcctgatgtccacatgagtctggggttcagttggggcctgctgtacatgtgggaccttggtgtctatctgagtcctgatggctacctggtgactgccatcctcttgaggcctgatatccacctgggaatggtttatccatggaaacggttatgtccacctggggctggatgtcgcccaatggctagatgtccacctgtggccccgtgtccacctagtgcctgatgtccacctgggacatggttttcacctgagacccgggtgtttacataggacctgatgtccagctggtgcctaggtgcccaccgggggccttgtgttaacctggggactggtatccagctcggtcctaatgaacacctgggttgaattattcacctagaatttggtattcatttagggcttgagtgtcagccttggacctggtgtccacctgggccttgggtatcaaactagggatttggtgtccagttgagacatcatgtgcacctggggtctgagtgttcacatgaggccagatgaccactgggggcctgaatgtcaacctggtgtcaaattcactgggagcctaggtatccacctggggcctgatgtccacctgggactaggtgtcaacgtgtggcctgatgtaaacctctagttcagtgttcaccttgggcctgatgtccactggaggactgatgttcccctttgatctgatgtccacctggaaaccgtgtattcacccatggcctgatggtcacctggggttgaatgtccaactgtggccagatgtgcacccggaacctgggcatccacctggggcctgatgtttagctggggcctggagttcacctgaggcatgatgtctacctgaagcttaatgttcatctgagtgctggatgttcacctggcgcctgatgtccacctggagcctgaggacccttctcaggcctgatgtccacaattggcctggtattcatctgggacctttgtgttaatgtggcctaatgtactcctgggttctagggtcctcttgggacctgatgtctaccaggatcctggtatccacctggggcctggtatccacctagggcttgatattcacctggggcctgggaatccacttgataactggtgcccatcgcggtcctgatgttcaccttgggactgggtaaccacctgaggcctgatgtccacttagggcataagtgtttatctggggtctagtgttcacatggggcctgatgtcaaccttgagcttaggtattcacaagaggactagtgtccagctggggccagatgttcacttggggcctggtgtcaacttgaagcatggttgtcaacctgggacctgatgtccagtccagtgtccgccttgggactgttttctacccagggcctgtgtgtccacatagaccctcgtgtcaatgtggggcctgggtatttaccaggggcctggatattcattggtacattatgtctactggggtctttgtgtcaatctgagctctgatgtccacctagagattgggtatccacctaaggcccggtgtttacatggggcctgtaacacgaggttccagatgaactcagatgtccacctgaggcctcatgtccacctgagttctgagtgttcacatagggcctgctgtcaacttggaacctaagtatttacctagggcctgggtgtccacctggggcctgacttccaactggatcttgtgtcaacatggggcctgatgtccactttgggcctaggtaacttcctgacgactaatgcccacatggctccgaaggaccatctgaggcctggtattaatttagagactggtatccacctggggtccaggtatccacttgggacctgatgttcacctggagtgtaggaattcacgtggggcctggtgtccaccttgagtgtgtgtatccaactgagtgctggtgtccacctggagtccagtgtatacctgggacctgatgtacatatgggacctgggcatccatctaggacctgatgttcacataagggctggcattctcctggcctggttcccatatggagcctgggcgtacacttggagcctgatgtcccaggtagatcgctgggccccagttgtcatcagatcctaggaaactctcaggccccaggtgcacataaagctccaagtggccacctaggccacaggttgatacacagggtccaggtggacactgggtgcaagatgaacaccaggtctctggtgaacgccaagcctcaggkgtctacctagtcctcaagtgaacaccaggcactagattgacacacaggtaccaggtggatatcaggccacaggtgaacaccaggccccaggtggttgggttacttatagcataggtggccatcaggtcccaggtctatagccactccccacctgaaaatcagga

SEQ ID NO: 94337 - DNA, 486 bp, Homo sapiens
gagaatgagcatgcaaggrggtagagggtcggtggtgaaaaaattatagatttcaaagttattgtttgaaataacccaaacaagcaaaacattagtatttttatcttgaaattcttggtgaattttatgttctagcccataatatattagtttattttaacacaaaagtttcttccaaaatggacatgtccaaaagatacaccatgctggcgacgggggtggcggcggcggcagcgagttcggttgcgcgtgacgcaccgggtgggagcggagaccaggccgggagcaggcgccaccgccagcgaccatggggaacatgttggccgccagctcgccgcccgcagggccgccacctccgccctcgccgccgggcttcacgctgccgccgctgagaggcggcctgggcgccggcacccctaggagtcgaggttcggaacggacccccggggctgcaaccgccagcgcctcaggggccgccgaggatgg

SEQ ID NO: 94338 - DNA, 1485 bp, Homo sapiens
tgtgtgtaattgaaaggtgctataggtggtacaacaccatctggcttctctattttgaaactccacaccaggttaatcttgtccatggctgtggcttaaatctaaagtcaggttctggtgttttctggaatccatgcctagctctttgattctgaaaccaaatctggattctggactcttctgcattgattgctaaagcaagtttttgtttggtagcataacctgggtaaggtttttgagtgaaggtattgatgaggattttcaattgatcttctgtgaatttggtgcaattgcacctatgatttgttgctaccatcttgtgtgaagaggggtcttcaactatgyagaaagagagttctggaggctgagctactgtctgggagactgcttacagctcattttttaaaaagaaaggtcacatataatacaatataaaattcacaaatctaaagcttatggttttctgggttttgacaaatgaaaactcctgtgcaacttcaagccttaccaggatatggatgagggtttctatccaaaagcaccagtattctaacaaacaactttacgttttttgaattgtccagtgcctgtgaggattccttactccaagtttatgacaaacatattcagaaggcatagtctacaattagtgtttgggtaagtattttcatcaattgtctgattatttgctgtgaatttgaagtatgctgattcttatgtaattgtcttctgagaaacattgtgccatttttcttgtggaaaccacctgtagaataaacagaaattatgaacgcacagagttggttgtgatgggcacgtctacctgtggctgccatttaagtggaaggtggaatccgactctggagcatcggcagcctgagctgctgctgggctcacactgaccctgggagtgctctatgcatgcttcaccttatgaggggtgcagaaggaacaaaagtagaaaagtgtgctctactttcatgtgttaccaaaggacagaggacactaccaaggatttagaaaactgttaagtgaggatttattcttcttaatagcctttcaagcaaggaatttgaaaacaagattctactcatcccacaccaaaatgtaaacagatatattattttctatactcccaggataattttggttttacttaagcatcactatcgccctcaaatgtcaagtggaaaaataaatgtgaataatcccaccactagcctccagacttgatgttcatgctatttcgtttttaaaatgaccttttaaaagttataaattagaaacgtggaagtagaatggcttcatgcaagaaatactggaataagatccctgttctggtcccagagtcttagacaagtcattcagcctttctaagcatcagttctcccttcaggaaaacatgggcattcatctctacgggagctgctagctctaactgtcagtgagtttctgaaacttgcccaggaaggagcagccccagtg

SEQ ID NO: 94339 - DNA, 1485 bp, Homo sapiens
tgtgtgtaattgaaaggtgctataggtggtacaacaccatctggcttctctattttgaaactccacaccaggttaatcttgtccatggctgtggcttaaatctaaagtcaggttctggtgttttctggaatccatgcctagctctttgattctgaaaccaaatctggattctggactcttctgcattgattgctaaagcaagtttttgtttggtagcataacctgggtaaggtttttgagtgaaggtattgatgaggattttcaattgatcttctgtgaatttggtgcaattgcacctatgatttgttgctaccatcttgtgtgaagaggggtcttcaactatgcagaaagagagttctggaggctgagctactgtctgggagactgcttacagctcattttttaaaaagaaaggtcacatataatacaatataaaattcacaaatctaaagcttatggttttctgggttttgacaaatgaaaactcctgtgcaacttcaagccttaccaggatatggatgagggtttctatccaaaagcaccagtattctaacaaacaactttacgttttttgaattgtccagtgcctgtgaggattccttactccaartttatgacaaacatattcagaaggcatagtctacaattagtgtttgggtaagtattttcatcaattgtctgattatttgctgtgaatttgaagtatgctgattcttatgtaattgtcttctgagaaacattgtgccatttttcttgtggaaaccacctgtagaataaacagaaattatgaacgcacagagttggttgtgatgggcacgtctacctgtggctgccatttaagtggaaggtggaatccgactctggagcatcggcagcctgagctgctgctgggctcacactgaccctgggagtgctctatgcatgcttcaccttatgaggggtgcagaaggaacaaaagtagaaaagtgtgctctactttcatgtgttaccaaaggacagaggacactaccaaggatttagaaaactgttaagtgaggatttattcttcttaatagcctttcaagcaaggaatttgaaaacaagattctactcatcccacaccaaaatgtaaacagatatattattttctatactcccaggataattttggttttacttaagcatcactatcgccctcaaatgtcaagtggaaaaataaatgtgaataatcccaccactagcctccagacttgatgttcatgctatttcgtttttaaaatgaccttttaaaagttataaattagaaacgtggaagtagaatggcttcatgcaagaaatactggaataagatccctgttctggtcccagagtcttagacaagtcattcagcctttctaagcatcagttctcccttcaggaaaacatgggcattcatctctacgggagctgctagctctaactgtcagtgagtttctgaaacttgcccaggaaggagcagccccagtg

SEQ ID NO: 94340 - DNA, 918 bp, Homo sapiens
tgactgtgtgtaattgaaaggtgctatagrtggtacaacaccatctggcttctctattttgaaactccacaccaggttaatcttgtccatggctgtggcttaaatctaaagtcaggttctggtgttttctggaatccatgcctagctctttgattctgaaaccaaatctggattctggactcttctgcattgattgctaaagcaagtttttgtttggtagcataacctgggtaaggtttttgagtgaaggtattgatgaggattttcaattgatcttctgtgaatttggtgcaattgcacctatgatttgttgctaccatcttgtgtgaagaggggtcttcaactatgcagaaagagagttctggaggctgagctactgtctgggagactgcttacagctcattttttaaaaagaaaggtcacatataatacaatataaaattcacaaatctaaagcttatggttttctgggttttgacaaatgaaaactcctgtgcaacttcaagccttaccaggatatggatgagggtttctatccaaaagcaccagtattctaacaaacaactttacgttttttgaattgtccagtgcctgtgaggattccttactccaagtttatgacaaacatattcagaaggcatagtctacaattagtgtttgggtaagtattttcatcaattgtctgattatttgctgtgaatttgaagtatgctgattcttatgtaattgtcttctgagaaacattgtgccatttttcttgtggaaaccacctgtagaataaacagaaattatgaacgcacagagttggttgtgatgggcacgtctacctgtggctgccatttaagtggaaggtggaatccgactctggagcatcggcagcctgagctgctgctgggctcacactgaccctgggagtgc

SEQ ID NO: 94341 - DNA, 918 bp, Homo sapiens
tgactgtgtgtaattgaaaggtgctataggtggtacaacaccatctggcttctctattttgaaactccacaccaggttaatcttgtccatggctgtggcttaaatctaargtcaggttctggtgttttctggaatccatgcctagctctttgattctgaaaccaaatctggattctggactcttctgcattgattgctaaagcaagtttttgtttggtagcataacctgggtaaggtttttgagtgaaggtattgatgaggattttcaattgatcttctgtgaatttggtgcaattgcacctatgatttgttgctaccatcttgtgtgaagaggggtcttcaactatgcagaaagagagttctggaggctgagctactgtctgggagactgcttacagctcattttttaaaaagaaaggtcacatataatacaatataaaattcacaaatctaaagcttatggttttctgggttttgacaaatgaaaactcctgtgcaacttcaagccttaccaggatatggatgagggtttctatccaaaagcaccagtattctaacaaacaactttacgttttttgaattgtccagtgcctgtgaggattccttactccaagtttatgacaaacatattcagaaggcatagtctacaattagtgtttgggtaagtattttcatcaattgtctgattatttgctgtgaatttgaagtatgctgattcttatgtaattgtcttctgagaaacattgtgccatttttcttgtggaaaccacctgtagaataaacagaaattatgaacgcacagagttggttgtgatgggcacgtctacctgtggctgccatttaagtggaaggtggaatccgactctggagcatcggcagcctgagctgctgctgggctcacactgaccctgggagtgc

SEQ ID NO: 94342 - DNA, 918 bp, Homo sapiens
tgactgtgtgtaattgaaaggtgctataggtggtacaacaccatctggcttctctattttgaaactccacaccaggttaatcttgtccatggctgtggcttaaatctaaagtcaggttctggtgttttctggaatccatgcctagctctttgattctgaaaccaawtctggattctggactcttctgcattgattgctaaagcaagtttttgtttggtagcataacctgggtaaggtttttgagtgaaggtattgatgaggattttcaattgatcttctgtgaatttggtgcaattgcacctatgatttgttgctaccatcttgtgtgaagaggggtcttcaactatgcagaaagagagttctggaggctgagctactgtctgggagactgcttacagctcattttttaaaaagaaaggtcacatataatacaatataaaattcacaaatctaaagcttatggttttctgggttttgacaaatgaaaactcctgtgcaacttcaagccttaccaggatatggatgagggtttctatccaaaagcaccagtattctaacaaacaactttacgttttttgaattgtccagtgcctgtgaggattccttactccaagtttatgacaaacatattcagaaggcatagtctacaattagtgtttgggtaagtattttcatcaattgtctgattatttgctgtgaatttgaagtatgctgattcttatgtaattgtcttctgagaaacattgtgccatttttcttgtggaaaccacctgtagaataaacagaaattatgaacgcacagagttggttgtgatgggcacgtctacctgtggctgccatttaagtggaaggtggaatccgactctggagcatcggcagcctgagctgctgctgggctcacactgaccctgggagtgc

SEQ ID NO: 94343 - DNA, 918 bp, Homo sapiens
tgactgtgtgtaattgaaaggtgctataggtggtacaacaccatctggcttctctattttgaaactccacaccaggttaatcttgtccatggctgtggcttaaatctaaagtcaggttctggtgttttctggaatccatgcctagctctttgattctgaaaccaaatctggattctggactcttctgcattgattgctaaagcaagtttttgtttggtagcawaacctgggtaaggtttttgagtgaaggtattgatgaggattttcaattgatcttctgtgaatttggtgcaattgcacctatgatttgttgctaccatcttgtgtgaagaggggtcttcaactatgcagaaagagagttctggaggctgagctactgtctgggagactgcttacagctcattttttaaaaagaaaggtcacatataatacaatataaaattcacaaatctaaagcttatggttttctgggttttgacaaatgaaaactcctgtgcaacttcaagccttaccaggatatggatgagggtttctatccaaaagcaccagtattctaacaaacaactttacgttttttgaattgtccagtgcctgtgaggattccttactccaagtttatgacaaacatattcagaaggcatagtctacaattagtgtttgggtaagtattttcatcaattgtctgattatttgctgtgaatttgaagtatgctgattcttatgtaattgtcttctgagaaacattgtgccatttttcttgtggaaaccacctgtagaataaacagaaattatgaacgcacagagttggttgtgatgggcacgtctacctgtggctgccatttaagtggaaggtggaatccgactctggagcatcggcagcctgagctgctgctgggctcacactgaccctgggagtgc

SEQ ID NO: 94344 - DNA, 918 bp, Homo sapiens
tgactgtgtgtaattgaaaggtgctataggtggtacaacaccatctggcttctctattttgaaactccacaccaggttaatcttgtccatggctgtggcttaaatctaaagtcaggttctggtgttttctggaatccatgcctagctctttgattctgaaaccaaatctggattctggactcttctgcattgattgctaaagcaagtttttgtttggtagcataacctgggtaaggtttttgagtgaaggtattgatgaggattttcaattgatcttctgtgaatttggtgyaattgcacctatgatttgttgctaccatcttgtgtgaagaggggtcttcaactatgcagaaagagagttctggaggctgagctactgtctgggagactgcttacagctcattttttaaaaagaaaggtcacatataatacaatataaaattcacaaatctaaagcttatggttttctgggttttgacaaatgaaaactcctgtgcaacttcaagccttaccaggatatggatgagggtttctatccaaaagcaccagtattctaacaaacaactttacgttttttgaattgtccagtgcctgtgaggattccttactccaagtttatgacaaacatattcagaaggcatagtctacaattagtgtttgggtaagtattttcatcaattgtctgattatttgctgtgaatttgaagtatgctgattcttatgtaattgtcttctgagaaacattgtgccatttttcttgtggaaaccacctgtagaataaacagaaattatgaacgcacagagttggttgtgatgggcacgtctacctgtggctgccatttaagtggaaggtggaatccgactctggagcatcggcagcctgagctgctgctgggctcacactgaccctgggagtgc

SEQ ID NO: 94345 - DNA, 796 bp, Homo sapiens
ttctaaatgcatgcacctgagtaaaaggatctgggctgcagtctaggctgagagatgccagcaaaggctgcctaggccagtgcagtccagtaaatccctctttaatcttctyttccacacagacagcagtgatgagcatgcccacgaacccacatgattattttgggaaaaatgaaagagttgtattctttttgtggtagtaattccacttccaggggcaaatacattttgattattttatcacctttcagtgagttgtttttgttctttaaccaaggatgtatgtttgaggtaagaagtaaagcataaagtatatgattttttgtgtgtatttttatcttgctatacccatagggaatgtttaattctgccttggaagtggccatatttgaaggtgctgtgattcaaactgtcagcgagataaggcagcagatcaagaaagcactccgggctccagaaggagccttccaggccagctttgagcataagctgctgatgagcagtgagtgtcttgagtagtgttcagggcagcatgttaccattcatgcttgacttctagccagtgtgacgagaggctggagtcaggtctctagagagttgagcagctccagccttagatctcccagtcttatgcggtgtgcccattcgctttgtgtctgcagtcccctggccacacccagtaacagttctgggatctatgggagtagcttccttagtgagctttcccttcaaatactttgcaaccaggtagagaattttggagtgaaggttttgttcttcgtttcttcacaatatg

SEQ ID NO: 94346 - DNA, 796 bp, Homo sapiens
ttctaaatgcatgcacctgagtaaaaggatctgggctgcagtctaggctgagagatgccagcaaaggctgcctaggccagtgcagtccagtaaatccctctttaatcttcttttccacacagacagcagtgatgagcatgcccaygaacccacatgattattttgggaaaaatgaaagagttgtattctttttgtggtagtaattccacttccaggggcaaatacattttgattattttatcacctttcagtgagttgtttttgttctttaaccaaggatgtatgtttgaggtaagaagtaaagcataaagtatatgattttttgtgtgtatttttatcttgctatacccatagggaatgtttaattctgccttggaagtggccatatttgaaggtgctgtgattcaaactgtcagcgagataaggcagcagatcaagaaagcactccgggctccagaaggagccttccaggccagctttgagcataagctgctgatgagcagtgagtgtcttgagtagtgttcagggcagcatgttaccattcatgcttgacttctagccagtgtgacgagaggctggagtcaggtctctagagagttgagcagctccagccttagatctcccagtcttatgcggtgtgcccattcgctttgtgtctgcagtcccctggccacacccagtaacagttctgggatctatgggagtagcttccttagtgagctttcccttcaaatactttgcaaccaggtagagaattttggagtgaaggttttgttcttcgtttcttcacaatatg

SEQ ID NO: 94347 - DNA, 796 bp, Homo sapiens
ttctaaatgcatgcacctgagtaaaaggatctgggctgcagtctaggctgagagatgccagcaaaggctgcctaggccagtgcagtccagtaaatccctctttaatcttcttttccacacagacagcagtgatgagcatgcccacgaacccacatgattattttgggaaaaatgaaagagttgtattctttttgtggtagtaattccacttccaggggcaaayacattttgattattttatcacctttcagtgagttgtttttgttctttaaccaaggatgtatgtttgaggtaagaagtaaagcataaagtatatgattttttgtgtgtatttttatcttgctatacccatagggaatgtttaattctgccttggaagtggccatatttgaaggtgctgtgattcaaactgtcagcgagataaggcagcagatcaagaaagcactccgggctccagaaggagccttccaggccagctttgagcataagctgctgatgagcagtgagtgtcttgagtagtgttcagggcagcatgttaccattcatgcttgacttctagccagtgtgacgagaggctggagtcaggtctctagagagttgagcagctccagccttagatctcccagtcttatgcggtgtgcccattcgctttgtgtctgcagtcccctggccacacccagtaacagttctgggatctatgggagtagcttccttagtgagctttcccttcaaatactttgcaaccaggtagagaattttggagtgaaggttttgttcttcgtttcttcacaatatg

SEQ ID NO: 94348 - DNA, 796 bp, Homo sapiens
ttctaaatgcatgcacctgagtaaaaggatctgggctgcagtctaggctgagagatgccagcaaaggctgcctaggccagtgcagtccagtaaatccctctttaatcttcttttccacacagacagcagtgatgagcatgcccacgaacccacatgattattttgggaaaaatgaaagagttgtattctttttgtggtagtaattccacttccaggggcaaatacattttgattattttatcacctttcagtgagttgtttttgttctttaaccaaggatgtatgtttgaggtaagaagtaaagcataaagtatatgattttttgtgtgtatttttatcttgctatacccatagggaatgtttaattctgccttggaagtggccatatttgaaggtgctgtgattcaaactgtcagcgagataaggcagcagatcaagaaagcactccgggctccagaaggagccttccaggccagctttgagcataagctgctgatgagcagtgagtgtcttgagtagtgttcagggcagcatgttaccattcatgcttgacttctagccagtgtgacgagaggctggagtcaggtctctagagagttgagcagctccagccttagatctcccagtcttatgcggtgtgcccattcgctttgtgtctgcagtcccctggccacacccagtaacagttctgggatctatgggagtagcttccttagtgagctttcccttcaaatactttgcaaccaggtagagaaktttggagtgaaggttttgttcttcgtttcttcacaatatg

SEQ ID NO: 94349 - DNA, 563 bp, Homo sapiens
tggaaataaaaaaatacaataagtttttgtgtatctgtgtatgcatcacatattttttaactttcttcacaagttcattgagatgtaatttatacrttatttaattcactcatttaaagtgtacatttcaatttgttagtgtattaactgggtggataaacaatcacaatataattttagaacatttttatgctccttaaaagaaaccttgcactcattagcaaacttttcccattttctccacttccttgaaacccctctcagccctaggcaaccatccacccacttcctaactaaggatttgcctactctggaaggatttgcttgttctggacatttcatgtaaatggaatcataataatacatagttacgtgtgacccactgctttcacttatgtttttaacgttcatcctttttgaagcatgtatattaatacctttttcttttttattgccaaatactattgtatttcatggacagaccacattttattaatccactctgcaattcatggacatttctgttgcttcccactttttgttgctgtaagtacttgtatgct

SEQ ID NO: 94350 - DNA, 563 bp, Homo sapiens
tggaaataaaaaaatacaataagtttttgtgtatctgtgtatgcatcacatattttttaactttcttcacaagttcattgagatgtaatttatacattatttaattcactcatttaaagtgtacatttcaatttgttagtgtattaactgggtggataaacaatcacaatataattttagaacatttttatgctccttaaaagaaaccttgcactcattagcaawcttttcccattttctccacttccttgaaacccctctcagccctaggcaaccatccacccacttcctaactaaggatttgcctactctggaaggatttgcttgttctggacatttcatgtaaatggaatcataataatacatagttacgtgtgacccactgctttcacttatgtttttaacgttcatcctttttgaagcatgtatattaatacctttttcttttttattgccaaatactattgtatttcatggacagaccacattttattaatccactctgcaattcatggacatttctgttgcttcccactttttgttgctgtaagtacttgtatgct

SEQ ID NO: 94351 - DNA, 563 bp, Homo sapiens
tggaaataaaaaaatacaataagtttttgtgtatctgtgtatgcatcacatattttttaactttcttcacaagttcattgagatgtaatttatacattatttaattcactcatttaaagtgtacatttcaatttgttagtgtattaactgggtggataaacaatcacaatataattttagaacatttttatgctccttaaaagaaaccttgcactcattagcaaacttttcccattttctccacttccttgaaacccctcycagccctaggcaaccatccacccacttcctaactaaggatttgcctactctggaaggatttgcttgttctggacatttcatgtaaatggaatcataataatacatagttacgtgtgacccactgctttcacttatgtttttaacgttcatcctttttgaagcatgtatattaatacctttttcttttttattgccaaatactattgtatttcatggacagaccacattttattaatccactctgcaattcatggacatttctgttgcttcccactttttgttgctgtaagtacttgtatgct

SEQ ID NO: 94352 - DNA, 563 bp, Homo sapiens
tggaaataaaaaaatacaataagtttttgtgtatctgtgtatgcatcacatattttttaactttcttcacaagttcattgagatgtaatttatacattatttaattcactcatttaaagtgtacatttcaatttgttagtgtattaactgggtggataaacaatcacaatataattttagaacatttttatgctccttaaaagaaaccttgcactcattagcaaacttttcccattttctccacttccttgaaacccctctcagccctaggcaaccatccacccacttcctaactaaggatttgcctactctggaaggatttgcytgttctggacatttcatgtaaatggaatcataataatacatagttacgtgtgacccactgctttcacttatgtttttaacgttcatcctttttgaagcatgtatattaatacctttttcttttttattgccaaatactattgtatttcatggacagaccacattttattaatccactctgcaattcatggacatttctgttgcttcccactttttgttgctgtaagtacttgtatgct

SEQ ID NO: 94353 - DNA, 563 bp, Homo sapiens
tggaaataaaaaaatacaataagtttttgtgtatctgtgtatgcatcacatattttttaactttcttcacaagttcattgagatgtaatttatacattatttaattcactcatttaaagtgtacatttcaatttgttagtgtattaactgggtggataaacaatcacaatataattttagaacatttttatgctccttaaaagaaaccttgcactcattagcaaacttttcccattttctccacttccttgaaacccctctcagccctaggcaaccatccacccacttcctaactaaggatttgcctactctggaaggatttgcttgttcyggacatttcatgtaaatggaatcataataatacatagttacgtgtgacccactgctttcacttatgtttttaacgttcatcctttttgaagcatgtatattaatacctttttcttttttattgccaaatactattgtatttcatggacagaccacattttattaatccactctgcaattcatggacatttctgttgcttcccactttttgttgctgtaagtacttgtatgct

SEQ ID NO: 94354 - DNA, 629 bp, Homo sapiens
cctcctccttcagaatccctcctcctcactccccattcgtgggctgcttctcccaggatcaggcagcctctgcccaccttttctcacttcaccctttctccttgcagaattagaaagaatcggctccagctatttgtttcttactgtggatttatccatgtgtcacctctcccaggcagaattacattctgaaggcatctctaattgagattgctccatggggaaggactcttagggctcagraagcaggtggtaaagccctggagtgaggcaggaaccccaaagccctatgacaccccatataggtacccccaaacctgcctatacttcaggccaggcccccagtatagagatggaaaaatagtcccacttttggtcacagattctggaaaactgtgagattctggggaaatccattttgagtaataccttttagaagaagaaaaaaatggaagtagcttatcatagaatgggttttgttagacaaagatggcaattcaggaggaaacataaatttaacaactctcaagtatgcacagctgacatctcgtagagcggggctggtgactaagccagaagttactgtctgcatcctttgtaacttacaaataaaaatgaggaccagacat

SEQ ID NO: 94355 - DNA, 753 bp, Homo sapiens
tgcatctgtaacagtgtttatttcagcatcatttctgaaagaaaatttgaaacaatatctaagtgtccattgatagagaaatgattaaatattaatattaaatgattaaatatgattaaaaatgcagcataggcaaaaggtagaatagtatgttgctgtcaaaaatcagtttttgaagagtaatgatctggaatacagtatgttcattacataatataacgttaaaaggaggatgtaaagttatayattcaacatgatttcagtttgatctctaaaatggtaagaattcttgttttcataatacttttctgtattttccaaattttctacaatggaaatccatgacttttataatcagggggaaaattattattcaaagaaatggatttgtcccaaagaaaactcccccttttcagtgacagtatggttccaatagcccagcacatggataagagaagtgactacaataaagattaccatgatcccaacctctaaaacattctctctccgtgcctcctcagcaaggtatcctcctgctaaaggcagtgtctacacccgtagggggaatactattacagacactctagagaaccaggccaacagtgacttttcagttacattgacggctcaaagtttgaccacaaagcagcattagcagagtgggttctgtctattcaacaacagatgatcctgcctcccaattatcacagataagccattcagcaaatgcaccatcaacccaaacaatacttg

SEQ ID NO: 94356 - DNA, 753 bp, Homo sapiens
tgcatctgtaacagtgtttatttcagcatcatttctgaaagaaaatttgaaacaatatctaagtgtccattgatagagaaatgattaaatattaatattaaatgattaaatatgattaaaaatgcagcataggcaaaaggtagaatagtatgttgctgtcaaaaatcagtttttgaagagtaatgatctggaatacagtatgttcattacataatataacgttaaaaggaggatgtaaagttatacattcaacatgatttcagtttgatctctaaaatggtaagaattcttgttttcataatacttttctgtattttccaaattttctacaatggaaatccatgacttttataatcagggggaaaattattattcaaagaaatggatttgtcccaaagaaaactcccccttttcagtgacagtatggttccaatagcccagcacatggataagagaagtgactacartaaagattaccatgatcccaacctctaaaacattctctctccgtgcctcctcagcaaggtatcctcctgctaaaggcagtgtctacacccgtagggggaatactattacagacactctagagaaccaggccaacagtgacttttcagttacattgacggctcaaagtttgaccacaaagcagcattagcagagtgggttctgtctattcaacaacagatgatcctgcctcccaattatcacagataagccattcagcaaatgcaccatcaacccaaacaatacttg

SEQ ID NO: 94357 - DNA, 753 bp, Homo sapiens
tgcatctgtaacagtgtttatttcagcatcatttctgaaagaaaatttgaaacaatatctaagtgtccattgatagagaaatgattaaatattaatattaaatgattaaatatgattaaaaatgcagcataggcaaaaggtagaatagtatgttgctgtcaaaaatcagtttttgaagagtaatgatctggaatacagtatgttcattacataatataacgttaaaaggaggatgtaaagttatacattcaacatgatttcagtttgatctctaaaatggtaagaattcttgttttcataatacttttctgtattttccaaattttctacaatggaaatccatgacttttataatcagggggaaaattattattcaaagaaatggatttgtcccaaagaaaactcccccttttcagtgacagtatggttccaatagcccagcacatggataagagaagtgactacaataaagattaccatgatcccaacctctaaaacattctctctccgtgcctcctcagcaaggtatcctcctgctaaaggcagtgtctacacccgtagggggaatactattacagacactctagagaaccaggccaacagtgacttttcagttacattracggctcaaagtttgaccacaaagcagcattagcagagtgggttctgtctattcaacaacagatgatcctgcctcccaattatcacagataagccattcagcaaatgcaccatcaacccaaacaatacttg

SEQ ID NO: 94358 - DNA, 638 bp, Homo sapiens
gatccttggaagagtggggctacttctttcccaattgttgaatctttttatgtctatttttggttttaatacatgttatggaagcataatcgtccttccaaaaatacttggtaaccaacattggtttaatggtgtataaaatttattttggctttaacaaggcatctggatcacagattcctataaaggttgcaaagtcaggccccaagtgatacagtccatgggacactgcctttcccatccctatccattcctcctgctcctactcccagctgccttgtgwgaaaaggtcagttgtactggtttgcccaggataatgaaatgtcactgaatgagctgctataacactaactatttttactgcttttgcatgttcctttctacttttatctcatctttgaaagatgttttacgacatctttgcaagatgaatggaaaaggcaatggggcatgcactgaaatgtggactatgctaaagctttgcaactcaagaccaaattccacattgatacttcctagtcacttccatagtctgcttgctgctttccctgcctcctccaccctatcccaccccaaccaattcagatggacttcaaaaattcaagtccagtagggcacagtagcttataccagtaatc

SEQ ID NO: 94359 - DNA, 736 bp, Homo sapiens
gtgttctctgcatcatgtacatttcaaggtgtagactgtgttctgaagggagagtcggccccacatccttaccttcttttcctgtggtttattgcagaactcagctgccttcacctcctcctgccatttttcatcacttctgagactgttagctcttagaccccccaaatagaacagtttcctttgtgagcccctattatatgcttgccaccattgtttttcaaacctaggatcctccaaactcagtgccactcagcctcttctactgatgaagaaactggagttcaaaggcttgcttgyagcttcccaggtgtatgacgagtatttcaggtcggccagcgccttgtgaagcccacactccagggttgagggcaacatgtaacaatgtcagggaaggctgaggaagtgctgtgccatcgcaaaagaataaaatataagtctagaaatgcggaaggtactgtacagcatcacagctacctaaacttcctctatgggaagacagggaaagtaggcgttagtggcaagacagagtggctttgagtctaagtgtcataataaactctgacggggaaaaataaggggcagcatttgcacatgtgtgctgcagattacccgctgtgaggcagcggtgagtttgttgccttgtgttttaaaaagtaattttctgggccgggcgtggtggctcacacctgtaatcccagcactttgggtggccaaggcaggtggatcacttgag

SEQ ID NO: 94360 - DNA, 736 bp, Homo sapiens
gtgttctctgcatcatgtacatttcaaggtgtagactgtgttctgaagggagagtcggccccacatccttaccttcttttcctgtggtttattgcagaactcagctgccttcacctcctcctgccatttttcatcacttctgagactgttagctcttagaccccccaaatagaacagtttcctttgtgagcccctattatatgcttgccaccattgtttttcaaacctaggatcctccaaactcagtgccactcagcctcttctactgatgaagaaactggagttcaaaggcttgcttgcagcttcccaggtgtatgaygagtatttcaggtcggccagcgccttgtgaagcccacactccagggttgagggcaacatgtaacaatgtcagggaaggctgaggaagtgctgtgccatcgcaaaagaataaaatataagtctagaaatgcggaaggtactgtacagcatcacagctacctaaacttcctctatgggaagacagggaaagtaggcgttagtggcaagacagagtggctttgagtctaagtgtcataataaactctgacggggaaaaataaggggcagcatttgcacatgtgtgctgcagattacccgctgtgaggcagcggtgagtttgttgccttgtgttttaaaaagtaattttctgggccgggcgtggtggctcacacctgtaatcccagcactttgggtggccaaggcaggtggatcacttgag

SEQ ID NO: 94361 - DNA, 736 bp, Homo sapiens
gtgttctctgcatcatgtacatttcaaggtgtagactgtgttctgaagggagagtcggccccacatccttaccttcttttcctgtggtttattgcagaactcagctgccttcacctcctcctgccatttttcatcacttctgagactgttagctcttagaccccccaaatagaacagtttcctttgtgagcccctattatatgcttgccaccattgtttttcaaacctaggatcctccaaactcagtgccactcagcctcttctactgatgaagaaactggagttcaaaggcttgcttgcagcttcccaggtgtatgacgagtatttcaggtcggccagcgccttgtgaagcccacactccagggttgagggcaacatgtaacaatgtcagggaaggctgaggaagtgctgtgccatcgcaaaagaataaaatataagtctagaaatgcggaaggtactgtacagcatcacagctacctaaacttcctctrtgggaagacagggaaagtaggcgttagtggcaagacagagtggctttgagtctaagtgtcataataaactctgacggggaaaaataaggggcagcatttgcacatgtgtgctgcagattacccgctgtgaggcagcggtgagtttgttgccttgtgttttaaaaagtaattttctgggccgggcgtggtggctcacacctgtaatcccagcactttgggtggccaaggcaggtggatcacttgag

SEQ ID NO: 94362 - DNA, 737 bp, Homo sapiens
agagaattgctgtgattaattttacagggcaacttggctaggccatggtgctcagatatgtggtaagctgttattttggatgttttcatgagggtttttgggaggagatcaacatttaaatcagccaagttgaagtaaagcagatggcgctccctaatgtgggtggggctcacccaatcagttgaaggcaggaatagaacaacttctgacctctttgagcaagaaagacttctgcctgcagatggcctttgggcgtcaattgcaactcttccctgagcctctagactgttgcctaccccatcagatttgggactcactatggctccacaattacatgtcaattccgtaaaataaatctctctccacttacatacgtacacacacacacacacacacacacacacacacaygacctgttggttttgttactggggagaactctgactaatataattatcccaaagtttcagtttctggtctgaaagtgatcttcagtccacttattcctgtgctttgcaaattctacctctttttcaaatttcaaaattcagaacatttcaaaaataagttgacattgcaaatttcatctcatcaaatgctaaaaaaagttcatacttctggccgggcgtggtggctcatgcctgtaatcccagcattttgggaggctgaggcgggtggatcacctgaggtcaggagtttaagaccagcctgtccaacatggtgaaaccccatctcta

SEQ ID NO: 94363 - DNA, 667 bp, Homo sapiens
caaaaaattagccagacgtggtggctcttgcctgtaatcccagcacttgggaggctgaggcgggtggatcacctgaggtcaggagtttgagaacagcctggccaacagacgaaacctcatctctactaaaaatacaaaaattagcccggtgtggtggcacatgcctgtagtcccagctacttgggaggctgaggcaggagaatcttttgaacccggcaggtggaggttgcagtgagctgagatcgcgccactgcactccggcctgggcaacagagtgagaccctgtctaaaaaacaacaacaacaamaacaacaaaaccccaaaaacaaaaaaacccacaacctattgtccagtcaagtctttcttgctaccagagcaggggacatgccactgatgagagcgtcttctctgttccttccaaacactcagcccagcattcagatcattgctcacccagtgcagagtcacggtgccagggtatggagtacagatgccagagccacagccatcagagacagtgtttttgttttctagggccctgcaacaaatgaccacgagctatgtggtttgtagcaatagtaatgtattctctcacagctctggagtctggaagtcccaaatcaagatgttggcagggctgtgctccctctgaggcctcctccaggga

SEQ ID NO: 94364 - DNA, 667 bp, Homo sapiens
caaaaaattagccagacgtggtggctcttgcctgtaatcccagcacttgggaggctgaggcgggtggatcacctgaggtcaggagtttgagaacagcctggccaacagacgaaacctcatctctactaaaaatacaaaaattagcccggtgtggtggcacatgcctgtagtcccagctacttgggaggctgaggcaggagaatcttttgaacccggcaggtggaggttgcagtgagctgagatcgcgccactgcactccggcctgggcaacagagtgagaccctgtctaaaaaacaacaacaacaacaamaacaaaaccccaaaaacaaaaaaacccacaacctattgtccagtcaagtctttcttgctaccagagcaggggacatgccactgatgagagcgtcttctctgttccttccaaacactcagcccagcattcagatcattgctcacccagtgcagagtcacggtgccagggtatggagtacagatgccagagccacagccatcagagacagtgtttttgttttctagggccctgcaacaaatgaccacgagctatgtggtttgtagcaatagtaatgtattctctcacagctctggagtctggaagtcccaaatcaagatgttggcagggctgtgctccctctgaggcctcctccaggga

SEQ ID NO: 94365 - DNA, 667 bp, Homo sapiens
caaaaaattagccagacgtggtggctcttgcctgtaatcccagcacttgggaggctgaggcgggtggatcacctgaggtcaggagtttgagaacagcctggccaacagacgaaacctcatctctactaaaaatacaaaaattagcccggtgtggtggcacatgcctgtagtcccagctacttgggaggctgaggcaggagaatcttttgaacccggcaggtggaggttgcagtgagctgagatcgcgccactgcactccggcctgggcaacagagtgagaccctgtctaaaaaacaacaacaacaacaacaacaaaaccccmaaaacaaaaaaacccacaacctattgtccagtcaagtctttcttgctaccagagcaggggacatgccactgatgagagcgtcttctctgttccttccaaacactcagcccagcattcagatcattgctcacccagtgcagagtcacggtgccagggtatggagtacagatgccagagccacagccatcagagacagtgtttttgttttctagggccctgcaacaaatgaccacgagctatgtggtttgtagcaatagtaatgtattctctcacagctctggagtctggaagtcccaaatcaagatgttggcagggctgtgctccctctgaggcctcctccaggga

SEQ ID NO: 94366 - DNA, 524 bp, Homo sapiens
ataaagtcattggtggatgaatcatggggatctggataatgtttttgtctatgacagcctttatttctttaataaaaacaacaaatatcacaaatcacttctcaacaataaaaatatgttttcacaaagcaaaaacctacgttttgctgtgawaatggcagcacatctgtcattctcaacacatcttaaacagtcgtacatggcgtgtggttggggccatgggactcttctgaaaaaggctacaagaattaggtcatctcaaatcattagggtatttttttccatgatgattattttgagttgtaacatatgttaaattaaaataaactttatatggctttggatttccccaaatctttcaaaaagtaaaatcctattcaaatggctcaaaaataatactgtaaaatatactccagtccccctttaagagttttctgatatactggaatagacttagaaactgtggccagaagggtcggctctttttgcccgcttcttaggcaggtgtttccacagatcacaag

SEQ ID NO: 94367 - DNA, 629 bp, Homo sapiens
gtcatggaacttaacaatacgccgtagtcctcaattcatgtctgaagcattaatgctattttcatttatttctgtctttcatatgcagtgggatcttaacaaattgaggcctagagatggacagaaagactcccaggcaccagaaagctatttcttgcagccaccacgttgctgtgattaacaaaatagttggatgcattttccactcaaaagtggctacagggggaactgagtgtgagttgttcactrtcaactaacagcaccattagaattatgttaaagctgagctaagagaagcaagagaaaggatgctactcaagaagaatcttctagtgaaagagtgaaaactttattggtctcaatggcagtggtgaatcaaggacttttttttttttttttttttttttgagatggagtctctctctgtcgcccaggctggagtgcaatggtgagatcttggggctcactgcaacccctgcctcctgggttcaagcaattctcctgcctcagcctcctgagtagctgggattacaggcacccgccaccacgcccagctaattttttgtatttttagtaaagacgaggtttcaccatgttggccaggctggtctcgaactcctgacctcggg

SEQ ID NO: 94368 - DNA, 629 bp, Homo sapiens
gtcatggaacttaacaatacgccgtagtcctcaattcatgtctgaagcattaatgctattttcatttatttctgtctttcatatgcagtgggatcttaacaaattgaggcctagagatggacagaaagactcccaggcaccagaaagctatttcttgcagccaccacgttgctgtgattaacaaaatagttggatgcattttccactcaaaagtggctacagggggaactgagtgtgagttgttcactgtcaactaacagcaccattagaattatgttaaagctgagctaagagaagcaagagaaaggatgctactcaagaagaatcttctagtgaaagagtgaaaactttattggtctcaatggcagtggtgaatcaaggacttttttttttttttttttttttttgagatggagtctctctctgtcgcccaggctggagtrcaatggtgagatcttggggctcactgcaacccctgcctcctgggttcaagcaattctcctgcctcagcctcctgagtagctgggattacaggcacccgccaccacgcccagctaattttttgtatttttagtaaagacgaggtttcaccatgttggccaggctggtctcgaactcctgacctcggg

SEQ ID NO: 94369 - DNA, 623 bp, Homo sapiens
ctgagggcagcagaatgaaaagcatgctcactgaacagggagataaacccaccccatccaatggtgttgaaaagtatggtgtagtcttggagggaccagtgttcccaaacttgcaggatatcrccggaacccaaactgaaattatggtttaatgcctctcaaaactggtgagcccactgttcttctcacatgtatctccatatgtggacgtgcaccagagcctttttctaccctctgaaggagagaagcgttctgtttaggggctcgtagaagagaggaacatgagaaggctgagaagagtggaggacccaacagagaactaccatctccagtctcccaggctgggttgagcctcagcagaaaagcgtgttgacctcagcacgggcagtggaaaaccagacatccaatgtgtttgcaagaaatattcatttagattcacagagctcttggtctaagcctaggatcttggtaggagagggaggcgggggtctttggcctctgggattcattgtatcaaccaccagcaatctttggaatgggccagctgctccctaggccagagctgttagggctggaggcggggaggccatttggacagttgaagaactctgtaaaactacctt

SEQ ID NO: 94370 - DNA, 623 bp, Homo sapiens
ctgagggcagcagaatgaaaagcatgctcactgaacagggagataaacccaccccatccaatggtgttgaaaagtatggtgtagtcttggagggaccagtgttcccaaacttgcaggatatcgccggaacccaaactgraattatggtttaatgcctctcaaaactggtgagcccactgttcttctcacatgtatctccatatgtggacgtgcaccagagcctttttctaccctctgaaggagagaagcgttctgtttaggggctcgtagaagagaggaacatgagaaggctgagaagagtggaggacccaacagagaactaccatctccagtctcccaggctgggttgagcctcagcagaaaagcgtgttgacctcagcacgggcagtggaaaaccagacatccaatgtgtttgcaagaaatattcatttagattcacagagctcttggtctaagcctaggatcttggtaggagagggaggcgggggtctttggcctctgggattcattgtatcaaccaccagcaatctttggaatgggccagctgctccctaggccagagctgttagggctggaggcggggaggccatttggacagttgaagaactctgtaaaactacctt

SEQ ID NO: 94371 - DNA, 698 bp, Homo sapiens
agtgagctgagattgtgccactgccctccagcctgagcgacagagccagaacttgtcaaaaagaagaaagaaagagaaagaaagaaagaaagaaagaaagaaagaaagaaagaaagaaagaaagaaagaagaaagaaagaaagaagaaaagaaaagaaaagaaaactgttatggacataacccctctcttgttctggttgctcagatcacagcatgcaatgtcaatattgtgtggcttatttgtgcagtttgttcttttatatgcctgatattcaaattttgttaaggawcctatacagaaagaaggtgacaagagccccatgttgctctgacatgtcccactatttcccaagacctatctcgttttttctttctttacatttcagaagcatccctgctccaagagaacaaaggcaagctcatagacacatccttctttgtaaacacagtaaagaggaggggaaaaaataaaaggcacatccctcaataactgggctctggaaggcaatacactggagatagttacctgtgatctggagacatgaacctagaatagaagaagtgccatattagatgtctatttccatctatgaagaagtgtcttagcaaactttgtattaggaacaactacactagctggataaaatacaaaagacagcattcagagtgcctgagagaacaaacaagacatccagatt

SEQ ID NO: 94372 - DNA, 898 bp, Homo sapiens
tagctgagactatcaaatagaayacctcagtttttctccttgtggcctctttatgtggcttgagcctccataataaagctgctgggctataagaagagtgaaatggaagtttaaggcttggactcaggagtaatagattctactggtcaaaagccacattatactggtcaaaagagccatagaaccagccaagttagaaggagaggggaaatgaaattccacattttgatggaggagtgaaatgtgcacaccagtcaaggagaaatcaattatgatgatctttggaaaatatgtaccatagccagccctgtggccaaaacagtgaatgtctctcccacatgcaaagtcatactcatctctttcccaaaagtcatgttccactgtggcattgttgcaaggtccagaggcttatcatgcaggtctgattcaaaatgaagagctccttgggtgtggtctctttggtgcagctcccaggggtggagagatctttgaactaaaatggttatccatacatcacacatacagtggtgagaaaggtgcaggataaccaccacagacatctctactccaaaagaaagtgagtacaggtctgccagatagagaagacagatatgagcatctcgggcagaaaaagcactgtataaaaagagacaaatctgagaataccatggtgaaaatgtaggctgagcagagtgaagctgccagaatgcacctggaagagcaggttaggactcatttgtgaaaggcatatagtaagatattatggagtttgatcttcatcaggagatgatttggaattagtggaggtttttcaaatagcagattctccctgttcagttgccttttggaaagaatgactgagactttagtatggagacagaattgagggaggggactt

SEQ ID NO: 94373 - DNA, 898 bp, Homo sapiens
tagctgagactatcaaatagaatacctcagtttttctccttgtggcctctttatgtggcttgagcctccataataaagytgctgggctataagaagagtgaaatggaagtttaaggcttggactcaggagtaatagattctactggtcaaaagccacattatactggtcaaaagagccatagaaccagccaagttagaaggagaggggaaatgaaattccacattttgatggaggagtgaaatgtgcacaccagtcaaggagaaatcaattatgatgatctttggaaaatatgtaccatagccagccctgtggccaaaacagtgaatgtctctcccacatgcaaagtcatactcatctctttcccaaaagtcatgttccactgtggcattgttgcaaggtccagaggcttatcatgcaggtctgattcaaaatgaagagctccttgggtgtggtctctttggtgcagctcccaggggtggagagatctttgaactaaaatggttatccatacatcacacatacagtggtgagaaaggtgcaggataaccaccacagacatctctactccaaaagaaagtgagtacaggtctgccagatagagaagacagatatgagcatctcgggcagaaaaagcactgtataaaaagagacaaatctgagaataccatggtgaaaatgtaggctgagcagagtgaagctgccagaatgcacctggaagagcaggttaggactcatttgtgaaaggcatatagtaagatattatggagtttgatcttcatcaggagatgatttggaattagtggaggtttttcaaatagcagattctccctgttcagttgccttttggaaagaatgactgagactttagtatggagacagaattgagggaggggactt

SEQ ID NO: 94374 - DNA, 2073 bp, Homo sapiens
tcgatcagattgcattgtgattaggaattccctgggtaaccactgaggactctccaccctggctggtcagagctattgtctttttaccatgtgagagctctggggaattctatgtttacaactccctggttcttttttactttgtcttgtgatgtttcactcttttgcataatccagcactcatcagactcaagtagacctatatgcaaatctccgggtcttctcatcttcttagctccctcctatccagatcctggcccacagcttccaactggctcagtctccccaaactctcatttccatctcttcattttcatgaggctaccaggttctgcatgactcctcctacctgtacccataacctagaaattgacttcaagcaaaatgctgcagtcagtatggggcccggttgtctgtttctgttttttcatggatcactgtcttgtgttgtcaattgtccaatgtctgaaacagttgttacatacgttcagttttccaaccaaaaaagcttaagtctagtccttgttactctaccataattggaagcagaaggtttttgctttggctttttaactatagttacttttatttttatattgattgctctacggattacatatgcatcattaacttatagtcttcttagacgttatactgaattacttcaggaaaaatacagaaaacttgcaataatgtagttgcaattttttctcatcctttttgctttttttcatatatattgcatctacttacatttttgggagatataattcacataccatatatatgattcacccctttaaagtatataattcagtggtttttattatattcacaaagttgcaaaaccagaacatttaatccagaacatttttctcactcctaaaagaaaggcaatactcattagtactcactctctattcctctctatccccagcacctagaaaccactaatctattttctgtctctatggatttgcctattctgaacatttcatacaaatggaatcatataattttgacataaattttaaacctaacaacctgtgtaatgatgtttgccttagagggtcaaatgtctttcacataaattaagagaagaaaaaacatgtagtctgttttagtgttgcatctcacagatacacttactcatgccatgaaatagaccacacttatgcaagtgtacagcaatgttctgtgttcctatctrgcacagcttgtgtaaatttacaggcagactgatgtttcctctaagtaaaactggttagtaatgaccatgagcggatgcaagactcaatgctttctaagctttacttcttttatcagcacttctgattttataagcaataatgcttatcaaccccattcctacccaaatctcctggcatgcttgggtataggagggcttcatggggatccaaacatttttaataatgctttggaacatctcagtgcagaaccaacagctcaggctgcacctgagccccacagccaatgactatagtttttatattcatccacaggctactatttttggtgctctttattccttccagtatatctgaattaccatatgatgccatttctttttattctaaagagcttgctttatagcattttttgcagttttcccttccctgtttcagaccttgtgccaaacagggccctggggatcttctgtgatgtaacatattcgttacttgataagttgaatttttcaaggaatttgttcattttatctaagttattgaatttattggcacaaagttgttcatattgctcctatactatacttttgatgccatggtttctgtagtgacatcctctttgaatactgatattggcagtttgccttttctctatttttctcttgaggtttgctaggggtttatgaattctgccacaaggagtcaatttttgatcttattaattttctgtatttctgttttttatttcattgatttctgttgtatctttattatgttcatctttccacttattttaggtttaatttgcttatctttttctaacttctctaggtgtttagttatttcattaattttaaacctttct

SEQ ID NO: 94375 - DNA, 1495 bp, Homo sapiens
ttctgtccatttgaagttctactttagtttttattgaaatttctttttcagcatagttccttgttattgttcagaataaataccttagacgaatatcttccagaagtcttgtgttttaaacatactgaagtaatgaaacgtgataaacttggtacattgtagtttggattttgcatggcacactgtgattttggacttctgtgttctgatagcttggtcatgagctgaaagggttcaaggctattgcccttcggagtaccgtgctgctgaataacgcaaatgtcagctcaggaacattggaaaagcagcagcagttgaattagcagaatgyatttgagattcatccatgtaaatgagtttgagattcattcattcaccttttgtaaaccagttgacgaaagaaaagaattattgtgcagaaaaggcagttttatatttttataacaatgaaaaaaatgagtaaaaaattttaagaacagttgaggtgaataggtaaattgacaggattagaaactgtgagaattgctttggggagcgcaaaggctactgcggtccagccatactgagctctcaataggtaccacgtactgagacctgtccatgtcctttccacacattagctcattgatcctccctatggcactctaggcaggagttactagctgcattttgtaaatagaacctcaggcactaagaggttagatgacttgcttagggtcacaccgatcctaggggtggagccaggatccaaacctagcacctggctccagaaaatcagtgaggccaactaaaatttacaagcaggtcaaaacaagactgggaaaaaaggacactattgggggttgagagacagggcagagagagttggcctggacctcacattcaggctttggacatttcttccaaatgagagtatataaacatgtatgacattttttggatgattttatataaaaaaattactttatatatgttgtatatatagcatatgctagatatttttgtatatataaattatatacaaaaatttatttatatataaattatatacttatatataaaattaaattaaattaataatcaattaaattaaaaattaattaaattaattaattaaattaaaaatgattaaattaattaaattaaaaatgattaaattaattaaattaaaaattagttaattaaattaaaaataaaattatatatttatatataaattatataaaattcatatataaatatatacaaaaatatatagtatatgctatatatacaaacataaatggtagaatatactatatatacaaacatataatgtatgctatataaagtatatactatattaaaaatataaatatagtataatttttgtcatcttttttagtgtgtttaatagaatgagaccctaaaaaaattggaagtgctgcatttctgtcttctcctgagaggccctatagcatattattgaagtaatatcattatttaatacatataa

SEQ ID NO: 94376 - DNA, 1495 bp, Homo sapiens
ttctgtccatttgaagttctactttagtttttattgaaatttctttttcagcatagttccttgttattgttcagaataaataccttagacgaatatcttccagaagtcttgtgttttaaacatactgaagtaatgaaacgtgataaacttggtacattgtagtttggattttgcatggcacactgtgattttggacttctgtgttctgatagcttggtcatgagctgaaagggttcaaggctattgcccttcggagtaccgtgctgctgaataacgcaaatgtcagctcaggaacattggaaaagcagcagcagttgaattagcagaatgtatttgagattcatccatgtaaatgagtttgagattcattcattcaccttttgtaaaccagttgacgaaagaaaagaattattgtgcagaaaaggcagttttatatttttataacaatgaaaaaaatgagtaaaaaattttaagaacagttgaggtgaataggtaaattgacaggattagaaactgtgagaattgctytggggagcgcaaaggctactgcggtccagccatactgagctctcaataggtaccacgtactgagacctgtccatgtcctttccacacattagctcattgatcctccctatggcactctaggcaggagttactagctgcattttgtaaatagaacctcaggcactaagaggttagatgacttgcttagggtcacaccgatcctaggggtggagccaggatccaaacctagcacctggctccagaaaatcagtgaggccaactaaaatttacaagcaggtcaaaacaagactgggaaaaaaggacactattgggggttgagagacagggcagagagagttggcctggacctcacattcaggctttggacatttcttccaaatgagagtatataaacatgtatgacattttttggatgattttatataaaaaaattactttatatatgttgtatatatagcatatgctagatatttttgtatatataaattatatacaaaaatttatttatatataaattatatacttatatataaaattaaattaaattaataatcaattaaattaaaaattaattaaattaattaattaaattaaaaatgattaaattaattaaattaaaaatgattaaattaattaaattaaaaattagttaattaaattaaaaataaaattatatatttatatataaattatataaaattcatatataaatatatacaaaaatatatagtatatgctatatatacaaacataaatggtagaatatactatatatacaaacatataatgtatgctatataaagtatatactatattaaaaatataaatatagtataatttttgtcatcttttttagtgtgtttaatagaatgagaccctaaaaaaattggaagtgctgcatttctgtcttctcctgagaggccctatagcatattattgaagtaatatcattatttaatacatataa

SEQ ID NO: 94377 - DNA, 746 bp, Homo sapiens
agcttttcatcttgcaactcttttgaacagcaaaatttttcaattttgatgaagttcaattatcaatgttttcttttattgattttgcttttggtggtataactaagaaatatttgcttaaccccagttcagaaatatttttctcctaagttttcttatacaaattctatagtttctgttcttacatttaagtctatgattcacttaaagttaatttttgtgcacagcatgatttaagagtcaaatcttaatttttgtatatgaatatmcaatttgttgaagactgtccattctccattaaagtaccttggcatctttgtcaaatgaattgatcataaatgtgtgtttatttctagacactctaatctgttccattgatctacatgtttattcctgtgcatataccatagtgtcttttattactgtggcttttaaaaaatttgttaattgtttatttatcgagagaaactatttcttagcccgcatattcgtgttcatagttcaggaacacaagccagtgacaaacttctaggtaattcagcctgaagaaattctttatatttcaagatcatttcacactccaaaaaataccagccttcctcatctcctcaaagtctttcatggaatcataatttctgtaaaaatctgtgtacaccttctttcttggttcagccacagcaaacttacagaaaactgcaagctccagggataccatgaatactccaacaatatgaaattgcagatgc

SEQ ID NO: 94378 - DNA, 622 bp, Homo sapiens
ataccaaaaagtgatccaaattggatacaaggctagggagatgcagttcgagcccacattgccatttgcctcaccagctggcactgtctcacaagatgctaccagatgagccttcatgagccttctaaatcaacagagaaattcagagtggagatatcaaatatgccattactgctaaaagcaagaaaatgatattacatacctatttgatacactgaaacagtcttgaatcaccaattgagtatctcttacaaaaactggaatgagaagtggagtaagtacattagactacaaatctgtctcctacactcctaataaaactttttagtggagaacacttttaaagacagcagtagtcttttctcctccatttataaggaccctcaatgtgtttggataaaggagagggagataatgatgtactaggtagagacctcaaaaagaaaaaatgtggcagatctgggaactggtaaatagaggaaatggtatcctctatttagccactttggctaaaaaygccactctttccaatctataatcctaatttcagaacatggcactcatcacacaccatcttgaaatgtaacgattgttgtacctgtgtcattgtccttaccataat

SEQ ID NO: 94379 - DNA, 659 bp, Homo sapiens
cagacagcacaagatttcagcaggtgctaatctccagatcttgtgaaggaagggagtaaatatcggggggaaatgcacgtttttgccgttgataaagatctccagttctactkgtgattgacttcccagcaaatttccccatccgaagtactacatctatcctaaataggttacctgtctttctcttaatcagataaggcttaatattcctggctgtggctaaactggcaagcccactgtgattggtgtcttccattacagctgccccagccttccaaaaaccacaaaggagctggcactctctgccctcagatgctgggttaggtcaaaacatattctatgtgtcttatagatcaggagattcacataatctactttggctcattaagacaggctagaaatttcctggattttttttcctttaaaaaaatcattgagaagaagagctaaagccatttaaaaagtcaatactggctcctcataaaaaagtagattattaatgccagggttggttttcctctaggacccgggatgctggcactgctgattagcatctggatgatctcaggctttgaggttgcacttgaatcttttattgggcagctgtcaaggtgaaaataaaatgaaataatgaaataaaatagaagctacccttagtg

SEQ ID NO: 94380 - DNA, 659 bp, Homo sapiens
cagacagcacaagatttcagcaggtgctaatctccagatcttgtgaaggaagggagtaaatatcggggggaaatgcacgtttttgccgttgataaagatctccagttctacttgtgattgacttcccagcaaatttccccatccgaagtactacatctatcctaaataggttacctgtctttctcttmatcagataaggcttaatattcctggctgtggctaaactggcaagcccactgtgattggtgtcttccattacagctgccccagccttccaaaaaccacaaaggagctggcactctctgccctcagatgctgggttaggtcaaaacatattctatgtgtcttatagatcaggagattcacataatctactttggctcattaagacaggctagaaatttcctggattttttttcctttaaaaaaatcattgagaagaagagctaaagccatttaaaaagtcaatactggctcctcataaaaaagtagattattaatgccagggttggttttcctctaggacccgggatgctggcactgctgattagcatctggatgatctcaggctttgaggttgcacttgaatcttttattgggcagctgtcaaggtgaaaataaaatgaaataatgaaataaaatagaagctacccttagtg

SEQ ID NO: 94381 - DNA, 659 bp, Homo sapiens
cagacagcacaagatttcagcaggtgctaatctccagatcttgtgaaggaagggagtaaatatcggggggaaatgcacgtttttgccgttgataaagatctccagttctacttgtgattgacttcccagcaaatttccccatccgaagtactacatctatcctaaataggttacctgtctttctcttaatcagataaggcttaatattcctggctgtggctaaactggcaagcccactgtgattggtgtcttccattacagctgccccagccttccaaaaaccacaaaggagctggcactctctgccctcagatgctgggytaggtcaaaacatattctatgtgtcttatagatcaggagattcacataatctactttggctcattaagacaggctagaaatttcctggattttttttcctttaaaaaaatcattgagaagaagagctaaagccatttaaaaagtcaatactggctcctcataaaaaagtagattattaatgccagggttggttttcctctaggacccgggatgctggcactgctgattagcatctggatgatctcaggctttgaggttgcacttgaatcttttattgggcagctgtcaaggtgaaaataaaatgaaataatgaaataaaatagaagctacccttagtg

SEQ ID NO: 94382 - DNA, 659 bp, Homo sapiens
cagacagcacaagatttcagcaggtgctaatctccagatcttgtgaaggaagggagtaaatatcggggggaaatgcacgtttttgccgttgataaagatctccagttctacttgtgattgacttcccagcaaatttccccatccgaagtactacatctatcctaaataggttacctgtctttctcttaatcagataaggcttaatattcctggctgtggctaaactggcaagcccactgtgattggtgtcttccattacagctgccccagccttccaaaaaccacaaaggagctggcactctctgccctcagatgctgggttaggtcaaaacatattctatstgtcttatagatcaggagattcacataatctactttggctcattaagacaggctagaaatttcctggattttttttcctttaaaaaaatcattgagaagaagagctaaagccatttaaaaagtcaatactggctcctcataaaaaagtagattattaatgccagggttggttttcctctaggacccgggatgctggcactgctgattagcatctggatgatctcaggctttgaggttgcacttgaatcttttattgggcagctgtcaaggtgaaaataaaatgaaataatgaaataaaatagaagctacccttagtg

SEQ ID NO: 94383 - DNA, 659 bp, Homo sapiens
cagacagcacaagatttcagcaggtgctaatctccagatcttgtgaaggaagggagtaaatatcggggggaaatgcacgtttttgccgttgataaagatctccagttctacttgtgattgacttcccagcaaatttccccatccgaagtactacatctatcctaaataggttacctgtctttctcttaatcagataaggcttaatattcctggctgtggctaaactggcaagcccactgtgattggtgtcttccattacagctgccccagccttccaaaaaccacaaaggagctggcactctctgccctcagatgctgggttaggtcaaaacatattctatgtgtcttayagatcaggagattcacataatctactttggctcattaagacaggctagaaatttcctggattttttttcctttaaaaaaatcattgagaagaagagctaaagccatttaaaaagtcaatactggctcctcataaaaaagtagattattaatgccagggttggttttcctctaggacccgggatgctggcactgctgattagcatctggatgatctcaggctttgaggttgcacttgaatcttttattgggcagctgtcaaggtgaaaataaaatgaaataatgaaataaaatagaagctacccttagtg

SEQ ID NO: 94384 - DNA, 1560 bp, Homo sapiens
tggaatgaaggttatgatgaaaggaatgcaaaacatgccttcagacccctgcccagactgaagtgagtcccaagaccctacagcatttctccattttgtgggtctcggcactttcaaaactccatgtgatagggccaagatgagaactgtaaacctgcaatccaacacttgccttgagtgtggctgctttacaaagtgtcatttgggggcagctgaaggactaatataatgacgagggggaacagcgctgagcaggacaaatctcagttaatgacaagatatttgctgtttgtcaacgacacagtgtcggggcatgtgaaaattatgctgctgagcaggtgctggcaaagacatgcctacatccactctccctcacataccgatttgattttttttttaaccaccaaaactagtgttttgatggggaaaaaaagtggacttcaatgtaaatgaaaacatcaatcaacctgacagacattcctcgttcctcaaaaacatgtgttttttactttcttcaagtgaagatgatagtcgaagacacttaaaattaagggaacgaagccaagacagagcaggagacttcaccactgctgttttaaaacagtcattctgttccacattgaatgtggcctcagtcttgaacctaatgagaaatgagtcaatcgacttgaaatgatccaaatgaggaaaagttggcaaaacaaggagggaactgggagggacctattttaatagagtattggcccacgacgcctgtgaggggagagtggccccagacggaatgacgaccatccctgtcactagccacatacttgttattaaaactggacaaaggcctggtgtcgtggcccatgcctgtaatcccagcactttgggagggtgaggcaagaggatccctgaggccacgagttcaagactggccagggcaacacagtgagatgctgtctctaccaaaacaaaacaaaacaaaacaaaactagacaaagggggatggggagagaaatattttcatggggcagacagctatacttttggaagtcaaagcaatgaaactggaaataaaaatgaaaaaccattaaacaaaaagtcagaaggcatgcaatgaattatggcatataaaataaatgggaacatgtaggcytatttaattttccatgcctttatatggagtttagaaatgacagttaaatttagaaaattgtttaaaactgaaataactagatgggaacatacgtttgtacacactcacacaaagtgactttcttcagacactagagatgtttgtagaaaaggatttctaaagcaaaattcaaaatcaccaggcacagtggctcatgtctgtaatcccaacattttgggaggccaaggtgggtggatcacttgaggtcaggagtttgagaccagcctggccaatatggtaaaaccttatctctactaaaaacacaaaaaattagctgagcatagtggcacatgcctgtagtcccagctacttgggtggctgaggcagaagaatcgctcgatcctgggaggcagaggttgcagtgagccgaaatcccacca

SEQ ID NO: 94385 - DNA, 1560 bp, Homo sapiens
tggaatgaaggttatgatgaaaggaatgcaaaacatgccttcagacccctgcccagactgaagtgagtcccaagaccctacagcatttctccattttgtgggtctcggcactttcaaaactccatgtgatagggccaagatgagaactgtaaacctgcaatccaacacttgccttgagtgtggctgctttacaaagtgtcatttgggggcagctgaaggactaatataatgacgagggggaacagcgctgagcaggacaaatctcagttaatgacaagatatttgctgtttgtcaacgacacagtgtcggggcatgtgaaaattatgctgctgagcaggtgctggcaaagacatgcctacatccactctccctcacataccgatttgattttttttttaaccaccaaaactagtgttttgatggggaaaaaaagtggacttcaatgtaaatgaaaacatcaatcaacctgacagacattcctcgttcctcaaaaacatgtgttttttactttcttcaagtgaagatgatagtcgaagacacttaaaattaagggaacgaagccaagacagagcaggagacttcaccactgctgttttaaaacagtcattctgttccacattgaatgtggcctcagtcttgaacctaatgagaaatgagtcaatcgacttgaaatgatccaaatgaggaaaagttggcaaaacaaggagggaactgggagggacctattttaatagagtattggcccacgacgcctgtgaggggagagtggccccagacggaatgacgaccatccctgtcactagccacatacttgttattaaaactggacaaaggcctggtgtcgtggcccatgcctgtaatcccagcactttgggagggtgaggcaagaggatccctgaggccacgagttcaagactggccagggcaacacagtgagatgctgtctctaccaaaacaaaacaaaacaaaacaaaactagacaaagggggatggggagagaaatattttcatggggcagacagctatacttttggaagtcaaagcaatgaaactggaaataaaaatgaaaaaccattaaacaaaaagtcagaaggcatgcaatgaattatggcatataaaataaatgggaacatgtaggcttatttaattttccatgcctttatatggagtttagaaatgacagttaaatttagaaaattgtttaaaactgaaataactagatgggaacatacgtttgtacacacwcacacaaagtgactttcttcagacactagagatgtttgtagaaaaggatttctaaagcaaaattcaaaatcaccaggcacagtggctcatgtctgtaatcccaacattttgggaggccaaggtgggtggatcacttgaggtcaggagtttgagaccagcctggccaatatggtaaaaccttatctctactaaaaacacaaaaaattagctgagcatagtggcacatgcctgtagtcccagctacttgggtggctgaggcagaagaatcgctcgatcctgggaggcagaggttgcagtgagccgaaatcccacca

SEQ ID NO: 94386 - DNA, 1560 bp, Homo sapiens
tggaatgaaggttatgatgaaaggaatgcaaaacatgccttcagacccctgcccagactgaagtgagtcccaagaccctacagcatttctccattttgtgggtctcggcactttcaaaactccatgtgatagggccaagatgagaactgtaaacctgcaatccaacacttgccttgagtgtggctgctttacaaagtgtcatttgggggcagctgaaggactaatataatgacgagggggaacagcgctgagcaggacaaatctcagttaatgacaagatatttgctgtttgtcaacgacacagtgtcggggcatgtgaaaattatgctgctgagcaggtgctggcaaagacatgcctacatccactctccctcacataccgatttgattttttttttaaccaccaaaactagtgttttgatggggaaaaaaagtggacttcaatgtaaatgaaaacatcaatcaacctgacagacattcctcgttcctcaaaaacatgtgttttttactttcttcaagtgaagatgatagtcgaagacacttaaaattaagggaacgaagccaagacagagcaggagacttcaccactgctgttttaaaacagtcattctgttccacattgaatgtggcctcagtcttgaacctaatgagaaatgagtcaatcgacttgaaatgatccaaatgaggaaaagttggcaaaacaaggagggaactgggagggacctattttaatagagtattggcccacgacgcctgtgaggggagagtggccccagacggaatgacgaccatccctgtcactagccacatacttgttattaaaactggacaaaggcctggtgtcgtggcccatgcctgtaatcccagcactttgggagggtgaggcaagaggatccctgaggccacgagttcaagactggccagggcaacacagtgagatgctgtctctaccaaaacaaaacaaaacaaaacaaaactagacaaagggggatggggagagaaatattttcatggggcagacagctatacttttggaagtcaaagcaatgaaactggaaataaaaatgaaaaaccattaaacaaaaagtcagaaggcatgcaatgaattatggcatataaaataaatgggaacatgtaggcttatttaattttccatgcctttatatggagtttagaaatgacagttaaatttagaaaattgtttaaaactgaaataactagatgggaacatacgtttgtacacactcacacaaagtgactttcttcagacactagagatgtttgtagaaaaggatttctaaagcaaaattcaaaatcaccaggcacagtggctcatgtctgtaatcccaacattttgggaggccaaggtgggtggatcacttgaggtcaggagtttgagaccagcctggccaatatggtaaaaccttatctctactaaaaacacaaaaaattagctgagcatagtggcacaygcctgtagtcccagctacttgggtggctgaggcagaagaatcgctcgatcctgggaggcagaggttgcagtgagccgaaatcccacca

SEQ ID NO: 94387 - DNA, 1216 bp, Homo sapiens
tgaccattcttttgaaaaatgcaatcctcctcccccatgcctccatctccctttcttgtttattttatgtatttatttagctatggagtctcattatgttgcccaggctggagtgcagtggctattcctaggtgcactcatagctcactgcagcctcaaactcctgggctcaagcgagcctcccacctcagcctcctgagtaggtaggaccacaggcgtgcacgaccacacttagctctgtttatttttcttcatagcacttatcaccatttcatttacttatgtattttacttatctgttggcctccctaacaagaatgtgagttccatgcaggcagagatctttgttggttgaactgcccattgtctccccagaggctagaagatggttagaacagtatctgcctcataaagtygttgaggagattaaatgaattaatgcctgtaaaacacctgaacggcacagggtctatactaagaactacagcaatatatgttataattttgattttgttttaaattttatgatgaaggcaattgggtagttattaccatatccatcttacagattccaagatggaggctcagagtaatttacctgaagttccacattagtgactggcagagagaggattcaaacccagatcgactccattccgtgcactaatttccccttgctctgctttggaagtcctgggatagaagagaggcagaaatccattctttctggaacaacctcaaaacctgagaaggctggtccaccccagggggtgggaagtggggaataatggctccagaatccagggaccgtttccttacagacctttacactgcatggatctaacatggcgtgtggcattctgtttacttcctaacttcaccaaaaaatgtaatacagtctgccaattaaacaatgttttcatgaccccagaaaatccatggattggagacatttactttaaacagccattccaccataacaggaaaagaggtagagcagaggagtttattataacagctgctttcatacctcaaacaaggtttggctgtttttggcacgttgcactgtagtagagttggcaagaagcggacagactgcatgagtttcctttcaaaagatcattttgcttccttaaaaaacccatgactggactatctagtgtgaactgcagatgtttgttcttcctttgcttctctgtccttggggagctcccac

SEQ ID NO: 94388 - DNA, 846 bp, Homo sapiens
tgtgggtcaaacaggcattgcagatggccagatgatctgattaccagtgaaaaacattatttctagggcaaactgtgtctttaaattatcaaaatctgcctaataattcacccttcctgtgttaagttagggagtccytgtataaatcagatacagatggaaaaaaaatccctttttctttctgcttttcatgcccagaatcaagaatataattagcttcacagatatgtggtcttactactttatatagtaaatttacttgtaggcaagaagagtgtcttctaagtgttctgcatctcatcacaacagagtaggttttcctaacctcgcaaatacatgacctgaaaaaacaggattgaaaacgactttgaaaggctggaactctggagcaaacccaatataatgaaattcaacaggaatgaagtccctgcttaccttaggctcaagtttctatctggacactccacttattagcactaatccccccgagccctggtttcttaatgtgtagtatgggcatcattacagccacattataggattattgtatagattaaatgaaattatgcatttacagtgaatacagtataggtggcacaaagtgggccagtgtatagtaagtgcctgcttcttttctcctttttgctgattcaagcaaatgttatttttaaattttgttttaagtgacacataataattgtacatattcatgagcacaatgtgatgtttctatccatgtatacattgtgtaatgatcaaattatagtattgagcatcacctcagacatttatcatttctttttttgtgtgttgtgatcattcagaatcctttaaaaatgcaatgat

SEQ ID NO: 94389 - DNA, 846 bp, Homo sapiens
tgtgggtcaaacaggcattgcagatggccagatgatctgattaccagtgaaaaacattatttctagggcaaactgtgtctttaaattatcaaaatctgcctaataattcacccttcctgtgttaagttagggagtccctgtataaatcagatacagatggaaaaaaaatccctttttctttctgcttttcatgcccagaatcaagaatataattagcttcacagatatgtggtcttactactttatatagtaaatttacttgtaggcaagaagagtgtcttctaagtgttctgcatctcatcacaacagagtaggttttcctaacctcgcaaatacatgacctgaaaaaacaggattgaaaacgactttgaaaggctggaactctggagcaaacccaatataatgaaattcaacaggaatgaagtccctgcttascttaggctcaagtttctatctggacactccacttattagcactaatccccccgagccctggtttcttaatgtgtagtatgggcatcattacagccacattataggattattgtatagattaaatgaaattatgcatttacagtgaatacagtataggtggcacaaagtgggccagtgtatagtaagtgcctgcttcttttctcctttttgctgattcaagcaaatgttatttttaaattttgttttaagtgacacataataattgtacatattcatgagcacaatgtgatgtttctatccatgtatacattgtgtaatgatcaaattatagtattgagcatcacctcagacatttatcatttctttttttgtgtgttgtgatcattcagaatcctttaaaaatgcaatgat

SEQ ID NO: 94390 - DNA, 1156 bp, Homo sapiens
caacactaaaagtaaatataattttctcttaattataaaatttccagaatttttcatctgtagtaactccaaattagccagtgagaatatgttccagttagctagaaaatttacttatttatgactcttccgttcaccaatattgccaagtaaagtcatttacagatctgggaacaaagctggggtgctacagtaggacaatttggataatcatatttcccctagaactttaatagaatttcataacatacatatattttttgtccattatattgtagaggtcttcttttgacttttattctattctattcatacaataaagttttccaggtcctcggaatttaactctttcttctgccattaccaatttttcaaatagtaggtttgatctaattaccaaaacattattagaatctaggtagaggcatgttattattttactagctaatgatctccaggagactttggaattaatatagaccactctgcagaaataatgaccactgaaatgagggccccagcacacactgaaatagccacactcaaagaagattcatttctttaggagtttagtgaaaatggagagattgactaaagtaatctccagaaagcataaagattaaattggctcctaactgagaaaatgctaccttagcactcacccagttctgcctttatgattctttgacactgatgtaagcaccacagaaaggaatatcaaggtggaattacataatcctttcttcaaccaattgttagcgtgtttgctgtagattaaaacactgccacaggcttctagtggttggcaactcacactgtggaaaatgtcactgggctttgctgcctcactagctgtgctccacagagcagaaaattaagcgcracatatttggaagaggagttttctggtttgtaagaatttataaaaatagctatacttatctattctagggtcatatttgtaagttattagtagctctgagataaataatttaaatttttagtacatatgctaaaatcttagattattctgactcgaaatctagctaagggtctcttaggtgacttaatttctgtttctaatttaaaagatacatacatacatgggacaataaaatatttttgaatccatggcacgtgaaaatagactgcaaaa

SEQ ID NO: 94391 - DNA, 1485 bp, Homo sapiens
taatattcatattattttatatatacatatatatatatatatatatatttttttttttctttttgagacggagtcttgctctgtcgcccaggctggagtgcagtggcgcgatctcagctcactgcaagctctgcctgccgggctcacgccattctcctgcctcagcctcccgagtagctgggactacaggagcccaccaccatgcgcggctaatttttgtgtatttttagtagagacggggtttcaccgtgttagccaggatggtctcgatctcctgaccttgtgatccacccgccttggcctcccaaagtgctggcattacaggcgtgagccaccrcgcccggccatattctattattattttattttcaccgagaaataaaagccatttgaaagggccattgacatagtctataattaatgttacagctataaagttaaaatggccaatgataagtctagttattaaacatcacagacattctaccaatgcatacatttatctagaaaatgctagggctgactatgagtactagggggagaatttcttgagttctgactaattttgtcctgaacttatgtctgttttaaattctgtttgtaaagtcttctttctaggttccctttacaaaggccttttctactgcagcttgtttcactttagcatgctaatgattgaaatagaaatttatgctattcacaataggatccttcacatgttacagtagcatagtttaaatgttcagaagctctgtgttaaaatttagtttttgacaaaatggctcaagttcctcttattaaagaaccggatctctctcattctctgagaaagtccctttgtagatgagatgcactactgcactgtgtcatcactaatacagggtggtttcattcgcacttggcacctctcaggtaggttgttttgcaatggctttatttcattttcccctcttattaccctgcagcttatttaacagaaagtgcaaagccaagcctcactttgttcttcctctggggacaacctactcttaggcagcaacatttctccttccagctcactgtgtcaatgtctctcccactagctcaaatggcatcatttgggaggcgtataaaacatttggtgtaggacagatgatttgttactttaaaacttgagtaagtaacttttcacgagaataattaatttagtgataacataatatttttccaaaatatttcacattgatggtttcatcacacaaaactaataatttttaatgtttggaatatatttttctgaagaggaggctttattgaaaataaagaacacttacaagaaaataaagaacacttacactgtcccatccctctccttccctccaaatataccttccaaagcctctgacaagcattctatggctattactagtaggttcaattttaatttagtaatcaggtgattttataagcttactttccaaaagtaaagttccaagaacaaccttt

SEQ ID NO: 94392 - DNA, 961 bp, Homo sapiens
aataactataatttttgaacaccctttttatagtagatgctatagaaaatggtggataaattttgtttttatcttcaacaacagtataaggaagatatgccaattttataaatgaggcacctggggctcagagagatttaggtaaggattagcatcaaggtaagatgccaagaaggggcagagaagggagtcccataaaggtgaatctgaagacatcctctcttcccaccacaccgagccatgacctgtagaaaaccatcaatgtctggtggtgcctaagacgctccatgccatgggaaaaatttattgaaatataatatccacatggaaaaatcaacaaaactttatgcctaaaacttattcatgaagagacaatggtaaagatacttaattagaaatataaaatagctgacattgtaacatatcctctatacttattgttgggaaacaattgtccctggttattttattatccttggttattttcacatttcagtatgatcctgagcctctgagcraagggtactgcaaggatgtttgcttaacagacagcctcggaagtcggagagtaatgtctccattaagatagacagcacgggagagatctggagacaaggctctctcctttctattctccggatgagattggcttacattctggtataacagataattaatttctcctctctctctctcaatctctctctctctctttctctatctatcgctgttgctcttactcaggcaaggcagaggtgcgagtagcccataaaagtttagtctctcctaatttgggggttcctctcccatgatgcaaacctaatgcaaacgcaggtaaacttttgactcttaacagcatcgccatgaaaggactgggaactagagccacaagccagagggaagacagttctctggctgctgcttttctgtgagtcataaggctctgtgtctctgccccgga

SEQ ID NO: 94393 - DNA, 2861 bp, Homo sapiens
taaatatgggacagggctgtgtaggtcctggctaccagaatgcctctgaagatctggactgtacaccctgctcaatcccatgggcttgtggagctggcccactcctccctaggaaggcctagcgttcccactaagctggcagatgcttgcagattccccgcacccaccaaggcagcaagtgccccctgaggagccatgcctcctttcctcctgacttcagggatgtgtattagcaaagactttcagtgctagaagagaaggtggaggaatggagtctgattgtgagacctgctcctgcgttagacaatgctgggagcaatactttgctacctgctccattaaattcttgctcttggaagataacgctgtgaaccaattaaagcagcttcttacaaaaatgaacagcctgctcataaaggctcacttcaagaccctcatctcagtggggcacagtgactcacgcctgtagtatcagcactttgggaggctgggatgggaggactatttgaggccaggagttcaagaccagcctggacaacatagtgagaacccatctctacaaaaataaaaactaaaaaattagctggctgtggtgccacacctgtaatcctagctactcagtagacagaggcagaaagatagcatgagcccaggagttcgaggctgcagtgggctatgatggcaccattgtattccagcctaggtgagagagtgagactctgtttcaaaacaaaccaaaacaaaagaccctcaccctcttgtgttcacctcttcaagactattatatcttaattttgcccaatctcgtttcttgccttgcaagacatgccttaaaatcatataatctgggccataacaccctccaacaccctttcctaatttctctgttttgagacacttctaagactgacactgtagtattgtcccttactgctgtaggtctaatatacttagatttgcttgatcaacagatttttctggtggtccctttggacaagcaataattaacacaaaatagacatggatcatagtaatacagaataaaggtagcatactagacattctcactctagtgctgacctgttctccctgtggtgtgtctggcctgagtcagttctgattcacccactttctcaacagggaaaatgtaagacacatttaagaaatgcatatcagtctgagaccggaatctaatcctgaaatatataaatgaatgctctttgcatttcaagtttaaagaaacggtttttgcctcacccgaaggaagaaataatgatttttttcctcccgtaagggctcttggttaactctaccctgtttgttttacttaaaatgttacatactttgcatttattcagttgattaagatttatcctgcttagttaatgactaacttttggctggcctttctaggttctgaaatagttgtcaggtctgtttgcacgtattagagacatgaagaatggtatctagtacacctaggctatttgggcacttagaggaaagatcagattttgacaggaatgccgctgttaacggatccagactttgaccctactaacaagaggcttcgttgttcaaattggtcatttgggaattaccgtaattactctggcaaatgaaggaaataaacctatcaaaagactttatttgttgctgttatttatgattttaaaatgtatttctatgggttttaaaatatgttcatgctggaataggcgttaaaacagacataataacttttcccacatactgttcctgtctcaaatacaaattctgcacaaacatatgcaaattatgcacaaattctactccctgctctgtaaatactccctaaaaattgagtacaaatcaagggttcacaaatctggtttttgttccccttactttcctttataatttctagtctcaggccaggcatggtggctcacgcctgtaatcccagcactttgggaggccgaggcaagaggatcactttaggccaggagttcaagaccagcctgggcaacatggcgaaaccccgtctctaccaaaaatacaaaaattagcaaggtgtggtggtgtgcacctgtaatcccagctacttggggggctgaggcatgagaattgcttgagcccgggaggcagaggttgaagtgagccgaggtcacgccattgcactccagcttgggcgacagagcgagactctgtctcaaaaaaagaaaaaaatgtctagtcttgtcatcatttctaataagaaacgtgtcctgagcatttgccattcattatctgctgactccatcccagagagtctgtaatgttgttacctggtcctagccctcattgcacatgagatggtaattgtagttcaaaagagtaggtgaccagtgccagctgagtagccggtcaataagggtcttaatgctaattgctaacccttgagctttgaatatttgtctctttcctgctgacccaaggctttctgccaagtagctaatcagtaaacatatgcttaaatatactcaaggcgttcctattattaaagcactattttgattgtgcttttgattccctgatcaaaattttccattgactactgagaaaagtccaaagcacttaagctgaaatgtccagctttctaaagtcagatctctatttacctttccaaccttatcttctgctattctccggtgcactccagaaattccaatcacaaagagctactcagtactccctgcggtgctggcattgctcggcctagccctccgttatctctttcaatatttcagcaccatcctccctcccctgagaggcccggtcaggtgaartgtttaggaagaactagcctgcaataaggtgaggacagggaagggggtggatcc

SEQ ID NO: 94394 - DNA, 584 bp, Homo sapiens
aagagaaagatgccccatggtcatgagagtcttctccccaggaccataaagatagaaaggamtcatcagtgtgcagtcactgatcctttgttcacaatacctaaagaaatgcctcctctcctgttttagaagtacctggcattaagtgctccattctattaaaagacacagaaaattaaagtgcacccttttaaaccaatacacatgccccatgaaggatgtctttgaaatgtggatgacaaatggttccaggcacctgtttgtttgaccaaggcttagctgatcacagatgcctcttcgggctccagggtgattcaccacctaattctgccataaaactacccttataagctttctagagttggaggctacccagcaatgaatcaatgggctgagatgccttattgtcatcagaagtgttcaagcactggatgaacaacccactgttttagatgttacaaaggagattcctatgagcacaagagctttagaaccataaccaccaacgaattttaaaattccaacaccctatggtttaaaggaactgtagtttttgtgaattgaagcataaagctcatatcata

SEQ ID NO: 94395 - DNA, 708 bp, Homo sapiens
ggtgggacgtcaaggctgcagtgactgatgattgcaccactgcactccggcctgggccacagagtgagatcctgtctcaaaaaaaaacaaacagaaagaaataatataaatcactaattcacagataccatttaaatagttgcaggagccttcattgccctagatttctatatcttagaactgtaaatatccctaaacaatttaaagcctacagctgagcctgaaccccaacaaggactttttttgtttttggggcagtctggcgagacccttaactctattctcttactctgtttacaactatgttatttattaccaatctcagtggaactkctttccttccttgtgtagagccttacatatttcacagagcacacgggtccctggtaattttccttctcgaagcagggcaccctcctgctgcccaaatatcaggacagtgttctgcgtgagtgggacgggcctggagaggagtgacggccttcccttccacgcggtctctctcctcagtcgtccctctctgcttcctccttccttcgcccacctgctgcagcttatcccagaggaagtggaactgacaaaccattgctaaaaatacccccagcttgcctcctcaagggggtgtcccgtgaggaaatgagaaaatgaacgagcagtctataagaccaacgagggctacagaaacaccagaggctgtttttatgttat

SEQ ID NO: 94396 - DNA, 1672 bp, Homo sapiens
gaacaggttaaagaaaacataaaaatttcaagtatactctccgtacctgattttaatatctctcaataatgccagtattgaaaatatttttccccagaacctttacacaatctgccttcaaaacaacttctagacctgagtcaatacagctttaagaccatttctatacatttgtcttaagaatcatagttttgtgggggttttgagaatttattcagaatttttaagtctaaraagatcttgtattttattcttatattatttcacagatgagaaacagatgaggctaaataacactataaaaattacacataaccagttagggggcaaaattagaattaaaacccaggtcttcttgtattatttttactagagcaacttgctgaaatctaattttatgtactaaacataacttgttattttctttttatcttaaatcactctatgactttcataaaaggcaaaattggcatttcttctatgtgatttggattctcatttcttcctgttcagtcttatgtgctgatttatgctgaaagacccaatcagtgctgaaatgttacagtttacaaaggacaagctaagctaactgtggaaaccttcttgttctgttgatatcccatctgaatcaccccacagaagattctagctttccagctatcaagtgttgaccttacgccccttgtcttcctctaacatgaggctctgaaggctagtaccagtctccacaggactggtagagaaggaaatttttgcccattacgttctatttccccctgcattttcatgtaaattacccctgcatgcagaagtagttcccaaaagacactcacctgtgactatccgtattcttataatggatcctaagttatcatccactactacaatgagcttccaggatggagaaaagagtacaaatatataataacaagttagaaaaagaattctactggtcttgcaggagaaaggtttaaagctcacaagtgcaaaagaaagaatatacaaaagtgaaatacgtcctcccactagctagttgaaatgcaagggcacatgaaactcagatctataagaaggaaaagcaaagtgctttttttctattcttttattgtgacagcttctgcaccatgaatgctggtctatttagtaccagctgattctctctcatgcaaacttcctcctcatgtgtaatttttgcataaaaggttttgcttttaaataccacctcctccaatttcctactaagaaatgttttcatgtgtttagagtaaagtaatcacgatggttaacttgcaaatgaattaaaactacaaatgtcaggagtttctgagagctgacattaacataatattcttgagggattgtgctgctccagctaattggactgttctgatagaagacaaaatggaataaaaataatgtgtctcatgaagcatgttagattcaaccttagagagaagctatcggaatgatttgctggggtcacagtcacctggtaagtgaaactaaatggatcaacaccattcatgtatattgggtgaggaactagaaaggaaggaataagcccttcatattcagagaccattcaaatcaggaaaaatctatgctgataaaaatacagttcctttacttggatgtggtaaatcaaatgaataatttgaaatcaaagacaaga

SEQ ID NO: 94397 - DNA, 1672 bp, Homo sapiens
gaacaggttaaagaaaacataaaaatttcaagtatactctccgtacctgattttaatatctctcaataatgccagtattgaaaatatttttccccagaacctttacacaatctgccttcaaaacaacttctagacctgagtcaatacagctttaagaccatttctatacatttgtcttaagaatcatagttttgtgggggttttgagaatttattcagaatttttaagtctaagaagatcttgtattttattcttawattatttcacagatgagaaacagatgaggctaaataacactataaaaattacacataaccagttagggggcaaaattagaattaaaacccaggtcttcttgtattatttttactagagcaacttgctgaaatctaattttatgtactaaacataacttgttattttctttttatcttaaatcactctatgactttcataaaaggcaaaattggcatttcttctatgtgatttggattctcatttcttcctgttcagtcttatgtgctgatttatgctgaaagacccaatcagtgctgaaatgttacagtttacaaaggacaagctaagctaactgtggaaaccttcttgttctgttgatatcccatctgaatcaccccacagaagattctagctttccagctatcaagtgttgaccttacgccccttgtcttcctctaacatgaggctctgaaggctagtaccagtctccacaggactggtagagaaggaaatttttgcccattacgttctatttccccctgcattttcatgtaaattacccctgcatgcagaagtagttcccaaaagacactcacctgtgactatccgtattcttataatggatcctaagttatcatccactactacaatgagcttccaggatggagaaaagagtacaaatatataataacaagttagaaaaagaattctactggtcttgcaggagaaaggtttaaagctcacaagtgcaaaagaaagaatatacaaaagtgaaatacgtcctcccactagctagttgaaatgcaagggcacatgaaactcagatctataagaaggaaaagcaaagtgctttttttctattcttttattgtgacagcttctgcaccatgaatgctggtctatttagtaccagctgattctctctcatgcaaacttcctcctcatgtgtaatttttgcataaaaggttttgcttttaaataccacctcctccaatttcctactaagaaatgttttcatgtgtttagagtaaagtaatcacgatggttaacttgcaaatgaattaaaactacaaatgtcaggagtttctgagagctgacattaacataatattcttgagggattgtgctgctccagctaattggactgttctgatagaagacaaaatggaataaaaataatgtgtctcatgaagcatgttagattcaaccttagagagaagctatcggaatgatttgctggggtcacagtcacctggtaagtgaaactaaatggatcaacaccattcatgtatattgggtgaggaactagaaaggaaggaataagcccttcatattcagagaccattcaaatcaggaaaaatctatgctgataaaaatacagttcctttacttggatgtggtaaatcaaatgaataatttgaaatcaaagacaaga

SEQ ID NO: 94398 - DNA, 1672 bp, Homo sapiens
gaacaggttaaagaaaacataaaaatttcaagtatactctccgtacctgattttaatatctctcaataatgccagtattgaaaatatttttccccagaacctttacacaatctgccttcaaaacaacttctagacctgagtcaatacagctttaagaccatttctatacatttgtcttaagaatcatagttttgtgggggttttgagaatttattcagaatttttaagtctaagaagatcttgtattttattcttatattatttcacagatgagaaacagatgaggctaaataacactataaaaattacacataaccagttagggggcaaaattagaattaaaacccaggtcttcttgtattatttttactagagcaacttgctgaaatctaattttatgtactaaacataacttgttattttctttttatcttaaatcactctatgactttcataaaaggcaaaattggcatttcttctatgtgatttggattctcatttcttcctgttcagtcttatgtgctgatttatgctgaaagacccaatcagtgctgaaatgttacagtttacaaaggacaagctaagctaactgtggaaaccttcttgttctgttgatatcccatctgaatcaccccacagaagattctagctttccagctatcaagtgttgaccttacgccccttgtcttcctctaacatgaggctctgaaggctagtaccagtctccacaggactggtagagaaggaaatttttgcccattacgttctatttccccctgcattttcatgtaaattacccctgcatgcagaagtagttcccaaaagacactcacctgtgactatccgtattcttataatggatcctaagttatcatccactactacaatgagcttccaggatggagaaaagagtacaaatatataataacaagttagaaaaagaattctactggtcttgcaggagaaaggtttaaagctcacaagtgcaaaagaaagaatatacaaaagtgaaatacgtcctcccactagctagttgaaatgcaagggcacatgaaactcagatctataagaaggaaaagcaaagtgctttttttctattcttttattgtgacagcttctgcaccatgaatgctggtctatttagtaccagctgattctctctcatgcaaacttcctcctcatgtgtaatttttgcataaaaggttttrcttttaaataccacctcctccaatttcctactaagaaatgttttcatgtgtttagagtaaagtaatcacgatggttaacttgcaaatgaattaaaactacaaatgtcaggagtttctgagagctgacattaacataatattcttgagggattgtgctgctccagctaattggactgttctgatagaagacaaaatggaataaaaataatgtgtctcatgaagcatgttagattcaaccttagagagaagctatcggaatgatttgctggggtcacagtcacctggtaagtgaaactaaatggatcaacaccattcatgtatattgggtgaggaactagaaaggaaggaataagcccttcatattcagagaccattcaaatcaggaaaaatctatgctgataaaaatacagttcctttacttggatgtggtaaatcaaatgaataatttgaaatcaaagacaaga

SEQ ID NO: 94399 - DNA, 1672 bp, Homo sapiens
gaacaggttaaagaaaacataaaaatttcaagtatactctccgtacctgattttaatatctctcaataatgccagtattgaaaatatttttccccagaacctttacacaatctgccttcaaaacaacttctagacctgagtcaatacagctttaagaccatttctatacatttgtcttaagaatcatagttttgtgggggttttgagaatttattcagaatttttaagtctaagaagatcttgtattttattcttatattatttcacagatgagaaacagatgaggctaaataacactataaaaattacacataaccagttagggggcaaaattagaattaaaacccaggtcttcttgtattatttttactagagcaacttgctgaaatctaattttatgtactaaacataacttgttattttctttttatcttaaatcactctatgactttcataaaaggcaaaattggcatttcttctatgtgatttggattctcatttcttcctgttcagtcttatgtgctgatttatgctgaaagacccaatcagtgctgaaatgttacagtttacaaaggacaagctaagctaactgtggaaaccttcttgttctgttgatatcccatctgaatcaccccacagaagattctagctttccagctatcaagtgttgaccttacgccccttgtcttcctctaacatgaggctctgaaggctagtaccagtctccacaggactggtagagaaggaaatttttgcccattacgttctatttccccctgcattttcatgtaaattacccctgcatgcagaagtagttcccaaaagacactcacctgtgactatccgtattcttataatggatcctaagttatcatccactactacaatgagcttccaggatggagaaaagagtacaaatatataataacaagttagaaaaagaattctactggtcttgcaggagaaaggtttaaagctcacaagtgcaaaagaaagaatatacaaaagtgaaatacgtcctcccactagctagttgaaatgcaagggcacatgaaactcagatctataagaaggaaaagcaaagtgctttttttctattcttttattgtgacagcttctgcaccatgaatgctggtctatttagtaccagctgattctctctcatgcaaacttcctcctcatgtgtaatttttgcataaaaggttttgcttttaaataccacctcctccaatttcctactaagaaatgttttcatgtgtttagagtaaagtaatcamgatggttaacttgcaaatgaattaaaactacaaatgtcaggagtttctgagagctgacattaacataatattcttgagggattgtgctgctccagctaattggactgttctgatagaagacaaaatggaataaaaataatgtgtctcatgaagcatgttagattcaaccttagagagaagctatcggaatgatttgctggggtcacagtcacctggtaagtgaaactaaatggatcaacaccattcatgtatattgggtgaggaactagaaaggaaggaataagcccttcatattcagagaccattcaaatcaggaaaaatctatgctgataaaaatacagttcctttacttggatgtggtaaatcaaatgaataatttgaaatcaaagacaaga

SEQ ID NO: 94400 - DNA, 1672 bp, Homo sapiens
gaacaggttaaagaaaacataaaaatttcaagtatactctccgtacctgattttaatatctctcaataatgccagtattgaaaatatttttccccagaacctttacacaatctgccttcaaaacaacttctagacctgagtcaatacagctttaagaccatttctatacatttgtcttaagaatcatagttttgtgggggttttgagaatttattcagaatttttaagtctaagaagatcttgtattttattcttatattatttcacagatgagaaacagatgaggctaaataacactataaaaattacacataaccagttagggggcaaaattagaattaaaacccaggtcttcttgtattatttttactagagcaacttgctgaaatctaattttatgtactaaacataacttgttattttctttttatcttaaatcactctatgactttcataaaaggcaaaattggcatttcttctatgtgatttggattctcatttcttcctgttcagtcttatgtgctgatttatgctgaaagacccaatcagtgctgaaatgttacagtttacaaaggacaagctaagctaactgtggaaaccttcttgttctgttgatatcccatctgaatcaccccacagaagattctagctttccagctatcaagtgttgaccttacgccccttgtcttcctctaacatgaggctctgaaggctagtaccagtctccacaggactggtagagaaggaaatttttgcccattacgttctatttccccctgcattttcatgtaaattacccctgcatgcagaagtagttcccaaaagacactcacctgtgactatccgtattcttataatggatcctaagttatcatccactactacaatgagcttccaggatggagaaaagagtacaaatatataataacaagttagaaaaagaattctactggtcttgcaggagaaaggtttaaagctcacaagtgcaaaagaaagaatatacaaaagtgaaatacgtcctcccactagctagttgaaatgcaagggcacatgaaactcagatctataagaaggaaaagcaaagtgctttttttctattcttttattgtgacagcttctgcaccatgaatgctggtctatttagtaccagctgattctctctcatgcaaacttcctcctcatgtgtaatttttgcataaaaggttttgcttttaaataccacctcctccaatttcctactaagaaatgttttcatgtgtttagagtaaagtaatcacgatggttaacttgcaaatgaattaaaactacaaatgtcaggagtttctgagagctgacattaacataatattcttgagggattgtgctgctccagctaattggactgttctgatagaagrcaaaatggaataaaaataatgtgtctcatgaagcatgttagattcaaccttagagagaagctatcggaatgatttgctggggtcacagtcacctggtaagtgaaactaaatggatcaacaccattcatgtatattgggtgaggaactagaaaggaaggaataagcccttcatattcagagaccattcaaatcaggaaaaatctatgctgataaaaatacagttcctttacttggatgtggtaaatcaaatgaataatttgaaatcaaagacaaga

SEQ ID NO: 94401 - DNA, 2633 bp, Homo sapiens
gcatccatcccctcaagcatttatcctttgtgttacaaacaatccatttatacttttttagttacttcaaaatgcacaattaagttcttattgactgcagtcacactgttgtgctgtgaagtagtaggtcttgtggttgcctttgttatccgtgttcccatgcctcaaatcctctaaggttgccatttgtggtacccatttcagatacgttccccaacattgttgatgatgataaagcaatggatagatccaatagtctaaagttgtcacaagaaagggatggtgataaggggatgggggagtgagactatcatatcacatctatctatctgtctgtctatctgtctgtctgtctgtctatcyatccatctatctatctatctatctatctatctatctatctatctatctacctatctatctatcatctatttgtctacctacctatcatctaatctaccatctatccatccatctgtcttctaactatgtatctctatctatagttcctggcttctatgtatcatgttctttacttgaccctttcacggaattagatcatttcattcttaaagactgtatgtaatacccctattttacagatgaagaaattgagcctaagaaatagtacatctttttcagacctgaagtcagagtttgtagtcaaattagtctgactccaaagtatgtagtctttccctttaccacacagctcttaggctgggtcttttagtttttggccagatgtctacttgttagaccagattattgctgttttaagatttttccagatcatctctgtaatgatctcaatagaacatttgcaaattaacctctgtctttctcaatactggttgtgtgaaatgtaatacattaaaaagaaaatctattctgtgtaggcaaataaaggtgtaaaacttgaaggggatgctaaagataaattttgcttttgttttagatgaactgtgtaatcaaatgccatttgtcttattctgtgggagttttgagaaaagcagtgcagagaagaccggagaagccatgcctgtttttccatatacaacataattagcatattaaaataattttaatgataatatgcttactctataatcaattaaagttccattctagggacttaccctattaggccagtgcttagctttattatgtagaaggaacaagctaggtaaggtatctcaccaatttttgcctcatgtatttgttctttacctgatgtatctctcagaatatctggttactgtggcaacagaacatatcaaaatttcatctaggtaaatagatgcaaaggaattacttattttaatatgcatattttttccttcaaagtctgttttctactcaagctgattaactaactttgcccataaaaattaactgattttgcccataaaaaccaagataggttgtattgtctttactcacggtgccaagaagtgtaaattatgttgccagaaataaatcacaacacaaaaatgaatgaactcaatagcaatcagcatcatatataataggacccaaatgaactgtttgttcatttcctaccactttgattccatggatcttagttggggggactgagttcttgagaagaatactctttaaagaaggatttccacaggttattggctaaaaaagcaggggctcatgtaaacgatgcttttttctttttctttttctttttttggagggaggagagaatgaatttcccaaaagttccatccaggatttatcatgcactttctttttaataatagaggaacttaatgtcattaacagctatgacctgtaaattttgtttgagactactgcatttgctgaaattaaatttttacttccaaatgtgtaaacacatctcagctagggcttttatataatcgtactcttgctctgcttgcttactggtatttatgactgcttgcttctgttaattggctaatgtttgtaaagtgcctttgagatgaaaagctaatgatctctgtagggaggagggtgtgggtggcttcccaacagctccctaagggtgtctcttggggctttgactgccaaggcttgcttgtgggctcagggataatgaggaatcccttaagacttcaatgtccctggttctcgaagtcttttccatttggttctcctggcttttacaaagtcactccttggaggaagtaaaaatcatcattcctgcaaagctctaagactttttttacccacttaccactagagtttgctctaacgcagtaggacagcatctctttgctattacaaaagaactaatagtaatagaaacacataaacaagtccaaaagatgttgctcttcttattagagacatatgttttattattttatcttttttttctgtcgaatcaggttaaagggagctatgtttttatttatttatttttgtgttttgaaaggtaggacatacttttgttaaaagaggttgactaagaaaactgtaattgcaaaccaataaaattttcacccatttatacaacaaacatatattagaagggaaaataatttttttttaaaaaaagtaatgtattatcatttagataaagctactgattttttttgtcactgtatagaaatgatatttagaattttcatgca

SEQ ID NO: 94402 - DNA, 2633 bp, Homo sapiens
gcatccatcccctcaagcatttatcctttgtgttacaaacaatccatttatacttttttagttacttcaaaatgcacaattaagttcttattgactgcagtcacactgttgtgctgtgaagtagtaggtcttgtggttgcctttgttatccgtgttcccatgcctcaaatcctctaaggttgccatttgtggtacccatttcagatacgttccccaacattgttgatgatgataaagcaatggatagatccaatagtctaaagttgtcacaagaaagggatggtgataaggggatgggggagtgagactatcatatcacatctatctatctgtctgtctatctgtctgtctgtctgtctatccatccatctatctatctatctatctatctatctatctatctatctatctacctatctatctatcatctatttgtctacctacctatcatctaatctaccatctatccatccatctgtcttctaactatgtatctctatctatagttcctggcttctatgtatcatgttctttacttgaccctttcacggaattagatcatttcattcttaaagactgtatgtaatacccctattttacagatgaagaaattgagcctaagaaatagtacatctttttcagacctgaagtcagagtttgtagtcaaattagtctgactccaaagtatgtagtctttccctttaccacacagctcttaggctgggtcttttagtttttggccagatgtctacttgttagaccagattattgctgttttaagatttttccagatcatctctgtaatgatctcaatagaacatttgcaaattaacctctgtctttctcaatactggttgtgtgaaatgtaatacattaaaaagaaaatctattctgtgtaggcaaataaaggtgtaaaacttgaaggggatgctaaagataaattttgcttttgttttagatgaactgtgtaatcaaatgccatttgtcttattctgtgggagttttgagaaaagcagtgcagagaagaccggagaagccatgcctgtttttccatatacaacataattagcatattaaaataattttaatgataatatgcttactctataatcaattaaagttccattctagggacttaccctattaggccagtgcttagctttattatgtagaaggaacaagctaggtaaggtatctcaccaatttttgcctcatgtatttgttctttacctgatgtatctctcagaatatctggttactgtggcaacagaacatatcaaaatttcatctaggtaaatagatgcaaaggaattacttattttaatatgcatattttttccttcaaagtctgttttctactcaagctgattaactaactttgcccataaaaattaactgattttgcccataaaaaccaagataggttgtattgtctttactcacggtgccragaagtgtaaattatgttgccagaaataaatcacaacacaaaaatgaatgaactcaatagcaatcagcatcatatataataggacccaaatgaactgtttgttcatttcctaccactttgattccatggatcttagttggggggactgagttcttgagaagaatactctttaaagaaggatttccacaggttattggctaaaaaagcaggggctcatgtaaacgatgcttttttctttttctttttctttttttggagggaggagagaatgaatttcccaaaagttccatccaggatttatcatgcactttctttttaataatagaggaacttaatgtcattaacagctatgacctgtaaattttgtttgagactactgcatttgctgaaattaaatttttacttccaaatgtgtaaacacatctcagctagggcttttatataatcgtactcttgctctgcttgcttactggtatttatgactgcttgcttctgttaattggctaatgtttgtaaagtgcctttgagatgaaaagctaatgatctctgtagggaggagggtgtgggtggcttcccaacagctccctaagggtgtctcttggggctttgactgccaaggcttgcttgtgggctcagggataatgaggaatcccttaagacttcaatgtccctggttctcgaagtcttttccatttggttctcctggcttttacaaagtcactccttggaggaagtaaaaatcatcattcctgcaaagctctaagactttttttacccacttaccactagagtttgctctaacgcagtaggacagcatctctttgctattacaaaagaactaatagtaatagaaacacataaacaagtccaaaagatgttgctcttcttattagagacatatgttttattattttatcttttttttctgtcgaatcaggttaaagggagctatgtttttatttatttatttttgtgttttgaaaggtaggacatacttttgttaaaagaggttgactaagaaaactgtaattgcaaaccaataaaattttcacccatttatacaacaaacatatattagaagggaaaataatttttttttaaaaaaagtaatgtattatcatttagataaagctactgattttttttgtcactgtatagaaatgatatttagaattttcatgca

SEQ ID NO: 94403 - DNA, 1031 bp, Homo sapiens
aaacaacagcaggttcctctaggaaggctcattcccagagttatccgatttggtcatttggcaaggtcctacagcgccaggaaggctcattcctagagtagtctggttggtggtaatagttttaaatattagcagtttggatcacggtggggagaacacagtctgacttgatgtaatagcccactgtttaaggtatgagatggagtcaggactagggtttggtctaaacatcccagatcagatccattttgcaagctatcatgatccgggctttcagtagtgcctttttccttttgctgtatctggcataacatttacaagagctatacaatactaacacagtgatgaatatcattaaagatagtgaagattaggcatccaagaaggttataggtagagtcacagggcagtaaacaacctaatgagccaaaataccactgcgtgcattgttacattctttgatcggactcactgtgtttaccctctttatcaagggccatttgaactttataataagtcttatttgaagattgtaggactgacattaaatcagaatccaataaatttaatctgtcttctggccaatttatctccataggtataacatcctgaggagggtataaatcaaatgcaagaaataccctgcctggtcctcagtgtctaaattgttagagacttgttaacagtagacaaatctatttttcccaccacttctatattgcaccatatacttgagagataaaaggagactttgtcacaggagaagtcatatgattctacagtgtcattttgtttttttccctcggcagaacttcctatggccgagggccttaagagtcgaaagactcatagccaattaattgtgctaggccagataaaaatggatgtggacaggcgttcattacttcttatamttattattttaagtaaagaaggccaacgacaaaaccaaaaggcaaagttccaagactgacttacttttaacttgtatatgtggagccactgtcagcttggtttttgttacatacttt

SEQ ID NO: 94404 - DNA, 1031 bp, Homo sapiens
aaacaacagcaggttcctctaggaaggctcattcccagagttatccgatttggtcatttggcaaggtcctacagcgccaggaaggctcattcctagagtagtctggttggtggtaatagttttaaatattagcagtttggatcacggtggggagaacacagtctgacttgatgtaatagcccactgtttaaggtatgagatggagtcaggactagggtttggtctaaacatcccagatcagatccattttgcaagctatcatgatccgggctttcagtagtgcctttttccttttgctgtatctggcataacatttacaagagctatacaatactaacacagtgatgaatatcattaaagatagtgaagattaggcatccaagaaggttataggtagagtcacagggcagtaaacaacctaatgagccaaaataccactgcgtgcattgttacattctttgatcggactcactgtgtttaccctctttatcaagggccatttgaactttataataagtcttatttgaagattgtaggactgacattaaatcagaatccaataaatttaatctgtcttctggccaatttatctccataggtataacatcctgaggagggtataaatcaaatgcaagaaataccctgcctggtcctcagtgtctaaattgttagagacttgttaacagtagacaaatctatttttcccaccacttctatattgcaccatatacttgagagataaaaggagactttgtcacaggagaagtcatatgattctacagtgtcattttgtttttttccctcggcagaacttcctatggccgagggccttaagagtcgaaagactcatagccaattaattgtgctaggccagataaaaatggatgtggacaggcgttcattacttcttatacttattattttaagtaaagaaggccaacgacaaaaccaaaaggcaaagttccaagactgacttayttttaacttgtatatgtggagccactgtcagcttggtttttgttacatacttt

SEQ ID NO: 94405 - DNA, 931 bp, Homo sapiens
tgagcgtcatggcaatcaacaagcaataaaaactaactctggctaacttcagcagaaaagaaatgcattgaatggatgttggacagctcacagaatttccaagatgtctggagaaacagactcagaaaataagcagaaactrcagaatgctggttggccaagaacacagtgaaaatcacaccatcggaaccctctggtgagatcatggcagccatcactgctggccctagacactgcccatggccactggcaccacaggcctggctgcccctagaatatgaatgctgcttatttaccctcagatgaactctctatgctccatgcttctttgatttaccaaccttcaattcaaaccaagttaccagtatattatttgctaagtctacctgcccatattccaactgctgatagaaaggataaaatcaagtatcaagaatatttatcttggatagagaaaaggagcctacgggaatgtataagatcacttagtgagcaagtgagaaaggaaaaggataggatggaaagaaatgagaatgaaatggaagaaatgaaggttagggagtttgcagggaaaagccttggtccaagctttgagaaactctagcatagagtttcacctgagtaagagttgtcaaggcctattctgtgataatacacttcagctcaagtctacctagcattttaacttgaaaataagtcagaaataaagatggtatccctcctttgggagtacacttgatttttaacaagtgagtcttgaagtgaatttaagaatcacattataaatctgaccccttaagatggcattttccatgtgaccttacccactctgaagccaactctaattggatatgctcctagggttgttaaactatccaaagttacaacagcacacaaaaaaagaactgatagagttttatataaaaattaa

SEQ ID NO: 94406 - DNA, 931 bp, Homo sapiens
tgagcgtcatggcaatcaacaagcaataaaaactaactctggctaacttcagcagaaaagaaatgcattgaatggatgttggacagctcacagaatttccaagatgtctggagaaacagactcagaaaataagcagaaactgcagaatgctggttggccaagaacacagtgaaaatcacacyatcggaaccctctggtgagatcatggcagccatcactgctggccctagacactgcccatggccactggcaccacaggcctggctgcccctagaatatgaatgctgcttatttaccctcagatgaactctctatgctccatgcttctttgatttaccaaccttcaattcaaaccaagttaccagtatattatttgctaagtctacctgcccatattccaactgctgatagaaaggataaaatcaagtatcaagaatatttatcttggatagagaaaaggagcctacgggaatgtataagatcacttagtgagcaagtgagaaaggaaaaggataggatggaaagaaatgagaatgaaatggaagaaatgaaggttagggagtttgcagggaaaagccttggtccaagctttgagaaactctagcatagagtttcacctgagtaagagttgtcaaggcctattctgtgataatacacttcagctcaagtctacctagcattttaacttgaaaataagtcagaaataaagatggtatccctcctttgggagtacacttgatttttaacaagtgagtcttgaagtgaatttaagaatcacattataaatctgaccccttaagatggcattttccatgtgaccttacccactctgaagccaactctaattggatatgctcctagggttgttaaactatccaaagttacaacagcacacaaaaaaagaactgatagagttttatataaaaattaa

SEQ ID NO: 94407 - DNA, 736 bp, Homo sapiens
ggggtttgtaaccctagtgacatctaaggcaaaagaagaaaattaaatatgggacaccactagaaagctctaccagcacactggcaacattttcaggcctatatgggcacaataaatttatttctatgagctctttctcaggaagctgctgaaagagttgctccaccaaactaacagagctaattaggaaagagaagtcatgggatataggaaatagaagagaaaggtaaagggtatttccagaatgatgaaaaagttaatgaccaggccagtgatagtaaagctgggtgagagaacaagtgatccagaatggagctggtaagcaggggatatcatcgaatatgcatacaagaatgaaatgaagttgaaaaccttccagttgtaattgtcactactgaaatgggactcctatttttatgagatagtctgaggttgaattagtgtgggaggctgaataaccaaccctcaagagatctcctgatccttggaatctgtgaatgttaccttatgtagcaaaagacgctggcagatgggactaaattcaagatcccgagatgtggagattatcctggattattggggtgartcctaaatgtaatcacaaaggtctttataagaggaaggcaagaaagtcaaagaaggagataggagatggacaacagaagcaagaagacagagacaagaaatacaggtgttctccagcagctggaaaagtcagggaaatggatggtctcct

SEQ ID NO: 94408 - DNA, 862 bp, Homo sapiens
gcatatatcaatccccaaaaagtgataaagttatcgtagaggaattctaataggaatagagtatcaatgacaataaatcaattaaagagttagaatagcaattgtatatactatgacattaagaaaaacatcaagtatagctagaggaccaggaaattcagtatctgattatttatratattcagagagataacaaagaaaacaatataaacgctattattaaagaatggggctgggcccagtggctcatgcctgtaatcccagcactttgggaggcccaggcaggcagatcacgaggtcaggagtttgagaccagtctggccaacatggtgaaaccccatctctactaaaaaaaaaaacaaaaattagcaaggtgtggtggtgcacgcctgtaatccaagctacttgggaggctgagacaggagagttgcttgaactcgggaggcagaggttgcagtgagctgaggtcgcgccattgcactccagctctgggcgacagtggaaggggaggggaagaatggtatggagtataatgaagagtgttagaattagaaataattgatatatagatagataggaagacaagtatagatattcagatgcaaacttgtttttagaaatcaacagacaaaaatctgagaggaaaaaatcttgcacaaaacaatttataaatggtgtgaaaaaataaaaagagattgattggtttaatgaagtctggaaaactgagtctatatcttggaatatatttgattacaaaagccatatgataataaaataaataatcagtagggtaagaactgaccagatgcaaaagacatttattaagaaaagcaaactacggcccttctttatattttaagga

SEQ ID NO: 94409 - DNA, 862 bp, Homo sapiens
gcatatatcaatccccaaaaagtgataaagttatcgtagaggaattctaataggaatagagtatcaatgacaataaatcaattaaagagttagaatagcaattgtatatactatgacattaagaaaaacatcaagtatagctagaggaccaggaaattcagtatctgattatttatgatattcagagagataacaaagaaaacaatataaacgctattattaaagaatggggctgggcccagtggctcatgcctgtaatcccagcactttgggaggcccaggcaggcagatcacgaggtcaggagtttgagaccagtctggccaacatggtgaaaccccatctctactaaaaaaaaaaacaaaaattagcaaggtgtggtggtgcacgcctgtaatccaagctacttgggaggctgagacaggagagttgcttgaactcgggaggcagaggttgcagtgagctgaggtcgcgccattgcactccagctctgggcgacagtggaaggggaggggaagaatggtatggagtataatgaaragtgttagaattagaaataattgatatatagatagataggaagacaagtatagatattcagatgcaaacttgtttttagaaatcaacagacaaaaatctgagaggaaaaaatcttgcacaaaacaatttataaatggtgtgaaaaaataaaaagagattgattggtttaatgaagtctggaaaactgagtctatatcttggaatatatttgattacaaaagccatatgataataaaataaataatcagtagggtaagaactgaccagatgcaaaagacatttattaagaaaagcaaactacggcccttctttatattttaagga

SEQ ID NO: 94410 - DNA, 646 bp, Homo sapiens
attagtgaactccaaagattgtggccctaagattctctaactttcatactagtctacactagcaacttatcaaaattaccacttgaatgtttataccattttatgagtccagttatttctgctttaggtaagcatgtcttagatactgtagatgcacctgtctccagatgcaattgcagctttctaacagatctgaaaaaagttgttgattttatatatattttatttttgtatggacaggaatgacaaatgacaatttctttgttcattgaatgttagagctaaaacctcaatgttttataatattttatttgttccttcatgtattgagcctttatttgttgggtgttattttagctttatttttaaattcttttaaacttttttttctggaaaacatatgagttatttggacatagtttgatgctttctaattttgcttttaagatttgttggtcaggatagaacctcaaactagggctaattattttatactatgaggacaagactttcctgtgtaatctaacctgtttcattaatcttacratttttcagtcaaactgatggcaatggtcactcttcttagccctgtgtgaccacaaggaccgttcaccataacgcttttggataactctttcaccagctt

SEQ ID NO: 94411 - DNA, 646 bp, Homo sapiens
attagtgaactccaaagattgtggccctaagattctctaactttcatactagtctacactagcaacttatcaaaattaccacttgaatgtttataccattttatgagtccagttatttctgctttaggtaagcatgtcttagatactgtagatgcacctgtctccagatgcaattgcagctttctaacagatctgaaaaaagttgttgattttatatatattttatttttgtatggacaggaatgacaaatgacaatttctttgttcattgaatgttagagctaaaacctcaatgttttataatattttatttgttccttcatgtattgagcctttatttgttgggtgttattttagctttatttttaaattcttttaaacttttttttctggaaaacatatgagttatttggacatagtttgatgctttctaattttgcttttaagatttgttggtcaggatagaacctcaaactagggctaattattttatactatgaggacaagactttcctgtgtaatctaacctgtttcattaatcttacaatttttcagtcaaactgatggcaatggtcactcttctyagccctgtgtgaccacaaggaccgttcaccataacgcttttggataactctttcaccagctt

SEQ ID NO: 94412 - DNA, 572 bp, Homo sapiens
tccctcatcagcctcctaagtagctgggactacaggtgcatgccaccatgcctggctaactttaaaaaaaaaaaaatgtagcgacaggggtctccctatrttgcccaggctggtctggaactcctgagctcgagcgatctgcccacttcggccgcccaaagtgctggaattacaggtgtgagccaccatgcctggccactttctgtgtgtgcttttgtttgtttgtttgtttgtttttgttttttgagatggagtctcactctgtcacccaggctggagtgcagtggcacgatctgggttcactgcaccttccgcctcccgggttcaagcaattctcccgcttcagccttctgagtgactgggactacaggcacacaccaccaatgcccagctaatttttgtatttttactagagatggggttttgccatattgcccaggctggtcttgaactcctgagctcaagtgatctgcccgcctcggcctcccaaaatgctgggattacaggcatgaggtaccgtgccaggccttaaagtgataaaactttcatcttaaatatctcaaagggaaaag

SEQ ID NO: 94413 - DNA, 718 bp, Homo sapiens
tgaagacctgtcatcaaagctgctttatgaatgcaaagggatttattagtacagagcttgtactcattaattttttactacttgcctcttttgagtgtggtagttaactcttaagggtaatcatacggctgggcgtggtggctcatgcctgtaattccagcactttgggaggctgaggcgggcggatcacaaggtcaggagatggagaccatcttggctaacatggtgaaatcccgtctctactaaaaaaaaaaaaaaaaaaattagccgggcgtggcagtgtgtgcctgtagtcccagctgctggggaggctgaggcaggataatggcataaacctggcaggcggagcttgcagtgagctgagatcgcaccactgcactctagcctgrgcaacagagtgagactccatctcaaaaaaaagagtaatcatacaagttttattactgcatggcaaaagaaagaaacagagtggagagacagcctgcagaatggaagaaaatatttgcaaactacgcaaccagcaggggactaagatccagagtttacacagaactcagggataacagcaaaatagcccaataataaggtgggcaaaggacataaatagacatttttcaaaagaagacatacaaatggccaacaagcatattttattttttaatttattttcttttttattgagacagggtctcactcccatcacccaggctggagtgca

SEQ ID NO: 94414 - DNA, 675 bp, Homo sapiens
gctaatcccccaaaatgtccatagatgttatttctgagtgaggagggtcaggaaggttttaattttctttgtactaactctatttactaaaatgtccacctggattaacgttataataaaaatgttacygtttaaaataaaatgaataaaatacaccggtatgaaggtattattagaacatacgaaagtacaaaatcaagcagcaaaaggaggaaattatattaagaactgaaaaaactatgttgagaattctgtctaagaaacgctgtagcaattaagaaaaatcccagttctgcaagtaatgggagaaagatgatgacttccagaactttcaccatctactaagatgttcaccaattcctaagaagggactgaatacgtctgcatcctcagatctgagagtaattttccacgacgcatactgagcaccataatgagtgaagtctctgagatgacctctctgacctctctaaaacaatcaggcactgcaaacatggcctatcccacactagcccttggtgaaattcaagggcataatattagactgaaacagtgagaagaagattcgacatggagtgcggcaagaatgtgttctagtccttgaaggccagcgctattccaagtgtggtctcagaccagcagcctcagctgcagctgggggcttggaaatggaaa

SEQ ID NO: 94415 - DNA, 393 bp, Homo sapiens
caccatgcccagctaatttttgcatttttagtagagagagggtttcatcgtgttggccaggctgtcctcaaactcctgacctcaagtgatccacccgcctcggcctcccaaagtgccgggattgcagaagtgagccactgcgtccagcaagaatgaggtttgaagggaggcatgattgtgttctcttcaaatagttgaaaggttccatttgaaaaagggatttacttattcctatggttctagtaagttgcagagggtggatctaagaccattgggtgaactttacagagaggccagaaagccttcwccaggggaagaaagtcaagaaaaggtctcaaaactgtctggcagaattctgcacaggagagtcctcaattcggtgtagaattggca

SEQ ID NO: 94416 - DNA, 527 bp, Homo sapiens
tgagagaatacatttctggtgttttaagccaagctgtttgtggtgcttactaagccagccacaggaaacacacacagggccacatgaacacttcaaaatacagccattgcgaaacctgaaacctggaatctaattagcctgaaccagccattaaaagaaaaagtgatgtatgcctgataaccattctccatatttttataaggagacagaaccagtaagaaaaagaacatagataaattaattcccccgttttacaagatatttattttacaagtaaccttccagggaattccctggtatgaacaaatgcatgcattatgaacccatccaatgatattgagttcactgctggaatctgggcaaaacactgcaagttgctcggtgaaaacaggtccarttgtgtttggtttgctctaagtcagctgcagggaggcactgctctgccacaagacaggagggaggaaagctggggaaatcagataggtttccttgttgcaggtgtgttcaaaggagggttggagcatctt

SEQ ID NO: 94417 - DNA, 1755 bp, Homo sapiens
ataccacataccacacacatacaaacacatgccacataccacacaaaccacacagcgcacaccacatacacaacacacaacacaaaccacacactgcacacaccacacaaacacattacacaaaccacacactacacaaaacacatcacacacagcacacacatcacacacaacacatgcaccacatatacacccacatacacaccacacacaccacacttcacacacatcccacacacccctctctctctctccttccctgtctctctctgtctctctgtctctccctccctgtctctctctcctcatgcgttctcacccatggagaatgtaagtgagaggagctatttacgtcatccataaagaagaagggaggaaggaccacagaagcccactctctatcagaagggccagagctcagggagcgcctttgtcagcaagatgggaaccagcttttacggagcactttgtgtcttcaaagaacttcaccaacattgactcattaagccacccacacctctgaggcagctggggtggcttggttctccctgtcagagaggagagaggtcaacgctcacctcagggcacagggcaaattcaagagagggcaagggccagtgtgtcccagatgacccggccgaggaacctgcttctgtgtcagggaaggggtcaagtgaggtcggaagtcaaggaccagctctctaggtgctgaagggttaaggaaggaggaagagagggtggccggtggctggtggcatcatgttaccttctgcctgtcatccagagagccaagctgaacaggcatcagggtgcctgtgaggaggggtgggcccagccttcctggggcagcagcccctccactctcttttcctgtgctgacagagaagggagaagaggtctcagagaggctcttggaccgagttcctttgttcctcccttctaggagtggtgcatttttacaatatcaacagtcctcactcccaggcaagatctctgtaatgcatcacacagatgaatccttctgtatctcaaagttcacacacagtatgaacttaacagccaacagggagcttgtttttatgctaatggaatggcaaagggaaagttcttcccaaatgaaagagctttgatgtcctgtatttctatatgtgtgtgtatgtgtgtacacatatatatatacacacaaatatatatatatatatatatatayacacacacacacacacacatatatttcctccaaaaaagaaatggctggtccggagctgaatctctttcctcctcaaacccctacttggaagcaggcattcctcccatcgtgaaagggctcacatacagcacaacttggtttctgaaagcttggcctttggagctagaaagatttgtttcagtcattgtctggatgtggagaagaacctgactcttagaggcagctttctctgaccccatcgctgcctgggatcccaacatctaggaagaggtttaaaagagaaactgtccaaccccaaaccaagggcaacacaaaccagcctggcttcttcactcacagcttgagcaagctgcttgtctcggtgattatttggacacatgctacgaagcacagagacatacgcttaccttttgttttcagggattaaagagaagattttaaaaatctgaagccaaaaagacacagagcaacagaagcagctgtacaaaacacaccctcagaagggaacaacttcagaagagagaacgagcaggaccctcaacttt

SEQ ID NO: 94418 - DNA, 502 bp, Homo sapiens
cagtctcggcaaggcctggtacggtgggcgtctcagctgcagccagcattgtgtcygccccctccgcgaggcagtgtgtttgtgatcagagcaggagtgtagcctgctggtttcggtacacgtagaatgcgtgccagtgcacgctagcagcatctgttgtgttccttgtgcggcagctccatgccatggccaaggtctcagtctctgtcctgctgattgctggagcaggtgtggtggcccatgtccgaggacggctgtgtcctggagaggtgggcaggggctgggttcatctgcctctggagcctgctggcagcctcctcccgggtttcatggctggcaatcatgaaagctgcctcgatggtggcggggccctgttgatgtcagattggcgtggcctcctgagagttcctcctgtgggtgtgcgcagggcttgcatgtgcaggaaatggactcaccctggagctgggcccccaggggctgccccgggcctgggtgggggccg

SEQ ID NO: 94419 - DNA, 667 bp, Homo sapiens
gggggtcagaacagctccragaaccacgtcctcctcccactttgggatctgggccaagtctccctgcctgtctgggccttggttccctcctctgtaagtgtgtggaggacaaggtgacctctaagacctgtccagttctggggtcccacccctgaggactttgcagcctgggctggcagccctgaatgatacgggggacacctgcaggggccgcacccctgcatagactgcagttaattctgggttaagcaaagcctgtgtttcccacacgggcccagcttctgatgtctggaaagatgaggacccgcacttgcttccatcagcagcatgtcctgtgcacacgaaggttgcaccgtcctaaaaacaccactgcgatgacgatctgagcttttaagtgtctcctgctgtctgcagcacgttgagcagaacaccctccaaattccaccttatttggaataagggtctttgcaggtgtaattaattgagagtctgtgatcatcctggttttagggtgggccctaaatccaatgactggtgtccttatgagaagaggagaggccacagagggacacatggagaaggccatggacggcagaggcaggggtcaaggtgacacagccacagccgagggacgcctagagtcacccgaagcggggaggggcaggaa

SEQ ID NO: 94420 - DNA, 667 bp, Homo sapiens
gggggtcagaacagctccgagaaccacgtcctcctcccactttgggatctgggccaagtctccctgcctgtctgggccttggttccctcctctgtaagtgtgtggaggacaaggtgacctctaagacctgtccagttctggggtcccacccctgaggactttgcagcctgggctggcagccctgaatgatacgggggacacctgcaggggccgcacccctgcatagactgcagttaattcygggttaagcaaagcctgtgtttcccacacgggcccagcttctgatgtctggaaagatgaggacccgcacttgcttccatcagcagcatgtcctgtgcacacgaaggttgcaccgtcctaaaaacaccactgcgatgacgatctgagcttttaagtgtctcctgctgtctgcagcacgttgagcagaacaccctccaaattccaccttatttggaataagggtctttgcaggtgtaattaattgagagtctgtgatcatcctggttttagggtgggccctaaatccaatgactggtgtccttatgagaagaggagaggccacagagggacacatggagaaggccatggacggcagaggcaggggtcaaggtgacacagccacagccgagggacgcctagagtcacccgaagcggggaggggcaggaa

SEQ ID NO: 94421 - DNA, 636 bp, Homo sapiens
gatgtccattagtagagcttggggccatggccttgatttgtgctaagacaccagcagtttaaaagcacactgtggtaaaatacacatttaccatcctgcccatgtttaggggtcccattcggtggcactaagagcacccacattgctgtgcaacttcaccaccccggagctgcttcagctttccaaactggaactccgtccccatgaaacactccctccccaccccccrccagcacctacgcttcacctgctgtctgtgtgggtcagactcctctagggacctaagtggggtcacacagcatttggctctcgtgcctggcttctttgagcgtaatgtccccacatgtcagaattgccggcacccccggctttacctgccattgcttctgtaccatcgacagtgcaaatgtgagtcccataacaaaacatctcgaggaacatctcagtcttgccatgaaaatagttcggatctcccagaccccccagggcatcagatgagtccacacaggagaaccccacaccccgtggcctctacccgcagacacaactgaggttatcaccacacttctactcaaacgggaacattctccacaaagccacagtgctggcgccacactgaggaaattcacagcagtg

SEQ ID NO: 94422 - DNA, 711 bp, Homo sapiens
gaagggagctcaccaaggaccacccaatggtgcagagttcttatccagccacataacggccttcacacagctgcccttcaggaaacaatatttaactctaacctgcctatgtgtgcatgcactgtcttgttattaaatgcgccaacatattactttaatatttcgataactttttcactttaattggttttctttgcaatcagatgtgttttatcttacggatttgtcaacatcatttgagaagaagtccataggctcagcagatttttatgccaggtgggccatggcataaaaatgtgaagaatgtgctcrcttagacaatacgtgtgctaaaattggaacaatacagagaagattagcaaattaaaacaatgttaggaagtcagtgtggtgaggtacggtgcctcatgcctgtaatcccagcactttgggaggccgagatggaaggactgcttgagaccaagaggttgtgaccagcctggacaacagaggagaccctgtctctgctaaaaataaaaaattagctgggtgtggtggtgcatgcctgcagttccagctacttaggaggctgaggtgggaggatcgcttgagcccaggaatttgaggctgcagtgagttatgaccgcaccactgcactccagcctgggcgacagagcgagaccctgtctcaaaaaacaaacacaaaacaaaccccaacaaccttggtctgga

SEQ ID NO: 94423 - DNA, 711 bp, Homo sapiens
gaagggagctcaccaaggaccacccaatggtgcagagttcttatccagccacataacggccttcacacagctgcccttcaggaaacaatatttaactctaacctgcctatgtgtgcatgcactgtcttgttattaaatgcgccaacatattactttaatatttcgataactttttcactttaattggttttctttgcaatcagatgtgttttatcttacggatttgtcaacatcatttgagaagaagtccataggctcagcagatttttatgccaggtgggccatggcataaaaatgtgaagaatgtgctcacttagacaatacstgtgctaaaattggaacaatacagagaagattagcaaattaaaacaatgttaggaagtcagtgtggtgaggtacggtgcctcatgcctgtaatcccagcactttgggaggccgagatggaaggactgcttgagaccaagaggttgtgaccagcctggacaacagaggagaccctgtctctgctaaaaataaaaaattagctgggtgtggtggtgcatgcctgcagttccagctacttaggaggctgaggtgggaggatcgcttgagcccaggaatttgaggctgcagtgagttatgaccgcaccactgcactccagcctgggcgacagagcgagaccctgtctcaaaaaacaaacacaaaacaaaccccaacaaccttggtctgga

SEQ ID NO: 94424 - DNA, 754 bp, Homo sapiens
ggtttctgcactgaaaagctgttattacttttttaggttaataaatatgtcaaagcagatactttgatcctatggaaatctccaatgaagctaatttaagtataagacacactaggtaaaaagtaacaaggtaaaagaagatatcccatgctaaactaatcaaaggaaagcaggagtcaatttcaagtcagagtctagggataaagagggtcatttcatgatgacacaggggtcaaccagtcaggagcatgcacgatgtgagcacagagtctcaaaacacatgaagcaaaagctgatagagctgcaaggaaaaattacagacaaatctgcaattacagtcagaggtttcaacaccgctatcaagaatttgtttgtttgagacagggtcttgctctgccacccaggctcaaatgcaatggcacaatcacggctcactgcagccttgacttcctgggctcaagaaatcctcctgcctcagcctcccaagtagctaggattgcaggcatgcgctgccatgsatgggtgagtttttgattttttgtagagatggtgtctcactttgttgcccaggctggtctctcaataattagcagagcaagtagacagaaagtggatgataatatgggctactcaaataacacagtcattgccgtttataggacacctcgtggagcaacagtacacaaattcaagtgcgcatgcaacaaccgccaaccataatcggggccatgaaagagtctcaataaatttaaaa

SEQ ID NO: 94425 - DNA, 605 bp, Homo sapiens
gggtgggattctggcaaaaggaagtgatagtgtttgtaacagaatactgacaaatcaaatagtaaaagtttaaataagaaaataaggaactgatgacaattttattttwaaaaaattggattaattatattaccactaaaattactatctaaatcttcctaaatatctaaagaaatttataaaatattgattaaagaaaacacaatgtgtagagaaagaagcatggcaaatataacaatgcacatgatcattacaacataaaataatttctcagagatgacaccaaacaaaatagcaggtcattaaatgtgaacaagcttaacttacctattaaaatacaatgattattaattggactcaccaagaaagaatcactatgttcaagagaaacattgaaaacaaagtgattaagaaagtctaagaataaaagtatatgcaaattaaatacaaaatgagataccataatatttctattaggatggctaaatttttttaaactaagtgtaatgattgattaagaaagtctaagaataaaagtatatgcaaattaaatataaaatgagataccatattatttccattagaatggataaaaattttaaaac

SEQ ID NO: 94426 - DNA, 642 bp, Homo sapiens
gctcatgctgccttccaggcttgcacttgccttgtctgccaatctagatatcgtgatggtgttaaaagatacacttaggcatattggattttatagtttatctgagcagacatcgattcacgaatcacacagtactgggtggtaagtgggtatcactccactgcagggtggagagagagacggtgagaggtgtttgtggaagaaatacaaggaacacagctttgactaggtagtgacagcccctagttagaggtcagttggtggtttccagttgccaaagtctctagtttcattttactccttatgttgggcttcggtttgcttacagaggaacctaaaaccctgggtctgcctcagtctaatggtcttccaattaatttttttttgcaagtgtgactgcaaatgttttttgggtccacctggaccggagaattaatggattttctgattcaggattatgtaaaatcaagaagattaggttaaaagaaaacaatccatcaaaataagatggactctattgagtctgttaatagttttgacawatagaggtgagatatatacatagtaattaagaacatggactctggtctggcacagtagcttccacccataatcccagcactttgggagaccaaagtggga

SEQ ID NO: 94427 - DNA, 701 bp, Homo sapiens
ttcaygttgtcctcacaaagacaggtctgaagactcccagaccctgcgaataggctttctctagttccttcccagtggctgactgaatcatgtccccgtcaggggttaaagctctggattgcatgggtgtggccaggagaaaccatgggatgcacactaaaaattcccatcttggagatactcctccgccctgggatcacagcatacacaacagagctcagctccagccgaacctgagctagacaatctgccttgacaggccccacgcccactgccgggtgtgtgtctcagccaacctgggaattcctgcacagcccaggagtctcctgtttcattgccatcacacacacatacgggtctggtttagggcaaagtccagtgttggggtgaatgatccctccagcgtctccattacccccgtgcctctcaaaggcctctaaagtacttgatcttacttcatcccgctccaatttttactcatgctctctaagccctggagggtctgagatacacaaatatgtgcacctaacacatgggatttctaaccgatgataactgtattagtccgttttcatgctgccgataaagacatacccgagactgggaagaaagaggtttaattggacttacagttccacatggctggggaggcctcagaatcatggcgggaggcgaacggtacttcttatgtggcggcgcaa

SEQ ID NO: 94428 - DNA, 701 bp, Homo sapiens
ttcacgttgtcctcacaaagacaggtctgaagactcccagaccctgcgaataggctttctctagttccttcccagtggctgactgaatcatgtccccgtcaggggttaaagctctggattgcatgggtgtggccaggagaaaccatgggatgcacactaaaaattcccatcttggagatactcctccgccctgggatcacagcatacacaacagagctcagctccagccgaacctgagctagacaatctgccttgacaggccccacgcccactgccgggtgtstgtctcagccaacctgggaattcctgcacagcccaggagtctcctgtttcattgccatcacacacacatacgggtctggtttagggcaaagtccagtgttggggtgaatgatccctccagcgtctccattacccccgtgcctctcaaaggcctctaaagtacttgatcttacttcatcccgctccaatttttactcatgctctctaagccctggagggtctgagatacacaaatatgtgcacctaacacatgggatttctaaccgatgataactgtattagtccgttttcatgctgccgataaagacatacccgagactgggaagaaagaggtttaattggacttacagttccacatggctggggaggcctcagaatcatggcgggaggcgaacggtacttcttatgtggcggcgcaa

SEQ ID NO: 94429 - DNA, 487 bp, Homo sapiens
taggagcactgtttccatggctccctagaaagaggccaggcrcaagaagggcaggacagagcccagggcggggagtctgcccgcttccgtagcagccccaggcccgcggctctggaagcttgtccacagatctagctgtcgctcctcgccctgcagtcgctcctcgtgcagccttatcctgtgactgcgggcactgcccgtgctgtgcccttctcttgcgcaactgcctgtctgatatctacacagaatttccccatctccggagacgccctgcctgcggctctagtcagaaatcaggctgtcttgatttctttctaccccttactttccacattctacccccagactggacacctccagtctctgcccccttcacagccacccaggccagcatccctcttgcccaagggaccgaaacactatctggatgcctcctgacaccggctgaactctcacagccaccccagagccagagatgtttcttttt

SEQ ID NO: 94430 - DNA, 528 bp, Homo sapiens
aaataaaaaaaataaaaaaaagaaagaaaactggttaacagagacccggtttcaggtaaaaatttctgtatccacttctccaaagtgggaggggaggttgatttcctagcagaaatctaaaagaagaaggagccggaggatgatgacaaagaagaccagaaggaggaggaggaggaggaggaaatgtcaacatacatagggccagaacaattgtgatgccgtgggaatggwgttacttgttgttttaggcagagaataaatgggcataaaactatacattggctgctcccctaaatatcttgatgttctgaaacctctaaaatgttggttcttgcataataaagccacttgtgatcctgccaagattttctgttacaatattgaagtgccataagtgcaaaaatccatcaaagaggtggtaagaaaataacagagaatttcagagaaaatatcaagaagttgtgcagcagaggaaagggatctccaatgggaagaatccgatggcttctttcacctaagtcacctgat

SEQ ID NO: 94431 - DNA, 1569 bp, Homo sapiens
ttataacaggaagcagagtggctatggtgggcagactaagccgattttccagaaaaaggctaaaactacaaagaatactgtgctaaggcttgagtgcgttgagcccaactgcagatccaagagaatgctggctattaaaagatgcaagcattttgaactgggaggagataagaagagaaagggccaagtgatcccgttctaagtgtcatcttttattatgaagacaataaaaatctcaaggagagtcttactgagcaccagctctgtgccaatcgttactgtggggctttttgtgcaagtggaggtgttctacaaatggatttcaaaatatttccttgaagactgaaaagtgggcccaaatgggaaatgtagactggaaatgtgcttcctttggctttatgggtgggaggtacatttgagtccttggctggtcctctttaggctgggtggcatggctttagtgagccctgtcagtcatgctcatatgtcaaatacactctcctaattcactggggtagctcagatattggagcagttacacaattgtttatatatcagactaaaataagattgcctcgtacttccgtgagaaaatatgcaatcaagaggcaggccctcatctyccctccaccaggctatggcctccctacagctgtgcctgctgtctcgccattctggccaaggtcaccctctcctctagtgctcaggatccgccccctgcctgctcaggaatgtgtgtccatctccgctgcactgtgacctgttgaccgagcccacgctttctgctggatactctcatccacaaacaagttacctacccacgaggtcttttccaaaaaggcaggccccactcactccctatccactccccctccacaccttctcacatcaaaatactccctatgcactccccctccacaccttctcacatcaaaacttctgaaagccctcgccatgtcttcatctcacttctatgtagaataattaaaaagtcgaatccttaggaagagaggagaagggtggctgccagggcctggggtggggtcctggggcaatgctggtcaaaggccatgaagtttcagggttacaggaggagtaagttctgcaggcccgaggtacagcatggtgactgtagctaatcatgtgttgtatgcttgaaatgtgcaaagagaagggcaggggatggtggctcacgcctgtaatcccagcactttgggaggccgaggtgggtggattgcctaagctcaggagttcgagatcagcctgggaaacacagtgaaaccccatctctactaaaacataaaaacttagccgggcatggcggcgtgcgcctgtagtcccagctacttgagaggctgaggcaggagaattgcttatacctgggaggcagaggttgcagtgagccaagatggtgccactgcactccagcctgggcaacagagggagagcccatctcaaacacaaaacaaaacaaaacaaaagaaaaagaaaaagaaaaggaaatgtgcaaagagagcagatctgaagtgttctcaccacacacacagaaaggcaactgcaggccgatgg

SEQ ID NO: 94432 - DNA, 740 bp, Homo sapiens
gttttcataatagcttcccaagaatttcatcactttggacaactacaaataatgaaggaaagaaataaatcacgattctggacattaaagcagaggaaaccctcttattttctagtctaaggctcctgccatcgccatctgaccttccttctgaccactaggcagaaagacctcccatcttcgctcctttccctgtgcatttgtccctcatgtcacctcttcctcatcctgtttgcttcatgctctcttcttctgctgtactctgaaacacagggtcaatcctgcacatttcctttagtcttgttctggaagggcacagctcaaagctcctccttctccaagaaagtgttttccatcctttcccacatcacagcacacatggaagaagrtggtatttgtgtagcacacacagtggacaagactgctctgctggaggtgggaaggcaatgagcttagagatttgggctggcccaggccctgactggtagacccagaagccagggggcaaatacagaggcatacctgtttacggcccacagtctgctgcctgagaagctctgccctgaagaacactagaacttccataactgtaagctgggcctagatctgattttctcacttattgtaaatacatcaagaaaaataaagcagcagatataagtaacatgcactaaatgggaaataggaatttgaagtcctatttgtttgaagtccagaaaaatatttgtttctggagagaa

SEQ ID NO: 94433 - DNA, 664 bp, Homo sapiens
tgcatttctctgataattaktaacgttgagcattttttcttgtgtttgctgacagcttcctttgagaagtgtctgttcacatcttttgtccattttttaatgaggttgtttgtttttgcttgttcaattgtttaagttccttatagattctggatattaacccttttgaatgcacagtttgcaaatattttctcctgttctgtaggtcatctgcttactttgttgatggtttcttgaagctctttagtttaactaggtcccacttgtcaatttttctttttgttttttttttttgcagttacttttgagggcttagtcattaattccttcccagagctgatgtctagaatcgtgtttcctaggcttcctttcttttttatctgtgccaatcctatgggaattttcattactcctcattcttttaagagtcaaagaacgtaaacaactataagcaaatttagtatttatatccctgttatgcaataaagacaaaacaaaagccagggaagtgaagtaatttgccaaatatcatatagcctggcaaagtcaagactagaaatgtctgagaatcaggcgcagtggctcacgcctgtaatcccagcactttgggaggccaaggtaggtggatcacctgaggtcgggagttcaagaccagcctgactga

SEQ ID NO: 94434 - DNA, 664 bp, Homo sapiens
tgcatttctctgataattagtaacgttgagcattttttcwtgtgtttgctgacagcttcctttgagaagtgtctgttcacatcttttgtccattttttaatgaggttgtttgtttttgcttgttcaattgtttaagttccttatagattctggatattaacccttttgaatgcacagtttgcaaatattttctcctgttctgtaggtcatctgcttactttgttgatggtttcttgaagctctttagtttaactaggtcccacttgtcaatttttctttttgttttttttttttgcagttacttttgagggcttagtcattaattccttcccagagctgatgtctagaatcgtgtttcctaggcttcctttcttttttatctgtgccaatcctatgggaattttcattactcctcattcttttaagagtcaaagaacgtaaacaactataagcaaatttagtatttatatccctgttatgcaataaagacaaaacaaaagccagggaagtgaagtaatttgccaaatatcatatagcctggcaaagtcaagactagaaatgtctgagaatcaggcgcagtggctcacgcctgtaatcccagcactttgggaggccaaggtaggtggatcacctgaggtcgggagttcaagaccagcctgactga

SEQ ID NO: 94435 - DNA, 664 bp, Homo sapiens
tgcatttctctgataattagtaacgttgagcattttttcttgtgtttgctgacagcttcctttgagaagtgtctgttcacatcttttgtccattttttaatgaggttgtttgtttttgcttgttcaattgtttaagttccttatagattctggatattaacccttttgaatgcacagtttgcaaatattttctcctgttctgtargtcatctgcttactttgttgatggtttcttgaagctctttagtttaactaggtcccacttgtcaatttttctttttgttttttttttttgcagttacttttgagggcttagtcattaattccttcccagagctgatgtctagaatcgtgtttcctaggcttcctttcttttttatctgtgccaatcctatgggaattttcattactcctcattcttttaagagtcaaagaacgtaaacaactataagcaaatttagtatttatatccctgttatgcaataaagacaaaacaaaagccagggaagtgaagtaatttgccaaatatcatatagcctggcaaagtcaagactagaaatgtctgagaatcaggcgcagtggctcacgcctgtaatcccagcactttgggaggccaaggtaggtggatcacctgaggtcgggagttcaagaccagcctgactga

SEQ ID NO: 94436 - DNA, 1258 bp, Homo sapiens
ttagtatttactttgcatctgcaatagacaatacaaatactatggtcatcaagaagataatcacagttcctgttgtcatggtgcttagaaacaagctaagcaaagaacattaaagaaatcattacataattaattaatgaattacacttgcactaagtgctttggagtaaaagacagtgtgtgagaggatacaaaaagggagaataatgtgttctgatgcacaggtgtgtgtgtgtgtgtgtgtgtgtgtgtgtgtgtgactaagaattaactaagcaaagttaaggagtggaggtgacatgtggaaggggaggtatcccaggcagagggaatagkatggttacagattatgtagtccaaaggctggatgaaagtgtgcttgttcaggaatggaaaggacacctgcatggctggaggacagtgagccaataggaaagaagtgcaagaggagagggcaagatgagtgggcaggggacagcatactcaggtccagcaaagccatacccaagatttaaggaggcactcgatccagtctgggttttgttttttttttttttaaagattactcttcttgctgatggaaaattcattgaagggagaacatttaactgctgtgtgggtgtaaaattatgtaatcattctgataaatgatttggcaaaatgtatccagagcctttaaaaattcatagcccttggtctgttctagaattctatctaaaaaggtaaaaaagaaaaagataaaatgttaaatacatacataatcaagctatttataaaaaataataattagaaacaacacaaaactaaaattagtatagcaacaactacacatattgactgtttactgtcaatctagctatttatgcatattaaattttctattatttttatgagacaggtaatattaatatttctgtctacagagaaggcaactgaggagttaagtaccttttccaaggtcacaggaaagtggcgaatgagagtcctgtgattccagtctaggtcatctgaatctagatcctgtgttcttgaccactacatgaaattactgactggcaaccaggtaagcagctgcagatcagaggatggaacattctacaaacattaaaattcaattctcaaacaaaattttaagactttgacaaaatataagacaataatgaataaaaatatatcaagacataaaactggctatgtgtgcttgtgattttgtaaaatacaggtacatacatgtgtggtgggattattaatctttatt

SEQ ID NO: 94437 - DNA, 1258 bp, Homo sapiens
ttagtatttactttgcatctgcaatagacaatacaaatactatggtcatcaagaagataatcacagttcctgttgtcatggtgcttagaaacaagctaagcaaagaacattaaagaaatcattacataattaattaatgaattacacttgcactaagtgctttggagtaaaagacagtgtgtgagaggatacaaaaagggagaataatgtgttctgatgcacaggtgtgtgtgtgtgtgtgtgtgtgtgtgtgtgtgtgactaagaattaactaagcaaagttaaggagtggaggtgacatgtggaaggggaggtatcccaggcagagggaatagtatggttacagattatgtagtccaaaggctggatgaaagtgtgcttgttcaggaatggaaaggacacctgcatggctggaggacagtgagccaataggaaagaagtgcaagaggagagggcaagatgagtgggcaggggacagcatactcaggtccagcaaagccataccmaagatttaaggaggcactcgatccagtctgggttttgttttttttttttttaaagattactcttcttgctgatggaaaattcattgaagggagaacatttaactgctgtgtgggtgtaaaattatgtaatcattctgataaatgatttggcaaaatgtatccagagcctttaaaaattcatagcccttggtctgttctagaattctatctaaaaaggtaaaaaagaaaaagataaaatgttaaatacatacataatcaagctatttataaaaaataataattagaaacaacacaaaactaaaattagtatagcaacaactacacatattgactgtttactgtcaatctagctatttatgcatattaaattttctattatttttatgagacaggtaatattaatatttctgtctacagagaaggcaactgaggagttaagtaccttttccaaggtcacaggaaagtggcgaatgagagtcctgtgattccagtctaggtcatctgaatctagatcctgtgttcttgaccactacatgaaattactgactggcaaccaggtaagcagctgcagatcagaggatggaacattctacaaacattaaaattcaattctcaaacaaaattttaagactttgacaaaatataagacaataatgaataaaaatatatcaagacataaaactggctatgtgtgcttgtgattttgtaaaatacaggtacatacatgtgtggtgggattattaatctttatt

SEQ ID NO: 94438 - DNA, 436 bp, Homo sapiens
agggatgttgatagtagaagagttggtatgtgcatgtggaaataggaggtagatgagaggtatacataggtggtataaacacacgcacacacatgcacacacacagatacacacacatatatatgtatacacatatttatgaaaccaaatataaatattaggtatatgtatgtgtatgtataaatatatataaataggaggtgcatacacacatatatgcacacatatacacatatatgcacacatatgtatatacacatatacacatatatgtaaacatgcataatatatatttacatatatatttaaacattgttgctttcaaaccactcactgaatctttggctttctttttcactyttccctcactttttaaaaatattctttaacatgaagttaaaccaaaagcttagttgcccttttgcattcatgttag

SEQ ID NO: 94439 - DNA, 1143 bp, Homo sapiens
tgatgcacattccaccagcaggataaatgatgctttttatcagagaatttttaccaaatctagatattctcactggaaaaacaaaaacaatttgcaaaataattggtagttatttaattctctttgtttttttttctttgagattgcatttgagattgaactgttctctcaattctgttttcttcttcctgttttatttcacttattgtgcctaaatgtgctgtgttagcccatttgcgttgctataaaggaatacctgagactgggtaatttataaagaaaaaaggattatttgggttacagccctgcagactgtacatgaagcatagtgccagcatctactcctggtgagggcttctggaagcttataatcatggtggaagatgtaggggagccagtttgtctcatggtgagagagggagcaagagagagagagaagaggtgccaggctctttttaaacaactagctctcctatgaactcccagagcaagaactcactcattaccatggggatggcaccaagccattcatgaaaaatccaccctcatgacccaaacacctgccactagaccccactatggacattggaggtcacattttaatgtgagatttagtgaggacaaaacattcaaaccttatcatgtgcctactagattaaaaataacaataactgctttacaagcttattgctgaggatgaattacatattgtatgtaaaatgccattcatataatgggagctcaataaatgctagttgaagtagactctgaatagcatattaattaaaatcaaaatataacttttcctttccaacagatgattctgctgcagagagctttaatggcaatgagactctggggcacagttcaattgcttcagggggaacacacagcagggagatgggagactccaacagtgatggcaaaactgggctggagcaagatgaacagccactgaacctgagtgacagtcccctctctgcgcagctaacttcggaatacagaatagatgatcacaacagtaatgggaaaaacaagtataagaatcttctaatttctgacctcaagatggaacgagaggcgagagaaaatggaagcaaggtatgatcacattacaatttccaraatttttgagttggtcat

SEQ ID NO: 94440 - DNA, 876 bp, Homo sapiens
aggaccttagtagttgtggccttgtgacattgtgccactgggtctgaaaaacccaccgtctcattggccattggcatgcaaagtgaactgtgcttgtacccattaatcacagattcttctattggagggcttttttttttttcttttggtcagagaaaccctcagattggtgcaagcatagtaggcctacttccacaaggaagcagctgcttgtctagtttggtgtgtcaggacaggctgcctaggtgaaaaggatgtgggcactgtaggagagtgagcagaagcaggtgggtggatgcagacgcgagagctcagtgtaatgggaggacaggatgctgggaatgtggagtctcaagaaaggcaggactgatttagaggaatggatgacttaagccatggttaaaagtttatagattgaagaaggcaaatctgtttgatgtaaacctgatctttttactagcatcgaaaacactgaaatctgcttttacttatttattaatttttctgtaggataaattccagtttactaactgtattttcttctctaaagaaaagggttgttgttaccaacttgaatggtcacaccgcccgagtcaattgcatacagtggatttgtaaacaggatggctgtaagtaataaccagattttaaagttgatctcaattgttttctgatamaataaggttagccatttttttctcatcacttctcttaatttagcattaccttatatgatgttatgcaattggagaaacaagaaaaatggtattcccagtgaaatatctgaactgtatttttacttcgtagcagttgaagcttggattatacagcagtgcttaggatgagggtagtgcagccctagactttggcaggatc

SEQ ID NO: 94441 - DNA, 876 bp, Homo sapiens
aggaccttagtagttgtggccttgtgacattgtgccactgggtctgaaaaacccaccgtctcattggccattggcatgcaaagtgaactgtgcttgtacccattaatcacagattcttctattggagggcttttttttttttcttttggtcagagaaaccctcagattggtgcaagcatagtaggcctacttccacaaggaagcagctgcttgtctagtttggtgtgtcaggacaggctgcctaggtgaaaaggatgtgggcactgtaggagagtgagcagaagcaggtgggtggatgcagacgcgagagctcagtgtaatgggaggacaggatgctgggaatgtggagtctcaagaaaggcaggactgatttagaggaatggatgacttaagccatggttaaaagtttatagattgaagaaggcaaatctgtttgatgtaaacctgatctttttactagcatcgaaaacactgaaatctgcttttacttatttattaatttttctgtaggataaattccagtttactaactgtattttcttctctaaagaaaagggttgttgttaccaacttgaatggtcacaccgcccgagtcaattgcatacagtggatttgtaaacaggatggctgtaagtaataaccagattttaaagttgatctcaattgttttctgataaaataaggttagccatttttttctcatcacttctcttaatttagcattaccttatatgatgttatgcaattggagaaacaagaaaaatggtattcccagtgaaatatctgaactgtatttttacttcgtagcagttgaagcttggattakacagcagtgcttaggatgagggtagtgcagccctagactttggcaggatc

SEQ ID NO: 94442 - DNA, 876 bp, Homo sapiens
aggaccttagtagttgtggccttgtgacattgtgccactgggtctgaaaaacccaccgtctcattggccattggcatgcaaagtgaactgtgcttgtacccattaatcacagattcttctattggagggcttttttttttttcttttggtcagagaaaccctcagattggtgcaagcatagtaggcctacttccacaaggaagcagctgcttgtctagtttggtgtgtcaggacaggctgcctaggtgaaaaggatgtgggcactgtaggagagtgagcagaagcaggtgggtggatgcagacgcgagagctcagtgtaatgggaggacaggatgctgggaatgtggagtctcaagaaaggcaggactgatttagaggaatggatgacttaagccatggttaaaagtttatagattgaagaaggcaaatctgtttgatgtaaacctgatctttttactagcatcgaaaacactgaaatctgcttttacttatttattaatttttctgtaggataaattccagtttactaactgtattttcttctctaaagaaaagggttgttgttaccaacttgaatggtcacaccgcccgagtcaattgcatacagtggatttgtaaacaggatggctgtaagtaataaccagattttaaagttgatctcaattgttttctgataaaataaggttagccatttttttctcatcacttctcttaatttagcattaccttatatgatgttatgcaattggagaaacaagaaaaatggtattcccagtgaaatatctgaactgtatttttacttcgtagcagttgaagcttggattatacagcagtgcttaggatgagggtagtgcagcccwagactttggcaggatc

SEQ ID NO: 94443 - DNA, 1165 bp, Homo sapiens
aattctagaacaatattgaaacagcctcattttctgaggtattacctggagttatttgagaataaggaatgtggacaccaagggtgaggtgggaacaaaggcttaataagctaaagagaaaatctctccacagtggacagaaggcctgaaagagggttgccagctgtgaagctgagtctggggtttttatggaccggaaggggaggaatgggctgaccggtctgtaggctatcttggagaaggcaccacttagaaagaggtataatagtgtaaagaaccaactggaagtagaagtgaaggcttggcctgggaccaattgaaggtagaagtgaaggcttggctgggaccaatcaggggctgaagtgatgatttactctgttaatgaagacttagcccacagccaattatagaaaggtaggcatacgtaaaataggtgaaaagtaaaagaccaataggtgaaaagtaagagastaagacatgccaaggggaaagaaatgtgtccaaaaaggggtggaatttgttcatctgggttcatagagtaagtgtttccattcaaggatgcagggtctttcttatctgggacctgaagtttgattatcaagctgttcttggtttgaaggagttataccaaggacctgtcctaactacctgcctgacaggtttcttcctcctctgtcagtatgagttatattgagtagtgatataatgagagtactagagctagggtcttgctgaaaatgatgtataataacagtagtgtgaaaataagatcaagtagagacaatgatattttgttatccacagactaattcctatgccatatcaccagttatgattaaacaaaagctgatttttaaaagtgaattaaataaaatagaaacttatatctctgaaatatatatgtgtatatatataagtgtgtatatatatatatatatatatatatatatatatatatatatatatatatatacctactgtatatatgtgtgaaatagtagcatttcatggttgatatgaaagggactatgggagtgtcattaggtcctaaggtcctagctactgttctaccatcctcagctcactgtttgcgttgcaagtcaccacatcatacaacaggtctgctggccctctaactttatctatgtactctaggctcaatgca

SEQ ID NO: 94444 - DNA, 672 bp, Homo sapiens
aagttggaatcatatagcacttcacaataaagtgctttcacatgtacacatccataagttatttgactttttataactctatamgtattgttgggtacgttttatcatcagcttctcaaatagtcagtgcaatttaaaagttcttttcaagatcacatggctagttaagttctagaatcaagaacccattcaccttcttctataacctcttccagtgatatggtactacaatacatatcccttactgtattttctgatgtgattaagcatatattgctgtatactcatataagccactatcaaatgcttattaactgtgatatgctcacttatttatttgtatcattgctattaatgcttacaatgattctaaaaaagaaatagtctacattttttcatccttattattttacataagaggaaactgaagcagagaaggctaaactccaatactattctctgcaaaagacatctagatgtacagcataccagcccatttaaaaaatacattttatttgctattagtaataatgaaaaataaaactagtttaaaaaaagaaagtagaattagggagcaatgaaaaaatatccaattggttcatctccaggaggataaataatcattgtaatcaatttttcaagtgaattggtattatttttatataatggaaa

SEQ ID NO: 94445 - DNA, 783 bp, Homo sapiens
aaacctgttggagcactttcctgtttcttttctcattttatatcacattctgtgctatttttaaagaaactcaatgtgccaagtggaaaatgtttttacatgctatgaaagataaaaagtgctttttcccccaaggatgttttacacattaacctgttttcctttgctttctatttttcacatgccccttgctcatatgttttgactggttttgctccaatgaaggcaaagccacgcccatcaggaacttcaaagtcattgaaactcaccaaagaccaactcctatgatcagcccgtggacaataccrgttattttcaaaccagtccttagtcaccaggattcttgacaagctcctgcaaagcagacacaggtttgtcttggtggaagctgctgactgtcatcccctcagtttgaaactcgaggtcctgctttggtgtggaagcagagcttttcttggcaggtgaaagattgcttagcaaaggaaacggtgtcaaatggaatatgtcagaacctatctcagaacaaggtcaccctgaccctaaatgaattccacaaaaactcattggagacactgttttgcaaatctggacttcaaccaaaaagaaagaaaagtggaccacagtaaccaaagctttcctcatccttcaggttgaggtctggaaaacagaatcaaagcctcccttcaattcctcctcaccacctgccttacccagatgtacattttaaatttaatcataaatcacataaaacagagtaacacagatgaattcaaatgaggtgga

SEQ ID NO: 94446 - DNA, 783 bp, Homo sapiens
aaacctgttggagcactttcctgtttcttttctcattttatatcacattctgtgctatttttaaagaaactcaatgtgccaagtggaaaatgtttttacatgctatgaaagataaaaagtgctttttcccccaaggatgttttacacattaacctgttttcctttgctttctatttttcacatgccccttgctcatatgttttgactggttttgctccaatgaaggcaaagccacgcccatcaggaacttcaaagtcattgaaactcaccaaagaccaactcctatgatcagcccgtggacaataccggytattttcaaaccagtccttagtcaccaggattcttgacaagctcctgcaaagcagacacaggtttgtcttggtggaagctgctgactgtcatcccctcagtttgaaactcgaggtcctgctttggtgtggaagcagagcttttcttggcaggtgaaagattgcttagcaaaggaaacggtgtcaaatggaatatgtcagaacctatctcagaacaaggtcaccctgaccctaaatgaattccacaaaaactcattggagacactgttttgcaaatctggacttcaaccaaaaagaaagaaaagtggaccacagtaaccaaagctttcctcatccttcaggttgaggtctggaaaacagaatcaaagcctcccttcaattcctcctcaccacctgccttacccagatgtacattttaaatttaatcataaatcacataaaacagagtaacacagatgaattcaaatgaggtgga

SEQ ID NO: 94447 - DNA, 752 bp, Homo sapiens
gatctcggctcactgcaatctccccctcctgggttcaagccgttctcctgcctcagcctcttcagtagctggactacaggtgctcaccaccatgcctggctaatttttgtctttttgtgtttttgtagtagagacggggtttcaccatgttggccaggctggtctcaaacttctgacctcaagtgatccgcccgccttggcctcctgaagtgctgggattacaggtgtgagccatcatacctggccattgttgggcttataatgattggaaaagtgttaatagccataacttgcatataaaatgatattaattttatttttgttaatttgttaatttagactgctaatctagatcatttattttgaaaatamcttatgcttgcattatatctgataataacttaaatcaatttaaatatttctgtctaaacagtaatattaggatgaatataaagattataactgaaccatttttgtaaatatgcaatgaataaatttggtatggcacactgcactatagttatacttgaatgaaaatattaggccaaaaatttattctaatattcattgaagaaatagttatttagtcaggaaagctttgactagatttttatgacaatggaaagaatcatatgtcatcatgcctatggcatattttatgggcctcattcagaataataatatacatatggttttctttccaaagaaatttaaatatttcagcatcaaagtttaatcaaacatattataga

SEQ ID NO: 94448 - DNA, 747 bp, Homo sapiens
aagtctaaaaaaattagatttatggtaagattttgtaaagttattcatagccatttaatagtgtaagacatttttaagcatcttctaaaggatgacaaacattccaaaggatgaccatttagttctatttttgcatattttaaagaaatattagacacatctttacacttgatattgtattggaagggaattagatacaatgaaacatataacctaaaagaatctcattaatctaggaaaaaataatggaaaaaatctaggaaaaaataatctaggaaaaacaatggtatgtttaggaaaatagcctgttgcatggtatgttatatatcaagaaggtatgtttaggaaaatagcctgttgcatggcaagagagatgccaccttgaagtaaaactgccatgaggacaaatgtttggctctcatgtacaaagatgttctgcaataggccttgaaacaatgcctctaacatagataatttatcataaatgtggttgtgtaacctccccagtggtcatgagtcttggcaagaaagtctgaagacatggcgagctgcacctgttttaccctgaaagtttcctttataaaaaatatgttttggagtgtagatatgggaatccactctcttgtggccactcaagacattacttctstttttaagtcccctttaatttttttctttccctgaaaaactggattcatcagcctcttctgtggcctctcttgtccttcaggctttggggatgggttt

SEQ ID NO: 94449 - DNA, 611 bp, Homo sapiens
tggtgagctgttcctagaagatttgctgacacccagggcttatctgtgctttctttctctggccgtactgtatacgttgcctcaacaatgtccttcataagcatgctctgtgaagtctaatgagccatttcattayccacctatccaatgctgctaccagatatatgcacattgtacagcttcttcttaattctgttggtagtcacctgtgcaatcttgacaatatgctcatacctcagtttctcaaacaaacaatagccagtaaaattgctttattgaacttgccttacttaatatacctcccctttaccaaatattttatatatttttgttagtttcatgtttctcaatccattaattttagataatatctcattaccactatgtaggaaaagaaaatatattcttcaaccctctctcatctctttctaaatagtttcatcttccaacttccaggaactataatttgattttccaattctataacatgtttagaaactatacgtttctataagtttctgtcagtttcaaaacttgtgttaggttttcaaagtctacaacatatttagaaaatataagttttgatgagttgtgtgaggataattttttta

SEQ ID NO: 94450 - DNA, 847 bp, Homo sapiens
taaatattgaccttgcctccccactttgagtttctcttgtttaagccattcaatctacggtattttttatagcagccctagcaaattagcatatgcagttaaattatggataggtagttttggtccccccatattcaggctaaatgtggaggtgggcattttgattcaaaacatatattttctttttagtgtactcctgattttagttcacagtgtatgcatacctatgtattagtttaaatttttatgttggtaatatataaccataaatatatttttcaaatatttttatatatttgcttaatgtttagtttttttctgaccttatatttgattggcattttacggagtatcaaatctatgttctattttacttcctcttaaatattattcaattgttttctagcgctttgttattgaaaaaattgttactttaatacaaactatatataatatatacacatttttttctgtcttgcattctaaaaatctttaaagaatgattattaatacctaatgattattagttatctacataattatagacattgtttatcttcatgttagtcaactcaggctgctattttatttttttatatttatttatttatttattttaatttatttttctgagatggagtctcgctctgtcgcccaggctagagtgcagtggcctgatcttggctcactttaacctctgcctcacagattcaagcaattctctgcctcagcctcctgagtagctgggattacaagcacctgccagcacgcctagccaatttttrtatttttagtagagacagggtttcactatcttgggcaggctgatcttgaactcctgacctct

SEQ ID NO: 94451 - DNA, 1183 bp, Homo sapiens
cttttctccctgataccagcattctgggttagttttgcagctgccactccttttgagtctgtgtttttgcagcaagatgaagtggaatgcgccaagtacccagaatccagtgacccagaaggcaacgcggctcagcttgaccttaatctccccagggagactcggattcctttcctatcagcacagccactgccagggacacatcaccagcttctgaacagccactctttggagcaggcagccacaaccaatgggctgctcacaaccaaggccaaggccaaggctacccaagygccaaggggactatctaaaatagataagcaactcaaggaaacccctatggaggcacacgcaccagggacacaacggcactaccgctaaaagaactttctgaaacatcctgccttctcagaatacacagacttctgttacagtaatatcagtggccttgggaaaagtctggtttaaccaactaaggttcacagaaacctgcatgtttcagttctgaccctgtgtctcaagggagcctttttacaagagtaacatataaagccctttgtgactataagaacaagtgcttacattatttaattgagtggtatagagacagaagcttgatgactttctccagcaaccaacagtgaaatcaatgctcccaagtactcctccacttaaattagaagaaataaactatagtttcagtcaaggatagaaacagatgtttcaccatctggcaaaagtagggacaagggccccctcaacagttgccccaggagtaaaaagctcttagtaagcttctggagctgtggggctcaactggcactccatctcagggataaagagatggaggaggatttgaaccagtcatcagctagtaaaaggacagtgctagctaagattaacttgcccagaagctcaaagtttaagcaagagaggcagttgccactacattaatctccgggtgtgttctcttctcccctggcagactgtagaggtagaaaaacatcgactctgaagccagctgtgtgatcttggacaagttacttaacctctctgagccttggctttattgtctgtaaaataagataatgtctaccttctcctgagggtgtgagaattcaatcaatcaatgcaagtaacatgctgtggacatggctggcatgtgataaatgctgaataatgt

SEQ ID NO: 94452 - DNA, 1183 bp, Homo sapiens
cttttctccctgataccagcattctgggttagttttgcagctgccactccttttgagtctgtgtttttgcagcaagatgaagtggaatgcgccaagtacccagaatccagtgacccagaaggcaacgcggctcagcttgaccttaatctccccagggagactcggattcctttcctatcagcacagccactgccagggacacatcaccagcttctgaacagccactctttggagcaggcagccacaaccaatgggctgctcacaaccaaggccaaggccaaggctacccaagtgccaaggggactatctaaaatagataagcaactcaaggaaacccctatggaggcacacgcaccagggacacaacggcactaccgctaaaagaactttctgaaacatcctgccttctcagaatacacagacttctgttacagtaatatcagtggccttgggaaaagtctggtttaaccaactaaggttcacagaaacctgcatgtttcagttctgaccctgtgtctcaagggagcctttttacaagagtaacatataaagccctttgtgactataagaacaagtgcttacattatttaattgagtggtatagagacagaagcttgatgactttctccagcaaccaacagtgaaatcaatgctcccaagtactcctccacttaaattagaagaaataaactatagtttcagtcaaggatagaaacagatgtttcaccatctggcaaaagtagggacaagggccccctcaacagttgccccaggagtaaaaagctcttagtaagcttctggagctgtggggctcaactggcactccatctcagggataaagagatggaggaggatttgaaccagtcatcagctagtaaaaggacagtgctagctaagattaacttgcccagaagctcaaagtttaagcaagagaggcagttgccactacattaatctccgggtgtgttctsttctcccctggcagactgtagaggtagaaaaacatcgactctgaagccagctgtgtgatcttggacaagttacttaacctctctgagccttggctttattgtctgtaaaataagataatgtctaccttctcctgagggtgtgagaattcaatcaatcaatgcaagtaacatgctgtggacatggctggcatgtgataaatgctgaataatgt

SEQ ID NO: 94453 - DNA, 1013 bp, Homo sapiens
catattaattatgatggaaaacaagtaagaaggcatgctctacaaaaattaggtcacttgcccaggtgcggtggctcacacctgtaattccagcactttgggaggctgaggtgggcagatcatgaggtcaggagatcgagaccatcctggctaacacggtgaaaccccgtctctactaaaatacaaaaaattagctgggcatggtggcatgcacctgtagtcccagctacttgggaggctgaggcaggggaatcgcttgaacccgggaggcggaggttgcagtgagccgagatcatgccactgcacaccggcctggtgacagagcaagactccatctcaaaaaaaaaaaaaaaaaaattaggtcacttttgtcatcaagaatatgtttttcttatccacgtctatgtcaccttttgcagtagatactttcatgactgatttcaggctttttgttttattgagacagggtctcactctgtcacccaggctggagtgcagtggcatgatcacagatcattgcagccttgacctcttgggctcaagcgattcccctgcctcagcctcccaagtagctgggactacaggcacacatyaccacatccagctaatttttttttcttttttttctttttggtagagatggcatctcactttgttgcccaggctagttttgaattcctgggctcaagccatcctcccgccacagcctcccaaagttctgggattacaagtgtgagccactgtgcccagcttttgatttcagacattttaatgcagatcctctcctttacagcactattatttggttatctacttataattactgatttaacattgatctgttttcactagactgtaagctccatgaggacaagtcctgtgccagtatatctctagtgtcagcagacaatactcaaaatttgttgacagactatttaaagctgcccctatttttatcattaattgattgaatattaattaaatatattttattaatttaaaatgaattttaa

SEQ ID NO: 94454 - DNA, 3732 bp, Homo sapiens
ctttctaggcttactagtcaatggataagtgtgtatgtaatttacctggctattgcctagttccttccattaggtttataccatttttccctcccacaagcaatgtatgagagtgcctatttcctctcaggttaaccaagagagaatactttcaacattttggatttttgacaatgtgatgtcaatctccaaggttctggtcatcagaaccggctccatatttcatgtagggaaacaatttgttttttctaagtgctcacctcagaaagccccttggtaatgttactgttaccaactttgactccctttcatcaaaagagtgacttttctctaggaatgaatggaaataaaagccctgcctatgatttagatgacaaaaaaaatcatgtggtcacacaggagccattaggaaggcctcctattcattcaacaaagatttactgagtatctcccatgaacctactgtgtgctactaaagtgcttttggactaaggtatggggctgaagggtggtaaaggttcagaaaaagtgtctactatggcaagataaactattccataataggttccaaataaccccaggcaagtgtgatattcagttctcgactaaccagctgtgaatagcaacatgatgctatttgcccaactctggtattttctgctgccccatcaaaaaggaaaatgaagaaattttatatttaagaggtagatgaaagaaaaagagagaacaaaagccagataaataaacacgagacttttctttctactgggtagaaggctgattcaactctactgccattaacacccagcaacaacttgcacattgacacttatcagtaaatgtttgtgggatgtagggatcataattttaaaatatctgtgtactagaggagaaatatctaaaccttatttctctaagtcctcttacataaagaacgttgctgattttaaccttccagtttggaaatatttcttcccattcatcaaattctgaaaataataataactggcctttgatgagtggttcatttgtgccgggcacacttctaagccccttactttgttatctcattcagtgttctaaacaaccctgctttgcatgctttgatgcaattattaccccattttacagatggggcaagtgaggcacaaaaaggttaagtaacttatctgcaattcagttcttaagagttccaagagtcaagatgtagaattaacactcttgaattcacttgtaaactgagacctgcagaagaattcatttgggaacatagagttgctatacatagaatgaccttcctattcctaagtgaaactgtcaccaccaccacggccaagtccatcgtcctccccttgctgcatctgcaggcagttggcccacctcctggccattctcggtgggtctcattctgaggcagtatctctgccttgaggcttttgctccaaatgagttgatccttaatctgattatctatgcatgcagttggcctattcaccacttcccagaagcctaagcctggagtgtatagtccaaaattctttactatatattaatagaaagtaccttactcagccttgcagctgtttatatcactgtgcaatggtttccaggatccagctgtcatcagtcttccccatatgccatctaaagagagatgagttgcaaggttctattaccaggcctcccgtctagcaacttgatatcaattacagcatttagataatgctggtaaaattgatgaagaagcttgatgtgtcatctatggctgaactaccattctccaattttttaacagcttgctccgaaattgagatcatataagggccacatcctcttagccattccagaaaaatgttgagcttcttaatactattttattttcctcttttttctgtcaatgaatcaactatcaaactaaaatcaaggcagaaaatgtttagctgtatattcatactaacatcaagacagaaaacttgtagctgcacattcatttgctctggatctagaagaaaaataaacgaatccctgccttctctcaattaacactgctctagagaactatgctgctttttacagaataatctaaaacctcctgtgtatgctgttattgtctatgtaactgtaaacctgatatgatgcttatagtatctttggctgctaatttagtccataatcacaaatcacaattattcgtgatataaagacacaaaagatagagagatgatcaaaataaagggactgccttgaaaatatctcacccatataagagagacagcacaaaatcaaaatcaaaatgtgatcatataataattaaatgctattagaggataatgcacaaaattatgtcttaccattttctacatgaacatatggtgtttttatagtagaagaaaaaaatacatttttcttactttaaagctcttcaaagttaaacgtgtatctcttgcaccagcactaattggttgcaactccaggaacttggatctgtagtccatgagggtagagctcatttatccctggctacttctgaagtaggacagaaatgctacttccctttaaagtttgcagttacgagtccttgcatcttctccccctcaaagcaaagcaaaaacaaatgaacacaaaggaaaggaaggtttacattatggctactaaaagatatgtttctggtaagtcctctcatcacctaaccacacaaatgcatggaactttaaagatgctgtggtttcttcctagcctctacaggctctttttttttactgaaggctttatatgctgccatgtcccgggctaagaatttagagatgagaagtccacttagcattgagggataaacagttcaccggaagagacttctaccacagaactccaacagaaaatgcttcttttattgaagacacttgggcattcaaaaattcaagtccaacatgacaaatgtgggggtaacgaataaatccaagatggcgccatcaactgtaacataattggatatctcatcatctaatgcttgctccaggagtatgataactgcttcagacatatttcatttttcacgtattcttagcaaaaactaaaattcagcatatcccctgcaagaccgaagatatcatgatttttctcatctctcagaatactttggtacaaatgtttagaaaactgtgagctgtagagagtgatttcacaattggtatatggaaagtcctcagagaatgaagtattgtaatgtaacttaagtcacatgagactggatatacttctggagtccagcccattaaaatagaactacatgggatcctattcaacaagtttttccattaagatgaataagactaaaacgtccatcagcagcaatgtcctccaaatgtagctatgaaaaataattatccaaccctagtttcttggtctatttcaaaatctatctcagaacagacagtgcccctcttctataagatgagacactgcttgcttgtcacacattaaattttacttaatatataatttctcttcagatacaagatccaaacaagttttttccattctgaacaaaaatgtatgagaaaagactcctcttctctcccaatagctattctcagctctattttaatgcaaattagaattatactttcattattatgaattagaaatacataatcaaaagcgcrtttgaattttatttgatataagccgcctcataccacaaatgctaatggacccatgactatacaattccaa

SEQ ID NO: 94455 - DNA, 946 bp, Homo sapiens
tatccatattggcagtaattgggagatctgagtgtaggataatctgaagctgaaagaaaaaaaaagaagaaaagaaaaattgagcctagaattaaaggactttatgtagaaatgacagttcgagaaacagggacgggtaaaattccccaaggaaatgaataaaggtgaagaaacactagtctacattctcagtgagggaaccaaagaagagaatggacagaaaataggaggtaaaaccagtgcagtgtcactagccaaaggaaagaggtgataagatatcaccataggaacaagtcccagagaactgtaccgatgctggacttggcaatgaggggagtatgactggccattaagaaacccctttctaaaaatctctgtaccttccactcaatttygctgtgaacctaaaagcgctctaaaaaataagtctaacatttataaacttttaatatttttcttgtttgttaatttctttaaagaaaagaaaatctttttattaaaagggtgaaggtagaagccaaatagtaacagattgaagagtgaatgaaacaggattatcaagccagaggagggaagggaagaagtgaaggaaagcagaagagattggaaagcagtgtgaagaaggagggaatcagcaattttgggattagaggaacagcagcatgcttgaaataagggtgactgatccagaagggtcctagaggagagaagaacaggtggaaggtgggctttggaaagagtaaaaacactatccctacccaatcttattctcattctctccctgccaccccctttcccacccactcccatcttttcatcttgtcgaagagaaagatgaaaaggactagaaaaaaatgagtgaaaatcttttagttctgaaatcccgatcctccataattatactatactcatcgctttccctacacacacacccatgtatacacgt

SEQ ID NO: 94456 - DNA, 946 bp, Homo sapiens
tatccatattggcagtaattgggagatctgagtgtaggataatctgaagctgaaagaaaaaaaaagaagaaaagaaaaattgagcctagaattaaaggactttatgtagaaatgacagttcgagaaacagggacgggtaaaattccccaaggaaatgaataaaggtgaagaaacactagtctacattctcagtgagggaaccaaagaagagaatggacagaaaataggaggtaaaaccagtgcagtgtcactagccaaaggaaagaggtgataagatatcaccataggaacaagtcccagagaactgtaccgatgctggacttggcaatgaggggagtatgactggccattaagaaacccctttctaaaaatctctgtaccttccactcaatttcgctgtgaacctaaaagcgctctaaaaaataagtctaacatttataaacttttaatatttttcttgtttgttaatttctttaaagaaaagaaaatctttttattaaaagggtgaaggtagaagccaaatagtaacagattgaagagtgaatgaaacaggattatcaagccagaggagggaagggaagaagtgaaggaaagcagaagagattggaaagcagtgtgaagaaggagggaatcagcaattttgggattagaggaacrgcagcatgcttgaaataagggtgactgatccagaagggtcctagaggagagaagaacaggtggaaggtgggctttggaaagagtaaaaacactatccctacccaatcttattctcattctctccctgccaccccctttcccacccactcccatcttttcatcttgtcgaagagaaagatgaaaaggactagaaaaaaatgagtgaaaatcttttagttctgaaatcccgatcctccataattatactatactcatcgctttccctacacacacacccatgtatacacgt

SEQ ID NO: 94457 - DNA, 674 bp, Homo sapiens
ttcaagagtgagtggagtcaagaaaggtcagcaggttgctgccaacagatatgagcgaaaaaggaatgatttagtattagcagtggcagtgggacccactgaatagtagtatgcatgtgactttaacgtttataataacaagagtagaataaaaatagctaccattgaccaagcacctgccatgccccgctgtggcaagttttccccatctattaactcaggcacaataccatgtattcaatccttttaactccatctctcagatgagggcctcaagaagcaggaaggttaatagattgagcatggtcatttagttgcaaaaaaaagaagagctggaatttcaactaaggtctatctgactccaacttagccatccctgcctcctgtgcaaggctgctgtaatgggagctttggaatggcctctggatggagggttcaagctttgacttgtgtcctccttccaagctatttgccagtcaygctattgcataaggggaaaggaagggaaagtggggaggtgattcctactttattcctctcttgggagtggcttcgctctattcctagaaatggggcaaatggatcttttctatgggttgatgaatagcaaagagaagcccatagacgggcatcttgccacaccctccaccaccatatatctaccccagggcccc

SEQ ID NO: 94458 - DNA, 3483 bp, Homo sapiens
attggactcccaaagcgctgggaatacaggcatgagccaccatgcccagcctacctcatttgttgatagcactgattcctaacagggttattttcattcctggcttaaaaaaaataacttaccctatttgcacactggaatggaagtaatgcattcagtaatttcagaacctgagtgttggctgacatcaagcaactgagatacactgcagctgctgttggagaaggaggctggaggctgactcatgttatgttggctggcaggagtttgagaccagcctgggtggcatagcgatatccctgtcctgtctctagaaaactaaaaacattttaaaaaatactggctggattttctagcctgccagactaatcttcttgaaagatttagacataaataatttattttagcctttgtcattattactgttatgatagtaaaataatgaatcttttaagtattttttgaatgctcaaggtatatctctgaaagagtaccaaccaaatgctgatattagggattaaatccagttttgagagagacagcaattcattcaaacttgttgcatgcaggatcctatgtcaaagtgtatatgagagggcactccgctgggtggcggctgctgtggtttgaatcatatgccttagtattggtatttgacaataagagttgtcaacctgaatttctagttggatgtatagccaagaaaataagaagttctgagggagcggggaactttgaggggtggagtggtccctccatgtacccctatattacagattgcaggttcatactgaggattttaccttgagcttctgggctccacagaacacttgcgtgtttccataagggcctagaagaagtgtcttctattcccatggacacaatgccagaatgtgattccctggttttattttaagctctttcttccacccagaaacacaacccaccacccctgagaaaagatgggaaataagtggattaaaccaaacattcagaagctgctcaatacatttccttgtgcgctaaagaggaggtacagtgctggggtcaagaaagcagggaaggagtcagggcatgggcacccaaaccacttattggccatgtgttctgagacaggcttccttcctgggccctgtctaaaaacaatgggcataatgacaacacctaccttatatggttattgagaagaagaggagttaacgtatgtaaagggcatgaacaggtgttcggcttatatatggtaagtggtcagtaagtgtagtttttctctcaaagacagttctccaggcagagcaagtgaggaggccttttttccacccctcagccgttcagaactggaaagcagttgtatttgcccatgcatggagatacttcagctttcccagaactgagcccatttgctaacactaccttttccctaagcttccccttgagtacccctctctccatccagctgtgaagctctgaaatgaactagatccccaaatggctggtggaagctgttggaatagaggtgttagaggagaaggcagagaaatgtgacaggaatccagcaggatgtaggagtagcctgaatatgcaagggaaaaccttgaggtcttggccagtttactgtttctagggctaaatgtaccacatcaaagaagggaaagggaagttgttcacccaagatcttcagttttcttccccatggcctcattatagtgccttgtttctctcttgggacttctgttttctctgccttgtattgtcattgtgttcttaatgttaacattttttctacaattgcagtcttaatggagaatatgttaaagaacatgtagagatactaagatcagacaaatttctccaatttccttgtgcttaaaaaatgtgttaagtgtttactatctcttctttctattgccttcgaaagagaaagacacattkgttgggcaaggcattgatgtgcttccaggggtagtggggtgagaagtctagtggaaggaggtagttttggtgggtgaaggaggtagttttggtgggcaaaggaggtggagtgagagagaggaaaggtgaggtaagaaagagaacttgcaaaagttgaagcttttacaaagcagggaggagatgaacttgtatcagctgtggtgatgtggctttgggcgagatgcggaaagagacgagaaaagaacttcaaaggaaggtattgttatgcattgggtagtgcgggtctctcttcactttgtcctcccttttaaaatgaaaaggtcttcattaaagatgctcattgctcttcaagtctttggagttgggtttgtgttgttttggaaatctcgccatgctaagttgggtaagaagaactcactttattttggagaagttataggtcccactcaagaagcaaaacaaggaaagttgaagctaaaaggtgccccaaaatgtcaaggattgagtgtggccactttacccccaggtctcagcaggtctgaagaagccatagttctatccaacaaatattcactgatgcccttggaagagaggtaacagacaagtatattaaggcttagacaaggaaactggcaattctcacacaatgagcaccagactgtgggagcccaaaagagagacatcatttgcagacttgagaaggggcccaaactacgttctgaaaagtgaataagatgtaggaagataaagaaagaaatggatgggatgggtgaatgcactgagctggggagagggaagtttttctcaggccagctgcatcttctctactgggcctggggagaaaggtgtgctgtgggagagagactccctggaccaaggccaggcaaaaccatggactggacttgtcttgttctcatgatgtgaactagatgctgatgctgtagtgaaactcttccacaatgatgttcacagacaaatttccctggacatctgtgtcttcatggaggctaggctgatggtcctgaagaggaaactctgattccagcactggtggactgtaaggctgagtgaacagccctcattcagcttatgtgggactccaaacctccatgaggaacctaatttactgggagtagtgacgatacccatagagaaaggtggtgggagttactgattggatgacattagggacttgggcctcagaacagggggacatttttccatttgctctgggtctttttccaacttaaagtcagccagatatgccacctcttctatttggcccacacttaacgacttagttctgactgctgcctgcctgtccacacatcctatgcccaggttagacccacgcttcttaactatcctggagtctggactaccaaagagagaagtagcccatctacttcccctggtcttcccttcatcatctctgtctgccccccagcaaccccaggaaaattgggaatctgcttcctaggctgatctagcatcaaacagacataggaattttatgccccacccccaacccccgaattagcaaactaatttttt

SEQ ID NO: 94459 - DNA, 958 bp, Homo sapiens
catctttttagaaatggtctttgaaatgtgatttaatttccaaaattctttttctctcttctgacttcatatgaattgaacctgatagtttcgtatgaatgaatcgctgataggatgttttccttgagcctagtaataaatttgctcttattatgctgaaaatttgytattctactttaacaccctttaaaaagtttccatcttacagagaagttagtcaaatagttaaatggagtttcaacagttttaatacatgaattagtgaagcagatgaagcagagatgggagaagtaatttaaaatgggcttcataaatgtaccatagtttgagggtatttaaaaaatttgccttcggaaaacccatacaagatatttaaagaatttcctctgccagaaggtcatttagcaaacgtttatattaaattcaaaagtaatacttttatttttaaagttccttagccgttgccgtaaacttagctgtcgtagtaaatataaatagttcacatctttcggcatttctaaagagtgtgcccacttttactataaatattaaactctgctggatttaattgagttcaaggctgttcactggccaggtttaattaatgtaatgtgattggaaacgttcattttggggttttagtaagaaattgctcttagagcttggtttttatacttagccacaccttctaaagtgcggccacaagcattgtaggtgttcaacaaaagtttgggttttcaaggttgtaacctacgtttacttagtcataagtggtcatgtctctacacagtctgtaagtttcatgaaataatagtcttttaagaaactgtgcagggtaatttcctgttgtttgtgtcttatcaggcttggtatgtgttttaactcttgtgtaggaatattggggatggttttggtatttcaacagaactttagtaggaacaaaggttgtttctattct

SEQ ID NO: 94460 - DNA, 958 bp, Homo sapiens
catctttttagaaatggtctttgaaatgtgatttaatttccaaaattctttttctctcttctgacttcatatgaattgaacctgatagtttcgtatgaatgaatcgctgataggatgttttccttgagcctagtaataaatttgctcttattatgctgaaaatttgctattctactttaacaccctttaaaaagtttccatcttacagagaagttagtcaaatagttaaatggagtttcaacagttttaatacatgaattagtgaagcagatgaagcagagatgggagaagtaatttaaaatgggcttcataaatgtaccatagtttgagggtatttaaaaaatttgccttcggaaaacccatacaagatatttaaagaatttcctctgccagaaggtcatttagcaaacgtttatattaaattcaaaagtaatacttttatttttaaagttccttagccgttgccgtaaacttagctgtcgtagtaaatataaatagttcacatctttcggcatttctaaagagtgtgcccacttttactataaatattaaactctgctggatttaattgagttcaaggctgttcactggccaggtttaattaatgtaatgtgattggaaacgttcattttggggttttagtaagaaattgctcttagagcttggtttttatacttagccacaccttctaaagtgcggccacaagcattgtaggtgttcaacmaaagtttgggttttcaaggttgtaacctacgtttacttagtcataagtggtcatgtctctacacagtctgtaagtttcatgaaataatagtcttttaagaaactgtgcagggtaatttcctgttgtttgtgtcttatcaggcttggtatgtgttttaactcttgtgtaggaatattggggatggttttggtatttcaacagaactttagtaggaacaaaggttgtttctattct

SEQ ID NO: 94461 - DNA, 756 bp, Homo sapiens
agcacctgaccttcttgcactacatcagtctttctcctttgttctttcacctgagtaggaaaggtctgtctttggatgttctgctgtctctgtatatgtataaatatacacagaggatattatacagagacaaacgtagatattatataatagattatatattatacgttatatattatataatagattatatattatctatatttgtctctctatatcctctgtgtatatataggcatatatataagtatatacagaggatattatatgtattatatagttatatgtataactatatatgtatataaatatataaatttatatattacattaaatatattaatatatttatgtaaatatacttatatattaaatagatatatattaaatatatttatgtaaatataattatgtattatatgaatatattatatttatgtaaatgtatgtttatgtaaatatattaataattatatattaatattatgtatctatttgkgtttgtataatatcctccttgtcccttctccatcctagactataaggttagcagacatcacagtttaactgttacaggcagagtgaaactttcttccacagtgaaagagactacagaaatttagaaatcctgtttcttctgacaaagtctgtctctccatgctataaaacccaattttggatatcagaagcaaattattaactcttgttttttgttacagtaagacttctatctgccccacctgacagcctcccacc

SEQ ID NO: 94462 - DNA, 704 bp, Homo sapiens
cgagatcacaccactgcactccagcctgggcgacagagtgagactctgtcttaaaaaaataaaaaataaataaataaagaattaagataattaaaatttcactatcaaaaatttatttttttcatttaaaaaattcagattttccccaaagcaacaaattaacataggacatactgttctgtgtgttttacatttaatggttaaaatgaaattaaaaggtcatgtaattagttagaaaggatgttaaatgcacgtagcacggtgcggcacgcaagtgctggcttcgaagacaggcaacgtttctaatactagccctggtaattcttagctgtgacttttctcctatcatttactttctcctgtgatgaatattagctagaaataaaggtagactaattcattctttacactatcttaagaacagtaggagaaatttggaacaaactagttggacagtcaaaagcctaaggatctttgatatattaaagtttcaaaaatcctaattattttccttaaagtagaaaagaaagccaaagtttagtaaagtaatgaytgatttagttaaataattattagatttagtgataaatatactggtatacctgcatgtctacatctctattaaatctactctaaaacccatgtatgccttaccacatttattatagattgtggttaaataattcatactgagttgagaaaca

SEQ ID NO: 94463 - DNA, 666 bp, Homo sapiens
aatgtaaacagcataaagcttctcaaccatttttaatatcctacatattaacagttacctaaggaataataagtggcagaatgttgttcrtatttacattattttcatttaaaaattccaaatttaaatgtaaatactcattattggacaaatgaacaagtggaaagtttcagtaggatactgtcagtatgtattgaggctttttttttttacaagtattacttgttgaaattatttcttatatggtatttatgtaatgaagaagtaaaatatttttaattaaacactgtaggaaaagaaggatatattacttattatgagacacatcattatttttacacaaaatattttaaaaagataactgttgaagacaattgttaagattttactgatttcatgatctttctcatagttgtcttagcacagtacaatattcaacgtaatgcttgggcctcatttggtgatgtcactggcacaccaccgacaataggatggacagctttaataacagtctgagacacaacagaatttttctcacttcctcattcactcctgccaatatcatccttcctcctctctctagtactccgatgtcaacaaaagaacaaaatcgcttatgaatccctcttaaacaatgaaattagttcatatgaaaagagaatgtca

SEQ ID NO: 94464 - DNA, 666 bp, Homo sapiens
aatgtaaacagcataaagcttctcaaccatttttaatatcctacatattaacagttacctaaggaataataagtggcagaatgttgttcatatttacattattttcatttaaaaattccaaatttaaatgtaaatactcattattggacaaatgaacaagtggaaagtttcagtaggatactgtcagtatgtattgaggctttttttttttacaagtattacttgttgaaattatttcttatatggtatttatgtaatgaagaagtaaaatatttttaattaaacactgtaggaaaagaaggatatattacttattatgagacacatcattatttttacacaaaatattttaaaaagataactgttgaagacaattgttaagattttactgatttcatgatctttctcatagttgtcttagcacagtacaatattcaacgtaatgcttgggcctcatttggtgatgtcactggcacaccaccgacaataggatggacagctttartaacagtctgagacacaacagaatttttctcacttcctcattcactcctgccaatatcatccttcctcctctctctagtactccgatgtcaacaaaagaacaaaatcgcttatgaatccctcttaaacaatgaaattagttcatatgaaaagagaatgtca

SEQ ID NO: 94465 - DNA, 2357 bp, Homo sapiens
aaaaaaggctctttgaatatagttttaatttctctctacagttttttttgtttggtttgtgggctgttggaattgtaatttttaattgccttctaaaaaatggaaatttaacaatgtctgatctcagctgaacaaattagatgtttcagttgctcttgggtcaactggcttacagatttacatgtgcacacacacacaaatttcttatcacattttcgacttcttcacttgacctaactgattatgcgaaatacccaagattcatgctactgtaccacagatttgttttcacagcaataaatcttcagttctttgtttatgattccacttaacaaaaggcctgcagaagtgatttattatttgggtatttggagataatacatttgatggttttttggaaaacctttttcactccatactcagatatgcttcattgtcaaatgcatatttagattagattattgaattgtaatgtttatctgctgctttttttaaataaaatttgactgaaaatgtttaattggcattttttaatgacttagccaaagaagtgcagctattattccatattaataggcttgcatttcttttcctaaatcttatttaggctaaatcagttttatttttctctgattttttttaataccacagaatcacctgagtgtcaattgaaagttgtcaattaaaaggtaaccttttaatctcgtaggaggaatctcattaagacatttttcctgatatgtagagcagtctgttggcaaaaatgcatatattttctttcatatttgtaaaattatatttaatggaattcttttctttgattatcaaggactttcactgcaggcagtgctatttcttgtgcctaagaatgtttccaaaagtcgcatcgctaatgatatttgccaagttgagtgtacacaaagtttctcatatcctgttcaagttaatcaacrtcaagcacatggggatgctttagggtgagtctatagtacaaaatgcataaaccatgtccccaggaaatttgaaaggaagcaggtgctgaatggaatttttttccttttccatgagctgtgttaattctatctccagtaggcctaatgcttgaataagcaagatgtctaatcaataaattattttcatgctcagaatttcaggtttttgtactccagcatagcttggtcttatttcttactgtatgaaagcttaacagcaatgtgatttaaggttttgttttaaatgggagatgtaagtgatttaattcatgggtacttttagaacctgatagataatcccattgcctttatttttctaattaaagaattcctaaatactttgaaaatacaaaatattcctgaatagttgtgccttacattggttttatttgaagttagagtggatccctgtttatcataattacttgtaattaggcagatgcttatcactctattataactcaaattgggaagaaaagaatgaaaaagaaaacaatggctgggtactggctcatacctgtaattttagcattttgggaaggtgagacgataggaccacttgagggcaggagtttgaggttgcagtgagctatgatggtgccactgcactccagcctgggcaacagagaagaaaccatgtatcttaaaaaaaaagaaaaaatgaaggatgaaaaagtgggattattatttaaccagtgaagaattcataaatgtgacaattaaggataatttgaatctcacaaatctattcaccccaccccagtcaaggtctattttaatatatctatcttcattggcattcttgagaaatagtgctgccattgaacattgggaatattcatccattctgcagatggaggacatcgtgcaggccatgtcctcattgctcccattctacatttagctgagaaacagaggttcctctttgtaaggatttgatgctcttctcatcttccaagaagtataccaagagcaaatttaactctatagttacctgttcttcaaagaaaaaagaaacttagaaggtagtgtttctgaggtcataactgtgaggggttgtatacaaagaatgagtcactttttaagccatttggaaaattagatctgtttctaattagatgacattttctccattctctgatttcctgaagattgccaagcatttgcttgataatctaccaggactgataattttgcagaatatgaggcaaatatatgaaattcagttgtgtatctatatcctagcaacaaacacttgaaaatataacgttaaaatatgccatttgtaatagcatcaaataagtcaaacttctaagtaggaagaaagttaacaacaagacctctactctgaaaactacaaaacag

SEQ ID NO: 94466 - DNA, 864 bp, Homo sapiens
ccttatattttaaacttagaactatatcctatttgagtctaagacatgaggaagagaagatattcaaaagaaacagcctctttgggtgtgatggagaacactgggtagattatgcagtgggtaatgatatccgatgttacagtggaggacaggctctgagcgggactgcctgggtttaggtcccagctgtgccactttctgatgtgggaccttgggctaattattaacctatctgtgcctcagttaaccttctataaaatgggagtgataatagtaccaatttcattgttttgaggattaagtaggttaatactatgaagagctcagaagagtacctggtcaatcagcagggcccctgtggactgacacctgccatgtgccagctctgtgccctgtactttatgggggctgactcacaggagcctgttatgctcctctgaggctggcattttgattagcacctcccattttacaggtaaagaaactaaggcacagattgcctacctatatttcccaagatcacacagctaagaagcaacaaagccaggagttgaatctggtgagaatccctctcytaacaactgggctatgctgtctctcaaaagtactcctcttattagtgtagaggtacctgttgggggtagaattgtgtctctccaaaagatcttttgaagtcctacccccccaccccatggctgtgaatgtgaccttatttggtaatagggtctttgcaaaatataatcaaactaagatgagctcatactggattaaggtgggtgctaatacaataactggtgcccttaaaacaagggggagatttggacagacacacagagagaacaccatgtgacaccagagattcga

SEQ ID NO: 94467 - DNA, 722 bp, Homo sapiens
agtttcagctttctacatatgtctagccagttttcccagcaccatttattaaatagggaatcctttccccattgcttgtttttgtcaggtttgtcaagatcagrtagttgtagatatgtggctaaatgtcaaaatatcttataaataatttgctcaaaaaatgaccagtatttagtcaaaaattagcagaccatacatggaaacaaacattttgagtcagaactaacagaaatgtcaaacaaaaggaaacctaccagagcaaccagaaaaagactgcaataagagcatgcttacacatgtgcatgcttgaaaaaaataacctaatagaaactctagaattaataggtttaagaacccagtgtatagatttaatagcatattgcacacagtttaagataattactaaccagaacacatgctagaagactacttagggccgcaacacccactgactccctgagtcagctaggaggagaaaccaaggcacaggaagcccaacaggaagtaaactctgcagccttgttttcctgaggaagctgctgacaaagtggcccagccagcacagttattttaaggaggtgccgccacctctttggggcagcaaaaatatctcttctggagccttcgaaggctaaatggactatattgtccaggctggactcgaactcctgagctcaagcaagacttccacctcagcctccagagtagctcgtactacaggc

SEQ ID NO: 94468 - DNA, 1859 bp, Homo sapiens
tgttaatgtaaattagattaatgtaataacaatgcaaaaataaagaaatgcaaatacgtgaaagctactgtatttttttagctgtcattaagcacaaaacatatttttggatcaagttattcacctcctaagttataaagggagaattattctgkcaacgaaaaacccgttggcctttgctttactgagtgaaagctgacctttaagtgaattctatggtcatttaaatagagattgactccactatttctgaaaggatgatctaaattctgcatagtatttaaaattgaaatctttcttccatgtggcctctataaattgttcctatgcgtagctcttttcatgattggcaatttaaatatttttcaactcgcttgtttcctaagatatcttaaaatgattccatgccaagaaatcctgttcctaaagtctagaattcacatggattttggaatttagccacagattcatttgaagtacattagatacaaatagaattatctcttcaagatatgcacactattaataatgaagacaaggaatgatatctgttttggaagttaattatcctgctgatatgggtgctaatagccccatatcaaatataatttcagtgtattgatccattagggtccatagtgtgtgtgataacacaatgaaatttacagtgaaattaacagcaagaaatttatttcatgacaataaattttcagggaaaataaagaaagacatttgacataaatgaaatggagccaattatatattttgataaacatagtttattaataatgcacctttcaaactactgaggggaatacgaaatataagttgaacagtttttctaaaaacagttgatctgtagctagtaaaacaagatagaacaatatattaaacactcatatgtgttttttcagaataacattcaagaattaacaatatttttcacctatgtaactctaggcaacaggatatgaatatgagaaaatgatcctgaaaataattagacattcacatgaggaagagatgcatctgcagttacagtacactagctaggatagaattacaccagctatcaatcttcatgcttcagggcagaagctgctcaccagatgggtcaggaagatattcccccctatggtatagtattgtgaaattaagtgtattatgggaggtttatttctctcagtgaaacatctggcattggccaccagacgagatcgactctctgttccagaatgataactccaattttttctcacaaaacgattgtgtataccagttgaagtcatgtgatccttacttatatgtcatgaccaacccttcaattcttaaatacttttgcattttcattaaacttccaaaagaaaaaaatggaagattatttagaaataattttcaattattactggaatttcatttgtctttatgaaataaataattataataaaggtaatgaggaaaaatatccaccatacctatgtggccaggactagcagctgtccatcaatactgatctctctcttcagtgcagacatttgaataaagtacattttccagcctttcttgagctgggcatggttaagagcccaaatttttcttaaaggaatgtgagtgatgtaatgtgtgcactaaagagaaatatctgcctcttctgttcttcccccttcccaggcctttattgtctgaaaagaccatgcacagagcagccatggatactgcatagtaaatatgacaaagccattgtcaacttaggtcattggatggttttgttgctggggacctgcttatcttccctgaaacaatcatctgagagacaaatggtctatctttttggttcattgcctttgggttctctccat

SEQ ID NO: 94469 - DNA, 1859 bp, Homo sapiens
tgttaatgtaaattagattaatgtaataacaatgcaaaaataaagaaatgcaaatacgtgaaagctactgtatttttttagctgtcattaagcacaaaacatatttttggatcaagttattcacctcctaagttataaagggagaattattctggcaaygaaaaacccgttggcctttgctttactgagtgaaagctgacctttaagtgaattctatggtcatttaaatagagattgactccactatttctgaaaggatgatctaaattctgcatagtatttaaaattgaaatctttcttccatgtggcctctataaattgttcctatgcgtagctcttttcatgattggcaatttaaatatttttcaactcgcttgtttcctaagatatcttaaaatgattccatgccaagaaatcctgttcctaaagtctagaattcacatggattttggaatttagccacagattcatttgaagtacattagatacaaatagaattatctcttcaagatatgcacactattaataatgaagacaaggaatgatatctgttttggaagttaattatcctgctgatatgggtgctaatagccccatatcaaatataatttcagtgtattgatccattagggtccatagtgtgtgtgataacacaatgaaatttacagtgaaattaacagcaagaaatttatttcatgacaataaattttcagggaaaataaagaaagacatttgacataaatgaaatggagccaattatatattttgataaacatagtttattaataatgcacctttcaaactactgaggggaatacgaaatataagttgaacagtttttctaaaaacagttgatctgtagctagtaaaacaagatagaacaatatattaaacactcatatgtgttttttcagaataacattcaagaattaacaatatttttcacctatgtaactctaggcaacaggatatgaatatgagaaaatgatcctgaaaataattagacattcacatgaggaagagatgcatctgcagttacagtacactagctaggatagaattacaccagctatcaatcttcatgcttcagggcagaagctgctcaccagatgggtcaggaagatattcccccctatggtatagtattgtgaaattaagtgtattatgggaggtttatttctctcagtgaaacatctggcattggccaccagacgagatcgactctctgttccagaatgataactccaattttttctcacaaaacgattgtgtataccagttgaagtcatgtgatccttacttatatgtcatgaccaacccttcaattcttaaatacttttgcattttcattaaacttccaaaagaaaaaaatggaagattatttagaaataattttcaattattactggaatttcatttgtctttatgaaataaataattataataaaggtaatgaggaaaaatatccaccatacctatgtggccaggactagcagctgtccatcaatactgatctctctcttcagtgcagacatttgaataaagtacattttccagcctttcttgagctgggcatggttaagagcccaaatttttcttaaaggaatgtgagtgatgtaatgtgtgcactaaagagaaatatctgcctcttctgttcttcccccttcccaggcctttattgtctgaaaagaccatgcacagagcagccatggatactgcatagtaaatatgacaaagccattgtcaacttaggtcattggatggttttgttgctggggacctgcttatcttccctgaaacaatcatctgagagacaaatggtctatctttttggttcattgcctttgggttctctccat

SEQ ID NO: 94470 - DNA, 1859 bp, Homo sapiens
tgttaatgtaaattagattaatgtaataacaatgcaaaaataaagaaatgcaaatacgtgaaagctactgtatttttttagctgtcattaagcacaaaacatatttttggatcaagttattcacctcctaagttataaagggagaattattctggcaacgaaaaacccgttggcctttgctttactgagtgaaagctgacctttaagtgaattctatggtcatttaaatagagattgactccactatttctgaaaggatgatctaaattctgcatagtatttaaaattgaaatctttcttccatgtggcctctataaattgttcctatgcgtagctcttttcatgattggcaatttaaatatttttcaactcgcttgtttcctaagatatcttaaaatgattccatgccaagaaatcctgttcctaaagtctagaattcacatggattttggaatttagccacagattcatttgaagtacattagatacaaatagaattatctcttcaagatatgcacactattaataatgaagacaaggaatgatatctgttttggaagttaattatcctgctgatatgggtgctaatagccccatatcaaatataatttcagtgtattgatccattagggtccatagtgtgtgtgataacacaatgaaatttacagtgaaattaacagcaagaaatttatttcatgacaataaattttcagggaaaataaagaaagacatttgacataaatgaaatggagccaattatatattttgataaacatagtttattaataatgcacctttcaaactactgaggggaatacgaaatataagttgaacagtttttctaaaaacagttgatctgtagctagtaaaacaagatagaacaatatattaaacactcatatgtgttttttcagaataacattcaagaattaacaayatttttcacctatgtaactctaggcaacaggatatgaatatgagaaaatgatcctgaaaataattagacattcacatgaggaagagatgcatctgcagttacagtacactagctaggatagaattacaccagctatcaatcttcatgcttcagggcagaagctgctcaccagatgggtcaggaagatattcccccctatggtatagtattgtgaaattaagtgtattatgggaggtttatttctctcagtgaaacatctggcattggccaccagacgagatcgactctctgttccagaatgataactccaattttttctcacaaaacgattgtgtataccagttgaagtcatgtgatccttacttatatgtcatgaccaacccttcaattcttaaatacttttgcattttcattaaacttccaaaagaaaaaaatggaagattatttagaaataattttcaattattactggaatttcatttgtctttatgaaataaataattataataaaggtaatgaggaaaaatatccaccatacctatgtggccaggactagcagctgtccatcaatactgatctctctcttcagtgcagacatttgaataaagtacattttccagcctttcttgagctgggcatggttaagagcccaaatttttcttaaaggaatgtgagtgatgtaatgtgtgcactaaagagaaatatctgcctcttctgttcttcccccttcccaggcctttattgtctgaaaagaccatgcacagagcagccatggatactgcatagtaaatatgacaaagccattgtcaacttaggtcattggatggttttgttgctggggacctgcttatcttccctgaaacaatcatctgagagacaaatggtctatctttttggttcattgcctttgggttctctccat

SEQ ID NO: 94471 - DNA, 2425 bp, Homo sapiens
gcatcctggaaccacccctctgtcactaattttcgagctaatcttgggaaaactgtatttcttcactttgctgctttcacatctgctaatgggaataaaccttgtattgtggaagtatagggattggacttagggaatatgtatctcttagggcagactaggtacattgttctgtatgtgggatttgcattcttattttatgttattaccttgatctttattattattgctactattggtatttctcacaaagcctcatttattttcttgttttctctacccacatcttgatacccatagcgtttccatgatatatctagactggccaatttgttttagagttgtgtcatcttgattcataaagttgttagtgaaccattctctaacattactcagaggccacaaatgaggctgaggaataatcatgctaagatggtgctttatccattcagttgtaatagaatagtggaaacattgactacagcacgttttattgctgaatgcaattttcagctattttgcaacacttttataacatatgtaaaatgaggttgtatatggaaaagttgaatatcttatgtactcactgtgtagattgttatgaataaatctctaagctataacaaataaatacaaaataaagtcaaggactttattctaaaaatgcttcatcttaaaactgacaataaaaaacgaaaaggaaatttcttggcaataattcttggcaataaacaaatgaaaaggaaaattgaaaaggaaaagaaaaataccattcaatattgatttatttcctttttccaaattgtgtacttcaatatctctgcacctatcttctcacatttgtaaggaagaggagtcctgcttcacagacaaagagagaaaaacaaaaacaaaaccactcaatacatccagacacatcactaaatgttttaatttaatttaatgttgaaatgtttgtgatagtatcattttcagttggcatttccacatttgttactaacatacatgaaggttaggagtctttcatatgtaaaactatttttaaagcaactttttttttttcagaaagtctgtgagaatcagacttattgcactggatttttaggcagtgactctctttaaaaactgctacattatactatatttcacctgaatagaacacttgtataatgtacttatttaaatgcatcaaagatacaagcatttttctcaatctaaagaaaatcagactaggcacaaattctgcaagaaatctaaaggtagaaaatggctcatctgttctgaaacactaacactcactctttccctctttagacactccaactaagggctaattcccactcattctctgtaagtgattatagatactgaatggccacaattatgttgctgcatatgaatgtagtgtttgatgaatgtaactacaacaatcacaaagcaatagaactaagaagaaaaatgcaataaactatcattttttaaattgccacactgaagcaaaattatacatgctaagaaagacaaacactcagcagataagatctatttgatacaaaattttattatacatgacaataacttggtattttactttctattatacaaattaatgatcgtgcttagttcttgtactgtgtgtgagagagcaatcctctctaacatgtgcaaagatatgtgcaattaataaaaatactataaaggaggtatgctagataataaaaattcagaccttccttagaatctgaatttaagtcttccaatttgttttcaaacatgaacttgggaaacacttttagcttattgttatactcgtcaattaggtcagtggcctcttacaaaggatgcacttttgccccacccagtggccgcctcacaaatagccaccgttcccctgagtaaggtaattcctttcccaggtgggttttggtactagaaacacaagggaatacgttgtccctgyggctcaatgtgtacatgaagctatcatttcatcagcgctgctgccatctgtactgagctgtggagcaaactcacaagaatgccagccacttcgggacttctaccaaatgcttcattatgcaagatctacaaagtcaactatgctttcatccaaaacaccaaaagaaagagcaaacgcacatctatggtaatgagattgagttggtgagaggaagagaaaggaggcaaagtaatttcatgacagagagtacaggtccaggaggtttcactctatgctaattatataaatttgagcaactcatttgtattgtacttgcttatacgttactgtaaaaggaggagagtaaaatttaagtaaaatcaagcaactggaaaaaggtaaagtctctacaaaaattgcaagaaaatatttaatatttttattctacaggtcatataatatttttctgtttgtgtctcatgcata

SEQ ID NO: 94472 - DNA, 2425 bp, Homo sapiens
gcatcctggaaccacccctctgtcactaattttcgagctaatcttgggaaaactgtatttcttcactttgctgctttcacatctgctaatgggaataaaccttgtattgtggaagtatagggattggacttagggaatatgtatctcttagggcagactaggtacattgttctgtatgtgggatttgcattcttattttatgttattaccttgatctttattattattgctactattggtatttctcacaaagcctcatttattttcttgttttctctacccacatcttgatacccatagcgtttccatgatatatctagactggccaatttgttttagagttgtgtcatcttgattcataaagttgttagtgaaccattctctaacattactcagaggccacaaatgaggctgaggaataatcatgctaagatggtgctttatccattcagttgtaatagaatagtggaaacattgactacagcacgttttattgctgaatgcaattttcagctattttgcaacacttttataacatatgtaaaatgaggttgtatatggaaaagttgaatatcttatgtactcactgtgtagattgttatgaataaatctctaagctataacaaataaatacaaaataaagtcaaggactttattctaaaaatgcttcatcttaaaactgacaataaaaaacgaaaaggaaatttcttggcaataattcttggcaataaacaaatgaaaaggaaaattgaaaaggaaaagaaaaataccattcaatattgatttatttcctttttccaaattgtgtacttcaatatctctgcacctatcttctcacatttgtaaggaagaggagtcctgcttcacagacaaagagagaaaaacaaaaacaaaaccactcaatacatccagacacatcactaaatgttttaatttaatttaatgttgaaatgtttgtgatagtatcattttcagttggcatttccacatttgttactaacatacatgaaggttaggagtctttcatatgtaaaactatttttaaagcaactttttttttttcagaaagtctgtgagaatcagacttattgcactggatttttaggcagtgactctctttaaaaactgctacattatactatatttcacctgaatagaacacttgtataatgtacttatttaaatgcatcaaagatacaagcatttttctcaatctaaagaaaatcagactaggcacaaattctgcaagaaatctaaaggtagaaaatggctcatctgttctgaaacactaacactcactctttccctctttagacactccaactaagggctaattcccactcattctctgtaagtgattatagatactgaatggccacaattatgttgctgcatatgaatgtagtgtttgatgaatgtaactacaacaatcacaaagcaatagaactaagaagaaaaatgcaataaactatcattttttaaattgccacactgaagcaaaattatacatgctaagaaagacaaacactcagcagataagatctatttgatacaaaattttattatacatgacaataacttggtattttactttctattatacaaattaatgatcgtgcttagttcttgtactgtgtgtgagagagcaatcctctctaacatgtgcaaagatatgtgcaattaataaaaatactataaaggaggtatgctagataataaaaattcagaccttccttagaatctgaatttaagtcttccaatttgttttcaaacatgaacttgggaaacacttttagcttattgttatactcgtcaattaggtcagtggcctcttacaaaggatgcacttttgccccacccagtggccgcctcacaaatagccaccgttcccctgagtaaggtaattcctttcccaggtgggttttggtactagaaacacaagggaatacgttgtccctgcggctcaatgtgtacatgaagctatcatttcatcagcgctgctgccatctgtactgagctgtggagcaaactcacaagaatgccagccacttcgggacttctaccaaatgcttcattatgcaagatctacaaagtcaactatgctttcatccaaaacaccaaaagaaagagcaaacgcacatctatggtaatgagattgagttggtgagaggaagagaaaggaggcaaagtaatttcatgacagagagtacagrtccaggaggtttcactctatgctaattatataaatttgagcaactcatttgtattgtacttgcttatacgttactgtaaaaggaggagagtaaaatttaagtaaaatcaagcaactggaaaaaggtaaagtctctacaaaaattgcaagaaaatatttaatatttttattctacaggtcatataatatttttctgtttgtgtctcatgcata

SEQ ID NO: 94473 - DNA, 939 bp, Homo sapiens
cattctttccttctcagtgtggcacagggaccttcctggaatgagggtcttatgttcatctgcaatcaaataaggtagatcagagagtttatttatagccagtttttactcaaaatatttttaggttctgtggctgtttttcaggaaaaggagttctggtttctatgacccaccttggggaagagggattccagtttctatagccagcttcagcggagaatgggactgagaaacaggagracaggagaaggtcagagaaaaacttttgcttctccggctgctgctgaggcctttaatttggggtactgttttctgaaccccaacggtttatatgcaatgacccaaatggatgatattaagtatggtgttcccgatacctagaatatgtaggtcaggaacaaaagagtgacagcatatctgggtcctatcactacccatctgggaactcaattatgaacttttgtttctcagtccacaatcttaaaccgtaccagttaaaggttctggtttacaggtcgagaaagcgtctattagattaggttaactgaaagctatgagtgacatctgatcattttagtattctcttgctggtgtactgggggccaacggaaggagtaacaaatctggcagggataatcgactttgactaccacaagtgcctagggttgctgccacacaggagcagagcagtatgcctggaatcaaatgaattcacttggatatatctttgtgtttttgtgctcagtgatagccattaatagttcattgcagcaaccacaacccaacacagacaagacaactaaggactccaaactcttgaagtaatagtaatagttaatagtaaaatgttaatatagtcaccttttgacctatgggtaagaagcagacagatctaacctcttttctaaagtgcaaatattttttaaagaaaaaagatgt

SEQ ID NO: 94474 - DNA, 1907 bp, Homo sapiens
tacataggaggatatatatgtttctaattttaacatggaattctatccatcttcatattgtggctattatgtgaatgaaaaaaatcatttgaaatgacccagaattccaacaagccacctaacaatcttaaaaaatagtcatttactggggatctaaaaataattttaaatatttcaaatttgattgtaataaagaaatttcactgggatccttatttaaattattctaaaggactgaaattaatttctctatttgtagaactagcaacagaactaggataaaaacttagtcctttaatacaccaaccactggatttttgtttgtttgttttgcccacaatgtctgagtcattgataattgttttatttctggttgtaatgaacatatattgacctttgaagctggcctgttcttatctgtaaggtagatttgattactattcaaaaatactcattgatattcctccatttccacggacagagttgttttcctcattcctcaattctaggatttgacaatgagatattagcagagatgayagaaacaaaaatttgaaaacaacttatatgtttgagctccaggtaaatacactttgattgttatatgacactgagattttgtgattgttagttacatacttactgtattcataattaactaatatacggatctatttcagtgatattaaatgtcactagaaagatcttagaaacatattcacagagctagaaaatgcatgcagaatcaatattgaatgtcatttacatatttataagaaaaatgattcttcctggtaacaatactatgataattcaaagtagtgttaggctgtaaatatattagtttaattcaatcaaatggagaagcagcctattaaaaagttatataattatatttacataaatcaagccacaaaattgaaagaggatataaaagaattagttagagcttagcttaacctcaaaagacataggttgcaaaaaaatggtgcaaagcaccacttataggactctgatccggaatcccttattaacatagcaaatatattaaacaaaattaacaaacaaagagactcaacttgaaagtttaggtcttctgaacactgaatatgaatgtttataatccagattaaccacagcggtcacaatttcagatagaaaagtaaacctagccagctgaggacacccaagttgcttataatgatataatttttgttttactacttgcgtttgagatgatgagaggaaaataattaaatagagaaataataaatcagtaagtattagtattttgtgttagatttagaaagtatatgtacaaatcatcatatggtgaaatatattgcatatctaacatttgagtgcattttaagttttgggtgataaaatagaatatttaaaagatattgagtattgacttagacctgtgaatttacattgaaaattataataaaattgtactaagtttgtaacttcattggaatgtttaagataagaatcaccatatttataattttaattttttagattttcttgtgtaggatgtgggaatgtcttgtcagtaactgaaaaactgaaaaagcaaatggcatatgttaaattaataaaatatttttataaaagattttaattaactgcatttgtgtaatgaagcatatatttatgttcctccttaaaattaattttgagaattattttatttataatagaatggaaacatacttgaaaaatacctagagttaaaatcatacatgttgagaaatcaaatgtctgcttttgatattatactttaatgaatcaaatgataagttagaaactcaaaataaattcaaattcaaaaattttcaaagaaagtaatagttacctccttaaatatacatcataaagaaaatatctgatatgtattt

SEQ ID NO: 94475 - DNA, 1876 bp, Homo sapiens
ctaaaattcttgtctgttataacccattataagaaatgattaaacaaagaatatataaataattaaactcattctaagtagtattgtttgtttagtttttaaacatttttaaaaatttcaccttattttataaaaataatttaaacatatgtatataacacatttattcaaaaaaacataagaacatcagaaatgtatgttaggaatgaaaagacatatttttaaaaaatttccatataaataattcaaacaatgtttcatctttatatttataaattttcaatgtctacaaaattttacattcactgccttcattattcaactttgtggttcatttaactgaaatatgcactcaaaagacaaatttttcacaattttgaggtttctcctgttctgaaaccctatcagcattttatctaccaaaagcatcatatatgtattaatacatatttctgaatggtcatcagatccaccttacactgtataatgtcatacttttattttttctctcacttactttgctaccaaaagtcatatttgaatataaaacattaaaccttttcagatacacatattgctttttaaaccaactcaaaaacttgactttttcagtatatttgctacataaatgttactcaaataaaggtttatgaaactaagaggaagattaacaagtctgtgctgcacactagtggcaagaggtagtaaatgcattcttttttttacttaaattttacactaattgcatcttaaatattagctttttcagtcaaaattcgaacccattatattatagagcacataaacacacattctaaacataatgtgtttttgtgtcatgaactatttttccactatacatcaatgtattgtgaacgccatacccagagaggttcctgtgcatagaaatactatggatccgtatatccatgtatatgtttgtgcacagacgtatacatgtgcataccttatacttatattgcacacacacccactaaatgttaactcatgtaaaaatagtcattattttgcccattatttttcttttctttactcattattctttcccacacacttatgtaataccatgctttaatacacataacatgtaaaatattactcaaataataaatggtaataaatcatcgaaatgggaaacgttcatgatggcattttattgatgaaaatgcaaaagaaaagtaccctggcaagtggctgatcccaaataactacaatgtcgatatgaaaagaacctcaatatgcctgagataaattgatattatcaggctgcttcatgaaagaataagataaagtcatttatgatagatggtgtgctatcagaggatatctttaaccrtcccctctaatgtgcctagaatgggtattaattgtgtcatgtagctcatcattaaccatttaactatcaatatggatatcaaaacatcatttttatatcttaaatatatagaataagatttttgaaaataaataatgaccaatataaaactgacacaaatgtgtaaataaaaacaagatgtcatagagtctgaatttgaccaagcccactattgacaagtgatttcaagtattactcttatagaggaaattccaatttttaacctcccttcctcttatctgttgtgcctttctgcccacatgcttacatatccaaagaaagaaaaagctaggcttcatttcttcctttacatcatattcccccatacctctttcacattttttggctttgattctttcagttcttcatacttccacttccacagagacaaagccgactccagtctctctatttctttttccaaagctgtgcgcattctaaataatttaagaattaaaagaaaaaaagtcggcttcaatt

SEQ ID NO: 94476 - DNA, 1876 bp, Homo sapiens
ctaaaattcttgtctgttataacccattataagaaatgattaaacaaagaatatataaataattaaactcattctaagtagtattgtttgtttagtttttaaacatttttaaaaatttcaccttattttataaaaataatttaaacatatgtatataacacatttattcaaaaaaacataagaacatcagaaatgtatgttaggaatgaaaagacatatttttaaaaaatttccatataaataattcaaacaatgtttcatctttatatttataaattttcaatgtctacaaaattttacattcactgccttcattattcaactttgtggttcatttaactgaaatatgcactcaaaagacaaatttttcacaattttgaggtttctcctgttctgaaaccctatcagcattttatctaccaaaagcatcatatatgtattaatacatatttctgaatggtcatcagatccaccttacactgtataatgtcatacttttattttttctctcacttactttgctaccaaaagtcatatttgaatataaaacattaaaccttttcagatacacatattgctttttaaaccaactcaaaaacttgactttttcagtatatttgctacataaatgttactcaaataaaggtttatgaaactaagaggaagattaacaagtctgtgctgcacactagtggcaagaggtagtaaatgcattcttttttttacttaaattttacactaattgcatcttaaatattagctttttcagtcaaaattcgaacccattatattatagagcacataaacacacattctaaacataatgtgtttttgtgtcatgaactatttttccactatacatcaatgtattgtgaacgccatacccagagaggttcctgtgcatagaaatactatggatccgtatatccatgtatatgtttgtgcacagacgtatacatgtgcataccttatacttatattgcacacacacccactaaatgttaactcatgtaaaaatagtcattattttgcccattatttttcttttctttactcattattctttcccacacacttatgtaataccatgctttaatacacataacatgtaaaatattactcaaataataaatggtaataaatcatcgaaatgggaaacgttcatgatggcattttattgatgaaaatgcaaaagaaaagtaccctggcaagtggctgatcccaaataactacaatgtcgatatgaaaagaacctcaatatgcctgagataaattgatattatcaggctgcttcatgaaagaataagataaagtcatttatgatagatggtgtgctatcagaggatatctttaaccatcccctctaatgtgcctagaatgggtattaattgtgtcatgtagctcatcattaaccatttaactatcaatatggatatcaaaacatcatttttatatcttaaatatatagaataagatttttgaaaataaataatgaccaatataaaactgacacaaatgtgtaaataaaaacaagatgtcatagagtctgaatttgaccaagcccactattgacaagtgatttcaagtattactcttatagaggaaattccaatttttaacctcccttcctcttatctgttgtgcctttctgcccacatgcttacatatccaaagaaagaaaaagctaggcttcatttcttcctttacatcatattcccccrtacctctttcacattttttggctttgattctttcagttcttcatacttccacttccacagagacaaagccgactccagtctctctatttctttttccaaagctgtgcgcattctaaataatttaagaattaaaagaaaaaaagtcggcttcaatt

SEQ ID NO: 94477 - DNA, 633 bp, Homo sapiens
acttctgaagggaaacacgaatattcaccattagcaaatactcaccttcattaggttgatgtaagtaggtatatacacacgtgtgtatatgcatatatgcatatgtttatatacatgtatgtgtatatgtatatgtatgtgtgtatatgtacgcacgtgtgtacagatggcccccaacttacaatgggtcgacttacagttttgtttttgagacagggtcttgccctgtcacccaagctggagtgcagagtggcacaatcagggttcactgcagtcacgacctccctgttcaatctattgtcccactttagcctccatgcagctggggctacaggtgtgagccgccacacccagctaatttctgtatttttttgtagagacagggtcttgctatattgcccaggctggtctcgaactccygggctcaagtgatcctcctttcttggccaaagttctgggattacaggcatcagccatggtgcctggccttaacttacaatttttctcctttaccatggtgtgaaagtgatacatattcagtagaagcaataccttgacttttggattttggtcttttcccaggctcctctctgcagcagaaagctgaagtccccagtcagccacgtgccacca

SEQ ID NO: 94478 - DNA, 598 bp, Homo sapiens
ctaaaaataacaaagtatgaatgcttcacaccaaaacctatgggatacaggtaaaaaaagaatcctctgaaaaattattggaaaaagtttggaaatttggtcagagtgaaatgatatgctatctgggatttgcttctaaataactctaggaggaggaagagggagaaggaggagragggggaggggagaaagaggaggatgaggaggggtggagaaggaggaggggggaggggagaaagtaggatggggaggggcggagaaggaggggaggaaatggaggaagagggaaggggtacaggaggaggaggaggaaaggttttattcactcattcactctgcctttgtatacacttgagttccataacaaaagaagagaagataaatttacaaagtaggataatatttttgaaatattaagctgaagtatttttaaaattccttgtcattcccagcaggtgcccctcaactctctctccatcaagtttataccctgaagcaaaaaatgtgtgttgaagagcactttgccaaagatctgaaacatggtttggtctagaggaaggggaatagaatgagaagagcagaagtagctcctggggtg

SEQ ID NO: 94479 - DNA, 684 bp, Homo sapiens
tcaaaatatgtgaggttaaaattatttttaaaactagactgtgagagacaaattcaaaatacttggaggtttcaagatatttctgtgtacaatacatgtattcagtattcaggttacaaaaattatgtttcttatgtaagtcttacatcatcactatataatatgtaatatattcagcaaacaattcctgtatgctgaattatataattctcctatgctgagtaccaaaaacattattgagaggaattaaggaagatctagtaaacatagaaatgtgcctgtttcatgatgtgaaagatttaatataatattaattttccatttgtctgtaaatttagtgcaaccataataaatattccagcaaatatttttacagaaattgataagtgaatttaaaaattcacttatgagaaycaaaggaccaaaaaagccaaaataacttggtgagagttttacattggctgtcttaacctagctgaattcaaaattaactttaaacctgaagaaatgcagactatttgaaattggtataaggataaacttacaaacaaaatacaagaatggagattccaaagtagctccacacatatctgttcagtggattttcaacaaagggaccaaagcgaattcaatgggaaatcagttgttttctcaagacatgtcttggaaaagttggatgttcat

SEQ ID NO: 94480 - DNA, 1012 bp, Homo sapiens
atgttgattgttaggaattatcttttattttctttatcagataaagcctttaatgcttaagttcagtaacattttaactactttgtactggatccctggtgagtctaaaagcagaawtttttacacacaatcattataaaacaaacattacattcaataagacagcatattttagatggctcccacatcataacgaatgaacaataagtaagatctacactaattatagacaaggacacataatcttatgaattctgaactccctgacactgaggtaaacctattaactaccacttggattctgctgatgtgttcatttttctaaagcctatagagagttctgaagtaacattctgcatattaattcagtaatttgctatgtagatgccttcaatatctattcatccacaattgacaacaccagtaacaaacttattgaaattatttacaataatatgactaaggagtgtttctgggtatcttccattttaaatcaagaaatttcctttaacacaacaattatttaggttggaattcagatactgacaaacaatcccattggctatcatgacaataagtgccttttttaatgcaatcagagtagtggttagtctgctggaacaatccaataagcacagtttatctactcagaacactgataaatatgctcatgttgtcattttacaaaactacaacatttcagtccagttggctcatttaagtctaaaagaagtcatgtattaactcgattcaagaggcttggtcatcacactgagacatgagaagtagcttacttatgtcatagaaaatggttctgatattgcaggcacctgggttggctaaaacagaactattttatatgaagtatagaattattctacagtttccactgttataatccagcaaatatcctttaggtactctgcctgaggaaatatgttattgaataccttcaaagaagctgtgatacttgaagttcatttaaggccaagtgaaaggaaaatgagacagg

SEQ ID NO: 94481 - DNA, 1012 bp, Homo sapiens
atgttgattgttaggaattatcttttattttctttatcagataaagcctttaatgcttaagttcagtaacattttaactactttgtactggatccctggtgagtctaaaagcagaaatttttacacacaatcattataaaacaaacattacattcaataagacagcatattttagatggctcccacatcataacgaatgaacaataagtaagatctacactaattatagacaaggacacataatcttatgaattctgaactccctgacactgaggtaaacctattaactaccacttggattctgctgatgtgttcatttttctaaagcctatagagagttckgaagtaacattctgcatattaattcagtaatttgctatgtagatgccttcaatatctattcatccacaattgacaacaccagtaacaaacttattgaaattatttacaataatatgactaaggagtgtttctgggtatcttccattttaaatcaagaaatttcctttaacacaacaattatttaggttggaattcagatactgacaaacaatcccattggctatcatgacaataagtgccttttttaatgcaatcagagtagtggttagtctgctggaacaatccaataagcacagtttatctactcagaacactgataaatatgctcatgttgtcattttacaaaactacaacatttcagtccagttggctcatttaagtctaaaagaagtcatgtattaactcgattcaagaggcttggtcatcacactgagacatgagaagtagcttacttatgtcatagaaaatggttctgatattgcaggcacctgggttggctaaaacagaactattttatatgaagtatagaattattctacagtttccactgttataatccagcaaatatcctttaggtactctgcctgaggaaatatgttattgaataccttcaaagaagctgtgatacttgaagttcatttaaggccaagtgaaaggaaaatgagacagg

SEQ ID NO: 94482 - DNA, 1745 bp, Homo sapiens
ctgttgcaaaagagtgaatttgatacaaaacatgagctacagtgatgcaaatatactcctgggcaagactgatgatgtgaaaaaataataatgtagattgtgttttagctgagccagagaaaattctatattcactagaaaaatgcaaaggatatgaaaaaagaatttagaattgaccagtttagcaaaactaatttgacccagttgtatccaaagttagtataaacaatatgaatagagtgagaataaataaaatagtcttatgtgattgtgagagtatgaagttgtgttacatatgaacacaactctggaatgtgtcttgagattttataaataataaacaacgagaggtactcattttaaatgatgcctacatctttttatttaattaaatacctatcatgctcataccttttaaaagtctattacattttgaatacaaatcaactgtctttttcactgacatataagtgatatgaaactattaaaatacactttaaaatctgaagcaatttatatggtaatttatgatttcctaatatcccaaagaaaataattgtatgagttctatcacaagttagcaatctctactttacagctaatttaggaagtgtctcaatagtgcattcagtctctgtggaaattggttaaatgagagatacggcagagtttcaggaacactataaagataatttgtcactcatataagaatcgacaatgtgcccttgccaaaaaccctgataggtttaaagtttgacttaactttcatttgccaggtttttttktgtgtgtgttccatccttaagtgctttgtctttgtgatttagtttcccctaactttctgtcttttttcttttattcttctacttgtcgatcttaatcttacttttttaccttgctttgtctcatctaatatttctcatcttttctccattcattttggaattggtgcaatgttatccatatgtaaatgctaaaatataaaacaaaatcaagaagccttatgcctctgattaacatgcataagcacacatacaatattaaaacaagaacgataaaaacaacaaaaacctatcagaaagataaatattgttcttagagggcaacatccttttcaatccactacacttacccaaaacgagattatatgatgacaatgaaaagatgactgttaataaagagaggaaaagagagaaatggaacatctggcagatggtgttttacagttttcttcattgaaaatgactgtgcattatccaccacattcttaatcaacagtaacccctttccccatggcataacaagtacttcaaaagttgataactgtggagaaaagataaaagaaaataatacaattccttataataaagagataggttacctgctcaaataattttagaaatttcaaacactacagttttaaatatgataattttgaaggctaaaatctatttattagaaactacccactggagtggtaataaacacatttactttcttttttccttcatcctttccccttctctttgctgtgataaccaccaatacactttctatcttcataaaatccactttttagccccacatgtaagtgaaaacatgtcgtatctgtgctcggcttctttcacgtaacataacggcctccagttccatctatgttgttgcaaatgatggcatttcattactttttatgcctgaatggtattccattatatatttatgtgtatatatatatatatatatat

SEQ ID NO: 94483 - DNA, 595 bp, Homo sapiens
ccatgcccggccccatttatccctcattttaatattttttaatattttttttctttttttgagatggagtcttgctctgtcacccaggctggagggcagtggcgggattttggctcactgcaactttggcctctcaggttcaagcaattctcctgcctcagcctyccaagtagctgggactacaggtgcccaccaccacgcccggctaattttttgtatgtttagtagagatggagtttcaccacattagccaggatggtctcagtctcctgacctcatgatccacctgcgtcagcctcccaaagtgctgggattacaggcatgagccacctcgcctggactatccctcactttataacattaatcaagttcttttataattttatgttaaagatttttgaattttgttaatctattttattttccttcataaaatgatcaaagctagaaataacattacaaagtatatcataatcgttaacagaaagagctctataatcagcttaaatttcttttctctcttttctagttatgtgatcttaggcaagttacataaattacctgtgttcagtttatttatttgtgaaatggggaa

SEQ ID NO: 94484 - DNA, 595 bp, Homo sapiens
ccatgcccggccccatttatccctcattttaatattttttaatattttttttctttttttgagatggagtcttgctctgtcacccaggctggagggcagtggcgggattttggctcactgcaactttggcctctcaggttcaagcaattctcctgcctcagcctcccaagtagctgggactacaggtgcccaccamcacgcccggctaattttttgtatgtttagtagagatggagtttcaccacattagccaggatggtctcagtctcctgacctcatgatccacctgcgtcagcctcccaaagtgctgggattacaggcatgagccacctcgcctggactatccctcactttataacattaatcaagttcttttataattttatgttaaagatttttgaattttgttaatctattttattttccttcataaaatgatcaaagctagaaataacattacaaagtatatcataatcgttaacagaaagagctctataatcagcttaaatttcttttctctcttttctagttatgtgatcttaggcaagttacataaattacctgtgttcagtttatttatttgtgaaatggggaa

SEQ ID NO: 94485 - DNA, 595 bp, Homo sapiens
ccatgcccggccccatttatccctcattttaatattttttaatattttttttctttttttgagatggagtcttgctctgtcacccaggctggagggcagtggcgggattttggctcactgcaactttggcctctcaggttcaagcaattctcctgcctcagcctcccaagtagctgggactacaggtgcccaccaccacgcccggctaattttttgtatgtttagtagagatggagtttcaccacattagccaggatggtctcagtctcctgacctcatgatccacctgygtcagcctcccaaagtgctgggattacaggcatgagccacctcgcctggactatccctcactttataacattaatcaagttcttttataattttatgttaaagatttttgaattttgttaatctattttattttccttcataaaatgatcaaagctagaaataacattacaaagtatatcataatcgttaacagaaagagctctataatcagcttaaatttcttttctctcttttctagttatgtgatcttaggcaagttacataaattacctgtgttcagtttatttatttgtgaaatggggaa

SEQ ID NO: 94486 - DNA, 1098 bp, Homo sapiens
tgagtttcttgcttcttcatgggtcccatgtacaaaaaatggcagtgttagcatgatcccagggtggagttttcagccctctgacattaaaaggtgaagcagaggacatgaaaacttgctctgtgcatcctctgtacrctggccagaacctctccatcgtgggtggtctcttatcaggcaagaaaggagaggttgatatcagtggtggaggctttgaaagggctggtttctgttaaatccttagggaagaaagcctcatcatggttagcaaaggagggggtataacgatgtgtatcttaaccccatcatcccatcctagcaaagctgagaactcagttttgaaagttactctggggtcccctcagccaagagtgggtctgttcagtcagttgggagcttagaatttaattttcatttatcaatgctaatgggaaagagtacgctgtcttcatggcagctgaatttgcaagaaactccttggatggggttaatggcagctgtatttttctgggagctgtgctttaattggataaagtaagttctggtaagatttcttcatcttcagtatctcaaatgttttcatttaaataatctttataacaacttttgatgtctgagtggattcccacacagtcatctattgtaagactttctgattccttttttttcctttggtcattatgaatagggcttctgtaaataactgcatggtagcttttgatgggaaataacatcaaagtagttgtcaaaatacctaggaatgttatttttggattgtaaggtgagacttgtttagctttggaaaaaaatgcccaacttgtaataggggaggaaaaataattttctgtttttggaattcttagatggaacgctctgtaaaaactgacagattaaaatgagaaaaagagaaaagtttaaaaacatgtatatcttatggttacatgggagatactcagggaaaaatgagtaaatctccaacaggtggctttcaattcaagcataaatactatcttcaacttaaagaaagaagatttgaggtgcagtagtggggagttaaccagcaaaagcacattagacaagagtaaggtacgttataca

SEQ ID NO: 94487 - DNA, 1098 bp, Homo sapiens
tgagtttcttgcttcttcatgggtcccatgtacaaaaaatggcagtgttagcatgatcccagggtggagttttcagccctctgacattaaaaggtgaagcagaggacatgaaaacttgctctgtgcatcctctgtacactggccagaacctctccatcgtgggtggtctcttatcaggcaagaaaggagaggttgatatcagtggtggaggctttgaaagggctggtttctgttaaatccttagggaagaaagcctcatcatggttagcaaaggagggggtataacgatgtgtatcttaaccccatcatcccatcctagcaaagctgagaactcagttttgaaagttactctggggtcccctcagccaagagtgggtctgttcagtcagttgggagcttagaatttaattttcatttatcaatgctaatgggaaagagtacgctgtcttcatggcagctgaatttgcaagaaactccttggatggggttaatggcagctgtatttttctgggagctgtgctttaattggataaagtaagttctggtaagatttcttcatcttcagtatctcaaatgttttcatttaaataatctttataacaacttttgatgtctgagtggattcccacacagtcatctattgtaagactttctgattccttttttttcctttggtcattatgaatagggcttctgtaaataactgcatggtagcttttgatgggaaataacatcaaagtagttgtcaaaatacctaggaatgttatttttggattgtaaggtgagacttgtttagctttggaaaaaaatgcccaacttgtaataggggaggaaaaataattttctgtttttggaattcttagatggaacgctctgtaaaaactgacagattaaaatgagaaaaagagaaaagtttaaaaacatgtatatcttatggttacatgggagatactcagggaaaaatgagtaaatctccaacaggtggctttcaattcaagcataaatactatcttcaacttaaagaaagaagatttgaggtgcagtagtggggagttaaccagcaaaagcacattagacaagrgtaaggtacgttataca

SEQ ID NO: 94488 - DNA, 577 bp, Homo sapiens
agatggaatcttactctgttgccccagctggcgtgcagtggtgcaatcatagctcactgcagcctttaactcctgggatgaagcaatcctcttgtctcagcctcaggagtagctaggaccacaggtgtgcaccaccaagcctggctaacttcatttttttttctttgtagagacaggatctcactatgttggccaggctcctggcctcaagcaatcctcccacctcgaaattccgaaattctgggattacaggtgtgagccactgtgtccagccagaagggtattttgtaatagtctgggaagaggtgactctggggagaggtgagttttaaaaaaataacacaagtgagaaggtaggatgcattgaggaaaaamacttttttttgagacaagatcttgctccgtcacccaggctggatggagtgcagcggtgctaccttggctcactgcagccttgacctcctgggctcaagtgatcctcccacctcagcctcctgagtagctgggactatagatgcacactaccacaccttgttaatttttgtatttttggtacaaaaatggggttttgccatgt

SEQ ID NO: 94489 - DNA, 577 bp, Homo sapiens
agatggaatcttactctgttgccccagctggcgtgcagtggtgcaatcatagctcactgcagcctttaactcctgggatgaagcaatcctcttgtctcagcctcaggagtagctaggaccacaggtgtgcaccaccaagcctggctaacttcatttttttttctttgtagagacaggatctcactatgttggccaggctcctggcctcaagcaatcctcccacctcgaaattccgaaattctgggattacaggtgtgagccactgtgtccagccagaagggtattttgtaatagtctgggaagaggtgactctggggagaggtgagttttaaaaaaataacacaagtgagaaggtaggatgcattgaggaaaaaaacttttttttgagacaagatcttgctccgtcacccaggctggatggagtgcagcggtgcyaccttggctcactgcagccttgacctcctgggctcaagtgatcctcccacctcagcctcctgagtagctgggactatagatgcacactaccacaccttgttaatttttgtatttttggtacaaaaatggggttttgccatgt

SEQ ID NO: 94490 - DNA, 577 bp, Homo sapiens
agatggaatcttactctgttgccccagctggcgtgcagtggtgcaatcatagctcactgcagcctttaactcctgggatgaagcaatcctcttgtctcagcctcaggagtagctaggaccacaggtgtgcaccaccaagcctggctaacttcatttttttttctttgtagagacaggatctcactatgttggccaggctcctggcctcaagcaatcctcccacctcgaaattccgaaattctgggattacaggtgtgagccactgtgtccagccagaagggtattttgtaatagtctgggaagaggtgactctggggagaggtgagttttaaaaaaataacacaagtgagaaggtaggatgcattgaggaaaaaaacttttttttgagacaagatcttgctccgtcacccaggctggatggagtgcagcggtgctaccttggctcactgcagccttgacctccygggctcaagtgatcctcccacctcagcctcctgagtagctgggactatagatgcacactaccacaccttgttaatttttgtatttttggtacaaaaatggggttttgccatgt

SEQ ID NO: 94491 - DNA, 472 bp, Homo sapiens
tgggttatggagagacagtggaagtagaaggaggtgtgacatcataacaaaattatatgtatatatatattttttggtctctgtctctggttcctggcatagagttcctaaaacctgtaaattcctgagcaatgggggtgctaggtatatcttttgttctactattttttttttttttttgagacagagtttygctctgttgcccaggttggagtgcaatggcacgatctcaactcactgcaacctccacctcacaggttcaagcgattctcccgcctcagcctcccgagtagctgggattacaggcacctgccatcatgcccagctgctttttgtatttttgtagagacggggtttcaccatgttggccaggctggtcttgaactcctgacctcaggtgatcctctagccttggcctccgaaagtgctgggattacaggtgtgagccaccatgcccggcctactatttggc

SEQ ID NO: 94492 - DNA, 642 bp, Homo sapiens
tgaggttttattttcttttacaatcccatgtcttctaagtggcatagccaggatttgaacttgggtagtagtacacccctatggtctctgctcttaaactttctgctagctcactcctcctgtgctacgtaagtgaatgctagaattcatagctctaggaggctggaagcaaagggaagaaaaccatctgtttgtgcttctcctccatgtgtaactacctaggtggagtctaagttactcaggtcttaggtctctgctgaggactgatggtgtctcctgtttacatctaacaatgttaacaatcagcatggcctggcacatagcattgttctcctcatcatcatcaaaaagaaaaagtcttccctgtatatatgtgcacataaaaatatataatatatatttatataaattactcacatatttaagaacgtgtaacatttwaaaaaaaaaacaaaaacctttgctgtattttaaaaaaatagatctgtattgccctctagtggccatgaaaatttaaacggtgggtaaccctaaaagagaatagcagctgttcaagtgccaaccataaaaacatcaaccctactacctccatatattgctggggtgcaaacaggcatgctcacagcgaccaggtaggtgatg

SEQ ID NO: 94493 - DNA, 583 bp, Homo sapiens
tctgggagcttgttagaaattctgaatcttggactctaccaaagaccctactgaatcagaattttaacaagactctcatgctattcatgtgcacgttaaagtttgaaaagcaccaacctaaatttgctgtgccagcgaatttctggcatttcaacatcttgcagttaggccacccctgagcccaggtatcggtcaattaattggaamcaactaaagtcacttccagctgctcaagctagcatattgaatttagatgttctggtccacagaggggctagtaaattcagccggatctaaaattatgtttctccctctttggtctagaccaatactctgcaagtgtttgaaaatgaaaatgagcaatagcttgcatatcctttggcatgtacatctcctactgggcttgtctttgtaattacaggtcataaattccagccataagactggaatctagccatgagcctggaaactataagggtggcagggctaaatcgtgaggtgaattggctcacttggcaagatacctgtctcagccatgatctttggggtcctcaaaaagggagagcttcatcagaagtgaaag

SEQ ID NO: 94494 - DNA, 676 bp, Homo sapiens
gagccaagccataacaaacatgcaccagaagagagcgcagttgcaagatttaatagagcgaaaacagagctcccatacaaagggaggggacccaaagagggtagccattgccagcttgaaggcctgggtttatatcccgatcattgtccccctcactgtgctctcaggcaataggtgattggctatttctttacctcctgtttttgcctaattagcattttagtgagctctctttattacctggttggtcggtgtgagctaagttgcaagccccatgtttaaaggtggatgtggtcaccttcccagctaggcttagggattcttagtcagcctaggaaatccagcttgtcctgtctctcagtagcatgagcaatattggtgacagagaggaagagctgaattcagtagacctgatgatggttggatagaagcaggtgagggagaaggaagtgtctaggatggcttcaggtttcaggctactgtccctggatgaatgatgttgccactcactgggatagaggagactgtgcatggttctggttggggcagagatgtgggttgtttgtgttgcggggggtatcgaagrtcctctatctgcttttaaacaagctgaacttgaagtgcctttgggatatccaaaagaagatttcaagaaggccgtttgatatacagatct

SEQ ID NO: 94495 - DNA, 745 bp, Homo sapiens
agagagaagggttaatgacaaacactgaagccttccctgaatgttatttcttaaagagtagaaaaaggtaatgtttggatggagccaaagacaaactattgaaacacggggtcagtagatggcaacttaataagactatttagctaatttgccccaaaatttgctgagactttttttttttaagataagaactttcaacctataaagaaaccaaaggtttagatctaaagggaagaataattccaccacaaggtttacactgtgaactaagccatcttaggcaactacagatatgtatctcaaccactgcctctgcatgggtaattttcttagcaagtgggtccaaattgccccattttttcttggaattctttatagcttcttacatttttaataaaatacgatttttaaaactcctcatgggtttttttgtttgtttgtttgtttgtttgtttgtttktttgttttttgctttttacctgtgcatgctttgaagaagaaaagagctctgttttattgtttgttttactttccttgcttgtgttttctatttgggacaaggttgctttagatacagtatacgcaaaactgctagctactggtcttatcatacacctagaatatatggaatttggagtggacacgaaaaatggcaagtcagaattagcgtgattctgggtcacttagtgtgtttactattgagctttcagactattccacctgggagttatggtatcttgcttct

SEQ ID NO: 94496 - DNA, 745 bp, Homo sapiens
agagagaagggttaatgacaaacactgaagccttccctgaatgttatttcttaaagagtagaaaaaggtaatgtttggatggagccaaagacaaactattgaaacacggggtcagtagatggcaacttaataagactatttagctaatttgccccaaaatttgctgagactttttttttttaagataagaactttcaacctataaagaaaccaaaggtttagatctaaagggaagaataattccaccacaaggtttacactgtgaactaagccatcttaggcaactacagatatgtatctcaaccactgcctctgcatgggtaattttcttagcaagtgggtccaaattgccccattttttcttggaattctttatagcttcttacatttttaataaaatacgatttttaaaactcctcatgggtttttttgtttgtttgtttgtttgtttgtttgtttgtttkttttttgctttttacctgtgcatgctttgaagaagaaaagagctctgttttattgtttgttttactttccttgcttgtgttttctatttgggacaaggttgctttagatacagtatacgcaaaactgctagctactggtcttatcatacacctagaatatatggaatttggagtggacacgaaaaatggcaagtcagaattagcgtgattctgggtcacttagtgtgtttactattgagctttcagactattccacctgggagttatggtatcttgcttct

SEQ ID NO: 94497 - DNA, 1175 bp, Homo sapiens
tatgggctaccacaaaccactaaaaaatgtcagcagaggatagtattaactctggaccaagcagcagggatggagttgtatcataggaggctttatgtccccattcagtggctgatttcagttcctgtagcatgtttctcaaacgatttctaccctctccaagctggcaacgcagtctctgctcttatcttctccctttaatgcaaagatcaaggcccctctctaatgagtctgttagtgttctttctctctggcaatctctataacctgttgtccttcttctgttttattaaaaaaaaaaaaagccaaaaacaaaaacaaaaaactctcttctgctaaccaaagataactcttctgctctgttctggatagcaatatttcccatctcctccaggtcctccaggatctggcctgtttattcccattatccagactagaaaagtgcccaagtgtcctatatgcttaaaacaaaagatacaacaccaccaataagttacttttccttyccccttccttccttctttccttccttccttccttcctcccttccttccttccttttctttccttccctttcttcttttctttccttccttccttttctttccttgctttcatttattttttaagagattggatctttctctcttgcccaggctggagttcagtggtatgatcacaactctcctaagcctcaaacacctgggatcaagtgatcctctggcttcagcctcccaagtagctgggattgcaggcacgcaccatcacacctggacaattgttttgcttttgttttcttgtagagtcaggggtcttactatgttgcccaggctagtcttgaggtcctggcctcaagcagtccttccgtctctgcctcccaaagcactgagctaagttacttttgcatatatgttttctttctccaataaacatttccaaactagcctggactatttgctgccactttcctgtcttcctgcactttcctgaacttataattctaatgaaactacactgactttctctactcatctgttcaaatccaatgtattgctctcagtctccactctgctttatatttcaccaacatttgactttgactcaattcttttcctctttacatctttcttattcctaaattccaaaaaatgtctctcaagctgcattttcctaaa

SEQ ID NO: 94498 - DNA, 1748 bp, Homo sapiens
cctcacggcctccccaaagctgcacccactgaggatggggtggagagccagtcctgtctacaatggggagaaccattaaaaaggttcagagaaacgagtcccttcctcctggggtggggacgccggcagccacgctccagcatcctaatgcacacctctccctacacagcaccttctggctgtgttcctgaaggcttggttggtagttcaatttttgttaaataaatattttcctcattgtcttacacattcagaactgctttcatttctgactcatctcaagttggcaaccttcccttcctcatacttgagcttcttacactctttctacccttcctccccgcaagaaaaggaaaacagaggaagacagtgagacaaacagaatgcactaagacaaagactccagattcagggcacgggcgtgggggcacaggcaaagacagcggaagataaaggagaggaaggaatgaggaggggccggcggctcagggagaggtgcaggaaggggccaggggctcaggacacaatgtcaggcaggggatccaaacttcaccagccctaggactggcctcatacttttggccctattggtgcctttgtatctatgtcaaaatgcgaccccagcactcctcagcagctttttaatttaattttctaggctgcactctgaccagattaacaaaatttgtcaaacatctatgtgtcagacaccttccgcttcctaaaaaacacatcagattctctgccctacagactcagtgaccccagcatcattctagactgaagaaaacgagggcaagaagtcttgtagttttccttccactctgtcaaaacatttggtaaagcagaggtgtctttggtaacagcaaatatccatgcatcaggagtcagggcaacgtgaacaaggttccacagtagggactctcactaatctcacaacatcagggaatggtacagaraagtgacctgtctggctggacacagtggtttgcacctgtaattccagcactttgagaggccaaggcgggagggtcacttgaggtcaggagtttgagacccacctgggcaacacagcaagacaacacctctataaaaatttttaaaaattagctgggcatggtagtgtgcctgtactcccagctactggggaggctgaggcaggaggactgcttgagctcaggagtttgaggttacagtgagctatgattgcacccctgcactctaacctgtgcaacagagcaagactcctgtctctttttaaaaagggtgaggaagaaagagatgaggggggaaatgaagcaaggaaggaaggaggaggaggagagagagaggacgacagagtgaatgagggaggcaggagagagggacagggacagagaggaagagggagggagacagggggagagtgagagagagaaagaaagcagtctagtttgctcttttatttaccaaaactggagtgggagagagaaaaaagcttatgtggaaatgtttgtaaactgatcatatattccctgcatgctcacttagtgtatactgaacatggcacagtctttgctcagtgattccggatcattaggaagatccattattgtggcgatggctatattgcacagcaagcctcccgcaggatggagatttgccagctctgtgcatttacccatctgccatttccaatgcttccctctgggaaacctggtcggctgggtggtgtggaggctaggattgacatatttttaaaggacgtt

SEQ ID NO: 94499 - DNA, 677 bp, Homo sapiens
ttttgccaccagcaattaaaataggccccattccctaaaacaaaattcgggccagggagtagaaaagatccagttgggaaggacatacctgataaacgctttaggctgatgtccccagcttcttacatgtcactctgcttaatttgggattggaggtagcaaggaataagccaataatccccagttctcaagggaaatctgataggctgcaggacggtgccatccaatttttcaaaaagtggttttaaaagttgtttcttaaaataaattttaaaaaagggccacctctcatttctgcagctctgaaagcttttctttcatctttgtaaagttctcgacataaacatgtagaaataccaccatcacatatctaggtcagaagaaagggctaactttacctatcctacagttactaggccatccagacagctctttcctttatgtaggggtgccaaggggtgtctgagcagaaaggtgaagaaggcaggtyggtgccaaagagacccaggctattatcacttgcaggtgagaacctttgatcagccgctgccacccccacccccacccactggagagtgtgtggggcagcgccttccctcaagcaggctcaggggagaggctcaccagaaagtcctcggattttaggaaccctcaagccctccacccaacaggctgct

SEQ ID NO: 94500 - DNA, 689 bp, Homo sapiens
cagattccattggatttggtcactgattgattaggtacaaaaaaagggaggtgtctagaataatccctaggtttcttcagaggactaggtagatgggaggaggggaagaagcctatctctattaaatacttagtacagtggctctaaactggggcctgtcttgcacccttccttctcccctaggggacatttggcaatgcctggagacttttttttgagacggagttttgctcttgttgcgcaggctggagtgcaatggcgtgatctcagctcactacaacctccgcctcctgggttcaagcgattctcctgcctcagcctcacgagtagctggggttacaggtgccygccaccacacccagctaattgttgtattttttagtagaaatggggtttcaccatgttggtcaggctggtctcaaactcctgacctcaagtgatgtaccggtctcggcctcccaaagtgctgggattacaggcgtgagccactgtgcccggccgcctggagacatttttgattgtcacagcttaggagatgcctctgacatctagaaggtggaggccagagatgcagcagaacatcttacacggcacagtacagctcccacaacgatcatctcgccccaaatgctgccgaggttgagaaaccctgctgtagtgtagtatcagttttacgtggttatctaatt

SEQ ID NO: 94501 - DNA, 689 bp, Homo sapiens
cagattccattggatttggtcactgattgattaggtacaaaaaaagggaggtgtctagaataatccctaggtttcttcagaggactaggtagatgggaggaggggaagaagcctatctctattaaatacttagtacagtggctctaaactggggcctgtcttgcacccttccttctcccctaggggacatttggcaatgcctggagacttttttttgagacggagttttgctcttgttgcgcaggctggagtgcaatggcgtgatctcagctcactacaacctccgcctcctgggttcaagcgattctcctgcctcagcctcacgagtagctggggttacaggtgcctgycaccacacccagctaattgttgtattttttagtagaaatggggtttcaccatgttggtcaggctggtctcaaactcctgacctcaagtgatgtaccggtctcggcctcccaaagtgctgggattacaggcgtgagccactgtgcccggccgcctggagacatttttgattgtcacagcttaggagatgcctctgacatctagaaggtggaggccagagatgcagcagaacatcttacacggcacagtacagctcccacaacgatcatctcgccccaaatgctgccgaggttgagaaaccctgctgtagtgtagtatcagttttacgtggttatctaatt

SEQ ID NO: 94502 - DNA, 689 bp, Homo sapiens
cagattccattggatttggtcactgattgattaggtacaaaaaaagggaggtgtctagaataatccctaggtttcttcagaggactaggtagatgggaggaggggaagaagcctatctctattaaatacttagtacagtggctctaaactggggcctgtcttgcacccttccttctcccctaggggacatttggcaatgcctggagacttttttttgagacggagttttgctcttgttgcgcaggctggagtgcaatggcgtgatctcagctcactacaacctccgcctcctgggttcaagcgattctcctgcctcagcctcacgagtagctggggttacaggtgcctgccaccacacccagctaattgttgtattttttagtagaaatggggtttcaccatgttggtcaggctggtctcaaactcctgacctcaagtgatgyaccggtctcggcctcccaaagtgctgggattacaggcgtgagccactgtgcccggccgcctggagacatttttgattgtcacagcttaggagatgcctctgacatctagaaggtggaggccagagatgcagcagaacatcttacacggcacagtacagctcccacaacgatcatctcgccccaaatgctgccgaggttgagaaaccctgctgtagtgtagtatcagttttacgtggttatctaatt

SEQ ID NO: 94503 - DNA, 689 bp, Homo sapiens
cagattccattggatttggtcactgattgattaggtacaaaaaaagggaggtgtctagaataatccctaggtttcttcagaggactaggtagatgggaggaggggaagaagcctatctctattaaatacttagtacagtggctctaaactggggcctgtcttgcacccttccttctcccctaggggacatttggcaatgcctggagacttttttttgagacggagttttgctcttgttgcgcaggctggagtgcaatggcgtgatctcagctcactacaacctccgcctcctgggttcaagcgattctcctgcctcagcctcacgagtagctggggttacaggtgcctgccaccacacccagctaattgttgtattttttagtagaaatggggtttcaccatgttggtcaggctggtctcaaactcctgacctcaagtgatgtaccggtctcggcctcccaaagtgctgggattacaggcgtgagccactgtgcccggccgcctggagacatttttgattgtcacarcttaggagatgcctctgacatctagaaggtggaggccagagatgcagcagaacatcttacacggcacagtacagctcccacaacgatcatctcgccccaaatgctgccgaggttgagaaaccctgctgtagtgtagtatcagttttacgtggttatctaatt

SEQ ID NO: 94504 - DNA, 689 bp, Homo sapiens
cagattccattggatttggtcactgattgattaggtacaaaaaaagggaggtgtctagaataatccctaggtttcttcagaggactaggtagatgggaggaggggaagaagcctatctctattaaatacttagtacagtggctctaaactggggcctgtcttgcacccttccttctcccctaggggacatttggcaatgcctggagacttttttttgagacggagttttgctcttgttgcgcaggctggagtgcaatggcgtgatctcagctcactacaacctccgcctcctgggttcaagcgattctcctgcctcagcctcacgagtagctggggttacaggtgcctgccaccacacccagctaattgttgtattttttagtagaaatggggtttcaccatgttggtcaggctggtctcaaactcctgacctcaagtgatgtaccggtctcggcctcccaaagtgctgggattacaggcgtgagccactgtgcccggccgcctggagacatttttgattgtcacagcttaggagatgcctctgacatctagaaggtggaggccagagatgcagcagaacatcttacacggcacagtacagctcccacaacgatcatctcgccccaaatgctgccgaggttgagaaaccctgctgtagtgyagtatcagttttacgtggttatctaatt

SEQ ID NO: 94505 - DNA, 728 bp, Homo sapiens
ccttgttcaaaaactatcaagaatttcaagatggcaagaaaagagcattaaatcaaacacagggcccttctgagtgtggagcaagggaccacrccgcaggctcaggaagctgaccttgagcagctctgcacccttccacatcctcaccctgcctgcctccctagccactgcaccaagtcttcattcttctccaaattgctcccaccattccttgtcacactgaagcttggctctgcacacagcacagcttccaggaggctacaggttctccggcactttttagggccagggctgaaccctactctgggactttccacctcagcctccatgtcatgaagagtcctccttattatctataggccacttggctggtcgctggacaccctagtaaccatcccctctttaaagatggcatggaacctgggttgccatcttcctccccggcccaaatcctgcatcatcctggatcaccgtggtccacacccacatagcaccctcaatccacaaatgactccctgagccccagacacatctgcctatgttgtgctcacacccagagccatgctggactgggccaccacgcaccacctcatctctagaaacctcaactccagagctccttttctgcgtctaggtctctcccgcccaccttcctgaggatcagcacatcaaatggctaataatctctagggctagctgaacatctaccagaacccagcactgattca

SEQ ID NO: 94506 - DNA, 1019 bp, Homo sapiens
gaattattgagatttcaccatgaagaagtgggacaacctgggcatggatggtggctggagcctgtaatactctggaggctgaagcaggaggattactggagcccaataccagcttgggcaacatagcaagaccccatctcaaaaaaaggaagagkgacaagatcactgtcagtatctaaagagtggcaatcctgcagagctgccaatgaccagaaaggtgtgttcttcaaaccagggctaggcttgaggggaaaggcccctatatgagcagcagagttagaatcttctctcagtttatacttaatgggaaaactatgagataaaaagaaagatgatcatttgttcattcatttatacgacatgtacagagcacttgtatgtgccaagaggagatgcacaaggagatggagaataaagaatcaggcaagccacctgcctgttgtgcctgcccttaagaagttagatctgaacttctcaacccaaccacacagtcaacttcctggagagcttttaaaaaatccttatgcttagaacactcccctagagatttttattttaccagcctgggtggttcccagagctttccaggtgcacccagcactgataatccctgagccaaagcacagatagtaatggggtgagctggaacaggaactaagaagtaaaatatatttgcaatcagataaaaattctgcccctttaaaggtattggtatgccaattttctttgggttttcccttcgtattatttaataaaagtcaacctcagctatggttagagaaactaaggagaaaacatgtctaaccatgctcaaagcaccattttttaaaatcgactaaggagataagagtgcaattttgttacaagaatatattgattagtggtgaagtttgggctttttgtgtagccatcacctgaatagtagattgtacccattaagtaatttcttatctcgcacccacttcctgcctttccacccttgtgagtctccagtgtctattacttctctccttgtgtcc

SEQ ID NO: 94507 - DNA, 1250 bp, Homo sapiens
gcatgtcaggataaaatttttgttacaaaaatagaaagatatattcatacagacaaaggataggaaattatattcaacatattagtaatgactagttgaatgatactgtgagtgatttttatattttaatttggttaattatgctttctaaaatttctgaaactacagcaaaaattttcaaatgatgaaatataattcaattttaaatggtaatggaaaatcagaaaatatagtaattagagaagaaagacatgtaggcagtcagtagccaacttaaaccacctttaaaactgtatgcagttgatttaaaaagcaaaatttaaaaaaaaacccagtgttgactataatgcaaaaggtagtttaaaagtaaaaatgaaggaaaataatgcaaagttgattcctgttattcacagttgttattttctataaagttactgcaaacacttaattagatcatatgaaaccattgctcttargaaaaatcaggattagtttcccatgagcctctatcacaatattttttacaattgagcaataaatacacaaccttgtttaatatatgtttctgtttaaagataccttacttaacatatgctgttgattcattaacattgatttcacaaccaatagtactgtaactcacggctgaacaagctgacctaacacatgtattttctccataaggcacatcacaggcttcttgtgcttggaaacacttcagcactacattcaagagtcattttaaacagtgaaatcactaacaaaaaacaccaaaatatgaaacacatggcactaatagaacacgaaaagaacatttgtttatagtatcagagctggaacaaagagagagtgttcaaccttagctaggaatgtgttaggtggctcaatttttttgccactctgcacatgccccacaatgacagcaaaagtgctgcactgatttgagggttacaaataaattttagggagtaggcaaatttgcaaatatgatattcacaaataatgaggatccacaatatcattcaaacactaaccaaaagaaagccggtcctagtcaacatagtactagaagtcctagccagaacaatcggcaaaagaaataaataaaagacatcaaataggaggaaagtaagtcaaactctgtctgtttgcagacaatatgattctatccctagaaaattctgtagtcgctgcccaaatgctcctagttctgataaacaacttcagcaaagttcaggatacaaaatcca

SEQ ID NO: 94508 - DNA, 1250 bp, Homo sapiens
gcatgtcaggataaaatttttgttacaaaaatagaaagatatattcatacagacaaaggataggaaattatattcaacatattagtaatgactagttgaatgatactgtgagtgatttttatattttaatttggttaattatgctttctaaaatttctgaaactacagcaaaaattttcaaatgatgaaatataattcaattttaaatggtaatggaaaatcagaaaatatagtaattagagaagaaagacatgtaggcagtcagtagccaacttaaaccacctttaaaactgtatgcagttgatttaaaaagcaaaatttaaaaaaaaacccagtgttgactataatgcaaaaggtagtttaaaagtaaaaatgaaggaaaataatgcaaagttgattcctgttattcacagttgttattttctataaagttactgcaaacacttaattagatcatatgaaaccattgctcttaggaaaaatcaggattagtttcccatgagcctctatcacaatattttttacaattgagcaataaatacacaaccttgtttaatatatgtttctgtttaaagataccttacttaacatatgctgttgattcattaacattgatttcacaaccaatagtactgtaactcacggctgaacaagctgacctaacacatgtattttctccataaggcacatcacaggcttcttgtgcttggaaacacttcagcactacattcaagagtcattttaaacagtgaaatcactaacaaaaaacacmaaaatatgaaacacatggcactaatagaacacgaaaagaacatttgtttatagtatcagagctggaacaaagagagagtgttcaaccttagctaggaatgtgttaggtggctcaatttttttgccactctgcacatgccccacaatgacagcaaaagtgctgcactgatttgagggttacaaataaattttagggagtaggcaaatttgcaaatatgatattcacaaataatgaggatccacaatatcattcaaacactaaccaaaagaaagccggtcctagtcaacatagtactagaagtcctagccagaacaatcggcaaaagaaataaataaaagacatcaaataggaggaaagtaagtcaaactctgtctgtttgcagacaatatgattctatccctagaaaattctgtagtcgctgcccaaatgctcctagttctgataaacaacttcagcaaagttcaggatacaaaatcca

SEQ ID NO: 94509 - DNA, 718 bp, Homo sapiens
tttaagctatatcacgaccatcttacagaaggtgtgtagaaaaataataatagttaagaaacagaatatctttatgttgaaaggctgatttttttatagtaagatgtagttaaatttataggtccatattttacacacacacacacacacacacacacacacacacacatacatactgttagcaagactagctaacaccatcaaagaggtccaaattctgttgggcatgtggagctgtgcaaagaagaaagagaatgaactcttctgaactgactattgataattgaaactgataacttctttgaattggattaaataattgcatgaagatcataagatacaattttcttttgatttttataaatttgttttacagatttcttttcattcattcagcaataatttattgagtactcatgatttgtcaggcaaaatgccaggttcctgacattaaggagctctcaatctagtgagaagcatgtaaacaaaaaggctttttgaatgataagcttcaatggaaaacataatagaagccatgtcgactgatataatctgaaccagtattttgtgtattgagaaagttaaaaagaattgtaaaattgctaatgctataaatactgtatgtttagcttaaaatgatcattaatcaattataatgtaatatcaatgccttttgcrtatgggttcaatagctggtgttttacatggtctttttatg

SEQ ID NO: 94510 - DNA, 691 bp, Homo sapiens
tcaacgtgaagatgatgaagataaaggactttatgatgattcacttccactcagtgaatagtaaatagattttttcttccctacaattttcttagtaatattttttctctaactttatcataagaatacagtatataatacgtatgacatacaaaatacgtgttaattgtttatattattggtaaggcttccagtcaacagtaggctattactagttaagttgaagggggagtcaaaagttatacacagatttttgaccgtgaggctctcggcaccccaaccccgatgttgttcaagggccaactgcattttcaatttctcctgtcttctgtcactttatttctgagttttcctaattataaattatgctattatttcatgtctcttattattttcatatatcttttgcctcattttgaaacagtgaattagaattttgatttgtgggcataagttattgatatgtttttaattctgtctctttttctcttttyttttttttttttatttttaatttttttttttattatactctaagttttagggtacatgtgcacattgtgcaggttagttacatatgtatacatgtgccatgctggtgcgctgcacccactaacgtgtcatctagcattaggtatatctcccaatgctatccctcccccctcccccgaccccaccacagtccccagag

SEQ ID NO: 94511 - DNA, 633 bp, Homo sapiens
agtgcacatgccctcttctgtctaagttgtggtggaagctgcagccccraatattagttgtttaaacaattcagaaatttacttccttctcatatagcactacaggacaagcagtccaccatggcacagcagttccacagccttggggacccaggctccttctatcttgttgttcacttttcctgagatattgtcctcatgggcatggctcagaatggctcccattgtgcctgcagtttagccagaaggaaggaaaaaaggatgaaaggcaggacatgcccctctttttccagacctgatcctgcagctgcgcacatcaattctacacacatcccgctggtcataaacagctgagagatggagttttccatgggtggcctagggtctaactcaaagttatatttctgtggaagaagaggagaacgccatttgggtgacaactggtaatctttgccacaggtgtattttttaaatataaatttgggagggataatgataatttagattcaaggatacaaggttgcccaagttcagttctgctttttcagaacaacagacagataggaaagagctttgaatggttttaagcacattgcaggccagaggctacctgaaaggtgaagctgaggtccc

SEQ ID NO: 94512 - DNA, 751 bp, Homo sapiens
ttgcctatcttggataatttaaatgaataaaatctcacaatatgtggcctttggtcaaaggtcctccacgtttttgtatatatacaaactttgttccttttcacagatgaataatatctcattgtatggataatgtgttttgttcatttgtccatagatggacatttgtctttttgatactgtttagttattatgaataatgctaatatgaacattcatgggcacagtttcgtgtgaatatatgtggattagataatattttaaaatttataaagcctaacagtacctaataaaacctaatagtactaatgaaatcacctaaggatgcagttgtgagaatgtagccctgccattacatgccacatacctacctgtatttagcatattcatcacctcatatatttatcatttctttgtgatgggaagcattgtattatttatcattgcattcctatcatctagcactttccatctaagaatgaatgagagtatttaaatatatatatatatattgctaggtcaaaatgtattcttgtcagtatatttgatgttatgacctaggtatcytaggaggccaaagttccaatacatacataatgacattcccattttaatcaccttggaatatattcatcctgcagtaatcagacaatagtagcattgtcaacatatctttttcacagttactatcagtaacttttaaaaacttttaactattccttccttaaaattgaggaaacatatttttttt

SEQ ID NO: 94513 - DNA, 773 bp, Homo sapiens
ttatatttagaatagttaagtcttgtagaatttcaacaaccctttatgattatgtaattcccttctttgtccttttttaatttttgtttatttaaaggctattttgtctgaaattagcattgcaacccttgcttgtttctgattttcatttacttatagatttttctctattcctttattttgagcccatgaatgtcattatgtgtgagatgggtttcttgaagacagcttactattgggtcttgttattttatccagcttgccactctgtcttttaaatgggggtatgtacaaacaactccaccaactggacraaactataacttgttgacagctttctctctctggttctcagatgaggaatgatgataaaacaaaaccaaaaggcatcttattgaggaaggtcagctccagtggatttctttgagacaacccaagttagatggagctagcgggaaaaaatacagtaattctttaaactatcattcaagcaaaacctgtgacctaagtgttccttttaaagtagctagacttgttagagattttattgagtggatataagcactttatacagaaacttttttttaaaaaatgtacaccgtcttttcatagaacagaggaacagctgtcacatcagttcccgatgccaagcacagcaatataaagtatataccctacgagttagatgaagcagaggaaagggatcaagagattaatatacctctttgagaaaagcacccaaaataaatcattttattattttttgcaaaaat

SEQ ID NO: 94514 - DNA, 773 bp, Homo sapiens
ttatatttagaatagttaagtcttgtagaatttcaacaaccctttatgattatgtaattcccttctttgtccttttttaatttttgtttatttaaaggctattttgtctgaaattagcattgcaacccttgcttgtttctgattttcatttacttatagatttttctctattcctttattttgagcccatgaatgtcattatgtgtgagatgggtttcttgaagacagcttactattgggtcttgttattttatccagcttgccactctgtcttttaaatgggggtatgtacaaacaactccaccaactggacgaamctataacttgttgacagctttctctctctggttctcagatgaggaatgatgataaaacaaaaccaaaaggcatcttattgaggaaggtcagctccagtggatttctttgagacaacccaagttagatggagctagcgggaaaaaatacagtaattctttaaactatcattcaagcaaaacctgtgacctaagtgttccttttaaagtagctagacttgttagagattttattgagtggatataagcactttatacagaaacttttttttaaaaaatgtacaccgtcttttcatagaacagaggaacagctgtcacatcagttcccgatgccaagcacagcaatataaagtatataccctacgagttagatgaagcagaggaaagggatcaagagattaatatacctctttgagaaaagcacccaaaataaatcattttattattttttgcaaaaat

SEQ ID NO: 94515 - DNA, 528 bp, Homo sapiens
tcataccagtaaggagtctggactgtcctgcgggcactgggagctgctgaagagtttaagcagagtagtgatctgatgcgatttgcattttagaagctccctctccccctaggtgagctgggctcagtggggaggctgatggcagggcatccacaccatcaaggtcagagacaagagctgacctggttcagtctatcctgctctgtagctcatgattgtggattccagctgtccttgctctgacctgtggactagaggcttcaggttcaaagacagtaaaccttacagagaatggcttaaccagctgccctgagagtgcccaggggaagctgaatattaatgaggaattttctcaattggttctgagttttctggaatcaattatctgacctcattagatgcaaaggcgttaatgatcctgtttccagtggatcatatctgatgacatgtaatggtgaaacagttaygcaaattattccttgtagatagctggtaactaaatgctgatgaaagtcaagattctggtgg

SEQ ID NO: 94516 - DNA, 660 bp, Homo sapiens
tataatattttgctttttactgaaaatatatttaagtaattgatcctgaagtatgccatttttatattcatgtgtgcrtgtgtgtgtgtgtgtgtgtatgcactccaacttttttttaaattttgggtggagatgatcacataaatcatattaattgtttggattcaaaatacagcaagaataagacaacacttgaggcttatgagcctcaggaagtataaatgaatgtttcagcagagagatgtaggaagtccagcactgctccccggtgcctgtgtcgcaacacagaactttctgaatggtggttatttggcctctgtggggtgcttcaaatgtactgagactgatatctcccaaagaagcccattccatttttaccacaaattggcctctttgtagatttcactcactgattctagtttcagcttctagagctctgtggcgttaagtacaaacctttttttttttttaaacatattcaaccctgttgcctgccacaccactcctttcctctgtgactgaagtctgctctcttataggcagaccacgcccacctgctccagcaaccatttgtaactcactctcttatatattttaatttttattcagaagcatgatagctattttccattgaggttttgatttgctatttttatattc

SEQ ID NO: 94517 - DNA, 674 bp, Homo sapiens
tggagactgatggagggagggagggagtggaaagatgttggtcaaagaaaaagtttcagttagacaagaggaataagtttttgcaatctattgcacagcatagtgactatagttaatgcattgtatatttcaaaattgctaagagagtacatttcaaatatctcaccacaaaaacagataagtgaagtaatgatatgttaattagattaatttaattattccactttgtatgcatatatcaaaatatcacatcacaatttaccccataaatatatatacttattatttgtgaattaaaaatatttttaaaaaagaatcacatatagagttaaggggaggcaaaaggtaactttagaatggaggaatgtgacacacactacctctgccaagtggtcacagtcaacatgaacagtggtaaatyatgcctaaatcataataggtacccttgttatgacacaaaaatagcccctttacctctgtggttttcctccccaaaacccataaccccagcgtaacaatgagaaaaacatcagacaaatcccaatggagggatattctacaaaatacttgaccataatcctcaaagcagtcaaagtcatcaaaaacaaagaaagtctgaaaaactgtcatagccaagagcaacctaaagagatatggtgactaagtgtaatgtg

SEQ ID NO: 94518 - DNA, 1343 bp, Homo sapiens
ttgagttttaaaaaatggtttcagaatgcctttawcccatttccctaactaccagacctaattaatacacatattgaagaaatgttaagactatagttcctttccatgtctttgtgcaaatcatatacataaataaataagtagtgagtgggtgaacagagctgggttcattgcaggaatttaatacactgtatgttgatttatggctaagtagagaggcagaaagcaaatgaatcagcctcattgagttgaggaaggtgagacttgtacccactgttaggcactggagttaaaattctataatgattccaatctactgcatgaataggaagctccagtttgaatatatatgatgttcttgtattattatgacacgcttgtcttacatcctccactccagcagtgttttcccatgaagcctatcattgcatttacctgctgctgttccctgatacctggaactgcttatcatcctcatcatttgatgtcacattttcctttatgactttcactggtttaaactttataactcttacaatatctgttaaattttcttttttagctttattgaggtataatcgacagataaaagattgcacatatttaattcatacttcctgatgagtttggatataagcatacacacgtgaaaccagaaccacaaccaagatactaattatatgcattacctccccaaattttcttgtgtgtctgtgtttcccccaattttctctctattttttcttgatattatagatcaggttagcctggaaagtaacaatcttcaaagggataaaaaaaggaagttctgcaatttttttcccctcagcaatttgagtcattttcattgtttgggaaagccaacactgtaatagctcaagtgaataaaatgcctccctgtcatttacagaatctatgcctaagctcagagccctgatgagtcatgctgagtcactgtaggatgagtgtccgctccatctcagctgataccgctgaccgtttgtcctcataactctctaggtaaaggttgacttaacctagcacactgtaaagccacgtcatcctaggtgcagcctagcttcaacgtttccctccggcacatgaaactaatgaagtttccacttaagctctcagcctttgcaaagtgtcttgatgacccagcttttaatcatatgtaaatgtgtttttaaaagtcacctgcttatgcttttggaactatttgactcagtgactctctactcagtgaatgtttataaaagtgcaggaatgttggtcaccacccatcccttggtgtttccacggagaatgatgaaaatggtcagcagctgagaccacgcacaatg

SEQ ID NO: 94519 - DNA, 1343 bp, Homo sapiens
ttgagttttaaaaaatggtttcagaatgcctttaacccatttccctaactaccagacctaattaatacacatattgaagaaatgttaagactatagttcctttccatgtctttgtgcaaatcatatacataaataaataagtagtgagtgggtgaacagagctgggttcattgcaggaatttratacactgtatgttgatttatggctaagtagagaggcagaaagcaaatgaatcagcctcattgagttgaggaaggtgagacttgtacccactgttaggcactggagttaaaattctataatgattccaatctactgcatgaataggaagctccagtttgaatatatatgatgttcttgtattattatgacacgcttgtcttacatcctccactccagcagtgttttcccatgaagcctatcattgcatttacctgctgctgttccctgatacctggaactgcttatcatcctcatcatttgatgtcacattttcctttatgactttcactggtttaaactttataactcttacaatatctgttaaattttcttttttagctttattgaggtataatcgacagataaaagattgcacatatttaattcatacttcctgatgagtttggatataagcatacacacgtgaaaccagaaccacaaccaagatactaattatatgcattacctccccaaattttcttgtgtgtctgtgtttcccccaattttctctctattttttcttgatattatagatcaggttagcctggaaagtaacaatcttcaaagggataaaaaaaggaagttctgcaatttttttcccctcagcaatttgagtcattttcattgtttgggaaagccaacactgtaatagctcaagtgaataaaatgcctccctgtcatttacagaatctatgcctaagctcagagccctgatgagtcatgctgagtcactgtaggatgagtgtccgctccatctcagctgataccgctgaccgtttgtcctcataactctctaggtaaaggttgacttaacctagcacactgtaaagccacgtcatcctaggtgcagcctagcttcaacgtttccctccggcacatgaaactaatgaagtttccacttaagctctcagcctttgcaaagtgtcttgatgacccagcttttaatcatatgtaaatgtgtttttaaaagtcacctgcttatgcttttggaactatttgactcagtgactctctactcagtgaatgtttataaaagtgcaggaatgttggtcaccacccatcccttggtgtttccacggagaatgatgaaaatggtcagcagctgagaccacgcacaatg

SEQ ID NO: 94520 - DNA, 679 bp, Homo sapiens
tttgaataagaacgtgtaatctaggagtgtaaaattttccaatgataagactcattggttttgaagaagcctttggractagataagaattcagggaaaggttagcatagttcctctcaacaccgtttatatggtggattgttaaatatgtatgtttcctgtagtggtacattagaaatatttaattatatgataaatatgtgagtaggaaagaagctaggttcacagtgagccacatctaggccagctaaagaggatggcaatgaaaaatatctgtagtcaatgggtgtctaaaaatcgaatttaagagggaattgtttctgagcaaagaatgatacctgcaattagaacagatttcttcttccccgcaccttgctccccttcatacaactttggcataaccacgttcctcaaggttgtgatttttatggaagaataaaagagactgtatgacagagatatcttcaatctcaatctgaacctgtcataaccacaatccatttcactacaaaatctagaatgtttacaatactcttcaggaaactacagaatgaatgaatgtgtccaagcgtgtgagtattgcttctaatctttctcttctctgcaatcttttatcagcagcaacaacaaaaccaaacctacctatattagcccaaatactttattgtgtttggattta

SEQ ID NO: 94521 - DNA, 679 bp, Homo sapiens
tttgaataagaacgtgtaatctaggagtgtaaaattttccaatgataagactcattggttttgaagaagcctttgggactagataagaattcagggaaaggttagcatagttcctctcaacaccgtttatatggtggattgttaaatatgtatgtttcctgtagtggtacattagaaatatttaattatatgataaatatgtgagtaggaaagaagctaggttcacagtgagccacatctaggccagctaaagaggatggcaatgaaaaatatctgtagtcaatgggtgtctaaaaatcgaatttaagagggaattgtttctgagcaaagaatgatacctgcaattagaacagatttcttcttccccgcaccttgctccccttcatacaactttggcataacyacgttcctcaaggttgtgatttttatggaagaataaaagagactgtatgacagagatatcttcaatctcaatctgaacctgtcataaccacaatccatttcactacaaaatctagaatgtttacaatactcttcaggaaactacagaatgaatgaatgtgtccaagcgtgtgagtattgcttctaatctttctcttctctgcaatcttttatcagcagcaacaacaaaaccaaacctacctatattagcccaaatactttattgtgtttggattta

SEQ ID NO: 94522 - DNA, 679 bp, Homo sapiens
tttgaataagaacgtgtaatctaggagtgtaaaattttccaatgataagactcattggttttgaagaagcctttgggactagataagaattcagggaaaggttagcatagttcctctcaacaccgtttatatggtggattgttaaatatgtatgtttcctgtagtggtacattagaaatatttaattatatgataaatatgtgagtaggaaagaagctaggttcacagtgagccacatctaggccagctaaagaggatggcaatgaaaaatatctgtagtcaatgggtgtctaaaaatcgaatttaagagggaattgtttctgagcaaagaatgatacctgcaattagaacagatttcttcttccccgcaccttgctccccttcatacaactttggcataaccaygttcctcaaggttgtgatttttatggaagaataaaagagactgtatgacagagatatcttcaatctcaatctgaacctgtcataaccacaatccatttcactacaaaatctagaatgtttacaatactcttcaggaaactacagaatgaatgaatgtgtccaagcgtgtgagtattgcttctaatctttctcttctctgcaatcttttatcagcagcaacaacaaaaccaaacctacctatattagcccaaatactttattgtgtttggattta

SEQ ID NO: 94523 - DNA, 674 bp, Homo sapiens
tctgtaccctttacccagtttcccccagtgggaagatcttgtaaaaccatagtataatatcccaagcaggacaatgacactgatactgtcaaggtaaagagtgttcccatcagcacaaagatctctcatgatgccattttatagccacatctgtcctcccctcaccatccctctgcctaatccctcacccctgagagccactaatctgtcccccatttctataattttgtcattttaagagtgttttatgagtagaatcacatacataacaagttgaacaatttatataacactttgttaccttttgtaaccttctgggattggcttttctcacttagmataattttctcaagaatcatccaaggtgctgtatcaatgggtcatttacttttatggctgaatagtactccatcatatggatatacaatggtttacttaaccattcaagcaccaaaggacatcaagggttgtttctacttgtggctattgttccagtttgtggctcttacaaataaagcttttataaacatttgtgtctaattttttgtgtaaacctttcatttctctaggaaaatacatcaagagtgcaattgctaggtcatacaacagtagcatgtttagtttcataagaaactgtaaaactcttttcagagtggttgtaccatgttacattt

SEQ ID NO: 94524 - DNA, 567 bp, Homo sapiens
tgartgaaaattaaggaaatagcaacatgttttaaaataactcagtagggaacaggatgtgagaaactgaacatctttttaacacttcttaaacttccatttgtattagtgtaataacaaaaagtagacattaatcctattaagatgacacctttaaccatttttattcataaatctgaacattaggtaatcggattttaggcaagaatcagtttactttatttaaacaaatatatactaagtaaaatgtgtcaggcattatggtaaagggaataaaacaagcataatgaccttagagaagaagaacatgaattacattctaatgaagaatctgaacccctggaaagctgaaaatggtcattatctttgtactgtcagcacccagctaatatctggcacattactaaatatagcagaaaatgacacatttgttgaatgaattgatcaattccaggtacatggcttatgagaaaagattatgttggcaatctcatgggtagagaacatgggttcagggaaccttatactctttagcagcactgcagtttgatccatagcttcccacag

SEQ ID NO: 94525 - DNA, 567 bp, Homo sapiens
tgagtgaaaattaaggaaatagcaacatgttttaaaataactcagtagggaacaggatgtgagaaactgaacatctttttaacacttcttaaacttccatttgtattagtgtaataacaaaaagtagacattaatcctattaagatgacacctttaaccatttttattcataaatctgaacattaggtaatcggattttaggcaagaatcagtttactttatttaaacaaatatatactaagtaaaaygtgtcaggcattatggtaaagggaataaaacaagcataatgaccttagagaagaagaacatgaattacattctaatgaagaatctgaacccctggaaagctgaaaatggtcattatctttgtactgtcagcacccagctaatatctggcacattactaaatatagcagaaaatgacacatttgttgaatgaattgatcaattccaggtacatggcttatgagaaaagattatgttggcaatctcatgggtagagaacatgggttcagggaaccttatactctttagcagcactgcagtttgatccatagcttcccacag

SEQ ID NO: 94526 - DNA, 711 bp, Homo sapiens
tgaaaaggcctctggcaactatatttgcacacttactttgctgatatttcttgcagattccattagtttgcatttaaaacacgagaaaattaggagcaaagtgtaggcctaaatattttccctccaacttctcattctatggtgcgtggttggtacttgaatgggcagtgcaagctgaagtccctgagaggcgcccaagaatggacagagcatcagtgacatcttcagctgaccagcagttaacaaccacttgtgaattggatcatctgacactgataacaccytgtgttcctagaaagtggggactctgataggtacatggtaataacaaacaacttggaagtgttccccatttccttgaaaatggatagtattgaatgattttgaagtcgcaaaaagaggttggccagccaagtgaggtgctaaatctgtattacctgcaagtacagagatacgtttttctaattatagtttagctctccatcacctggtggcccctcttgtgatctcaataagcagggataatgtgagagcatattacaggagggtattatagatgttggaaagagaatatagaaatgactcataaactccttgaaggtaaaatgtttttttgagttaaatggacctaatgcaaattgcaccattgagtcaactggtcctttgatcctttttaggcatagaaacccagcaatttgcctctgggcaaag

SEQ ID NO: 94527 - DNA, 545 bp, Homo sapiens
caactctatgtgtatcaattccatgtgtatcaagtaacataatttaagccaaaggtatttccttttttaaaaaaaaatcagagacaaggtctcactgtgttgcccaacctagagtgcactggctatttgcaggcacaatcacagcatactgcagacctgaactcctgtgctcaaatggtcctcctgcctagcctccctagtagttgaaagtacagactggtgtcatcatgccaacaaaagatatttcttacaactaaaaatgccaggcatattaagaaaaatctatttctttatttttgatctccacataagttacatacagattaaaaaacgattttaaagtcattcaaatggagaaacaataatgagtaaattttacaaraagagttgataaatagagaaaaacatgcttaactatacattacagtaaatatgctctggagtgtgggtatatggggaaaaaaacctaaagaaaaatacaacaaaccattaccaacagttatttccaggagatggaattctgggcatttcatttctgggttgta

SEQ ID NO: 94528 - DNA, 655 bp, Homo sapiens
tactgggtaggggactgggagatggtctggcctgactttactcaataaagtggaaaattacctcctttacctctgcaacagccagtccaggaagacagacaaggacagggctttggggttcttacagggaagaggttgctaagtagttctctcctccagcttctggctcagtgaaatagatggccactttatgaacacataccaggagggggatataacagaggcagaarggaatatcaaagactctcttggcttatctaaaatattcacagagaaagccgtccactggttaaggctggttaaaaataagttctccttcaacaagcaacataagggaagaaatcattctggaggctgacagagagtcgtaaaaggttgagggcaaataaacctaaggcctcagtgctagatgaaatggggacctcacctagctattgtgtattgaggattaattcttaagagccatttttattaagtcttatttgtaagactagtatttgatttatatcaaacttataaatgaaaggggaaggaatagtgtgaaaggaatccaaacctacttcagagttcttaaccttttagaggaggcaaatattgtaccctgattttatagggcacatatttttgggagattactagacccctcatctcaggt

SEQ ID NO: 94529 - DNA, 781 bp, Homo sapiens
ttttcatagaagctaccctggggaaaaaataaacacactgcagagaaacctctgtatcattccagtgcccaatggtcataccaatgacccaagtacataatgtgagatcgtgggtaatgactgcaggatctctgaggcaatcattcaagtttagaggaacttgttttgaataatggtccgtgtatatttgctgacaaacactgacgttatggctaccattcgtggtggcacagatgctcccttcttttgcattcttagtatgaatgaacactgtctgtaaacatggacttcttttgtaaattcacaaagctttagaagcaaaagaaattatttcttaaaaaataacaaaccttcaatggttgcaatttcatttctgggtgggccacttaatgcctccaaatacagcaagttccttctgagcatggttcactgtttttaccaccaacgtgctaaatgccatttcctttccttgcacacatctatcaaaactctctaatatcctcagaactaggttaagtgctcctataatacattctcaacrcaccctgaatgtttcattcaaagtgttccttccagttaataattgtagaattattggttacatgaatgcctccactgccagattacagattgcatagagcagaaacaccatcattaaggcttagcataaaacctggcacttagtagacttaaatgaataaatgattgactcttatgtgatacttataattcagtacaaccacatttcttaccctaaaccactaacaagaagtgaccaatg

SEQ ID NO: 94530 - DNA, 689 bp, Homo sapiens
agtttcagctttctacatatggctagccagttttcccagcaccatacatatgtaacaaacctgcacgtgtgcacatgtaccctagaacttaaagtataataaaaaaagaaagaaacattttgaatagatataagaaaatgaagatttactgtattcagctgaacaaaaagttaagtccacagccaagaaatatgattaagagatatatttttgtgggcaaagactcttagttcagtatgcttattagtaatacacacacacatatgcacacacacatacacacatgtaaaatgagcatattctattttattttgagaaaagaataaaaatcacagttaaaaatgtataccaaagtatttacctctttattttaatcaagtgattagaaaatacatgaaaaagtaatacatggggcagatragtgtggtgaaaagagagttgctttggattagagttgagaattctggcctcattttgagtgaattgggtattattccaaacttatatgagtgttagcattcccgtgtgtgtgagtattgccgacctgcggggatgggtgaagtggagtgcctggccgcatcagttgtgcccactctgtgaacatggactttaaggtcgctcttcatatgtggtttgtagcaatatctgtttagggtttattttcaatttgttttggtcccaacttccaa

SEQ ID NO: 94531 - DNA, 653 bp, Homo sapiens
agttaaactaaacagaaaggaaacaattttttcttgtactggaaaattactaatacagctttgcttgcacctagcatagatataacacaagataaatatattaatatataattcattctaaccacttccagtgactgaagtaaaccacacttgacacatttgaaaagcttaaaaaaaaaaaacctaaaatctataagttaatttctattacactaattttaaaaacttactagtggtaattaaaaggtattagtaattcttccagttatttattacattctgattgaatgccaaccaagcactcactgagtactgcagtgccaataataaacagaaggaagagaggtggatcctgcctcatggggcttttagtgtaagatagataaattgatagcagagtggttacaagaatacctaattgtaaaaattcaacttaagtgaaatacaaataacgctatactcaataaaggagactttaaaatacagaggaaaatatccattttcttatttttattgacgtagaagcaaatggcttttaaggacagttggatgctaaatttactgaagctggtaagtatactgtggtagcataagcsatatcctctttcaggaaatacacattaaagtatttaggagtaaagggatattacgat

SEQ ID NO: 94532 - DNA, 1039 bp, Homo sapiens
aacaacttaaatgtcgtaatatatggcattagcaatattcactggataaattcaatgatattttgaggccatatatctttcaacatagattatattatggaaaatgcctataaaactttttttttaaattgcatatacgcaagtagaaaatcatctagagtgttatacaacaagacatcaatttaaggattacttggaagcagacattatattaacagttggcttcaagtttgtctctattttttgtaatcagcttatgttacttttgttctttgagttatttttgaatcatttattctaaaaatatttatgtgccatgtattgttataaggataccattagtgaaaaaaataaagatcactgcccctttggtgcttacatggtaagagatgagaggaaaaacatacacagtgaaaaggctagctctcctcccaccccataaccacttttatcagtttcttgtgtgtccttccagagtttctgcatgtaaacaaagataaatgcaaacaaatattattttcccctgcactaatcacatactacatgtattatttcatatcttgtatttttcacgtaatatatctgaaagagccttccatcagtaccttactctttttttttttttacagctgcacactactagatcaatgtaccatatttaagtaggtctctgttggtggatatttgagttgttcctaatcttttgctattataaaaaatactcccaaaataaactagtacattgtcattttgcacaaatgcacgtaggattgctgggtcaaagggtgatgttatttgaaatttggatggatattaccacattcttcataggagttgtaccaatttacacttcaaccagaaaattttgagacggtctgtttccacataacctggaaaatggatttttctaatctgataggtaagaaatagcatgtcagtgaagttttaaactgcaattttcttattagasttaaactgtgcattttaagctatatttaagagctatgtgatacccttttaagtaacctttaaaattgtg

SEQ ID NO: 94533 - DNA, 1266 bp, Homo sapiens
ttttcaattcttagcacattttgtgatgaataagtgatgatagaaacaggattttaaaaatatattataatgaaatgtgtcaacgtttaggtctccatgttatatagatgttataaaatcctgatggagaaaaacatccattcaaaaggcaaaactgatcaatgaactttaatgtaatcaagcacataacaaattaagcaaagttatttgatattatttcagataacacatcacaacgaacctttaagaaattattaattgtcaagttttggtgtagtatcaaagaatattcacaactatctaaaaaaaagctattaaaatactgctgctcccttttccaagtgcttgtcaatcataccccaatcgaaacgataaattgcagtaaattgaacacagatatgagaakctattaagctaaatgttaaagagatttgcaaaccaatggtactcttctaaagcattatttttttatttggataaactacagaaaataaagactattaaaaattttttaatatgaaaaaagagtaagagaaaagataggaaaagaaaggaaagagtgtccaggatcccttcccatttataaccacagacaacatcttgatatatttcattttagacactatgtttcttagcttggacttaaaaatgtttgttctccttcctcctgaaggtgtctccagtagctgccatcaattgattaggggaacagacagggaatgatcccgtttttcaagcaagcatgcccacacgtgttataacctcaggttagagtgatagatgataactatgcatagacctgagaagcatgaatgttgagtatggcaaactcaatttaactaatttgtgctcgagcacattaaatgaatttaaagctttactctgcaaacttgctacatatttttgccactactctcttgctatatatactctcaacttgcacagagtgtccggagagtatcccacacgactcccttctgtcttttcatgcatttttccatctctatagcacattgactcttcttactatctcctcccccgccctgcctcacatattcctcacttacactttccacacacacactttctttgtagtcagggaaatcttcatagactccttttctttcattccttctaggcttccagaggctcattacgggtgggggaagaggattggtgttttcctttgtttcatacccaaaaggggaaggtaggtagaaaaggaatccacgagggagggagggagagagggagaagggaagggag

SEQ ID NO: 94534 - DNA, 984 bp, Homo sapiens
accaccaaaatgtgtgtcctttgtcccaaaagtaactacttactgacataaattaatttggtgatgagaagtaaaaatcaaaaacattagaaaagtcggccgggcatggtagcacacgcctgtaatcccaacactttgggaggccgaggtgggcaaatcacctggggtcagaagtttgagactagcctggccaacatggcaaaaccccatctttaccaaatatatatataaaatagctgggcatggtggcagatgcctgttatctcagcactccggaggctggggcaggagaatctatcgaacctgggaggcggaggttgcagtgagctgagattgcaccactgcactccagcctgggcaacagagtgagaatctttctcaaaaaaaaaaaaaaaaaaaaattagaaaagtcaaatcaatgaaccttttcctgtttttcctctgaagtacagaataaaagctaccttcctggttttactatgtccaggtaatttatcagacttaaataatcaataggcacaaactgatgtcaattcatacaactagattcaaaataccaaaactggagaaaccagagattactatatcctactcatattttacagatgagagaaatggtaagtgacctactcaaagttacaaggctaataaatccttaagttataccattcaactagggtacgtctctttcagattgcytcacactagccagtggaaggaactgttttgtagttggagtaataaaccttgatccaatggtctaaccaggaaactaatagtcagaggatgtatcaagctttttctttttgtatttttagtctcaattgaagaattgacccaattgggagtatgtgtcttggagggagggaacgtggttacagagacgaagtgatggtacgatctttatatactcatagaaccgtcgtttggctagcagatgcaaagtttgatggctttatgatttccaactgagtaacttaatgc

SEQ ID NO: 94535 - DNA, 984 bp, Homo sapiens
accaccaaaatgtgtgtcctttgtcccaaaagtaactacttactgacataaattaatttggtgatgagaagtaaaaatcaaaaacattagaaaagtcggccgggcatggtagcacacgcctgtaatcccaacactttgggaggccgaggtgggcaaatcacctggggtcagaagtttgagactagcctggccaacatggcaaaaccccatctttaccaaatatatatataaaatagctgggcatggtggcagatgcctgttatctcagcactccggaggctggggcaggagaatctatcgaacctgggaggcggaggttgcagtgagctgagattgcaccactgcactccagcctgggcaacagagtgagaatctttctcaaaaaaaaaaaaaaaaaaaaattagaaaagtcaaatcaatgaaccttttcctgtttttcctctgaagtacagaataaaagctaccttcctggttttactatgtccaggtaatttatcagacttaaataatcaataggcacaaactgatgtcaattcatacaactagattcaaaataccaaaactggagaaaccagagattactatatcctactcatattttacagatgagagaaatggtaagtgacctactcaaagttacaaggctaataaatccttaagttataccattcaactagggtacgtctctttcagattgcttcacactagccagtggaaggaactgttttgtagttggagtaataaaccttgatccaatggtctaaccaggaaactaatagtcagaggatgtatcaagctttttctttttgtatttttagtctcarttgaagaattgacccaattgggagtatgtgtcttggagggagggaacgtggttacagagacgaagtgatggtacgatctttatatactcatagaaccgtcgtttggctagcagatgcaaagtttgatggctttatgatttccaactgagtaacttaatgc

SEQ ID NO: 94536 - DNA, 1338 bp, Homo sapiens
attttgtgcaaaaatggtcatttctagggtatctttaaacttcaatctttgtatttctctgcttgatgcaaggatcagacctgccttgagctttcaccaggttctgcttctctagcatccaaatataggtaggtatagatgtcatcttctggaagaaggcttctctacttagcaggtaacaaaggtaaaaaaattattcatatacccttaaagctaaatcatccttgaattctttagtaattagcaaaatcttgttaatcctttgcataaacacagtctagttgtatttttaatacatttaactaataatttgtttcaaatatatgcaaaaaaagatasaagttcttgctatacacttttctttctctaggacctcttcctaaatcttactatccatacagtaaaggctgtaacatttataactcaaatcctgaccttacacatgaataccagacttcatctgattagctacttgacattcccactgggaaatctaaaaagcacctaaattagtaaccaagttcaaaatagaatgatcgatttctccgaacttgcttctcttcaagtttttctcatctcagctagtgaaactaagccagatgctaaagacaaaaacctaggaattaccctcaattatttttttccttcattcctggatcctaggttgcaggtccctgttaggaaagcatgaaaggagatttttgttcaaataacttattagggaccactctatttcaatggttctcaacttgagcatgcatcaaaatcacctggagggcttgttagaacacaaagtcctggaccccatcatctccagaatttctgattaagtaagagtgatggttaattttatgtgtcagctcaactaggccatgtgatgcacacaaacttggttaaacattatttcagggtgtctatgagggtgtttccagaagagcttagcatttgaattggagagagtgagcagatgaccctccccaattgggctagcatcatctaatccattaagggccttaatagaacaaaaagaagtaagaaggttgaagattctttctacctgactgacaagttggtacatcaatctcctacctcaatgttcctgattctcaggccttcagactaaatgaatagctttccaggtctccaacttgaagacagtgtgtcatgggacttctcagcctccataatcaagtgaacaataccttatagtaaagctctgtctctgctctcctactatgtatatatgtttctaaaaataatcatgtgagatttactttcccttactaaactcatgactaaaggaaaaacaagaaattatgtttgaaaggaagcaatggt

SEQ ID NO: 94537 - DNA, 1338 bp, Homo sapiens
attttgtgcaaaaatggtcatttctagggtatctttaaacttcaatctttgtatttctctgcttgatgcaaggatcagacctgccttgagctttcaccaggttctgcttctctagcatccaaatataggtaggtatagatgtcatcttctggaagaaggcttctctacttagcaggtaacaaaggtaaaaaaattattcatatacccttaaagctaaatcatccttgaattctttagtaattagcaaaatcttgttaatcctttgcataaacacagtctagttgtatttttaatacatttaactaataatttgtttcaaatatatgcaaaaaaagatacaagttcttgctatacacttttctttctctaggacctcttcctaaatcttactatccatacagtaaaggctgtaacatttataactcaaatcctgaccttacacatgaataccagacttcatctgattagctacttgacattcccactgggaaatctaaaaagcacctaaattagtaaccaagttcaaaatagaatgatcgatttctccgaacttgcttctcttcaagtttttctcatctcagctagtgaaactaagccagatgctaaagacaaaaacctaggaattaccctcaattatttttttccttcattcctggatcctaggttgcaggtccctgttaggaaagcatgaaaggagatttttgttcaaataacttattagggaccactctatttcaatggttctcaacttgagcatgcatcaaaatcacctggagggcttgttagaacacaaagtcctggaccccatcatctccagaatttctgattaagtaagagtgatggttaattttatgtgtcagctcaactaggccatgtgatgcacacaaacttggttaaacattatttcagggtgtctatgagggtgtttccagaagagcttagcatttgaattggagagagtgagcagatgaccctccccaattgggctagcatcatctaatccattaagggccttaatagaacaaaaagaagtaagaaggttgaagattctttctacctgaytgacaagttggtacatcaatctcctacctcaatgttcctgattctcaggccttcagactaaatgaatagctttccaggtctccaacttgaagacagtgtgtcatgggacttctcagcctccataatcaagtgaacaataccttatagtaaagctctgtctctgctctcctactatgtatatatgtttctaaaaataatcatgtgagatttactttcccttactaaactcatgactaaaggaaaaacaagaaattatgtttgaaaggaagcaatggt

SEQ ID NO: 94538 - DNA, 1338 bp, Homo sapiens
attttgtgcaaaaatggtcatttctagggtatctttaaacttcaatctttgtatttctctgcttgatgcaaggatcagacctgccttgagctttcaccaggttctgcttctctagcatccaaatataggtaggtatagatgtcatcttctggaagaaggcttctctacttagcaggtaacaaaggtaaaaaaattattcatatacccttaaagctaaatcatccttgaattctttagtaattagcaaaatcttgttaatcctttgcataaacacagtctagttgtatttttaatacatttaactaataatttgtttcaaatatatgcaaaaaaagatacaagttcttgctatacacttttctttctctaggacctcttcctaaatcttactatccatacagtaaaggctgtaacatttataactcaaatcctgaccttacacatgaataccagacttcatctgattagctacttgacattcccactgggaaatctaaaaagcacctaaattagtaaccaagttcaaaatagaatgatcgatttctccgaacttgcttctcttcaagtttttctcatctcagctagtgaaactaagccagatgctaaagacaaaaacctaggaattaccctcaattatttttttccttcattcctggatcctaggttgcaggtccctgttaggaaagcatgaaaggagatttttgttcaaataacttattagggaccactctatttcaatggttctcaacttgagcatgcatcaaaatcacctggagggcttgttagaacacaaagtcctggaccccatcatctccagaatttctgattaagtaagagtgatggttaattttatgtgtcagctcaactaggccatgtgatgcacacaaacttggttaaacattatttcagggtgtctatgagggtgtttccagaagagcttagcatttgaattggagagagtgagcagatgaccctccccaattgggctagcatcatctaatccattaagggccttaatagaacaaaaagaagtaagaaggttgaagattctttctacctgactgacaagttggtacatcaatctcctaccycaatgttcctgattctcaggccttcagactaaatgaatagctttccaggtctccaacttgaagacagtgtgtcatgggacttctcagcctccataatcaagtgaacaataccttatagtaaagctctgtctctgctctcctactatgtatatatgtttctaaaaataatcatgtgagatttactttcccttactaaactcatgactaaaggaaaaacaagaaattatgtttgaaaggaagcaatggt

SEQ ID NO: 94539 - DNA, 692 bp, Homo sapiens
tcctacaatgcactctacatgcattagtcagagtgttgttttttttttaagcagaaaacaagttatgtcacctctgattctccatgtacttagaagaaaatcaaaccatgattccacagccaacaaggtcccagatttttctggctgaaggcatttgcaactttctatttcttcttcttaaaagcttttcctccaccatcactccaagtcttaccattacctttcctactctgagatacagatgaatgactacttctcctcattcaagtctcaacctgaatgcctttttcacrgagacctgcagagatcattctacctaaatcagcttccacacccagtcattgtatcatattttcctgcttttttttttcatcatagcatctaacctttcagaaggtagcaggtttatttatgtttccctgtttatcatttctccttcctgagaatatgagttctacaaattcagacttcattttgtagttcactgctgtgtttcctgcacctggaagaatgtgtttggcacattgcagatgttggacaagaacttttgaataaatatgttaatgatgttcatggtttaaataagaataatattttactttttagcctccaattgttctacttgcgatagccagatagccagatttttagtcattttattttaggccctgcgtgagcagtttggactagaa

SEQ ID NO: 94540 - DNA, 626 bp, Homo sapiens
actggatcagaagttgcctggaagaagagagggccattatcagagtataagagtgtgaaacttatctggtaggaaaaaaaaaagagtaactgctgttcgtttaatagagcacacatcctctgcaattcaggtgggaggttgtgagcttcttaagtacagaagctgcctcttgatttcagcatagcgaggaggtgctgaagagcgcaggtttggagaatgatcacctggattggaaccatagctctaccaatatgraacccagctccttaggcctcggtcttctcatggagaacatggtgtgataatcctactcctctgggagggtggctgttaaggtgagtgattgcacacgagtccctctagctgatgttaccgagcggtccttgtttttagagctcccaagagggtggcgggccacttccaagatggcggcaagcctcttgttctctgacctggggttcttggcctcacagattccaaggaatggaatcttggggcatgtggtgagtgttctcattaggacaaacccaggcacttagacatgcgggaacaatggcgagcctttagcccgaatgggagcggcaatgggtgcctcgctggatcaggagcacagcggacacactgcc

SEQ ID NO: 94541 - DNA, 740 bp, Homo sapiens
tcagtgtccactggggagggctgcccaggagaccttgggtggcgtcaggtcatcactgcccttccatccagggcacaaagctgcctggagactgagcaccgcctgaggctggcacgagggctggcctcacacacgtgacactcctcacacatggcacccctcacacacggcactcctcacacacacggcactcctcctcacacacatggcactccccatgcatgtgacactcctctcctcctcacacacacatggcactcctcatgcacatggcagtcccgaccccaccagaaaggcatcgagactccatcttaccctcagggaaactggcactcagtgaggcccagggccaggctgcactgcagctgagggctggagatctacacacccraaggctttgctttcctcctcgcgctccatggcctccagttggggcacccatggaccaccttgctcccaagccaacctgatgtggggaagcagcaatggagaaaagagaatagactggcaacaggaagacttccccaaaggacccggaggggcctctctgggagaagcacccttcccttccggggctgtatctgaaggggaagtgctctcttagctgcaccctccaccatcccctgtgggccgcagggaggtggggctcctgcctgggctgcttcccccaagggaaagcatctgataaggtcataacagccccttctccagcctctcctggggagctccaaggatgacct

SEQ ID NO: 94542 - DNA, 573 bp, Homo sapiens
gacattttttacagtgatctaaagttaggagcctgtgtgcaggagcttcggagactgctggaaaaggaatgaaaaaggcgggtaagtagtatcaacgtgtaaatgatgtccctgttgtccacaggcctaatggcacacctgtgggacatcagtgtcagttcctggagtgagtcacgtccctgaaaaatrcagcacatcgtgaaaaaccagccatcagcagggtgtgttctgacaggtggataatgacccccaactggacatgactttggagtttggccagtggggcagatacagtggtgctgatgtggctaactgcctggtgtatcagagggcacctgctggggaaatgccctgggcatggtgataggggctcccaggcagaggaacccccagctgtcagggggctctgagctgaccaggtgacctgaggctgggggatgagggggacctcagtggtgtttctgatctataggcacctgcacctgccttgaagctctgctttaggctgatcttggaggccctgaagggcctatggacaagggctcccaggtggaacaggggagaggaaggggt

SEQ ID NO: 94543 - DNA, 674 bp, Homo sapiens
agccatctcctttatgatgtgagttctgagcgggccaaatgagctctgagttctgagagcccttgccttgtggaggaagcatggaggtcggaggaaggagacatttaggtaacggtgtcctggcaccctctgtgtttccctgatttcacagactgctccgtgaagccttgcaccaaacagctgcatctgaccttggcccacaagttctacccccaccaccagaggacgctggagcagctggccagagccatccccctgggccacagctgccagtggaccgcagcactctactcccgagacatgcgctttgtgcactaccaggtgagagagctgagcaggggctcataagaagcagatgaatgggctgggctcggtggctcacgcctgtaatcccagcactttgggaggccgaggcggcggatcatgaggtcaggaratggagaccatcctggctaacatggtgaaacctcgtctctactaaaaatacaaaaaattagccaggcacggcggcgggcacctgtagtcccagctactcaggaggctgaggcaggagaatggagtgaacccgggaggcggagcttgcagcgagtggaggtagcatcactgcactccagcctgggctacagagcgagacgtctcaaaaaaagaagcagatgagtgaacggccactcacc

SEQ ID NO: 94544 - DNA, 696 bp, Homo sapiens
gcctcctcactctccaaacccaacctcgaggttcccccgccgctgcgcaccctgggaagccctttctcaccaggagctctcaccccaatatcattctctccctcctcctccaactcctccgagcccaggtccgacatggtctcgccccagcctggatcacagccgcagcgcctctagcargtgggtagcaaccgcctccaccgccgcgtcccgcgtcgccatggagacgcggccggtcccgcctccctcccagcccggaagatggggagcggggacaggcgacgcggacgaagcgggaggagccactggcagcctttgcgtactgtcatagcaacgggaagggcacctcgaccaatcaccgcccgggaatacggaggggcggggcggaagggacgaggtggagccagtggcagcactctggtgccgtcatagcaacgaggggccgcttcggccaatcactgctcgggaagcgagggggcggggactgggcagggcctgagcgggttctgtgcctggctgcccaccggctctctgacctggacctcgccgtcgctggcccctgaaatccatcacttttgtcggctgttctgtgacgccacaacgaggagccacctgggtactgggccctcaagaggaaggacgcgggaaacgcgtccgggccaactctcgagagggtttcacccctgcccagtgcgg

SEQ ID NO: 94545 - DNA, 542 bp, Homo sapiens
taaagtcctaggtcgtattattagttttctatgactgtataataaattaccactaaaacaaagtgcaattattatcttatggtatttatgggttgagagtcagagtccagcttcactgggtcctcagctcggggtctcaaggctgtaatcaaggtgcctgccagggctgggctccccastgaggcttcacaccctcgcctgagcatacacagttgttggtgggagtgatttccttgaagctgtagggctcctggtgagttgcttcttcatcagctgaagaatctcttaattttagcaccttttagcatcatctggtgaggctaaggattttcagaatcatcagatactggttcttttttgttcgatgttcttccctcaatttatctctttcctctcccgcttcactataaataacatgaagaaaccaggtgatacacttaacactttgtttggaaatagccttagctatgtgaccaacatcatcgcttacaagtcctgctctccatggacaatttcattaaactctctggcacacatgggaa

SEQ ID NO: 94546 - DNA, 1387 bp, Homo sapiens
ttggccagcagcgactctggcacctggagcacacctgaagagagcccccaagctctcgcctctctccagccctgctatccaaccagatgttcccactcctgctcctccctgcctcatcgcctcagccgcccggggtgagccacctactctcccaaggcaagacacagccggcatgcttcacacactcaccttgaagttcagggttggaaggtcagtccatccagctgaagttcactgctagagatgtaattgaatcagccctggcaggagcatttggaccacaggaataggtaaacacggctgcgagtcagcccctccagggctcactgctaagagggcacatcgtgtcctccagaatgaggactaagatgctgcaagtgacgtggacccatcgacaggccacatgattttacaacggtgggcccgaggcacagagactctgtccgaggtcaccatgagtagaggacggaactgagctttaactcagatcccagtggaattccttcggatgaagcgctgytgttgtttatcagcattgaataactaatgtctcatttgctgttggaaattatttcctgcaatctcctgaatgtgtgtgcagccgctgtctgccggcgcgtggggggttcttcatgaaaagtgagaggggtccagctgtgtgaaaggcctttgcaaattgccacagcaaactcccagaattatgatgtacttcttcctgtgtggttccaagtaaatgccacttccggctgtccagtaccattttttcctaggacttaaggccacaaaaatggattaagaaacacacatgtatacatgcaatcttcctggtgaagtcttcaaacaaagttctccaagaagtcattaaaaaattaatcatctggaaatgtcatgtttctccttctctctccaaaatgtatttctttcaaccattaactcattctctttcattgtgtcccatagtgagacaaaactgtgttaggacaataaaccaagcaattttccaaagaagctatagcacgaaagcaacgtaaatcccgaaggagaaacgcctgcgaatgagctcaccgaaggcacactctcctcccaggagcctccccggagaggcagcccgtttatttgagttagtgattttggaagacacactgcactttctttgcctccagctatccttgagccattttgttctccttgcgaggtactgatagcacttattatctagaaaatataaccagactttgaggagaggcaaggggccctataaattatttatttttttgcttctcaaactctggaccgaggaccaggattacaggcattgcctggaagcttgttacaaatgcagggcctcaggcacccccgtctccgtgtcagcagctgtgtcttagca

SEQ ID NO: 94547 - DNA, 1387 bp, Homo sapiens
ttggccagcagcgactctggcacctggagcacacctgaagagagcccccaagctctcgcctctctccagccctgctatccaaccagatgttcccactcctgctcctccctgcctcatcgcctcagccgcccggggtgagccacctactctcccaaggcaagacacagccggcatgcttcacacactcaccttgaagttcagggttggaaggtcagtccatccagctgaagttcactgctagagatgtaattgaatcagccctggcaggagcatttggaccacaggaataggtaaacacggctgcgagtcagcccctccagggctcactgctaagagggcacatcgtgtcctccagaatgaggactaagatgctgcaagtgacgtggacccatcgacaggccacatgattttacaacggtgggcccgaggcacagagactctgtccgaggtcaccatgagtagaggacggaactgagctttaactcagatcccagtggaattccttcggatgaagcgctgctgttgtttatcagcattgaataactaatgtctcatttgctgttggaaattatttcctgcaatctcctgaatgtgtgtgcagccgctgtctgccggcgcgtggggggttcttcatgaaaagtgagaggggtccagctgtgtgaaaggcctttgcaaattgccacagcaaactcccagaattatgatgtacttcttcctgtgtggttccaagtaaatgccacttccggctgtccagtaccattttttcctaggacttaaggccacaaaaatggattaagaaacacacatgtatacatgcaatcttcctggtgaagtcttcaaacaaagttctccaagaagtcattaaaaaattaatcatctggaaatgtcatgtttctccttctctctccaaaatgtatttctttcaaccattaactcattctctttcattgtgtcccatagtgagacaaaactgtgttaggacaataaaccaagcaattttccaaagaagctatagcacgaaagcaacgtaaatcccgaaggagaaacgcctgcgaatgagctcaccgaaggcacactctcctcccaggagcctcccyggagaggcagcccgtttatttgagttagtgattttggaagacacactgcactttctttgcctccagctatccttgagccattttgttctccttgcgaggtactgatagcacttattatctagaaaatataaccagactttgaggagaggcaaggggccctataaattatttatttttttgcttctcaaactctggaccgaggaccaggattacaggcattgcctggaagcttgttacaaatgcagggcctcaggcacccccgtctccgtgtcagcagctgtgtcttagca

SEQ ID NO: 94548 - DNA, 1387 bp, Homo sapiens
ttggccagcagcgactctggcacctggagcacacctgaagagagcccccaagctctcgcctctctccagccctgctatccaaccagatgttcccactcctgctcctccctgcctcatcgcctcagccgcccggggtgagccacctactctcccaaggcaagacacagccggcatgcttcacacactcaccttgaagttcagggttggaaggtcagtccatccagctgaagttcactgctagagatgtaattgaatcagccctggcaggagcatttggaccacaggaataggtaaacacggctgcgagtcagcccctccagggctcactgctaagagggcacatcgtgtcctccagaatgaggactaagatgctgcaagtgacgtggacccatcgacaggccacatgattttacaacggtgggcccgaggcacagagactctgtccgaggtcaccatgagtagaggacggaactgagctttaactcagatcccagtggaattccttcggatgaagcgctgctgttgtttatcagcattgaataactaatgtctcatttgctgttggaaattatttcctgcaatctcctgaatgtgtgtgcagccgctgtctgccggcgcgtggggggttcttcatgaaaagtgagaggggtccagctgtgtgaaaggcctttgcaaattgccacagcaaactcccagaattatgatgtacttcttcctgtgtggttccaagtaaatgccacttccggctgtccagtaccattttttcctaggacttaaggccacaaaaatggattaagaaacacacatgtatacatgcaatcttcctggtgaagtcttcaaacaaagttctccaagaagtcattaaaaaattaatcatctggaaatgtcatgtttctccttctctctccaaaatgtatttctttcaaccattaactcattctctttcattgtgtcccatagtgagacaaaactgtgttaggacaataaaccaagcaattttccaaagaagctatagcacgaaagcaacgtaaatcccgaaggagaaacgcctgcgaatgagctcaccgaaggcacactctcctcccaggagcctccccggagaggcagcccgtttatttgagttagtgattttggaagacacactgcactttctttgcctccagctwtccttgagccattttgttctccttgcgaggtactgatagcacttattatctagaaaatataaccagactttgaggagaggcaaggggccctataaattatttatttttttgcttctcaaactctggaccgaggaccaggattacaggcattgcctggaagcttgttacaaatgcagggcctcaggcacccccgtctccgtgtcagcagctgtgtcttagca

SEQ ID NO: 94549 - DNA, 723 bp, Homo sapiens
tggggagctgtggctcagacctctggtttctgcgcctcctcactctccaaacccaacctcgaggttcccccgccgctgcgcaccctgggaagccctttctcaccaggagctctcaccccaatatcattctctccctcctcctccaactcctccgagcccaggtccgacatggtctcgccccagcctggatcacagccgcagcgcctctagcargtgggtagcaaccgcctccaccgccgcgtcccgcgtcgccatggagacgcggccggtcccgcctccctcccagcccggaagatggggagcggggacaggcgacgcggacgaagcgggaggagccactggcagcctttgcgtactgtcatagcaacgggaagggcacctcgaccaatcaccgcccgggaatacggaggggcggggcggaagggacgaggtggagccagtggcagcactctggtgccgtcatagcaacgaggggccgcttcggccaatcactgctcgggaagcgagggggcggggactgggcagggcctgagcgggttctgtgcctggctgcccaccggctctctgacctggacctcgccgtcgctggcccctgaaatccatcacttttgtcggctgttctgtgacgccacaacgaggagccacctgggtactgggccctcaagaggaaggacgcgggaaacgcgtccgggccaactctcgagagggtttcacccctgccca

SEQ ID NO: 94550 - DNA, 1005 bp, Homo sapiens
gtggggtgggaggccctaattgtttcagggaagtgtcccagcttggaagtggattcttgcaggggctctggtctggtggagaaagtggagaaggcagcctggggacgtggctgggtggggagtgggcgcaggcacagagccagcctgcatgctccttctctccctccatggacataaggacagtgaagtactgtccataccaccgcgtccaggcatctcacacgccctacacctgagaaacggagctgaaaaatgaatttgtgctgtccatccaccacatcagaaagacgagggacagtgatgcctagtgtgggtcaccagagaggcccacaggggacccctaacctgctacagttgtgctctagtcatttgtttcttggcattaggggcactttaaaccatcaaattaacaacctcaccatagtaacaacctgttcaatgtcaccaggggatcctaattggctcacagttaagcccctttcaaccttcgcactgtcgtggttgtcaggactgccaagccgccctcccatgcctgctcctcatgcctgtccactctacaagccagctgtaaaacccctgcccccaccctctgtgtcggtccatggtcaccaccctgtcacctccagcatcagtcacgcctccgtggtgggcgtgggggccccacccgaggctcccgggcatttctctgatggctaatgagactgatctttgatttttgatctgctcattggccattcagcttcctcttctgtgatgtggtggcctctgcccacattctgctggggcagtttgtcttttccaagttgatcgcaggtttttttctggttttttkttttttgtttttgagacagagtctcactctgtcgcccaggctgcagtgcagtggcaagatctcggttcactgcaacctccacctcccgggttcaagcgattctcccacctcagcctcccaagtagctgggattacaggcacctgccatcatgcccagctaatttttgtatttt

SEQ ID NO: 94551 - DNA, 1005 bp, Homo sapiens
gtggggtgggaggccctaattgtttcagggaagtgtcccagcttggaagtggattcttgcaggggctctggtctggtggagaaagtggagaaggcagcctggggacgtggctgggtggggagtgggcgcaggcacagagccagcctgcatgctccttctctccctccatggacataaggacagtgaagtactgtccataccaccgcgtccaggcatctcacacgccctacacctgagaaacggagctgaaaaatgaatttgtgctgtccatccaccacatcagaaagacgagggacagtgatgcctagtgtgggtcaccagagaggcccacaggggacccctaacctgctacagttgtgctctagtcatttgtttcttggcattaggggcactttaaaccatcaaattaacaacctcaccatagtaacaacctgttcaatgtcaccaggggatcctaattggctcacagttaagcccctttcaaccttcgcactgtcgtggttgtcaggactgccaagccgccctcccatgcctgctcctcatgcctgtccactctacaagccagctgtaaaacccctgcccccaccctctgtgtcggtccatggtcaccaccctgtcacctccagcatcagtcacgcctccgtggtgggcgtgggggccccacccgaggctcccgggcatttctctgatggctaatgagactgatctttgatttttgatctgctcattggccattcagcttcctcttctgtgatgtggtggcctctgcccacattctgctggggcagtttgtcttttccaagttgatcgcaggtttttttctggttttttgttttttktttttgagacagagtctcactctgtcgcccaggctgcagtgcagtggcaagatctcggttcactgcaacctccacctcccgggttcaagcgattctcccacctcagcctcccaagtagctgggattacaggcacctgccatcatgcccagctaatttttgtatttt

SEQ ID NO: 94552 - DNA, 510 bp, Homo sapiens
agcaccctgggcacggttttccagacctcgcagggaacagagtaaaagctaggaaygctgggcttcacgaaggagcagagggggcaggtgcggagggaggaggccggcagagagcaggtccctcctggagcagcgcgatcgggcgccgaggcctcatgcaacatccgacaactactcatggcaaggagaattctggactgactttctattgttttgattaaaagtaattttatccaaaaatccaaaatgtactggacgtgccaatcagaatggaacagaaggaaatgccgcactacctggctgcctctcccctcggctgctggtggctgcccatagacccctgtaaacagctgatgcatgtcccacctgcaccatagggcctggaggaagcggctgtagcaggactcgcagagttccccgtgcgtggccaccggccctgcctccatcgctgttgtctccccgcaggccaaggcgaggcaggtggggcgcactgcatggctctcaggggaa

SEQ ID NO: 94553 - DNA, 510 bp, Homo sapiens
agcaccctgggcacggttttccagacctcgcagggaacagagtaaaagctaggaacgctgggcttcacgaaggagcagagggggcaggtgcggagggaggaggccggcagagagcaggtccctcctggagcagcgcgatcgggcgccgaggcctcatgcaacatccgacaactactcatggcaaggagaattctggactgactttctattgttttgattaaaagtaattttatccaaaaatccaaaatgtactggacgtgccaatcagaatggaacagaaggaaatgccgcactacctggctgcctctcccctcggctgctggtggctgcccatagacccctgtraacagctgatgcatgtcccacctgcaccatagggcctggaggaagcggctgtagcaggactcgcagagttccccgtgcgtggccaccggccctgcctccatcgctgttgtctccccgcaggccaaggcgaggcaggtggggcgcactgcatggctctcaggggaa

SEQ ID NO: 94554 - DNA, 1863 bp, Homo sapiens
tttggagctgaggggtttgaccccayagatatgaggggtatctgcatgaagccttacaggaaagggtctcagtctgagctggtgactggatgcctcaatgggccccaaccctgggcagggggtccttgggacatgggaggagcagaagctgccaagtgaattgttttgctctgtgatggcagaaggacctcaggccagtcagagcccaggaccccagtgattggtaagatgagggacacaggtgatctccaagtcctctccatcctctcacttcagtagcgcaatgagtccaaaatgtggggatccaggaatcccaagagaccagcccctgaggcagtgataccatatgagttgtgctattccaaaaggacatctcaaatccatatttatgcttgatgcccaatcctactcaatcctctatacttgtgagagtagctcagttgctggaaatcattttttcagtttcgttgaagattagttggcctcgaggctctggtctagtagaagagaagtccagcgtttgaatcagatcatggaagatggctctagaggaagctgatgtgcacatgtgtggagcctgggggtcaccagcccagtcacagccacggcccacgagggtcaccagcccagtcacagcacggcccacagagtacggtcttcccatggccacagaaggaagggctggcctccctggccatgatggtgctctcagtgcccacgtgacggggatggcaccatgttcttccccagggctgccataacaaggaaccacacccaggaagacttagatacagctgtggaagctggaattccgagatgaaggtgcccaggggctggttccttccgagggcacggagagagaagctgttcttggcctctctccctgcttctggcagctgctggcaacctttggtgctcgttggtgtgcagaagcatcacctcgacttctgcctccatcttcacagggccttctccctgcatgcatgtctgtctccgcatccacatttccccttttgaaaaggacacagtcatactggcttagggcccaccctaatgaccacattggaatttgattgcctctataaagaccctatctccaaataaggtcacattctgaggtactgggggttaggacttcaacatatgaaattttaagggacacatttcaacccataattggtgggtgcccttgccccgggactccagcttcaggggagctgggggaaggccttaaaggctgtaacacacagtagccacatggacaggtttctgtggcttgccttccagaacccaaggctatgcggctgtcagacttttttagcatctagtgtcagaaacacaactcaagcaagtttaggcataaaggaaatttaacaacctctggaatcaaaaaaaaaaaaaaatgggtggggattgttcagccagatataagaaggccagagatgcagctgccttcaaggatagctgggtcaggccttgaccccacgaggatctcctctctgcacgtcagctccctccacgcggtgcagctggcttccttggtgggccaggaacaaggctgcacagtggcctcacagcctgcgtgtcagggatgggctcctctttggctctgcttcagaaagtcccaggagaggccatcccggacctgccagctatgggctgggaggtgggatgcaggggaagcccagcagtctcaccaaggccacgtgcatagaatcaggagtggcaggggagtgaggacagtcccaaaacaagtggcacaaaaggaacatatcgtgggcccccaaaatcactgagctaaagggaaaattccagctgggagctgctcagggcaaatctgcctctcattctattcagtcatcc

SEQ ID NO: 94555 - DNA, 1863 bp, Homo sapiens
tttggagctgaggggtttgaccccacagatatgaggggtatctgcatgaagccttacaggaaagggtctcagtctgagctggtgactggatgcctcaatgggccccaaccctgggcagggggtccttgggacatgggaggagcagaagctgccaagtgaattgttttgctctgtgatggcagaaggacctcaggccagtcagagcccaggaccccagtgattggtaagatgagggacacaggtgatctccaagtcctctccatcctctcacttcagtagcgcaatgagtccaaaatgtggggatccaggaatcccaagagaccagcccctgaggcagtgataccatatgagttgtgctattccaaaaggacatctcaaatccatatttatgcttgatgcccaatcctactcaatcctctatacttgtgagagtagctcagttgctggaaatcattttttcagtttcgttgaagattagttggcctcgaggctctggtctagtagaagagaagtccagcgtttgaatcagatcatggaagatggctctagaggaagctgatgtgcacatgtgtggagcctgggggtcaccagcccagtcacagccacggcccacgagggtcaccagcccagtcacagcacggcccacagagtacggtcttcccatggccacagaaggaagggctggcctccctggccatgatggtgctctcagtgcccacgtgacggggatggcaccatgttcttccccagggctgccataacaaggaaccacacccaggaagacttagatacagctgtggaagctggaattccgagatgaaggtgcccaggggctggttccttccgagggcacggagagagaagctgttcttggcctctctccctgcttctggcagctgctggcaacctttggtgctcgttggtgtgcagaagcatcacctcgacttctgcctccatcttcacagggccttctccctgcatgcatgtctgtctccgcatccacatttccccttttgaaaaggacacagtcatactggcttagggcccaccctaatgaccacattggaatttgattgcctctataaagaccctatctccaaataaggtcacattctgaggtactgggggttaggacttcaacatatgaaattttaagggacacatttcaacccataattggtgggtgcccttgccccgggactccagcttcaggggagctgggggaaggccttaaaggctgtaacacacagtagccacatggacaggtttctgyggcttgccttccagaacccaaggctatgcggctgtcagacttttttagcatctagtgtcagaaacacaactcaagcaagtttaggcataaaggaaatttaacaacctctggaatcaaaaaaaaaaaaaaatgggtggggattgttcagccagatataagaaggccagagatgcagctgccttcaaggatagctgggtcaggccttgaccccacgaggatctcctctctgcacgtcagctccctccacgcggtgcagctggcttccttggtgggccaggaacaaggctgcacagtggcctcacagcctgcgtgtcagggatgggctcctctttggctctgcttcagaaagtcccaggagaggccatcccggacctgccagctatgggctgggaggtgggatgcaggggaagcccagcagtctcaccaaggccacgtgcatagaatcaggagtggcaggggagtgaggacagtcccaaaacaagtggcacaaaaggaacatatcgtgggcccccaaaatcactgagctaaagggaaaattccagctgggagctgctcagggcaaatctgcctctcattctattcagtcatcc

SEQ ID NO: 94556 - DNA, 1863 bp, Homo sapiens
tttggagctgaggggtttgaccccacagatatgaggggtatctgcatgaagccttacaggaaagggtctcagtctgagctggtgactggatgcctcaatgggccccaaccctgggcagggggtccttgggacatgggaggagcagaagctgccaagtgaattgttttgctctgtgatggcagaaggacctcaggccagtcagagcccaggaccccagtgattggtaagatgagggacacaggtgatctccaagtcctctccatcctctcacttcagtagcgcaatgagtccaaaatgtggggatccaggaatcccaagagaccagcccctgaggcagtgataccatatgagttgtgctattccaaaaggacatctcaaatccatatttatgcttgatgcccaatcctactcaatcctctatacttgtgagagtagctcagttgctggaaatcattttttcagtttcgttgaagattagttggcctcgaggctctggtctagtagaagagaagtccagcgtttgaatcagatcatggaagatggctctagaggaagctgatgtgcacatgtgtggagcctgggggtcaccagcccagtcacagccacggcccacgagggtcaccagcccagtcacagcacggcccacagagtacggtcttcccatggccacagaaggaagggctggcctccctggccatgatggtgctctcagtgcccacgtgacggggatggcaccatgttcttccccagggctgccataacaaggaaccacacccaggaagacttagatacagctgtggaagctggaattccgagatgaaggtgcccaggggctggttccttccgagggcacggagagagaagctgttcttggcctctctccctgcttctggcagctgctggcaacctttggtgctcgttggtgtgcagaagcatcacctcgacttctgcctccatcttcacagggccttctccctgcatgcatgtctgtctccgcatccacatttccccttttgaaaaggacacagtcatactggcttagggcccaccctaatgaccacattggaatttgattgcctctataaagaccctatctccaaataaggtcacattctgaggtactgggggttaggacttcaacatatgaaattttaagggacacatttcaacccataattggtgggtgcccttgccccgggactccagcttcaggggagctgggggaaggccttaaaggctgtaacacacagtagccacatggacaggtttctgtggcttgccttccagaacccaaggctatgyggctgtcagacttttttagcatctagtgtcagaaacacaactcaagcaagtttaggcataaaggaaatttaacaacctctggaatcaaaaaaaaaaaaaaatgggtggggattgttcagccagatataagaaggccagagatgcagctgccttcaaggatagctgggtcaggccttgaccccacgaggatctcctctctgcacgtcagctccctccacgcggtgcagctggcttccttggtgggccaggaacaaggctgcacagtggcctcacagcctgcgtgtcagggatgggctcctctttggctctgcttcagaaagtcccaggagaggccatcccggacctgccagctatgggctgggaggtgggatgcaggggaagcccagcagtctcaccaaggccacgtgcatagaatcaggagtggcaggggagtgaggacagtcccaaaacaagtggcacaaaaggaacatatcgtgggcccccaaaatcactgagctaaagggaaaattccagctgggagctgctcagggcaaatctgcctctcattctattcagtcatcc

SEQ ID NO: 94557 - DNA, 1863 bp, Homo sapiens
tttggagctgaggggtttgaccccacagatatgaggggtatctgcatgaagccttacaggaaagggtctcagtctgagctggtgactggatgcctcaatgggccccaaccctgggcagggggtccttgggacatgggaggagcagaagctgccaagtgaattgttttgctctgtgatggcagaaggacctcaggccagtcagagcccaggaccccagtgattggtaagatgagggacacaggtgatctccaagtcctctccatcctctcacttcagtagcgcaatgagtccaaaatgtggggatccaggaatcccaagagaccagcccctgaggcagtgataccatatgagttgtgctattccaaaaggacatctcaaatccatatttatgcttgatgcccaatcctactcaatcctctatacttgtgagagtagctcagttgctggaaatcattttttcagtttcgttgaagattagttggcctcgaggctctggtctagtagaagagaagtccagcgtttgaatcagatcatggaagatggctctagaggaagctgatgtgcacatgtgtggagcctgggggtcaccagcccagtcacagccacggcccacgagggtcaccagcccagtcacagcacggcccacagagtacggtcttcccatggccacagaaggaagggctggcctccctggccatgatggtgctctcagtgcccacgtgacggggatggcaccatgttcttccccagggctgccataacaaggaaccacacccaggaagacttagatacagctgtggaagctggaattccgagatgaaggtgcccaggggctggttccttccgagggcacggagagagaagctgttcttggcctctctccctgcttctggcagctgctggcaacctttggtgctcgttggtgtgcagaagcatcacctcgacttctgcctccatcttcacagggccttctccctgcatgcatgtctgtctccgcatccacatttccccttttgaaaaggacacagtcatactggcttagggcccaccctaatgaccacattggaatttgattgcctctataaagaccctatctccaaataaggtcacattctgaggtactgggggttaggacttcaacatatgaaattttaagggacacatttcaacccataattggtgggtgcccttgccccgggactccagcttcaggggagctgggggaaggccttaaaggctgtaacacacagtagccacatggacaggtttctgtggcttgccttccagaacccaaggctatgcggctgtcagacttttttagcatctagtgtcagaaacacaactcaagcaagtttaggcataaaggaaatttaacaacctctggaatcaaaaaaaaaaaaaaatgggtggggattgttcagccagatataagaaggccagagatgcagctgccttcaaggatagctgggtcaggccttgaccccacgaggatctcctctctgcacgtcagctccctccacgcggtgcagctggcttccttggtgggccaggaacaaggctgcacagtggcctcacagcctgcgtgtcagggatgggctcctctttggctctgcttcagaaagtcccaggagaggccatcccggacctgccagctatgggctgggaggtgggatgcaggggaagcccagcagtctcaccaaggccaygtgcatagaatcaggagtggcaggggagtgaggacagtcccaaaacaagtggcacaaaaggaacatatcgtgggcccccaaaatcactgagctaaagggaaaattccagctgggagctgctcagggcaaatctgcctctcattctattcagtcatcc

SEQ ID NO: 94558 - DNA, 1208 bp, Homo sapiens
tatttagtgtacttagactagcattatggcagaggaagggatggaaattacagaaattttgaaagaatcatcataggagtcaatgattaattggcaatacatgtttaaaaatacagaggatttaaagaacaatctaggatcttaagcctggggaaggaaggagtggatggcaatggtgactgtacgctgtggaaatcagtaagaacctgggggagttggagctggttatagggggatggcaagtgcagggctgggtgtgtggaagctgaggtgacggcaggacttgtcacatggagactgaacctgcccagcaggttctggctgggcacggtggctcacgcctgtaatcccagcactttgggaggccgaggcaggtggatcacgaggtcaggagatcaagaccatcctggctaacatggtgaaaccccatctttactaaaaatacaaaaaaattagccgggcgtggtgrtgggtgcctgtggtcccagctacttggggaggctgaagcaggagaatggcgtgaacccgggaggtgaagcttgcagtgagcggagttgcgccactgcgctgcaggctgggtgacagagcaagactccgtctcaaaaaaaaaaaagaaaagaaaagaaaagaaaagaaaattccaagtagctgggaatgtctactagcaaaacagacacaacagtcttcaaacaacccattactagaacttcttaaactaagggtataaaggagggagcccagggagggttgcctgtccagaagctggaccttggtgggaggaccggcagaacggtggagcctgacttcccaattaggcctttgcgaaccggattcagctttctcaggaccactggcgatcacagaaggacgataggagcatcaggacacaatcagctcctgtgcagcaaggaggagagacacggaggagcgatttgggatagacggtgattttggagatgactcctaatttcctagctgacagcagctgtgagcaccagacaaagacagggcagggggaatgggaatagcacgtggactaagaaccaatttaaggagaatggaggaaaaaatgtgtagccaaaattgtgaggttagagacaagttaggatatagaaagaaaaacatgagtgaaagaaataaatgtaatgattctatagtggggaaaaagaacagaaagcaggattttcacagatctatatattaatgca

SEQ ID NO: 94559 - DNA, 1208 bp, Homo sapiens
tatttagtgtacttagactagcattatggcagaggaagggatggaaattacagaaattttgaaagaatcatcataggagtcaatgattaattggcaatacatgtttaaaaatacagaggatttaaagaacaatctaggatcttaagcctggggaaggaaggagtggatggcaatggtgactgtacgctgtggaaatcagtaagaacctgggggagttggagctggttatagggggatggcaagtgcagggctgggtgtgtggaagctgaggtgacggcaggacttgtcacatggagactgaacctgcccagcaggttctggctgggcacggtggctcacgcctgtaatcccagcactttgggaggccgaggcaggtggatcacgaggtcaggagatcaagaccatcctggctaacatggtgaaaccccatctttactaaaaatacaaaaaaattagccgggcgtggtgatgggtgcctgtggtcccagctacttggggaggctgaagcaggagaatggcgtgaacccgggaggtgaagcttgcagtgagcggagttgcgccactgcgctgcaggctgggtgacagagcaagactccgtctcaaaaaaaaaaaagaaaagaaaagaaaagaaaagaaaattccaagtagctgggaatgtctactagcaaaacagacacaacagtcttcaaacaacccattactagaacttcttaaactaagggtataaaggagggagcccagggagggttgcctgtccagaagctggaccttggtgggaggaccggcagaacggtggagcctgacttcccaattaggcctttgcgaaccggattcagctttctcaggaccactggcgatcacagaaggacgataggagcatcaggacacaatcagctcctgtgcagcaaggaggagagacacggaggagcgatttgggatagacggtgattttggagatgactcytaatttcctagctgacagcagctgtgagcaccagacaaagacagggcagggggaatgggaatagcacgtggactaagaaccaatttaaggagaatggaggaaaaaatgtgtagccaaaattgtgaggttagagacaagttaggatatagaaagaaaaacatgagtgaaagaaataaatgtaatgattctatagtggggaaaaagaacagaaagcaggattttcacagatctatatattaatgca

SEQ ID NO: 94560 - DNA, 2367 bp, Homo sapiens
aagcaagtcagcataacagctgacccgtattaaatgttcaacatatgttggttattgctgtagaatcagttacaatcaccattctagtagaatggtagaatcagtggaatcaccatttggctgcctggaagaatcttaggggattttagaagtatttaatcagaacccagacatcaatctgctgtggaaacacagtcttgcccaagcctcactcaaagtttccaaactttttcatatttcctgccatttcagtttccctctcagtcccaggatgagctcatgatccttccagtatttcaaagcagccctagtgatataggagttaaaaagaaatgatttaggcaggtagtgagtgtagacgtgtccttggtaaggttttctttttaatgaaaagcagcccccaaatcatttcttttctaccaaagagcagcctctaaaatcgagctgcagacatagataagcaagctggaatcctgcccaggtgaatgccggcagctatgccaataggaaaagtctacctggggggcaggtatattcaacacgaaggctctatcttcccttttctttgtcaaccacgtgtacaataaggaacagacaacatggtgccagccagatagagaacacatctgcataataaaaattaaggtggggtggccagcttctttgcacactacataaatagcacacctggtccaaccaatttttgggccctttgtaaatcagacaccgcctcttcaagacagtctatcagcctataaaacccycgtgcactttgctgcagaccagaagtcccacttaggagcccctctctctctgcaagagacagagctcttctcttttctttctttcacctattaaacctctgctctttaaactcactttttgtgtgtccacatccttgattcccttggtgtgagacaatgaacttctggtatttaccccagacaatgacgctgcttcactaggtgcccgaggccaaacctcacacattccagattacctacatttactgtcccacacaggaaggcatgcatttttcacctttcccaccccacccaggttctcatgggcctgaaagggaccgtaagctacagccccactttgaggcccttggagagttttccaatgcatttggcaaaggtgagatggcagctgctcactgtaccacctgggataccagtcaaacctgcattttccaccttttgtgttattggaactttaaaaattaatacctctgtatgattaatgcctctgtatgattgtgaatattgttctagaatatataaattataattaaatgtagttaagggtcttgcttttggaaagaaactgagatgaatctttggtgaatagaggaatccacctgtgttgcaaatcttttctccctaactggcacatttgtattttctacctaattggcacatttgtatttctttagagaagaacagtgaataaaagaggtaaacaaaggaaagtaaattgcccttttcaagtctgccagctgtaacacccagaagagcgttttcttcttattcttctaagaatcaaggctcataggtatgtgctaaagagtaatgaggcaagttaagaaggtcttccgaaatactgctggggaaatttagcccattgttaccaaagacttacaaaaacttaaagccgtttcccttcattaaaaaacatgagcagtgaaacctactacattggctttctggaaaccaaagaaaaggaccttgctaaattactgttaagacaaacaataccttgtagactgaccttattaagtcagatggcagctttaggggtgagcctggaacctttctttaagtggtggtgggcacagtaataatgtagggaaatggaaaggtcctagccccccaaaacctccctacccactggcttgtgccttctagatcacattctaagctcgtgtactttgtttgaagatctgaatttcccaaatacatacactatgggcttcttaaatggaactctcaataaactgtgacagaaagatggttaatgagtaaggtggaacttattaaagagaaagaggcataattacagtttgaagacaggtttaaaaattaaagcagataggttgtagtggaaataaaatagaaatttcaaacattttaattaaattgtttaaattaaattacttcatttccattttaattaactttaattaacataatgtgacattatgagctttaaaaaaaatgtttttcccgatttccttgggaaatgtggcctaaggagaatggatggcactgcctctccgggtcctgtgtgctcccactgcctgagtcatgattctctccagcaccattctccacccctccagacagtgctcttggagggaatgca

SEQ ID NO: 94561 - DNA, 966 bp, Homo sapiens
attgatatactcttaaagtgtttattacttkaaatgttggaagtttgaaatcattcccactctctcccaaagggaatattttgttcatcactggatttatcagagaaaaaagcaaaaagaaagtgagtacaaaatccccaagacctaagtgcattagaaatctcaaagggactatgaaacattcccctgatgtttttcccccataagaagcttaatttgctaaaaccctttcactcctgtaatcccagcactctgggaggccgaggtaggcggatcatgaggtcaggagatcaagaccatcctggctaacacggtgaaaaccctgtctctactaaaaaaaaaaaaaaatacaaaaagttagccaggagcagtggcgggcacctgtagtcccagctactcgggaggctgagacaggagaatggcattaacctgggaggcagagcttgcactgagccgagttcacaccattgcactccagcctgggtgacagagggagactctgtctaaaaaaaaagaaaaaacactttaaaagatatattttaatttgagaaagagttttttaaatgtattttctccaaaagccacattgtatatagcctggtcccggaaatgctcctcccctcccacttggagaagccagtagggcaggaagctctcctggtgcatgcctgtgggcctcctgtttctgtgaagtggggtatggctcctctgttttgcataactggagagctgaaagggacattaaacaaagggcagaacatgaacccggaaatccctaccaggccaacgatccagaggctgctctctgtgccacttccccatgccctgggcatggagctcaccggagattaacccagcttccctgagcccaggggaacctaggctcggcaccaccacccccaggagtttcccgggattgtaagccagtggcataagtcagctggatgcagagaatgacctgtaaac

SEQ ID NO: 94562 - DNA, 966 bp, Homo sapiens
attgatatactcttaaagtgtttattacttgaaatgttggaagtttgaaatcattcccactctctcccaaagggaatattttgttcatcactggatttatcagagaaaaaagcaaaaagaaagtgagtacaaaatccccaagacctaagtgcattagaaatctcaaagggactatgaaacattcccctgatgtttttcccccataagaagcttaatttgctaaaaccctttcactcctgtaatcccagcactctgggaggccgaggtaggcggatcatgaggtcaggagatcaagaccatcctggctaacacggtgaaaaccctgtctctactaaaaaaaaaaaaaaatacaaaaagttagccaggagcagtggcgggcacctgtagtcccagctactcgggaggctgagacaggagaatggcattaacctgggaggcagagcttgcactgagccgagttcacaccattgcactccagcctgggtgacagagggagactctgtctaaaaaaaaagaaaaaacmctttaaaagatatattttaatttgagaaagagttttttaaatgtattttctccaaaagccacattgtatatagcctggtcccggaaatgctcctcccctcccacttggagaagccagtagggcaggaagctctcctggtgcatgcctgtgggcctcctgtttctgtgaagtggggtatggctcctctgttttgcataactggagagctgaaagggacattaaacaaagggcagaacatgaacccggaaatccctaccaggccaacgatccagaggctgctctctgtgccacttccccatgccctgggcatggagctcaccggagattaacccagcttccctgagcccaggggaacctaggctcggcaccaccacccccaggagtttcccgggattgtaagccagtggcataagtcagctggatgcagagaatgacctgtaaac

SEQ ID NO: 94563 - DNA, 966 bp, Homo sapiens
attgatatactcttaaagtgtttattacttgaaatgttggaagtttgaaatcattcccactctctcccaaagggaatattttgttcatcactggatttatcagagaaaaaagcaaaaagaaagtgagtacaaaatccccaagacctaagtgcattagaaatctcaaagggactatgaaacattcccctgatgtttttcccccataagaagcttaatttgctaaaaccctttcactcctgtaatcccagcactctgggaggccgaggtaggcggatcatgaggtcaggagatcaagaccatcctggctaacacggtgaaaaccctgtctctactaaaaaaaaaaaaaaatacaaaaagttagccaggagcagtggcgggcacctgtagtcccagctactcgggaggctgagacaggagaatggcattaacctgggaggcagagcttgcactgagccgagttcacaccattgcactccagcctgggtgacagagggagactctgtctaaaaaaaaagaaaaaacactttaaaagatrtattttaatttgagaaagagttttttaaatgtattttctccaaaagccacattgtatatagcctggtcccggaaatgctcctcccctcccacttggagaagccagtagggcaggaagctctcctggtgcatgcctgtgggcctcctgtttctgtgaagtggggtatggctcctctgttttgcataactggagagctgaaagggacattaaacaaagggcagaacatgaacccggaaatccctaccaggccaacgatccagaggctgctctctgtgccacttccccatgccctgggcatggagctcaccggagattaacccagcttccctgagcccaggggaacctaggctcggcaccaccacccccaggagtttcccgggattgtaagccagtggcataagtcagctggatgcagagaatgacctgtaaac

SEQ ID NO: 94564 - DNA, 950 bp, Homo sapiens
ggagttcacatttgagaagatgaaccctcaatagycctcttgcatgagaaacaaggacttagccctcaggcccctttatttcattcccacaatactaagaagttacctaagcttttattaaggctgaaactccaggtcccttttcatactacaaaacagtttattaagtgtctctttattcccctctcccaggcttcttcttaaatatgctatgacagaatgctagatagaaaggtacttaaaaagctagttaaacaagctaaacaaaccagcttggctaactagaatcatcacagtttgtttcatatcccagatctggagagggaatcttctagcttgtcccctggtcctcttgcttccagcccagtttttattaactagtatgcagattaatgtaaactgtccctgactcattgcctcagtcctgagttggcaaaggcagagacaaactactgggttgccatttctgccccagtcttattaattttgttaggatgactccctgagctttgataattggccactgtaaggagaagatgaagaaagcagaagttaaaagttaaggcttcaatttagtctggtcctttagaaagccgataactgactcaattatttcccctagttcttacgttacacgttatttttatttattttgctttactgagctccatagtctgatgcctgatcctgttttctttaagtttgccatagaggagaatcttccttgaaatgtcactgttatctcatgaatcagtaatacgtacacactgtgccacaattcctgctggggatcaattgctcagctcttccagtgctatctgacaggctaggtcttctactgactccagctagacctgttcactgagtggctgccccactccttgatctggttctcatctactcctagcacatgaaacctcctgaaggggaatcatcctataccttgtcaa

SEQ ID NO: 94565 - DNA, 560 bp, Homo sapiens
ctcctagaagcagagagctagaattgactttgagagagtatattttactacatttaatagaaaaaggaaggttatgcccagaaaatttaattatattttttagggtcccacaactagtgggtagtagagctgtaactagatcagagatttcctgactcaaagtgctagagtttccccctataatttacacaagtgtcacatcaatcactttcatttagctattccagcgatccatctgattgttttagtcaactccccattatgcatgctagctggtaagcaccagatagctatatggaaaccactgctaatctaacattccmttttctctttagtttcaatcttctacacaaactgagattcaagtaacaccagttcatttatctgaattgatttgccaaagactttaggttttgactgaaatggagagggaatttgttcatgagtccctggggagtaaggcaggggaggcagcaaaggggaagaaaaaaagagaaagcagagacagcagcatgatctctgcccttagttcaattacatgacctgatgcccaagtgtag

SEQ ID NO: 94566 - DNA, 836 bp, Homo sapiens
ttcctattttaatacctccattttcggccaggcacggtggctcacgcctgtaatcctagcactttgggaggccgaggcgggcggatcacaaggtcaggagatcgagaccatcttggctaacacggtgaaaccccatctctactaaaaatacaaaaaattagccgggcgtggtggcaggctyctgtgatcccagctactctggaggctgaggcaggagaatggcatgaacccgggaggcagagcttgcagtgagccgagatcgtgccactgcactccagcctgggcgacagagcgagattccatctcaaaaaaaaaaacaaaacaacaacaacaacaaaaaaaaaaccctccattttctcattgacagaaaatctagtttaagaagaacagcctacttaatttttactaaaatgagtataattgcatttgtctgtctggtctgtggtctttaattcagtttaacacagccaggcaaggacttggggccactattgcagttacttcattaccctcttctttgttccaaatctgttctctatcaaatccaatgcaatgttcaccaaactctgaaatccaggtgcaggatgcctcactgtaattacatctcaggcagtttagacttgtatttcctctccttggctgttgagtcttgggtttccacttgttaaggctgggcttggttaactcctctgattctcctcgcatcaagaagacagtttcttactgtagcaagctgcacccaccatgagccacatgggaagggctgagaaaggccacttttgacagcctcctattgaagcatgcagcaaagggagacagggaggaatagattcaga

SEQ ID NO: 94567 - DNA, 836 bp, Homo sapiens
ttcctattttaatacctccattttcggccaggcacggtggctcacgcctgtaatcctagcactttgggaggccgaggcgggcggatcacaaggtcaggagatcgagaccatcttggctaacacggtgaaaccccatctctactaaaaatacaaaaaattagccgggcgtggtggcaggctcctgtgatcccagctactctggaggctgaggcaggagaatggcatgaacccgggaggcagagcttgcagtgagccgagatcgtgccactgcactccagcctgggcgacagagcgagattccatctcaaaaaaaaaaacaaaacaacaacaacaacaaaaaaaaaaccctccattttctcattgacagaaaatctagtttaagaagaacagcctacttaatttttactaaaatgagtataattgcatttgtctgtctggtctgtggtctttaattcagtttaacacagccaggcaaggacttggggccactattgcagttacttcattaccctcttctttgttccaaatctgttctctatcaaatccaatgcaatgttcaccaaactctgaaatccaggtgcaggatgcctcactgtaattacatctcaggcagtttagacttgtatttcctctccttggctgttgagtcttgggtttccacttgttaaggctgggcttgkttaactcctctgattctcctcgcatcaagaagacagtttcttactgtagcaagctgcacccaccatgagccacatgggaagggctgagaaaggccacttttgacagcctcctattgaagcatgcagcaaagggagacagggaggaatagattcaga

SEQ ID NO: 94568 - DNA, 867 bp, Homo sapiens
aggttcttccagatctttctgctctgaaatcctcagcttgtggacttggtcccaggatggttcttgcagagcaaggcaacacgtgtagatggaagcatcaggggcatatgagtagagggtctctgcttatgccccctttttgggagcaagrtgaagccccacccaacttataatagccaggatggtctcactgcctaggcctaagtcaatcatgatgactagaatgaggtgacaatggttgatttttcttcagccaaaaaccacctgcaccaccccccaaccttaaaagacagggctgctggaaggtgaacaagattcgattctgtttcagccagaaagatgacaggaagtatggctgaaaattgggcaggtgacttattctatgtgccaagaccctgctcagaccataagtatgagctgctcttctccttttcagacttcccttgatatgttgctgccaccttaacccatcccagactcaagagattctacttcaagaatctctcctttctcttttagctctacaatcttctgataccccctgtgataagaaagattcagggagttattgggtaattattcatttaccatattgtagaaatctctgaaaaataaaagtaaaaatatcaatgatctctttggtcaaatctcttaacctttaagtcatggtgtttttttcagcctaaaatgtgcatttattaaactcatgagtttctatggtctctcagggattctctcatttactctctgcagatagagaaaagatccccttgagagaaaaaggggcatgatactgagttgaatcacatgagaggcaagaggagtgtttcttcaaagattatcttaagcatcatcaattttgatgtt

SEQ ID NO: 94569 - DNA, 867 bp, Homo sapiens
aggttcttccagatctttctgctctgaaatcctcagcttgtggacttggtcccaggatggttcttgcagagcaaggcaacacgtgtagatggaagcatcaggggcatatgagtagagggtctctgcttatgccccctttttgggagcaagatgaagccccacccaacttataatagccaggatggtctcactgcctaggcctaagtcaatcatgatgactagaatgaggtgacaatggttgatttttcttcagccaaaaaccacctgcaccaccccccaaccttaaaagacagggctgctggaaggtgaacaagattcgattctgtttcagccagaaagaygacaggaagtatggctgaaaattgggcaggtgacttattctatgtgccaagaccctgctcagaccataagtatgagctgctcttctccttttcagacttcccttgatatgttgctgccaccttaacccatcccagactcaagagattctacttcaagaatctctcctttctcttttagctctacaatcttctgataccccctgtgataagaaagattcagggagttattgggtaattattcatttaccatattgtagaaatctctgaaaaataaaagtaaaaatatcaatgatctctttggtcaaatctcttaacctttaagtcatggtgtttttttcagcctaaaatgtgcatttattaaactcatgagtttctatggtctctcagggattctctcatttactctctgcagatagagaaaagatccccttgagagaaaaaggggcatgatactgagttgaatcacatgagaggcaagaggagtgtttcttcaaagattatcttaagcatcatcaattttgatgtt

SEQ ID NO: 94570 - DNA, 3484 bp, Homo sapiens
cctagatctttctgagccaatttaatttttagctttattcttggcctaatgcaatgttttagttcattgcgctttttggatgtgcagaagcaaagataatgtgttacactacattcatttaatgtttcatcaggcttttttggtgtatctaccttttggttattttaaaatgtttcatccttatcgcttcagtcatgaaatgtagattcattaaatcactgtgctgggtgattccgtggagcaggctgggtgaagaagtagctcakcttcagccgtcaacatgctgcagcacctgcagagccaggcaggttcctccccacacagccttaaagacatttctgtttcaaagaacagaacaagggtgttttctgactggaccaggcagtgtctaggacttcagaattttagtggaccccttatagacataaggccagacaaaggctcctggaaactcacacaggatttgctctcaacgtgtacaaatagtaggtagtcgtttgccaacaataataacaacggcaaagcagatatcatcaggatgataataccctacgtgtgtgttgcctcgtgtttaacaatgctttcacatatatcacctgaatagctgttatcttcagagttgaatggattgggagagacgtagccatgtgaacagaataaataaagcttctgaaataagtttgtgccaactgcatattcacctagaactggattttactcacctctcattaacaactggatcctctaccaagaagcaactccctcttacttgaaacagggcaagtttcttgtccctgtcaaagaagtggaccagatttcgccttctctgctcggaaaatatgtttggctgaacagtgtcctcgccaacagggtagggagtgaccaagagtcacattttggtcattcatttcatgtgacatattacatgatacaggataagacatttattgcccggagaagtgctgcagttcacagtcagtaaaaacaagtgtgtccagctataaatgacaaccacaggacactgtttctcagatatgaaattcacaatgttgtaaatcaaggcttctgattggattaaagggtaacggaagccagccggaggcccaccttctgggttagcatcatgggattacgtatgttttcaggaatggcgtgcaaggcttccctgcttctgtttaaaactaggcccctagaggagctgttttctggggatggtgggggtctctgcaatatccctgggcttttcacagtgagcacagaggagagaaagcttctgtacccacaagtcgcctcaatccaagcctgaagccatcagagaagattgcagccatcagaagtgctttgtgtcaaggctgtttctgcctgactgaatccgaaaataaacacctttgctctctatcattactgtttcattaacaccttggccaagttctttggccaaagagactggatttcagtgtgatactaaattattccaggcccgtgtgtaatagtccttgataatttcgtatccacagaccctctctcccaaatgacatatccgtctcctaacacacacacacacacacatacacacacactcaccatgaataagcacatacaaattggagactgtgcacaaaaaaaagaaaggaaggggaaaaaaaccaggaaagctatttagggcactgttcccattgggtttctctacaaagcagtttaactgtagttagtaagtgctcagtgtaatctaataaaaggcattttgcaatattaagcaaaaaacatctggtacccagaattccctgatcatttttaactagatgcaatatctctctctttctctttcttttacagacatgtgaaaaatagcctaataaggatccttgtggtaaaatcagatggaaaacagggaggaagagttccaccgtctccagcagctcatttgaagcagctcctcagagtttcacaataataatcagtgctggcccagtgccgccggattattttgtatattcatgaagctgctcatcagccgtcaggagaatgtgcagtaatccttggatgaaataaggccaatcagtggaataatgaggaaggtaatatctcccaagaggcctggagtgggttttcatcaaacccggctgtaactctccaactatttgctttacaaatgcagcctttgatctttgatttggggagaagagggggggagacggacctgctggtgtattgtccggcctgcaaggataacaagctgcctctggaggaggagcgggagggggaagaacctggctttcaagtctcagtcagttcttgttaactaaaacctcatggcctttttatttactgtgccctaatatacactcacttagcaagtcaatggcctcaagccttctttctttaagaaattcttccatatatttatgtggaccataagccttctctaatcaggaggtgttgggcctatataaatacctgctctatttttttttttttttttttggccaggaaacaatgaagactttcaaatgaacctgaaaaaccatttcagagctttaagatcatgcagtgagtcaaagacggaagtatcttaattattttaataaagtcttatttcctcttcatcatgcccaaaaagcaaaaccaaaagcaagatgaggtgcagtggaaataaatatttaaagcattcatgttgttgtctttttacaagataaaacaaatttagtcaacaaacggaataaacgacacacaccacttgttcactctgtttgtatatttgtgtgtgacaaagagatggctcaaacggatcctagaataatctgccgcacagagacatcctccgttagaccacaggaagtggcatgaggggaagaaaatgcccgctcaccatcatcccactgttgcctttcttcccccatccgccttcccttcccacctccatttcctcttcctcctcctcatgcaccagttgctctgagtctcttatcctacatgtaggcattgtgagccttttcttacttcacaaatgttagtttctttgtttttctctctgtgtctttacacaacaatggaaatgacaatgttttgtattagttgaagagacaagttagttgcatgttgaatactagagttgtacatctgaattgtcccttttagagccatctacctaattagacaaattgcatattagacaaatgaatgcatgactatttatttactgcaggaaaacaaaagtactacccaactatctaatagaaaaggcctgcacgcttactcaaaccagtcatatatctgatattagcctctctgggttgagaagaatagacatttacattttccatatagttcttagtgagggagattttgtttaaagtttattatggattgttaagcctggagaatttttgtttaaacaagctatgacgcaacttgattatgagtgaagtaaatctgctttttaaaacaatgtcttgtaaatttttgtgtagtctattatgtgaaa

SEQ ID NO: 94571 - DNA, 3484 bp, Homo sapiens
cctagatctttctgagccaatttaatttttagctttattcttggcctaatgcaatgttttagttcattgcgctttttggatgtgcagaagcaaagataatgtgttacactacattcatttaatgtttcatcaggcttttttggtgtatctaccttttggttattttaaaatgtttcatccttatcgcttcagtcatgaaatgtagattcattaaatcactgtgctgggtgattccgtggagcaggctgggtgaagaagtagctcagcttcagccgtcaacatgctgcagcacctgcagagccaggcaggttcctccccacacagccttaaagacatttctgtttcaaagaacagaacaagggtgttttctgactggaccaggcagtgtctaggacttcagaattttagtggaccccttatagacataaggccagacaaaggctcctggaaactcacacaggatttgctctcaacgtgtacaaatagtaggtagtcgtttgccaacaataataacaacggcaaagcagatatcatcaggatgataataccctacgtgtgtgttgcctcgtgtttaacaatgctttcacatatatcacctgaatagctgttatcttcagagttgaatggattgggagagacgtagccatgtgaacagaataaataaagcttctgaaataagtttgtgccaactgcatattcacctagaactggattttactcacctctcattaacaactggatcctctaccaagaagcaactccctcttacttgaaacagggcaagtttcttgtccctgtcaaagaagtggaccagatttcgccttctctgctcggaaaatatgtttggctgaacagtgtcctcgccaacagggtagggagtgaccaagagtcacattttggtcattcatttcatgtgacatattacatgatacaggataagacatttattgcccggagaagtgctgcagttcacagtcagtaaaaacaagtgtgtccagctataaatgacaaccacaggacactgtttctcagatatgaaattcacaatgttgtaaatcaaggcttctgattggattaaagggtaacggaagccagccggaggcccaccttctgggttagcatcatgggattacgtatgttttcaggaatggcgtgcaaggcttccctgcttctgtttaaaactaggcccctagaggagctgttttctggggatggtgggggtctctgcaatatccctgggcttttcacagtgagcacagaggagagaaagcttctgtacccacaagtcgcctcaatccaagcctgaagccatcagagaagattgcagccatcagaagtgctttgtgtcaaggctgtttctgcctgactgaatccgaaaataaacacctttgctctctatcattactgtttcattaacaccttggccaagttctttggccaaagagactggatttcagtgtgatactaaattattccaggcccgtgtgtaatagtccttgataatttcgtatccacagaccctctctcccaaatgacatatccgtctcctaacacacacacacacacacatacacacacactcaccatgaataagcacatacaaattggagactgtgcacaaaaaaaagaaaggaaggggaaaaaaaccaggaaagctatttagggcactgttcccattgggtttctctacaaagcagtttaactgtagttagtaagtgctcagtgtaatctaataaaaggcattttgcaatattaagcaaaaaacatctggtacccagaattccctgatcatttttaactagatgcaatatctctctctttctctttcttttacagacatgtgaaaaatagcctaataaggatccttgtggtaaaatcagatggaaaacagggaggaagagttccaccgtctccagcagctcatttgaagcagctcctcagagtttcacaataataatcagtgctggcccagtgccgccggattattttgtatattcatgaagctgctcatcagccgtcaggagaatgtgcagtaatccttggatgaaataaggccaatcagtggaataatgaggaaggtaatatctcccaagaggcctggagtgggttttcatcaaacccggctgtaactctccaactatttgctttacaaatgcagcctttgatctttgatttggggagaagagggggggagacggacctgctggtgtattgtccggcctgcaaggataacaagctgcctctggaggaggagcgggagggggaagaacctggctttcaagtctcagtcagttcttgttaactaaaacctcatggcctttttatttactgtgccctaatatacactcacttagcaagtcaatggcctcaagccttctttctttaagaaattcttccatatatttatgtggaccataagccttctctaatcaggaggtgttgggcctatataaatacctgctctatttttttttttttttttttggccaggaaacaatgaagactttcaaatgaacctgaaaaaccatttcagagctttaagatcatgcagtgagtcaaagacggaagtatcttaattattttaataaagtcttatttcctcttcatcatgcccaaaaagcaaaaccaaaagcaagatgaggtgcagtggaaataaatatttaaagcattcatgttgttgtctttttacaagataaaacaaatttagtcaacaaacggaataaacgacacacaccacttgttcactctgtttgtatatttgtgtgtgacaaagagatggctcaaacggatcctagaataatctgccgcacagagacatcctccgttagaccacaggaagtggcatgaggggaagaaaatgcccgctcaccatcatcccactgttgcctttcttcccccatccgccttcccttcccacctccatttcctcttcctcctcctcatgcaccagttgctctgagtctcttatcctacatgtaggcattgtgagccttttcttacttcacaaatgttagtttctttgtttttctctctgtgtctttacacaacaatggaaatgacaatgttttgtattagttgaagagacaagttagttgcatgttgaatactagagttgtacatctgaattgtcccttttagagcsatctacctaattagacaaattgcatattagacaaatgaatgcatgactatttatttactgcaggaaaacaaaagtactacccaactatctaatagaaaaggcctgcacgcttactcaaaccagtcatatatctgatattagcctctctgggttgagaagaatagacatttacattttccatatagttcttagtgagggagattttgtttaaagtttattatggattgttaagcctggagaatttttgtttaaacaagctatgacgcaacttgattatgagtgaagtaaatctgctttttaaaacaatgtcttgtaaatttttgtgtagtctattatgtgaaa

SEQ ID NO: 94572 - DNA, 530 bp, Homo sapiens
aagttttgttgccagaaaaatagtgatcaactattctctataaggtaaatacctttttttcaaaaaatattccartttaccagatacatattctttatataatcatttttgttctccaggaatcagactgtgactttatccttgctcacatttttttttcatttttttctgttctgtttttggtaacagtgttatttatctcatttttcctcatcgtgacatatttattttaatgttaatatacacatatgcatattttaaaacataagaagtaaaaataactttattatgaaactattagaagttaattgtagaaaaactagaaaataataaagaaaaaatttaaagtcatttaagtccaaagataatcactgttgatactttatattgattcaaaaatataggtctgtgaagatttcagtattacaaagatggactaatgctgtatggaatgctttgcaatttgcttttttactaactaaatcttgaaaaccttttgtgatgtacttctcatgagcaggatgtacata

SEQ ID NO: 94573 - DNA, 719 bp, Homo sapiens
caatatgaaactccacaggaatttcagttttctaaaaatgtgaaatggtaaagaaggtctcctattaagtagaacaagagatgcattcaaatattaggtgacgttttcttagaaagttagaggaaacgtaacatcaaatgtaattttgcataactacatttttgataagtattgcactatctcatttggattctttccactataaacattgctttataataacttttgtgatttttttttttggaaaacactttaatctggatgagcacctaaaaagaaaaattgttttaaatggtaaatagtgattacaatagcatcaaggaggaaacctaagttaaattcccagatgttgaaaacacacatagtagaataatcacataaatgaagcaattgtaagccatcagattatttggggattcaatgagaatttcagtgctcagttgtttttttaaattaattaattaattwatttatttatttatttatttatttattttttgagatggagtcttgctcttttgcccaggctggagtgccgtggttctatcttggctcactgcaagctccacctccccagttcacaccattctcctgcctcagcctcctgagtagctaggactacaggcgcccaccaccatgcccggctaattgtttttttgtattttcagtacagacgggatttcactgtgttagtcaggatggtctcaatctcctgacct

SEQ ID NO: 94574 - DNA, 719 bp, Homo sapiens
caatatgaaactccacaggaatttcagttttctaaaaatgtgaaatggtaaagaaggtctcctattaagtagaacaagagatgcattcaaatattaggtgacgttttcttagaaagttagaggaaacgtaacatcaaatgtaattttgcataactacatttttgataagtattgcactatctcatttggattctttccactataaacattgctttataataacttttgtgatttttttttttggaaaacactttaatctggatgagcacctaaaaagaaaaattgttttaaatggtaaatagtgattacaatagcatcaaggaggaaacctaagttaaattcccagatgttgaaaacacacatagtagaataatcacataaatgaagcaattgtaagccatcagattatttggggattcaatgagaatttcagtgctcagttgtttttttaaattaattaattaatttattwatttatttatttatttatttattttttgagatggagtcttgctcttttgcccaggctggagtgccgtggttctatcttggctcactgcaagctccacctccccagttcacaccattctcctgcctcagcctcctgagtagctaggactacaggcgcccaccaccatgcccggctaattgtttttttgtattttcagtacagacgggatttcactgtgttagtcaggatggtctcaatctcctgacct

SEQ ID NO: 94575 - DNA, 852 bp, Homo sapiens
ttgtttcaggaaattaattgctataccaatttcctgattaattgtttagacacttctaagtttctaagtcaagtttcttaccttgaaatgaaataagtctcctaaattatttttctcagttccatcctctggagccagaatatacctaagcccttgtttttcatgagaaccctttaagtactataaytgaaaatcgcaattatgttcctcttatctccaggataaagagcacacatacatacacagcacacccatacattctagaccacagtaccagtctttagaaaaatattgcatttaatttgttctggacctactaatatcactgtttctgatccatgtggagtataatgaaatactaaatccattaatctggacacttggtatctatctactcaataaaaaaatgtgtcagaccattgatttcttgagtcagaaatcatatctttttcatgtaggtctcaaatgtgctctataatagatattgcataaattaaaaatgatttcctgtgaattgctggctttttacgagctcatataaattttatgcccacataaattttatgttgacataaatttgtgttaattaatactgacaagttactttttatgttaggtcactgtttgtttccattggtgactgtaatccactcaagactatcatagggcaaacacatttcctgtcttctgtcgttgtaaacagccttacataaagtctgcatcatctgtagatacagcagttccaggagttccaatgatgtaagagggctcacaacttctctgtctatcattctcttaggactattccgaatgataaagttagtggtcctgatttttgtttgtcattcttta

SEQ ID NO: 94576 - DNA, 724 bp, Homo sapiens
tatgtaagaaacctgcacgttctgcacatgtatcccagaacttaacataaaattaaaattaaaacaaaccagcctgtgatatttataaatgtatgttaacaaaaaactccagcgcatgaaagctcctagcagctttattcataacagctccaagctggaaacaacctagatgtctttcaagggagggatggttaaacaaacggtggtgcatccctacagtgggaatacaactcagcaatgaacagtggtgggctattcatacacacagccactggatgaatctccaggaaactatgctgagtgaaaaaacttagttccaaaaggtgtatatgataccatttataaagcatccttgaaacaatgatattaaataaatggaaagtacattaatggttgccaagtgttgaggcaaaaatgatgcagtgggagaagggaagtaggtgtggctrtgtaatagctataggaagaaacctcgtggtaatgaaaatgctctgtaaatggactgtattaatgtcaatatcctggttgatatattgcgctatagttatgcaagatgttaccactgtggaaaaagtaagtgaaagaaatatggggcctttctgtagtatttttaacaagtgtatgtaaatctgtaattatgttaaaaatatttttaaaaaccagcagcttgtgtgtacaggtaacataagagagattaagataaggtattttatatcataaaaag

SEQ ID NO: 94577 - DNA, 598 bp, Homo sapiens
tccctgaatgtggagcgatggggggttgcacacaggccgttctgccccagcagctaacaagaaagacccttgcattcctccctgcatctctcccttttgggtcctactaatgtctgttgaatttctcttttttccaaagcaaaatccttctctgcattttgtctgcttgtctgtttcccagagccgcaggactctctccttgtctggagttccagagagcccccactttctctttctaagctgtgttgtgtgtttcctggtacattctaggttccccaaagataaacatgactaaggattggaaaggaggaaaggccrcgcagattgttaatctgaaagtcaatccccggatttagctctcaaaaatgctttatttttggagaaaagcaatagagtaagacagaaggacttaacgcttgcagggaagtggctttctgccatgtagagccaggctggcaacctgtcctctgccatcagggagtgagcatgaacctggaaacctctaggacgcaagagcgaggctggctgtcccctcgtgtgcagtgcttagaccttcttgccacacatcccgtccctcacctcactggatagcccccga

SEQ ID NO: 94578 - DNA, 639 bp, Homo sapiens
tttttctcatcaaaactttaaattctttcctaaatgaagaacactttgagatgattagatgaaagcacgaaaatgggtagtcaacttgacgtgagaagaacgagagaccgtgaggaaaatgagactccagctcatcactttcttagcacacaacgctgcaaatcacccgctcatttctccaagctacagatttgactaagcataagaatttgaatacattcttgaaccaattcggagaactctaatgtgcattcttctattttccataatgcggacgtcgcttctctgacaagcctgtatgtrctctttgagactctagttctggttcgatttgtgaccttaggcaaatcacatttttttctatcatagatttctcatctgtaaaatgataatgccatgttccctcacatcaagacacaaatgactgtttaatagctgtaaggcaccattacactaaacagcataaaatactaaagagaaacaggcaaccattcaaaacaaaaataaaacaaaactaaagtctcatccaccgttatgctttggtaggattgctgacttctgtcacttccttcctaaaatcacccagctgaatatgtttgtgaaaagatggactaagatgaaacacatccatgtaacatt

SEQ ID NO: 94579 - DNA, 1054 bp, Homo sapiens
atgccatttaacagtattttcttcctaggtcaaagtttgcccagcatgacctcacccactaactgmattagtttaaaattttaggccaaaataaaatagtgatctaaaatcatgcagcttttattcactgtacaacatggatattcataagacccctccataaatgtttggtccagatctttcttccactgaatgaagtttgacaatttgtgacaagacagaaaggaaattcattatatttagtaatagaaaacctatttctcatttttcacgagccaagcagcctcgatgaaattgcctaaaccgctacatcacactcctccacctttgtggtctgtgaggtcgctcacaagggtcttcaatttccttatgttcacagcttggcatctggtaattttcagtatcagaaaacataagggggctatatattttttcctcagaagaaatatttctgatttgaaaagaaataaatctgtcaagaggaaaatattaaaaataaaaagtgtgactgtaataatcacatcgatgtcacaggcaattttgctcattcggattggggaaggaaacttccctgcccccccaaaggaattgtcaaagtaagagaaatggaatttttatttcaataaccactttggtttaagggtaatttatgtataaggaagcacaacagcctcaagaatcaaatttccttaaaatattattttgtattctctctgctacaaggcttagtgaaactgatggatcaaagtgaagaattactaaatttgtttctctaagttacagtttaacagacactgtacaccacacacagcactggcaaaagggcagtgttttgcattttgcaaagggttatacccagagaataatatttcttgaaattaaataatcctcataatgttaaaatgaaaaatggaagaaaagctagttttgtttgaccggatccagaaaagtagcaaatcttccgctgcccacacccacctcccgtcacacacacacacacccttgggctcagtcactgctgttttcatcaataataaatagcagtgctatatgg

SEQ ID NO: 94580 - DNA, 1054 bp, Homo sapiens
atgccatttaacagtattttcttcctaggtcaaagtttgcccagcatgacctcacccactaactgcrttagtttaaaattttaggccaaaataaaatagtgatctaaaatcatgcagcttttattcactgtacaacatggatattcataagacccctccataaatgtttggtccagatctttcttccactgaatgaagtttgacaatttgtgacaagacagaaaggaaattcattatatttagtaatagaaaacctatttctcatttttcacgagccaagcagcctcgatgaaattgcctaaaccgctacatcacactcctccacctttgtggtctgtgaggtcgctcacaagggtcttcaatttccttatgttcacagcttggcatctggtaattttcagtatcagaaaacataagggggctatatattttttcctcagaagaaatatttctgatttgaaaagaaataaatctgtcaagaggaaaatattaaaaataaaaagtgtgactgtaataatcacatcgatgtcacaggcaattttgctcattcggattggggaaggaaacttccctgcccccccaaaggaattgtcaaagtaagagaaatggaatttttatttcaataaccactttggtttaagggtaatttatgtataaggaagcacaacagcctcaagaatcaaatttccttaaaatattattttgtattctctctgctacaaggcttagtgaaactgatggatcaaagtgaagaattactaaatttgtttctctaagttacagtttaacagacactgtacaccacacacagcactggcaaaagggcagtgttttgcattttgcaaagggttatacccagagaataatatttcttgaaattaaataatcctcataatgttaaaatgaaaaatggaagaaaagctagttttgtttgaccggatccagaaaagtagcaaatcttccgctgcccacacccacctcccgtcacacacacacacacccttgggctcagtcactgctgttttcatcaataataaatagcagtgctatatgg

SEQ ID NO: 94581 - DNA, 1561 bp, Homo sapiens
cttaaattgcagatgagaactaagtggctaaattactcttttttcttcaggtgttgtttcagagtaaagtttcttggtgactctcaaacattgcactttctgctatgttgagaagtgacataagttgtgcaactgtttgaacatttatttatgtgtattttatgtgccggatttatacactcaataaaaaacctagttccatgaataaatagggagaatcacacaaaagagaaacactgatcagctaagctcttcttcatatagcagtttcttgaaatccatcatattcttgtcatctacaacctcccactgtttttacatttttgtcaaaaattgataatgaaaatactctcattaacctacatttgacatggcataaatcccagtaactggctctctttttaactgaaacacagtctttattcttttatttactcctactttcatttggttgatttatatttctggcatgcttcccttcagtagcaattctaagacaaactttgcttacttgtcacagcatttagtgcaagggaagttggtagataacaaatggacaggtgatgatacatcgatatatatcaagattaggaagagaggcaccaggtcatagcaagagatcagtaataatcaaattaaaaacattgtggaactctgtgtcctgggtgtctacatattctagagaagtaatgaggacagagatgtggatttggcttctaaaagtttgcgtatatttttaaatggctttgagaataacttatctgcctgcactagtcagcttacatgttttcactgaatgtaatatcatttcgttatgaattagtttaaatggaaagagccaggtttgtttaatgagcattttgaattaatcgacaatttgcaccaacttttcttattaatgcatatcatagcccagtatgtgttttccccattggcataattgtggataaaatcaaagtagatgttagtaactcttcattcagctactctcaacctccaaatttctcttctacccaggaggagagagttctaaatcattattttattaatagacaaagtagcatctttagttcaagaaatttctatggagaaatagagagagagatgccaattttaaataagcacaaataattagtagaaatacttaggrgaaaaggtgaaactgtaagaatgtttactgaaaattacataaaattataaacctgggaagaatgtatggaataatgtcactaacagtaagaaaaaataattgaaaaaaagaagtgcaactagagcatctaggacacttttaagcttggaatgaaattgtaaataagatgagagaagtcaggcagaaggaattagggagcatgtcaaaatgaagaagaaaccttggtgagagcaggctgggtatggatgtaaacagtccattttgaaaatgatgtaaatggtacctgttcaacttctttacacccacagagcttaccagttactgacaataaattatgtaatatctcaacactcagcgatgagaaagatgagagtgactgtgatcaaggttatacattatgacatagcaacc

SEQ ID NO: 94582 - DNA, 955 bp, Homo sapiens
tcacgaaccccctgaactgtggggtggtgtccaggccatgcctagatccaacgttaaaggtggaaaccttactgactcatgggacttaagcccaatcagtggctgatcactaaatggttcgaatccaggggtgtaattggagcaggggcatctggggatgcactggactcgtgcagccaaatccgtaaaacaaacaagcagcagcaactttaaattcaaagataaaaataaaaaagaaatgccatgtaaatagcagccatgagagataacagaaattatcctgttttatgttaccagagtgcttgtgattcttctctgggtgataaaaccaatctttgcaaaaaaaaaaaaaaaattgttgaaatttaaacaaacagagggtcacctctaaaactatacaataatgcttcaaaaataaaatgcagttaataaactcttttaagcactactgtggcagtcaacttgttaagtatggcaagtacagagatggaaataagatgatgctgatactggcattgtaataagcctggggatgcagtggcccctggacagtggctctaccagtagtgcactaaacaggctttaagaaaaaagctgtagctggaggagtgaccctttccaccatgtctccgcagagctacatgctctgacttttatctcataatgtttttctggttttatacatttgcttctcagtttccattattgggctgattttcttcaccctgttctgtctgtcatcccatgggagtgcttttcaattccgtttattcagcaaatctgtttacagtacatttaaacactctctcatgttggacacttggaaaaaaaatcatcctgttttatgttaccacagtgcttgtgattcttctctgagttataaaaccaatctttgcaaaaaatgtgttgaaatytaaacacaaagtgggtcacctctaaaactatagaatactgc

SEQ ID NO: 94583 - DNA, 1420 bp, Homo sapiens
ggggggggtaggttgggggcactatcctgggctgtattgccagcagcagtagggctggttgggggccctattgggtgctacactgcccgcgacagggggcgggttagggccgctactgtggttacactgccggcggcgccggggtggggggactggtctgggtgctgactggtctggcttcattgcccatagtggggtggggggtggtatgggggctgcaccgcctgcggcggggggcttgttgggggcgctatctggggctgcagtgccccccgcaggggataggttagggggagtatcccgtgatacactgcaggtggagtggggcgggaaaggggggtacagggaggtgattggagggggtggtttcaggcgctatcgcgggccagactgctcatgatagaggggggcgttgggtgcgctattggctacactgccagcggcaagggacagtttgggggcgatacccctccagtggtgggtgggcaggtgtgatgggttgtgggcaccattagggggctgtactgtggtcagtgggagcgagttaggggagctatcagctgctgcactgcctgtggcgggagtcaggtttggtgcgctatcgggaccatattctcggtagtggcatacgggttaggggagctgtcgggggctaagccgtccacggggggtgcgggttgggtgcgctatccagggcatcacaccccgcagctggggtatggttgggggtgctcttcgctatctgggactgcattgcccatcgtggggagcgggttgggggccttaaggatccgtggctgcactattcacggcggggatcaggttgcagcgctttctggggcgtcgctgcccgcggcaggggggttggttgcgggtccaatccgtggctgcatggcccacggcagggggcaggttgggggagttatctggtgctgcaacgtctgaggcggggacgggttgggggcgctgttgggttctacgctgcagcggcgaggggagggtgttaggggcgccatcccgggtccaacagctggcggcgggttaggggcgctatcggggtgccctgaaggacactctggtggccgcgaagtgcccttgccagcacccgatctcccttccgaggagaagcagggcgggccgcaaggccagacaggccatcctcctcaggccgggctggctgagcgcgtgcgattctggggctgcccaggcgagcccaggagaaccggcgagcccagcggcgcctgcccgcagctgcacccccacctgccagcrcgtgccgcttcccagcgacttccgggagcccggcggccaccgcggtgcaggcgcgcgcccaacggctttgccaggctcactcggtctgagaggtcggaggctgcgagtgtcgttgctgaaggctgtagtggaccgggctggatcgcgg

SEQ ID NO: 94584 - DNA, 740 bp, Homo sapiens
acaaccacaaaatgtattttagtattttttccccagagtagaaacaattgcatccagatttcatacatttaataaattttcatagtttatccatgtttaaattttacataaaagttaaaattgcatacttgttctgttttcttttgctctgttgcatatcctaatgacttcaccctattttttacctaacacatgaataagtaaaatataatatttctctatgtaaaaatgattaagaagacagtgagataaataaaatatggacagacctgtttgtcttttccctttcctttataataagtggctaagaaaaagaaatgtatgcagagaacaatggttgtgtgctcaccaacattctgtactaaggtgtaaatatcataacctgagatagaagatttaaaaatgttcctcctccttgacgtctcttctaagcatatataaaaatgaaattgtctaaaatgaagatagttacatatgtatagatattaactatttatgataaaacaaactttggggaaaaatgaaggatccaataataaaggacactaaatttaataatccacaaaagatagaatacaaagtagccattaacttagggaaaaaaaatgcttacaacccagttcatgatataacatagaaccaataacgttgtgttcaccttgttttttatgyaaataatgagacttgaagatactgcagtgtaggctgaatgatgtatacacacagacactgtgtcatat

SEQ ID NO: 94585 - DNA, 790 bp, Homo sapiens
cccttcaattatttctttccaagtaccattgcaccctcattcttctaggcaaagagaggaagttatctacctcagttacattctgatatttctcctccttctagaacacttctccaagagaggagagtatggcctagcagttggtggtgtatcttaagcaaaaaggaaaaaaacaaactatatattgttcaatctgttagcactgtgttgctcagaaaaatgaaagttaatattaaatggtaaccgtaactaaatccaacttcaagtttcaattgttcatgccctccatgagataggcaagatattatgtaaggtgctttcacagggatcataaacttaagtaacttctgggtccaggtagtataagccagacttttaagacaaggggaagtaatggggactgtggtagaccaaagaaggcatatttacctttaagatatttcaaaataggccaacgccgtggctcacgcctgtaattccagcattttggggggccgaggtgggcggatcacctgaggtgaagagttcaagatcagcctggccmacatggtaaaaccccctcgctactgaaaacacaaaaattaactgggcgcgatggtgggcactcgtaatcccaactactcaggaggctgaggcaggagagtcgcttgaactgggaggcagaggttgcagtgagttgagatcacgccactgcactccaggctgggccacagagcgagactgtctcaaaaaaaaaaaaaaaaaaaaaaagatattttaaaataactcttgttagtatgaatttggatcc

SEQ ID NO: 94586 - DNA, 512 bp, Homo sapiens
catgatacaattaaatgttgcctctccagattgtttgggggaattggggggttttttgagaataaagtgctccagatagccgtgtgagtgcctcttgaataaacaccagttttttwaaaaattgaattcatttatataaaaatataaattgcattaaatgctatttatattaaatgctttcctgccatcttaagcagaatgcgctgaataataccttactgaggactcagcaccgtgacagccattgctgattattgcagtgaactgtgattcagtgatgtgggacacaccgtcaaggaagtgagtgcaatgagagctccacatacacaaagttcagaaaaaaacaaagcacaggaggctgtttgctttctaactactcgtttcacccctggactctggtgtactctccagcatgccacacttcaggaaggatattggcaaagtggagtattctagctaagaaaagaagctaggatggtaagcgctattgaaacaaggttcagccagcaaaa

SEQ ID NO: 94587 - DNA, 512 bp, Homo sapiens
catgatacaattaaatgttgcctctccagattgtttgggggaattggggggttttttgagaataaagtgctccagatagccgtgtgagtgcctcttgaataaacaccagtttttttaaaaattgaattcatttatataaaaatataaattgcattaaatgctatttatattaaatgctttcctgccatcttaagcagaatgcgctgaataataccttactgaggactcagcaccgtgacagccattgctgattattgcagtgaactgtgattcagtgatgtgggacacaccgtcaaggaagtgagtgcaatgagagctccacatacacaaagttcagaaaaaaacaaagcacaggaggctgtttgctttctaactactcgtttcacccctggactctggtgtactctccagcatgccmcacttcaggaaggatattggcaaagtggagtattctagctaagaaaagaagctaggatggtaagcgctattgaaacaaggttcagccagcaaaa

SEQ ID NO: 94588 - DNA, 693 bp, Homo sapiens
tccgcacaacatatctgccagccaaatacctgagcaacctcaatcaatgccrcatggagtggaaaaatcacccaggtgagtcctgcctgaattcctgatacacaagatcttaagatataataaaacaagtcccgctttaagctgctaacatttgaattgatctattacacagcaataaatcatggaaacatcaggtacatagcattctaaatcactgaccaagatgatgctggtattttttttctttttctttttctggttttttttttttttttttttttggagacaaagtcgtgttttgtcacccaggttggagtggcataatcacgactcactgcctcaacttcccaggttcaagtgatcctcccacctcagcctcctaagtagctgagactacaggcacgcaccactacacccggctaatttttgtatgtttttgtagagacagcgtttcaccatgtttcccaggctggtcttgatctcctgaactcaagtgatccacctgccttggccttccaacgtggtggtattttcttcataattgtttaatgaatgctgcaactaagtgtcccaaaatgtattgccaatttaaatatgtagttcaaacttcactgagaaactaagaggctaagttctctttctgttatctgcctggacataaagacgtatgtttggagatggcagccttttttt

SEQ ID NO: 94589 - DNA, 906 bp, Homo sapiens
tgttctcacaagtgggagctaaacactgagtacatatggacacgtgtacttgagagtgaagggcgggaggagggagaggattgaaaaactacttatcgagtrgtatgtttattacctgggtgacaaaataatttacacaccaaatccctgtgacacaaattttctatataacaaacctgcacatgtatccctgagcctaaaacaaaaatttttaaaaaagaagaaatctaactactttaaaatgttttataaagccttgcaatggctgattcctgcctatttttttacatcataccatgttattttctttcctcacacacgccacattcctggtacactagccacatttcagttcctcaaacccactctttttcttgaccttgaggcttttaattcgatgtttcttaacagtattctgccagaagtattccttctgtactatttactggaaaactccccttccttcaaggactgctgtcctcttaaatgtggtttcctcaataagaccttccatgcccatcctcatgtctccccacccctgcccactctgcaacatcccagaatctatgatacttaaattgcattattgtcagtcattaataaatacaaggaccacaagggccctcaagatgtatgttccttattagaacccaaaacaacaaaccaacagatattttaactatgaaagtccagtacagatttcaaaataattttgaataatcaaatttaatataaagagttatagtttcacaaagactatatgctatattttatcaccttaagtttctgtgagaaataggctttgttaatatgacgaaactctaaaattaatggattaaaagacacaatttctgtgaaaccccatctctacccaaaatcctcaaattagccaggcatggtggctca

SEQ ID NO: 94590 - DNA, 629 bp, Homo sapiens
cattactagcacaatgctttgaatatgagaagtgtttaaataatatatattaaacggatcaatgagtaactaactggagattaacctaatatgaaagttagtattgaggctttaaagtaaaaaataaattttagccttgtgatcatatttctccataatattgaaagcctttawtgggactcgaatggtttcctgtttatcatcaagtaatgatggaggtttgctcttaattctgtattgagtaaatacatgtcccatataaaattttttgctgccctctggtggatatagttcaataaataaacattatacaattatatatcaaattccatatattaagcagtttctcatttgtgtatgttcccaaagttgctttctcagtttagaaattggaatgcatttttcacatcagaagagaggttagtatctcagatctgcttgtaaatccctattataataaatggtacttaaaatatggcacaaaaaatagtgtagagcctaacaagtaggtagttgcaatgatttcatgaggaaatccattgaaagtgatcacttgggaacacagttagccatcttccctgctgtggccttgattactgaggaaggcgaagtggaatttcctggatccc

SEQ ID NO: 94591 - DNA, 629 bp, Homo sapiens
cattactagcacaatgctttgaatatgagaagtgtttaaataatatatattaaacggatcaatgagtaactaactggagattaacctaatatgaaagttagtattgaggctttaaagtaaaaaataaattttagccttgtgatcatatttctccataatattgaaagcctttattgggactcgaatggtttcctgtttatcatcaagtaatgatggaggtttgctcttaattcygtattgagtaaatacatgtcccatataaaattttttgctgccctctggtggatatagttcaataaataaacattatacaattatatatcaaattccatatattaagcagtttctcatttgtgtatgttcccaaagttgctttctcagtttagaaattggaatgcatttttcacatcagaagagaggttagtatctcagatctgcttgtaaatccctattataataaatggtacttaaaatatggcacaaaaaatagtgtagagcctaacaagtaggtagttgcaatgatttcatgaggaaatccattgaaagtgatcacttgggaacacagttagccatcttccctgctgtggccttgattactgaggaaggcgaagtggaatttcctggatccc

SEQ ID NO: 94592 - DNA, 629 bp, Homo sapiens
cattactagcacaatgctttgaatatgagaagtgtttaaataatatatattaaacggatcaatgagtaactaactggagattaacctaatatgaaagttagtattgaggctttaaagtaaaaaataaattttagccttgtgatcatatttctccataatattgaaagcctttattgggactcgaatggtttcctgtttatcatcaagtaatgatggaggtttgctcttaattctgtattgagtaaatacatgtcccatataaaattttttgctgccctctggtggatatagttcaataaataaacattatacaattatatatcaaattccatatattaagcagtttctcatttgtgtatgttcccaaagttgctttctcagtttagaaattggaatgcatttttcacatcagaagagaggttagtatctcagatctgcttgtaaatccctattataataaatggtacttaaaatatggcacaaaaaatagtgtagagcctaacaagtaggtagttgcaatgatttcatgaggaaatccattgaaagtgatcacttgggaacacagttagccatcttccctgctgtggccttgattactgaggaagrcgaagtggaatttcctggatccc

SEQ ID NO: 94593 - DNA, 631 bp, Homo sapiens
caagggcagaagcactatatgtctaccacctccttaaactaggatgaaacataggttctatttccagtgttccggaactcagtgctaagttgtataaacaaattcattgcggtggttacatcagaatttaaatgattatgctctatgtttttgaaaggcttattgaaaaacattttaatctcttcccccagtattttcaaaacaccrctgcaatggaagaaccttggggtaattctgtttcttattagcatttgagaatgtaaggctcaatttgatgttcctgatatttagaagtatcttggacaggactaatatgggatttaaaaattaacaccaattcctcataggccaccttattagaacacaaataactaactccacttttgagatattagtatttcctaaattctctaaagttttacagaaatgatgtttttttctagattttaatgatttagcagggtaaatcagctatatcatttatatattgggttagtaacagggaaatgctatttgctaggaaataccattaaaaaaacactaccctaagtttttttaacctttattgttgcatcagtataaaatgttttctttcatactttgatcaaagacatgaaaatgttattcaagg

SEQ ID NO: 94594 - DNA, 774 bp, Homo sapiens
tgaaattcatttacacgagtcttctttggtcttcaaagcaacatgtgttttcactaaatacacttgtgctaagtacacagcctgtgatgctggcatcttcctccttttacaagtatggatcctaagtcaaatctcattacacagtgcagcataacagttgatagatttctaactgtaacgtaggcctcccaaccatagttccagggttctttgtattatagcatactgcctattccaatttaaatataagtgtggaggttctcatcctctgttctttcctgagttttgagtttatgtgccaattattattttttttttctgaatccctcgctctactttctcttctttgtaatcagtggcttwaatatctgagatcactggcttctgtgtaagaaagcgttacacagaacgctttaaaactgaatagtatttagtgtttttaaaactaaatagtacttagtgatttgcaaactgttggatatttaaattgatgtgattgtcatcaaaactttaaaattaaaaaaaaatttaaatcatggtgcttttaaaaaccactgagagtaaatacttctatatgtatcttttagttatgcaggattgtacaggcatccaaactatgttctcataaaaccaattttattttttaaattaattttttcattaaagccaattttaatgtgtttcagttcatggttgaaatgtttcttgatttttatgtatgactcataataatacctgaattaatcatggggcctggaaaattagtaatagcag

SEQ ID NO: 94595 - DNA, 578 bp, Homo sapiens
gtagtttccaagggtttaggggaaagaagagatgaataggaggaacacaaatrtattgtcagggaagtgaaactactctgtattataccatattgatggatactgtcattatacatttgttaaaattcatagaattatacaactccaagtgtgaaccttaatttaaactgtggactttgctcacatgataatgtcagtgtaggctcatcaaccttaacaatacatgagatacctctccagtgatagcaagcaaagatgtgcaaatgtgagtgcagggaaaatctctgtaacttcagctcaattttgttgtgaatctaaaacttctctaaaaaatgaagtctattaaaaagttttcaataaaataaaaaatcttattctgctcattttctagaccagagattattagcctggggtaattttgttccccactgtcagggacatttagcagagactggagatatttttgattgtcacactttcatgagactatgggagtgttgctgctggcagtcagtgggtagaaacaagagatatttctaaacatcctatgatgtgtagctaacaagtgttaaccaacc

SEQ ID NO: 94596 - DNA, 744 bp, Homo sapiens
aaaaattcattaaaatatattttattcagcacttaaattttttttctgtgttagaattattttaggatctgctgtttgctatgctttctgtttttacacgtaatttcttctcaatattttctttacaccttccatgatccatctctttcaaaagatggtttaataatttatttttagtatctattttgacatgttaccttgctcatgtttaaggttttccattaattactcaaagaaagataaagtagggtaaacagtgaataagaacagagaaaatgggattgataccagctacaggttgagcattacyaatctggaaattcataatttgaaatattcctaattctgaaattttctgagcaccaacatgataccacgggtggaaaattctacccctaactcttaccgggggtccttgctcacagagctcctcagatggtggcgagccacttccaagatggtggtaggccacttccaagatggtggctagcctcgtgttctctgacctggggttcttggcctcacagattccaaggaatggaatcttgggccgtgcggtgagtgttatagctctattagaagccatgggtcatggaagagaaccgtggaacccagtgactagtgttcagctcaattaggatgaacctgggcacttagccgtgcaggaacaacggcaagcctttagcccaatcaggattggcaatgggtgcctcgctggttcaggagcacagcggacagcctgcc

SEQ ID NO: 94597 - DNA, 744 bp, Homo sapiens
aaaaattcattaaaatatattttattcagcacttaaattttttttctgtgttagaattattttaggatctgctgtttgctatgctttctgtttttacacgtaatttcttctcaatattttctttacaccttccatgatccatctctttcaaaagatggtttaataatttatttttagtatctattttgacatgttaccttgctcatgtttaaggttttccattaattactcaaagaaagataaagtagggtaaacagtgaataagaacagagaaaatgggattgataccagctacaggttgagcattaccaatctggaaattcataatttgaaatattcctaattctgaaattttctgagcaccaacatgataccacgggtggaaaattctacccctaactcttaccgggggtccttgctcacagagctcctcagatggyggcgagccacttccaagatggtggtaggccacttccaagatggtggctagcctcgtgttctctgacctggggttcttggcctcacagattccaaggaatggaatcttgggccgtgcggtgagtgttatagctctattagaagccatgggtcatggaagagaaccgtggaacccagtgactagtgttcagctcaattaggatgaacctgggcacttagccgtgcaggaacaacggcaagcctttagcccaatcaggattggcaatgggtgcctcgctggttcaggagcacagcggacagcctgcc

SEQ ID NO: 94598 - DNA, 744 bp, Homo sapiens
aaaaattcattaaaatatattttattcagcacttaaattttttttctgtgttagaattattttaggatctgctgtttgctatgctttctgtttttacacgtaatttcttctcaatattttctttacaccttccatgatccatctctttcaaaagatggtttaataatttatttttagtatctattttgacatgttaccttgctcatgtttaaggttttccattaattactcaaagaaagataaagtagggtaaacagtgaataagaacagagaaaatgggattgataccagctacaggttgagcattaccaatctggaaattcataatttgaaatattcctaattctgaaattttctgagcaccaacatgataccacgggtggaaaattctacccctaactcttaccgggggtccttgctcacagagctcctcagatggtggcgagccacttccaagatggtggtaggccacttccaagatggtggctagcctcgtgttctctgacctggggttcttggcctcacrgattccaaggaatggaatcttgggccgtgcggtgagtgttatagctctattagaagccatgggtcatggaagagaaccgtggaacccagtgactagtgttcagctcaattaggatgaacctgggcacttagccgtgcaggaacaacggcaagcctttagcccaatcaggattggcaatgggtgcctcgctggttcaggagcacagcggacagcctgcc

SEQ ID NO: 94599 - DNA, 744 bp, Homo sapiens
aaaaattcattaaaatatattttattcagcacttaaattttttttctgtgttagaattattttaggatctgctgtttgctatgctttctgtttttacacgtaatttcttctcaatattttctttacaccttccatgatccatctctttcaaaagatggtttaataatttatttttagtatctattttgacatgttaccttgctcatgtttaaggttttccattaattactcaaagaaagataaagtagggtaaacagtgaataagaacagagaaaatgggattgataccagctacaggttgagcattaccaatctggaaattcataatttgaaatattcctaattctgaaattttctgagcaccaacatgataccacgggtggaaaattctacccctaactcttaccgggggtccttgctcacagagctcctcagatggtggcgagccacttccaagatggtggtaggccacttccaagatggtggctagcctcgtgttctctgacctggggttcttggcctcacagattccaaggaatggaatcttgggccgtgcggtgagtgttatagctctattagaagccatgggtcatggaagagaaccgtggaacccagtgactagtgttcagctcaattaggatgaacctgggcacttagccgtgcaggaacaacggcaagcctttagcccaatcaggaktggcaatgggtgcctcgctggttcaggagcacagcggacagcctgcc

SEQ ID NO: 94600 - DNA, 557 bp, Homo sapiens
taataagttcccaaaatggcacaatcattgcattaatcactactagtagagtcctatgattgtcaatagtatctgttaacttgactgaggcacaggatgcccagataactgcttatacattatttccaggtgtgcttgtgagagtatttgctgactagcatttaaattggtaaactgaataaggcagataatcctccctagtgtgaatggccaacatataatctgttgagggccttaaacaaaaatgcagaggaatgttggatttgcattttctctctctcttctctcttctctctctctctctctcaactgaaatattaatcttacagcttacagacagcatatcatrcaactttttttgcctccataactgtgaatccaatagcttataataaatctatgtatctatgtatctatgtatctatctatgtatctatctatctatctatctatttataagttctgtttctctggagaactcaaatacaaagccaatagtgttttatgaaataattatatggaaagataattggagtaagcttcaaagtaaaatactg

SEQ ID NO: 94601 - DNA, 550 bp, Homo sapiens
tttctccagtagatgaagtcaggcttccaatccctacattttactcactggttgctcattctctaaattgacaaaatggatcacatacggttccctctaattccctcctgtccttttccttgtttctacttcactccttctccaacttatttatatgatttcaagccttcaatgccccacaaaatttctaaaaagataaacatgcagattgaatctctataattattttctaaaggaaacatctcttccagggtgttttaaaaatttactaatacttttcaggcaagctcttcctatttgctctagctctgtcttcyagctcattcttttctagttctatccctccatttcctccacttcttttctctataaattcctactgatgtagcttcagggtcccaagactgttggaattataataataaccttaagttatttacattccttattactaatctataggtcatcttgagaatttcgctaagatgctttaattgcatatttaaaaattgcaagccaacttcatttgatgtaatgttaattcagaaaa

SEQ ID NO: 94602 - DNA, 1069 bp, Homo sapiens
taataaaaatgctctttaagatttaaatattgtattgatttctaatgctgaaccacttaaaataaaaaaaaattaattaagtgctgggattacaggcgtgagccacagcactcggccactatttattttttaagcaacttttatgtgatataaattgcttttatgcttctccaagactgaaatcctaaataaaataatatgttatggtctgtaatcccaacagtttgggaggccgaggctggcagatcacctgacctcaggagatcaagagcaacctgggcaacatggtaaaaccttgtctctacaaaaaattagacaggcatggtggcacacgcctgtagtcccagctactcggggaggctgaggcatgaaaattgcttgaacctgggaagtggaagttgcagtgagccaagattgcgcccctgcactccagccgggagagggagtgagactctgtctcaaaataaaacagaaaataaataaataataataataatgattacaactttagtggtgtacttattttgttcatattttattttaaatcacacattcaatacttgaaatggaaaaacgatctttgttttttgattcttttraacttctgtataccatttttggtataagtatccttaaaaatcagagattttttctaatttttctaattaatctattgtgtcaacaatagataatttttacatgtttttaaagttcaaaataaggaatactctaaatttgtttatctattgtcattatttactgagttatatggtagcaatgaaaaaataattaaaaagtacaagaataagagtatctgaggaattccaccaaattgacaaaattttggaagtacaattttgggaaactataaattagtaaagtaaattcctttatatgtaatgtactgggaatccagccaaaatagcatttttatttttcttagtctacaaagaaccccttgctccaggaaagcagtagaggcaaaattggtggaaaaggaaggcaatgcaaggaaatctctttttttctctctaaaacgatgacatttctctgaagttttgacttacac

SEQ ID NO: 94603 - DNA, 1069 bp, Homo sapiens
taataaaaatgctctttaagatttaaatattgtattgatttctaatgctgaaccacttaaaataaaaaaaaattaattaagtgctgggattacaggcgtgagccacagcactcggccactatttattttttaagcaacttttatgtgatataaattgcttttatgcttctccaagactgaaatcctaaataaaataatatgttatggtctgtaatcccaacagtttgggaggccgaggctggcagatcacctgacctcaggagatcaagagcaacctgggcaacatggtaaaaccttgtctctacaaaaaattagacaggcatggtggcacacgcctgtagtcccagctactcggggaggctgaggcatgaaaattgcttgaacctgggaagtggaagttgcagtgagccaagattgcgcccctgcactccagccgggagagggagtgagactctgtctcaaaataaaacagaaaataaataaataataataataatgattacaactttagtggtgtacttattttgttcatattttattttaaatcacacattcaatacttgaaatggaaaaacgatctttgttttttgattcttttaaacttctgtataccatttttggtataagtatccttaaaaatcagagattttttctaatttttctaattaatctattgtgtcaacaatagataatttttrcatgtttttaaagttcaaaataaggaatactctaaatttgtttatctattgtcattatttactgagttatatggtagcaatgaaaaaataattaaaaagtacaagaataagagtatctgaggaattccaccaaattgacaaaattttggaagtacaattttgggaaactataaattagtaaagtaaattcctttatatgtaatgtactgggaatccagccaaaatagcatttttatttttcttagtctacaaagaaccccttgctccaggaaagcagtagaggcaaaattggtggaaaaggaaggcaatgcaaggaaatctctttttttctctctaaaacgatgacatttctctgaagttttgacttacac

SEQ ID NO: 94604 - DNA, 1069 bp, Homo sapiens
taataaaaatgctctttaagatttaaatattgtattgatttctaatgctgaaccacttaaaataaaaaaaaattaattaagtgctgggattacaggcgtgagccacagcactcggccactatttattttttaagcaacttttatgtgatataaattgcttttatgcttctccaagactgaaatcctaaataaaataatatgttatggtctgtaatcccaacagtttgggaggccgaggctggcagatcacctgacctcaggagatcaagagcaacctgggcaacatggtaaaaccttgtctctacaaaaaattagacaggcatggtggcacacgcctgtagtcccagctactcggggaggctgaggcatgaaaattgcttgaacctgggaagtggaagttgcagtgagccaagattgcgcccctgcactccagccgggagagggagtgagactctgtctcaaaataaaacagaaaataaataaataataataataatgattacaactttagtggtgtacttattttgttcatattttattttaaatcacacattcaatacttgaaatggaaaaacgatctttgttttttgattcttttaaacttctgtataccatttttggtataagtatccttaaaaatcagagattttttctaatttttctaattaatctattgtgtcaacaatagataatttttacawgtttttaaagttcaaaataaggaatactctaaatttgtttatctattgtcattatttactgagttatatggtagcaatgaaaaaataattaaaaagtacaagaataagagtatctgaggaattccaccaaattgacaaaattttggaagtacaattttgggaaactataaattagtaaagtaaattcctttatatgtaatgtactgggaatccagccaaaatagcatttttatttttcttagtctacaaagaaccccttgctccaggaaagcagtagaggcaaaattggtggaaaaggaaggcaatgcaaggaaatctctttttttctctctaaaacgatgacatttctctgaagttttgacttacac

SEQ ID NO: 94605 - DNA, 1069 bp, Homo sapiens
taataaaaatgctctttaagatttaaatattgtattgatttctaatgctgaaccacttaaaataaaaaaaaattaattaagtgctgggattacaggcgtgagccacagcactcggccactatttattttttaagcaacttttatgtgatataaattgcttttatgcttctccaagactgaaatcctaaataaaataatatgttatggtctgtaatcccaacagtttgggaggccgaggctggcagatcacctgacctcaggagatcaagagcaacctgggcaacatggtaaaaccttgtctctacaaaaaattagacaggcatggtggcacacgcctgtagtcccagctactcggggaggctgaggcatgaaaattgcttgaacctgggaagtggaagttgcagtgagccaagattgcgcccctgcactccagccgggagagggagtgagactctgtctcaaaataaaacagaaaataaataaataataataataatgattacaactttagtggtgtacttattttgttcatattttattttaaatcacacattcaatacttgaaatggaaaaacgatctttgttttttgattcttttaaacttctgtataccatttttggtataagtatccttaaaaatcagagattttttctaatttttctaattaatctattgtgtcaacaatagataatttttacatgtttttaaagttcaaaataaggaatactctaaatttgtttatctattgtcattatttactgagttatatggtagcaatgaaaaaataattaaaaagtacaagaataagagtatctgaggaattccaccaaattgacaaaattttggaagtacaattttgggaaactataaattagtaaagtaaattcctttatatgtaatgtactgggaatccagccaaaatagcatttttatttttcttagtctacaaagaacccyttgctccaggaaagcagtagaggcaaaattggtggaaaaggaaggcaatgcaaggaaatctctttttttctctctaaaacgatgacatttctctgaagttttgacttacac

SEQ ID NO: 94606 - DNA, 663 bp, Homo sapiens
atcctatgaagctcttttctttttgtctttattggtattttcatatttatagcttacttgattgtttcatgatctggccttcgtgtgagtgtgtgtgtgtgtgtgtgtgtgtgtrtgtgtgtaactttagaagtctgttatatcatggtatgaattaactgcctaataaataatcactataatttttactcattttagcaagtataacttcggattttttaaaatgtatttttataatatatggctcactgaatgataaaatatcagagaaaaattagaaatgaaaatacatgaaaattcctgagagtaggcactactttagggaatataagaggcattgtttccctgaattcagaataagatcatgtctctaatgtaggataatatgatagaaagaagcagtggactgaatgcaaatgacaacgtttagtattctctgtggtaggaaaagggattagggaatatttcgttcatcttaacaatttttttaactcattatctgtacaataagagatttgaacaagatattctctagggtctattctaattgcaaacttttgtaactttaatggaaaacaatttaaaaataaatcaaagtttgtttctaatgaatgctatttcaagtttcattgaatagtttaaatgaataatatcgcatcggaa

SEQ ID NO: 94607 - DNA, 663 bp, Homo sapiens
atcctatgaagctcttttctttttgtctttattggtattttcatatttatagcttacttgattgtttcatgatctggccttcgtgtgagtgtgtgtgtgtgtgtgtgtgtgtgtatgtgtgtaactttagaagtctgttatatcatggtatgaattaactgcctaataaataatcactataatttttactcattttagyaagtataacttcggattttttaaaatgtatttttataatatatggctcactgaatgataaaatatcagagaaaaattagaaatgaaaatacatgaaaattcctgagagtaggcactactttagggaatataagaggcattgtttccctgaattcagaataagatcatgtctctaatgtaggataatatgatagaaagaagcagtggactgaatgcaaatgacaacgtttagtattctctgtggtaggaaaagggattagggaatatttcgttcatcttaacaatttttttaactcattatctgtacaataagagatttgaacaagatattctctagggtctattctaattgcaaacttttgtaactttaatggaaaacaatttaaaaataaatcaaagtttgtttctaatgaatgctatttcaagtttcattgaatagtttaaatgaataatatcgcatcggaa

SEQ ID NO: 94608 - DNA, 663 bp, Homo sapiens
atcctatgaagctcttttctttttgtctttattggtattttcatatttatagcttacttgattgtttcatgatctggccttcgtgtgagtgtgtgtgtgtgtgtgtgtgtgtgtatgtgtgtaactttagaagtctgttatatcatggtatgaattaactgcctaataaataatcactataatttttactcattttagcaagtataacttcggattttttaaaatgtatttttataatatatggctcactgaatgataaaatatcagagaaaaattagaaaygaaaatacatgaaaattcctgagagtaggcactactttagggaatataagaggcattgtttccctgaattcagaataagatcatgtctctaatgtaggataatatgatagaaagaagcagtggactgaatgcaaatgacaacgtttagtattctctgtggtaggaaaagggattagggaatatttcgttcatcttaacaatttttttaactcattatctgtacaataagagatttgaacaagatattctctagggtctattctaattgcaaacttttgtaactttaatggaaaacaatttaaaaataaatcaaagtttgtttctaatgaatgctatttcaagtttcattgaatagtttaaatgaataatatcgcatcggaa

SEQ ID NO: 94609 - DNA, 663 bp, Homo sapiens
atcctatgaagctcttttctttttgtctttattggtattttcatatttatagcttacttgattgtttcatgatctggccttcgtgtgagtgtgtgtgtgtgtgtgtgtgtgtgtatgtgtgtaactttagaagtctgttatatcatggtatgaattaactgcctaataaataatcactataatttttactcattttagcaagtataacttcggattttttaaaatgtatttttataatatatggctcactgaatgataaaatatcagagaaaaattagaaatgaaaatacatgaaaattcctgagagtaggcactactttagggaatataagaggcattgtttccctgaattcagaataagatcatgtctctaatgtaggataatatgatagaaagaagyagtggactgaatgcaaatgacaacgtttagtattctctgtggtaggaaaagggattagggaatatttcgttcatcttaacaatttttttaactcattatctgtacaataagagatttgaacaagatattctctagggtctattctaattgcaaacttttgtaactttaatggaaaacaatttaaaaataaatcaaagtttgtttctaatgaatgctatttcaagtttcattgaatagtttaaatgaataatatcgcatcggaa

SEQ ID NO: 94610 - DNA, 663 bp, Homo sapiens
atcctatgaagctcttttctttttgtctttattggtattttcatatttatagcttacttgattgtttcatgatctggccttcgtgtgagtgtgtgtgtgtgtgtgtgtgtgtgtatgtgtgtaactttagaagtctgttatatcatggtatgaattaactgcctaataaataatcactataatttttactcattttagcaagtataacttcggattttttaaaatgtatttttataatatatggctcactgaatgataaaatatcagagaaaaattagaaatgaaaatacatgaaaattcctgagagtaggcactactttagggaatataagaggcattgtttccctgaattcagaataagatcatgtctctaatgtaggataatatgatagaaagaagcagtggactgaatgcaaatgacaacgtttagtattctctgtggtaggaaaagggattagggaatatttcgttcatcttaacaatttttttawctcattatctgtacaataagagatttgaacaagatattctctagggtctattctaattgcaaacttttgtaactttaatggaaaacaatttaaaaataaatcaaagtttgtttctaatgaatgctatttcaagtttcattgaatagtttaaatgaataatatcgcatcggaa

SEQ ID NO: 94611 - DNA, 623 bp, Homo sapiens
agtgaaacttagggagattaaaagcaaagcaataatttaagtcgctatttccataaaaacatgtttctgagttggagcatagatcttccagtaataccctctgctcttttatttgtgaaatcactttccaataaggtattatggactatattcaataacacaacaacgttgacccagatcaatttctgaaattcagtcaggtgtatgacattggctcaaaactccttagcaagccatgaacgagcatgtgtgatcatgagttacatagtttgtttgataagggaattataatttcacaagaacaactgttgccttctacaagccagcctgcagaagattccttgtgcacttcacagaaggtagctgggtaaatgtacattgttctaactttttwaattataatttttctcttggtttcctaaagaataataaaaatgttaaaagctaaagcacttattagatgcttaaaaattaataaagaatgcataggtacaattgaattactatatattgcaagattataaatattcctggattataatataaaatagcattaatatctgtattttacataagaggaaattaggcggctgtggtcacttagctaatagatgtaggattta

SEQ ID NO: 94612 - DNA, 652 bp, Homo sapiens
cattattttgtgagaaacaccttaatacatgataagaatagaaaaagaatgtctatcttccatatcacagaataagaaaatatcaagcaaaataatatattatctatatggctagcagaagaaagtaaaacgataaaagacattaaatggtgcagagatgttaatagattcaactagtccaaacttcatattttaaaggcaagagcatttacattgtgtcaaaaaagttataaatatttatttcttatacactatttaaataacctaatataaacaaaatgctggaaacaaagaatgaccaaatatatgtcactcaaaagtgaaacaaatgtttatcaaaatgaggaaaaaatataggatataatttattagtaataaaaacatgaactgaagcaaaaggagtaatctactttatctgcaagttataggtactatttaaatgagaaacatttatttrtaagcacaaatatatgtagcatcaaaatatgtaaatcaggaaagtttataattaggaagtattgataaaaacaaatgatataatattttagagcatgtgcgaattatatagttaagaaaaacaacaaacattatggggtttgacctaaggtaacttaaaaaccacttagtggaatagcttttttgaaaagcagat

SEQ ID NO: 94613 - DNA, 594 bp, Homo sapiens
tgttttcatcagctttgtcagagatcagatggtcttacatgtgcagccttatttgtgggctctctttgctgttccatacgtctatgtgccttttattgtactagtatcatactgttttggttgtggtagccctgtagtattgtttttaagtctggtaatgtggtcccttcaactctgttctttttgcctaggattgcattggctatttgggctctgttttggttccatatgaaccttaaaataatttttctagttctatgaagaatgtaatttgtagtataataggaatagcattgaattagtaaattgctttgggcagtaaggccattttaatattaattcttcctgcccacgagcatgagatgtttttccattttaacctatgcaaaacatagcagctttagactatgtaaaacatagcagctttagattcacagcaaaatagaaaggaaggcacagagatttcccgtataccctccacccgacacatgactagccccscttatcaacatcccttactagagagtacgcgtgttgcaatagatgaacctagattgacaagtcgcattcacccaaagtccatgttttacctta

SEQ ID NO: 94614 - DNA, 594 bp, Homo sapiens
tgttttcatcagctttgtcagagatcagatggtcttacatgtgcagccttatttgtgggctctctttgctgttccatacgtctatgtgccttttattgtactagtatcatactgttttggttgtggtagccctgtagtattgtttttaagtctggtaatgtggtcccttcaactctgttctttttgcctaggattgcattggctatttgggctctgttttggttccatatgaaccttaaaataatttttctagttctatgaagaatgtaatttgtagtataataggaatagcattgaattagtaaattgctttgggcagtaaggccattttaatattaattcttcctgcccacgagcatgagatgtttttccattttaacctatgcaaaacatagcagctttagactatgtaaaacatagcagctttagattcacagcaaaatagaaaggaaggcacagagatttcccgtataccctccacccgacacatgactagccccccttatcaacatcccttactagagagtacgcgtrttgcaatagatgaacctagattgacaagtcgcattcacccaaagtccatgttttacctta

SEQ ID NO: 94615 - DNA, 569 bp, Homo sapiens
aatgagttttaatttcagctatacttcctagtagccaggttacaccgggcaaggtatttattttctcttggactcagtttccttatgtataaagtgagacaatagtagaatcattttcatagaactattatgataattcaatgtactgttatatgcaaaacagtccaatgggtggcatattttaagtatgctctttctttaaaataaagttttatataccatagtatatattttaactctatgccattcattgcactcacggtctttttttttttttttttttttgtgggagagatacaatgaaaaggttgatggttctttaatttgagccatctgatgcacatctgtgcagcaattcctttgagttgcttatactagtgttttagttaaaatagttcccataggtgttaaaacataaattttcaatgcctattaccacttcttttgcccagtccatgtttctgtgtctatgtagttgtaggcattatgacaacttgtattgtgctktatacataggcactccaacatcagaaggaaataaaagctcaccacagtccccggcaatttaa

SEQ ID NO: 94616 - DNA, 634 bp, Homo sapiens
gtgctttaagttgaaatcagtatgttgttttctaaggcactgtgcttttaggaaaaggaagtgaaaaaaaggtatctccttgttaaaatccacaagtttcttagaagtggcaatttcatggaggcatcacagtactccccttcaaactatactataaggctacagtaaccaaaacagcatggtactggtacaaaaacagacacattgaccaacaaaacagaatggagaacccagaaatgaagtcacatgcctaccaccatttgatctttgacaatgttgacaaaaataagcaacacagaaagaacttcctattcaataaatggtgttgagataactggcttygccatatgcggaagaatgaaactagacccctaccttttaccatatacaatcatgaactcaagatggattaaagatttaaatgtaagatgtcaaactgtaagaatcctggaagcaaacttaggaaacaccagtctagacatcagccttgggaaagaatttatgactaagtacctaaaagcaattgcaataaaaacaaaaatcaacaagtggacttaaccaaaatagagagattctgcacagcaaaagaaactgtcaacagagtaaacaaacattctacagaataggagaaaaa

SEQ ID NO: 94617 - DNA, 649 bp, Homo sapiens
tttgtatacaataagcataagtatacaatatgtatacatacacagtatgcaagtcaggggcaaaagctgyttattatatagctcatcatttgttaacaagtgaaggtgctgcacgacggggcagcagctgctaaatcccaatcatgaatgagatgcaagagccagcccaggggttaatagctctaagaccagtgaatcctgggacagccactgctgtccatgtagtccaaaacattgatcacagattgcttggtggaaggaagtaaagacttaggacgaaaaagattgtatggcaggttctggacacatcacaagcagaggagtacagggagtggtttcacaagatctgggtccgcggcatgctgttggcagctggggatcccctcaggtttcttggcagtagttcaggagctggattctgccatagctgttcctggcttagcagaggacatctctgagggtcacatgaaaaaaggggctattagaggggatgacagccccatggcaataacccctgagggaatgacagctgtggttttcacctgagcaattattgaaagacaagatgaccttagtttagattataggtaaagtactcgcacttacttaatgctatttctccttctttgctgtggcttctagaattttt

SEQ ID NO: 94618 - DNA, 649 bp, Homo sapiens
tttgtatacaataagcataagtatacaatatgtatacatacacagtatgcaagtcaggggcaaaagctgtttattatatagctcatcatttgttaacaartgaaggtgctgcacgacggggcagcagctgctaaatcccaatcatgaatgagatgcaagagccagcccaggggttaatagctctaagaccagtgaatcctgggacagccactgctgtccatgtagtccaaaacattgatcacagattgcttggtggaaggaagtaaagacttaggacgaaaaagattgtatggcaggttctggacacatcacaagcagaggagtacagggagtggtttcacaagatctgggtccgcggcatgctgttggcagctggggatcccctcaggtttcttggcagtagttcaggagctggattctgccatagctgttcctggcttagcagaggacatctctgagggtcacatgaaaaaaggggctattagaggggatgacagccccatggcaataacccctgagggaatgacagctgtggttttcacctgagcaattattgaaagacaagatgaccttagtttagattataggtaaagtactcgcacttacttaatgctatttctccttctttgctgtggcttctagaattttt

SEQ ID NO: 94619 - DNA, 536 bp, Homo sapiens
tttgatcattttcaaatcaaatgaagttgttcacattatttcagataaaatgtgttttcttccaggcttagaggtcatgctcttgggtcaaatgtctgccaggaactcttttctggggagtaaaattgctgacaggatgatcacagattcaactacatcatcagggcagccaaggagactttaatatctatgattcaagctcactggagaggtcccctgggtcaaaaacttttaccaaaaaaaaagaaaaaaawttttttttaaaaaagcattcttttcaaggaagcttccacacccactgcctcttaaaatacactgtttggaacatagtgggctctcaagaaatagcgttggatgaacacgccaaacttagactaggaaatgtgggcgggtggatagtgttgtgcataattccggggtttgtttcaagtcattaaagatcctcactcaacatataaagtcaatacaaaaataatacttccgtgcattttatacgctccacaagaggtttccatgcatggtatcctatttggttc

SEQ ID NO: 94620 - DNA, 636 bp, Homo sapiens
gataatagctaaagctgcatcaccaaaagagattttatttcagtaggaagcacaagaaaactagaaaatgtggcygggtgcagtggctcatgcctgtaatttcagaactttgggaggccaacgtgggtggatcacttgagatcagaagtttgagaccagcctaggcaacatggtaaaaccctgtctctaccgaaaaaaaatacaaaaattagccggatgtggtggcacacacctgtagtccaagctactcgggaagctgaggcaccataatcgcttgaacccagaaggcgcaggttgcagtgagccaagatccccccactgcactccagcctagattacagagtgaaaccctgtcttaaacaaaaacaaacaaacaaaaaagtagaaaatgtggcagacacagaagagtgagacactaatcgtggaattccacatatgctaagaaaagatgtacaataagtcatcctgtgtaaacagtgtcttccaagactctccacaattcatggaatttcccactcaaggactctgtgtcaatttttaatgaaccagttactgaacattgtacctaagaccatgacaacttatgctcagccattccatgctcttccatacccagtgcagacaaatttattgggg

SEQ ID NO: 94621 - DNA, 716 bp, Homo sapiens
aggagctcatgcaatattaccaggactctctgtctttcrccttgcttttgtttggctttattctgcagactgggttgcatccatccagttttgcctcatcagggccttgcctgttgcctgccacgcttgccttggctgtgcttttaaacatctccagagctatctgcaacagaactgcatctttagccagctgctggcctgtgtcagttctttctctgcagctgatagggcctctttgtgggctgccacccaggtcctctggctctcatccttggccatttactgctggtaatcaaccctcagtctctcatcatctttctgcagggtggcagcatgacttaacattactcaagcaacgctgttgtctttataggatttgttcccccagatttttcaaaacccacatcattgcacctgccacaagcttctctgccactggacatttggccaggccactgctggtgaaatctgtcatattaagagccataccacgtaacagcggttatccttgccctacctaccacacagaccttatgctcttggcctgccaggcagtaagtgaggaagtcagaaattcttgtctttccacatgtattgtctgacttctttagttactgcttaagcttctaggtcctccaagaaacagacgttaacattggattaagtgtgtgggaattttattagggcaaatgcctgtgagaaaatgggaaggggat

SEQ ID NO: 94622 - DNA, 716 bp, Homo sapiens
aggagctcatgcaatattaccaggactctctgtctttcaccttgcttttgtttggctttattctgcagactgggttgcatccatccagktttgcctcatcagggccttgcctgttgcctgccacgcttgccttggctgtgcttttaaacatctccagagctatctgcaacagaactgcatctttagccagctgctggcctgtgtcagttctttctctgcagctgatagggcctctttgtgggctgccacccaggtcctctggctctcatccttggccatttactgctggtaatcaaccctcagtctctcatcatctttctgcagggtggcagcatgacttaacattactcaagcaacgctgttgtctttataggatttgttcccccagatttttcaaaacccacatcattgcacctgccacaagcttctctgccactggacatttggccaggccactgctggtgaaatctgtcatattaagagccataccacgtaacagcggttatccttgccctacctaccacacagaccttatgctcttggcctgccaggcagtaagtgaggaagtcagaaattcttgtctttccacatgtattgtctgacttctttagttactgcttaagcttctaggtcctccaagaaacagacgttaacattggattaagtgtgtgggaattttattagggcaaatgcctgtgagaaaatgggaaggggat

SEQ ID NO: 94623 - DNA, 716 bp, Homo sapiens
aggagctcatgcaatattaccaggactctctgtctttcaccttgcttttgtttggctttattctgcagactgggttgcatccatccagttttgcctcatcagggccttgcctgttgcctgccacgcttgccttggctgtgcttttaaacatctccagagctatctgcaacagaactgcrtctttagccagctgctggcctgtgtcagttctttctctgcagctgatagggcctctttgtgggctgccacccaggtcctctggctctcatccttggccatttactgctggtaatcaaccctcagtctctcatcatctttctgcagggtggcagcatgacttaacattactcaagcaacgctgttgtctttataggatttgttcccccagatttttcaaaacccacatcattgcacctgccacaagcttctctgccactggacatttggccaggccactgctggtgaaatctgtcatattaagagccataccacgtaacagcggttatccttgccctacctaccacacagaccttatgctcttggcctgccaggcagtaagtgaggaagtcagaaattcttgtctttccacatgtattgtctgacttctttagttactgcttaagcttctaggtcctccaagaaacagacgttaacattggattaagtgtgtgggaattttattagggcaaatgcctgtgagaaaatgggaaggggat

SEQ ID NO: 94624 - DNA, 716 bp, Homo sapiens
aggagctcatgcaatattaccaggactctctgtctttcaccttgcttttgtttggctttattctgcagactgggttgcatccatccagttttgcctcatcagggccttgcctgttgcctgccacgcttgccttggctgtgcttttaaacatctccagagctatctgcaacagaactgcatctttagccagctgctggcctgtgtcagttctttctctgcagctgatagggcctctttgtgggctgccacccaggtcctctggctctcatccttggccatttactgctggtaatcaaccctcagtctctcatcatctttctgcagggtggcagcatgacttarcattactcaagcaacgctgttgtctttataggatttgttcccccagatttttcaaaacccacatcattgcacctgccacaagcttctctgccactggacatttggccaggccactgctggtgaaatctgtcatattaagagccataccacgtaacagcggttatccttgccctacctaccacacagaccttatgctcttggcctgccaggcagtaagtgaggaagtcagaaattcttgtctttccacatgtattgtctgacttctttagttactgcttaagcttctaggtcctccaagaaacagacgttaacattggattaagtgtgtgggaattttattagggcaaatgcctgtgagaaaatgggaaggggat

SEQ ID NO: 94625 - DNA, 716 bp, Homo sapiens
aggagctcatgcaatattaccaggactctctgtctttcaccttgcttttgtttggctttattctgcagactgggttgcatccatccagttttgcctcatcagggccttgcctgttgcctgccacgcttgccttggctgtgcttttaaacatctccagagctatctgcaacagaactgcatctttagccagctgctggcctgtgtcagttctttctctgcagctgatagggcctctttgtgggctgccacccaggtcctctggctctcatccttggccatttactgctggtaatcaaccctcagtctctcatcatctttctgcagggtggcagcatgacttaacattactcaagcaacgctgttgtctttataggmtttgttcccccagatttttcaaaacccacatcattgcacctgccacaagcttctctgccactggacatttggccaggccactgctggtgaaatctgtcatattaagagccataccacgtaacagcggttatccttgccctacctaccacacagaccttatgctcttggcctgccaggcagtaagtgaggaagtcagaaattcttgtctttccacatgtattgtctgacttctttagttactgcttaagcttctaggtcctccaagaaacagacgttaacattggattaagtgtgtgggaattttattagggcaaatgcctgtgagaaaatgggaaggggat

SEQ ID NO: 94626 - DNA, 648 bp, Homo sapiens
aagagatccagagggaaaacgtgttgctaatccaagtatttgaataatatttatcatgcgtggagtacatgcaaagcacctactgaatgctctttgtgagttaaagaggttggcagatttgagtttatgcaaaccaatataatatgacaacatgatatcattatgtctattatatttatagaattatattaactttatgttatgtagttttgcaaacaaggtcctgtctataataatagcaattttattttatttatttatttattttttagacagagtcttactccatcacccgggctggagtatagttggtgccgtctcggctcactgcaamctccacctcccagattcaagcgaccctccagcctcagcctccttagtaactgggattacagacatgcaccaccacatccagctaattgataacagtaattttatttatttatttatttgacagagtctcgctctgtcacccagtctggagtacagtggcatgatcactacaacttctgcctcctgggttcaagcaattcttctgcctcagcctcccaaggagctgggattataggtgcgcaccaccacacccagctaatttttgtatttttagtagagacagggtcttgccatgttggccaggctggtcttgaa

SEQ ID NO: 94627 - DNA, 829 bp, Homo sapiens
cacagctggcctgatcttgggctgcttttctttccacataaaggtgatgatcagacccacggcccaaagctctgcccrtggggacactttctccctggttggggctgaagtgcagcagcgggccactttcggtgtgtgcccacataccatgctaaccttgccatgaaaccaggccggcctttcctcctacttctgctaggcataattacccatccccctttatggtcatcatgtgagcagacacagacacggtgcgacaggggtagaggggacaggagtccgagccacctgcatgtggccaacatgcaccctctgaccccatctcaggacctactgggtctcaggcctcatgatggtcacttctgggcagcaccatcacctcgcgtccctcgtcagaagctctgtctctgccgggaccccatagcgtcccaggagctgctttttcaaacagagtacaattatctgctgcagatggccccgcctgaccccagaactctcgtatctatgttgtgactttcctcttgggatttgccataaactccacccagcatcttttcccaccccagacacttcaaggatatgcgaagtcacacattccccaggttggattcacaggccgtccctggtgggtaatgtaccagtcctgaggtgtgcatagggctgcaggctgcacggcccataccttctgcagggccctttcctgcctggggcccctccgtgccagcagcctcctgtgtggtttgataaacatattggaacagtcagtattcctaggcgtggaacatgctgcctccagaaccctgaggcctccacagcacaatgcttcctt

SEQ ID NO: 94628 - DNA, 829 bp, Homo sapiens
cacagctggcctgatcttgggctgcttttctttccacataaaggtgatgatcagacccacggcccaaagctctgcccgtggggacactttctccctggttggggctgaagtgcagcagcgggccactttcggtgtgtgcccacataccatgctaaccttgccatgaaaccaggccggcctttcctcctacttctgctaggcataattacccatccccctttatggtcatcatgtgagcagacacagacacggtgckacaggggtagaggggacaggagtccgagccacctgcatgtggccaacatgcaccctctgaccccatctcaggacctactgggtctcaggcctcatgatggtcacttctgggcagcaccatcacctcgcgtccctcgtcagaagctctgtctctgccgggaccccatagcgtcccaggagctgctttttcaaacagagtacaattatctgctgcagatggccccgcctgaccccagaactctcgtatctatgttgtgactttcctcttgggatttgccataaactccacccagcatcttttcccaccccagacacttcaaggatatgcgaagtcacacattccccaggttggattcacaggccgtccctggtgggtaatgtaccagtcctgaggtgtgcatagggctgcaggctgcacggcccataccttctgcagggccctttcctgcctggggcccctccgtgccagcagcctcctgtgtggtttgataaacatattggaacagtcagtattcctaggcgtggaacatgctgcctccagaaccctgaggcctccacagcacaatgcttcctt

SEQ ID NO: 94629 - DNA, 1084 bp, Homo sapiens
tgcatgcacgtgggcaccaagaaacggacaagaacagttaaagcagagctgctcccaacagcctcagaatttactcagcccaattgtccttaacagtaggatggataaataaattgtggtgtatttactgaataaaatacagtagctggctcacacccagtactttgggaggccgaggcaggcggatcacctgagggcaggagtttgagaccagcctgaccaacatggagaaattccgtctctactaaaaaaatacaaaattacctggccgtggtggcacatgcctgtagtcccagctactcgggaggctgaggcaggagaatcacttgaacccaggaggcggaggttgcggtgagccaagattgcgccattgcactccagcctgggcaacaaggtagaaactccacgaaaacaaatgaaccttggctgcatggagcaacatgragaaatctccaaaaatgattttgagtgaaagaaaccaagcacaaaagaaggtgtactgaaagattccatttatatgaaattcaaaaagcaaaactaaactctaatatttaagaatacaagttgtgatggtaaaactgtcttttaaaaaatcagggaaatgacttccataaaaatcagggtagtggctactttaatcagagagggatggtatggtgattggaatacagaggaggtttctggaatgctggtaatattttatttcttgaatagggttatatggatgttcactttgggataaaccattgagcgatacatttttgttttttccctgttctatatttgttttaacacacacacacacacacacatacacacacacacacacagacatacacacacacacaaacatatgcgcacacacaattataaaaagaaaaaacagaatggttacatatactaagtacagtaaattacgaaatgctgagtatcagtctttaaacatgaagtagatttatacatagagatttggagagtttttgaagctgtaccattaccactgagaaaataaaacagtctgcagaatgatgcacacaatgcaatacatgtatatcaaaacaatgctatacatgtttacatatac

SEQ ID NO: 94630 - DNA, 720 bp, Homo sapiens
taagcatattgactgaagaaatctggaaacctagtaccgcggcaccatatcgttaccccaaaggaaaatgcatgcacgctgtcagagatgacgaacactgcgtctggaaacttcttaagggcacccacgtgtcctcagctgcagacagcagcgaggagacacccagggaattcgagacagcggaaggcggaagggtcccgcaacaacccaccctccagctcaggtgagttcagagtgagaacgcaccgccaggcttggacaaaggcacccggcctacaccccagcggctccccgccggggcctacgtggacttcagcctccagccacagggacaagagctgctggccagggctgcccgcctgggctcactgcgcctgcgcagtgagcagcgcgccccaggtcttctgcccgggcccactgcgcctgcgcacggagtagtgcactctcgtcggcggcaccggcccactgcgcctgagcacgtagcggtgcatttcgggacstgtagttttccccggcaggacggtagaagtcgtggtttgtgcgcggccaggcgctggagcctccgctgccgggagcagtaagtgtgtgacgtcggggtagaagggagtgacccaaattccaaaagctctttgggatgctgcgatgtcgcggccggccccgcgctcgggttttccctcctagacaaaagtctgccggctcccggtcgcgccgggtcgggga

SEQ ID NO: 94631 - DNA, 668 bp, Homo sapiens
gtttactgagactctaatcaccgctcagcaagaaatctatgctaatcacatcaatattataacacaaacaagcaggtggaagaaaatccaaagatagctaatggataatactttgtctttggttcaattataggacttggtttctaaaggagctgctaactcattcattcactcatcaaacatgtattgatcacayataacatggcaatgactgtgctaggagctggcaatactaaaattgtttcttcattccagaacatcagagattagttgggaacagagtcaccctctactgagaaaaggccatcagaaggccggcaggggtcagctccatggagaagaggtctggggcatcccaggcggaggcaactgcagtttccatcctacggtgccctgtgtcctgggaacctcaggtagttgagcaccactgcactaatgagctgagtgagggagaagcaagagctgagacacaacagggtccaaatgagaggccttattcacaaagtaaggattttgaacattaccttatgaacaacagataagtactgaagagtatctagaaacaggatagtgagatgatgacatacataggtttttagaaaaatcgcttgggccagtcatggtggcacgtgcctataatcccagcactttgagaggtggaggtgggt

SEQ ID NO: 94632 - DNA, 747 bp, Homo sapiens
tttccaaattttctacaatggaaatccatgacttttataatcagggggaaaattattattcaaagaaatggatttgtcccaaagaaaactcccccttttcagtgacagtatggttccaatagcccagcacatggataagagaagtgactacaataaagattaccatgatcccaacctctaaaacattctctctccgtgcctcctcagcaaggtatcctcctgctaaaggcagtgtctacacccgtagggggaatactattacagacactctagagaaccaggccaacagtgacttttcagttacattracggctcaaagtttgaccacaaagcagcattagcagagtgggttctgtctattcaacaacagatgatcctgcctcccaattatcacagataagccattcagcaaatgcaccatcaacccaaacaatacttgcagggttctagcactctgtgcgatgagtattcaggcgaacggctaaagttcgtgtctggctaattttaaaatgtgctgactataaaattttcccagtattgccagtatagggaagagcacctctctaattaaaacagctcctctgttctctgtttcttctttcaatgacttaacattaccatcgccagctttgtcttaggtgtacaacagtctagagtacttgtaactgatgcccagtgaaagggcaaaactgagccgttcaaatgcttcacagcctgagcggttgtgtctgcgtgcattaatgagca

SEQ ID NO: 94633 - DNA, 715 bp, Homo sapiens
aatgtcactgaatgagctgctataacactaactatttttactgcttttgcatgttcctttctacttttatctcatctttgaaagatgttttacgacatctttgcaagatgaatggaaaaggcaatggggcatgcactgaaatgtggactatgctaaagctttgcaactcaagaccaaattccacatagatacttcctattcacttccatagtctgcttgctgctttccctgcctcctccaccctatcccaccccaaccaattcagatggacttcaaaaattcaagtccagtagggcacagtagcttataccagtaatcccaatgctttcagaggccaagtcaggagatcacttgaggccaggagttcaagaccagcccaggcaacacagtaagaccctgtctctacaaaaaatataaataaataaaaattttaaattagctgagcatggttgtgggtgcctgtagtcccagctacttgggaggctgaggcaagagtattacttgagcccaggagtttgaggttataatgagctatgattgcaccacttcactccagcctgggtgacagagtaagaycctatctctaaaatgaatgaataaatgaatgaatgaatgaataaataaataaatggattaatttaaaaaaaatcaaatctgataatgatattacctggcctaatcctttccaatggttccatgtcacttaccaaggaca

SEQ ID NO: 94634 - DNA, 715 bp, Homo sapiens
aatgtcactgaatgagctgctataacactaactatttttactgcttttgcatgttcctttctacttttatctcatctttgaaagatgttttacgacatctttgcaagatgaatggaaaaggcaatggggcatgcactgaaatgtggactatgctaaagctttgcaactcaagaccaaattccacatagatacttcctattcacttccatagtctgcttgctgctttccctgcctcctccaccctatcccaccccaaccaattcagatggacttcaaaaattcaagtccagtagggcacagtagcttataccagtaatcccaatgctttcagaggccaagtcaggagatcacttgaggccaggagttcaagaccagcccaggcaacacagtaagaccctgtctctacaaaaaatataaataaataaaaattttaaattagctgagcatggttgtgggtgcctgtagtcccagctacttgggaggctgaggcaagagtattacttgagcccaggagtttgaggttataatgagctatgattgcaccacttcactccagcctgggtgacagagtaagaccctatctctaaaatgaatgaataaatgaatgaatgaatgaataaataaataaatggattaattwaaaaaaaatcaaatctgataatgatattacctggcctaatcctttccaatggttccatgtcacttaccaaggaca

SEQ ID NO: 94635 - DNA, 661 bp, Homo sapiens
gccatcgcaaaagaataaaatataagtctagaaatgcggaaggtactgtacagcatcacagctacctaaacttcctctrtgggaagacagggaaagtaggcgttagtggcaagacagagtggctttgagtctaagtgtcataataaactctgacggggaaaaataaggggcagcatttgcacatgtgtgctgcagattacccgctgtgaggcagcggtgagtttgttgccttgtgttttaaaaagtaattttctgggccgggcgtggtggctcacacctgtaatcccagcactttgggtggccaaggcaggtggatcacttgaggtcaggagtttgagaccagcctggccaacgtggtgaaaccttgtttctactaaaaatacaaaaattagctgggcgtggtggcgggcgcctgtaatcccagctacttgggaggctgaggcatgagaatttcttgaacccaggaggcagaggttgcagtgagctaagattgcgccactgcactccagcctgggcaacagaacgagacttcgtctcacaaaaaaaaaaagaagtaattttctgatctagcatgtggattcttgagtcatcttaactaagagattgggagcagcctgtgtggctgacaggccctattgctcatgacttgtgtatgtgtaca

SEQ ID NO: 94636 - DNA, 661 bp, Homo sapiens
gccatcgcaaaagaataaaatataagtctagaaatgcggaaggtactgtacagcatcacagctacctaaacttcctctatgggaagacagggaaagtaggcgttagtggcaagacagagtggctttgagtctaagtgtcataataaactctgacggggaaaaataaggggcagcatttgcacatgtgtgctgcagattacccgctgtgaggcagcggtgagtttgttgccttgtgttttaaaaagtaattttctgggccgggcgtggtggctcacacctgtaatcccagcactttgggtggccaaggcaggtggatcacttgaggtcaggagtttgagaccagcctggccaacgtggtgaaaccttgtttctactaaaaatacaaaaattagctgggcgtggtggygggcgcctgtaatcccagctacttgggaggctgaggcatgagaatttcttgaacccaggaggcagaggttgcagtgagctaagattgcgccactgcactccagcctgggcaacagaacgagacttcgtctcacaaaaaaaaaaagaagtaattttctgatctagcatgtggattcttgagtcatcttaactaagagattgggagcagcctgtgtggctgacaggccctattgctcatgacttgtgtatgtgtaca

SEQ ID NO: 94637 - DNA, 685 bp, Homo sapiens
agctgagggcagcagaatgaaaagcatgctcactgaacagggagataaacccaccccatccaatggtgttgaaaagtatggtgtagtcttggagggaccagtgttcccaaacttgcaggatatcrccggaacccaaactgaaattatggtttaatgcctctcaaaactggtgagcccactgttcttctcacatgtatctccatatgtggacgtgcaccagagcctttttctaccctctgaaggagagaagcgttctgtttaggggctcgtagaagagaggaacatgagaaggctgagaagagtggaggacccaacagagaactaccatctccagtctcccaggctgggttgagcctcagcagaaaagcgtgttgacctcagcacgggcagtggaaaaccagacatccaatgtgtttgcaagaaatattcatttagattcacagagctcttggtctaagcctaggatcttggtaggagagggaggcgggggtctttggcctctgggattcattgtatcaaccaccagcaatctttggaatgggccagctgctccctaggccagagctgttagggctggaggcggggaggccatttggacagttgaagaactctgtaaaactaccttatgcacctgcaggtaaagtcacattttggggttatcaaagtctaaattaaatggtacata

SEQ ID NO: 94638 - DNA, 669 bp, Homo sapiens
ggatcctcagaaaacttaatttcatcactattaagtattctaaaagaacatcttcagagtggccctgaagacagtcatggatgagggttacagacgtgagctgagcagggcagccacgaaggagcaaggcagggccccgtgggagacttggaaggtggcaatgtttatgtmgagatataaataggttttgataagtttggtctaaaagaaatagtcatctcaatttgcagttaagcgttctatgcttctccccaaaacttcattgctgtgcccagcagggtgcatgttttacacagatgatgggcaaacattcttaagtgcaaaaggaaaccagacaaaaagtccccatgacgagacagccgagtgggagtgcatctgactctgactgcaggcccaaaaagatggaggtgaggaccaggacaggagctggaccactggggaagcagtcaatctaattttttaagattaaataaaataagtccaagatgaaagcctccttgagctgtcgtccatacataataccccttaaacaaaaaaaaagcggggttggtggtggggactaatattactgaaaaaacatactgagaaatgtaaaatttggtctttagtctttgaaaaacaaaataaacttggcatctgactttggttttctcacatcagagtctactt

SEQ ID NO: 94639 - DNA, 669 bp, Homo sapiens
ggatcctcagaaaacttaatttcatcactattaagtattctaaaagaacatcttcagagtggccctgaagacagtcatggatgagggttacagacgtgagctgagcagggcagccacgaaggagcaaggcagggccccgtgggagacttggaaggtggcaatgtttatgtagagatataaataggttttgataagtttggtctaaaagaaatagtcatctcaatttgcagttaagcgttctatgcttctccccaaaacttcattgctgtgcccagcagsgtgcatgttttacacagatgatgggcaaacattcttaagtgcaaaaggaaaccagacaaaaagtccccatgacgagacagccgagtgggagtgcatctgactctgactgcaggcccaaaaagatggaggtgaggaccaggacaggagctggaccactggggaagcagtcaatctaattttttaagattaaataaaataagtccaagatgaaagcctccttgagctgtcgtccatacataataccccttaaacaaaaaaaaagcggggttggtggtggggactaatattactgaaaaaacatactgagaaatgtaaaatttggtctttagtctttgaaaaacaaaataaacttggcatctgactttggttttctcacatcagagtctactt

SEQ ID NO: 94640 - DNA, 729 bp, Homo sapiens
gtctcccttccaattgcaccattctctgtattttctcagtaagtgtctgcaggatgagtgagtacatttatgaatgaatcttccatttaaatattgagttccttatctcatacctgcagtgcaagagaaagcccctcgtgttgcagtcagaaaaccattgctgaccttggttgaccttagatgggtcacctaacctttcgaggctcaactccttcattcataaaaatgaatggatgctttcttgaggttgctgtgaggacatccctgagatgatgcctgtgaagaaagtctgcaaactgtgaagcactatacagattaacacagcaacatactgcatgtgcatggctgtgcatgcgtgtatgtgggtgtaaatgtgaggctttttgttcttggcaactgttcataactgtacctcggtgaactcttaggtaggtcaggaagctaaggtttactattgtgcagtgttcagcatgcaactgytttttggaatgtcactgtctttctgaatgttccttttggtttattaggttagttcacattaagaagaacttggtgaggaagccacatggaagaaatggaaaggctttctttggcagctctaccctaagagggcaaaggggtcagttctgcgagagaacccccacaaggaggctggcccgggacaagcattccaggcctgtctcaagtctgaatacaaataaatcccttctcaggtggttttcttcataa

SEQ ID NO: 94641 - DNA, 823 bp, Homo sapiens
acctctacggtggggagacacctggccctgcactttgccacccagcagtcactgtgtgtgttacgtgtattcctggaagccattcccacggctcagagttaaccacaaattacctgcacatgactgctgacaacataagaactactcactggtcccaactttggtgcacctcccactcccttagcactgctccagtatgcctgaccactgcactacggccaggacacccagagaggagagagagcatgaacagaaacagacagcgatcytcaggattgccacgaaaatagcttactcttgcaatgttcgcaaaatgccacagccatgcagctttctcccaggacttctaggctccagctttccaggaaatctcccatttgagctcaacaggaaagttctggaaccaacctagcttctctgtagtgcttgggaggtctgaacccactgttctcaagccagtgagacccgggcgggccctttacctggacttctccaacctggacccctgcaaacccgtctgtctctgcttctgcaggtgaagcgggaggaggagaccaaggccagcgcagcccacccgccctgcaccagtgcacggtccccaccctttctcttcctttccgtgtctttacttgtcagccacctcatttgattagttcagaagaggcacaggtagctcattgcctttctctccttattagtgaagagatagcacttggtgtttctagtccaggaagcatggaggagccatccccgagcagacaggggtaaattggtggtgaaatgatcactggggttcagacaagttagatctgatatgaattct

SEQ ID NO: 94642 - DNA, 656 bp, Homo sapiens
cctggaaggtgcgagccccactgtttgggataacacattaacaactctactctctgagctcttctcgctggctctcatttaaaggaaacatttaggtctccaagttgatactgcatcccaccagggaacaggctgcagccaccaatgcgcagaccttggcaaattcctccagttcacgggcctcagtctccccttctggagaaggggcttggctagaagagtttagggtttctttccatcttaaaatacaaaggtggggtaaaacttggaatgggaggagttattgkctcaattggacagaaaattccacttttcagacagaatgctggacatgattaagttattaccagtgtcttctcaatccctaagcgacaggccaagaactggtctcctccctgggtaggacagagtgatatcaggacaaggcagaggcaggagggggagcactaagctgtagctgtccaggcgagagcgggcttggagtgtcagccctaatccgggattagtgggaatggaggtgggggagggcagccacgaatggacacagcagcccctgctctcccacaccgccatcactgtcacaacagcgatggcccaggatgctgggatgtgtgtgacaatcgctggactcggggcggccaggaatgcaaacacca

SEQ ID NO: 94643 - DNA, 727 bp, Homo sapiens
tcccacctggttaagcccaaccaggaggttgaggctgcartgagctatgattgcacaactgcactccagcctgggtgacagagcaagactctgtctcaaaaaaaaaaacaaaaacaaaaacaaaaaaagggcttctttttttccccccctcataaaaggcatatcctacaccaagttttcctcaaatatgaataggcccaagaaccacctgtagatcttgtagagctgcagattcggattcagtaagtctgggacagggcataggagtctcgcaagctcccaggtgacactgatgttgctggtctggggccacactttgaacagccgggccccaagcctctctcgactccaggagacatccagggctggcttgctcattgcttctccttagcatggtgcggtgcccactctgggtgccggggtccacgtccccatcattattatggtcagcatatagctgtgacctttctgacatcaatgtggatgtgcgataagtccatgtttgcgggaacctaaggaaagacccacttactcatcatctatgaaggtgtgggtaggagacaagagagccgtgcagagaaacgagagtcaggaagagaatgaggagctctgggcatggagatggacaccagggaccagtggggaagctgaacggggcctgggcctctgcaaagagacctggcggggagggggcagaagtagggtgctcacctgttggcatgtccag

SEQ ID NO: 94644 - DNA, 727 bp, Homo sapiens
tcccacctggttaagcccaaccaggaggttgaggctgcagtgagctatgattgcacaactgcactccagcctgggtgacagagcaagactctgtctcaaaaaaaaaaacaaaaacaaaaacaaaaaaagggcttctttttttycccccctcataaaaggcatatcctacaccaagttttcctcaaatatgaataggcccaagaaccacctgtagatcttgtagagctgcagattcggattcagtaagtctgggacagggcataggagtctcgcaagctcccaggtgacactgatgttgctggtctggggccacactttgaacagccgggccccaagcctctctcgactccaggagacatccagggctggcttgctcattgcttctccttagcatggtgcggtgcccactctgggtgccggggtccacgtccccatcattattatggtcagcatatagctgtgacctttctgacatcaatgtggatgtgcgataagtccatgtttgcgggaacctaaggaaagacccacttactcatcatctatgaaggtgtgggtaggagacaagagagccgtgcagagaaacgagagtcaggaagagaatgaggagctctgggcatggagatggacaccagggaccagtggggaagctgaacggggcctgggcctctgcaaagagacctggcggggagggggcagaagtagggtgctcacctgttggcatgtccag

SEQ ID NO: 94645 - DNA, 1387 bp, Homo sapiens; identical to SEQ ID NO: 94546

SEQ ID NO: 94646 - DNA, 1387 bp, Homo sapiens; identical to SEQ ID NO: 94547

SEQ ID NO: 94647 - DNA, 1387 bp, Homo sapiens; identical to SEQ ID NO: 94548

SEQ ID NO: 94648 - DNA, 626 bp, Homo sapiens
taattggctcacagttaagcccctttcaaccttcgcactgtcgtggttgtcaggactgccaagccgccctcccatgcctgctcctcatgcctgtccactctacaagccagctgtaaaacccctgcccccaccctctgtgtcggtccatggtcaccaccctgtcacctccagcatcagtcacgcctccgtggtgggcgtgggggccccacccgaggctcccgggcatttctctgatggctaatgagactgatctttgatttttgatctgctcattggccattcagcttcctcttctgtgatgtggtggcctctgcccacattctgctggggcagtttgtcttttccaagttgatcgcaggtttttttctggttttttkttttttgtttttgagacagagtctcactctgtcgcccaggctgcagtgcagtggcaagatctcggttcactgcaacctccacctcccgggttcaagcgattctcccacctcagcctcccaagtagctgggattacaggcacctgccatcatgcccagctaatttttgtatttttactagagatggggtttcaccgtgttggccaggctggtcttgaactcctgacctcaggcgatccgcccgcctcggc

SEQ ID NO: 94649 - DNA, 626 bp, Homo sapiens
taattggctcacagttaagcccctttcaaccttcgcactgtcgtggttgtcaggactgccaagccgccctcccatgcctgctcctcatgcctgtccactctacaagccagctgtaaaacccctgcccccaccctctgtgtcggtccatggtcaccaccctgtcacctccagcatcagtcacgcctccgtggtgggcgtgggggccccacccgaggctcccgggcatttctctgatggctaatgagactgatctttgatttttgatctgctcattggccattcagcttcctcttctgtgatgtggtggcctctgcccacattctgctggggcagtttgtcttttccaagttgatcgcaggtttttttctggttttttgttttttktttttgagacagagtctcactctgtcgcccaggctgcagtgcagtggcaagatctcggttcactgcaacctccacctcccgggttcaagcgattctcccacctcagcctcccaagtagctgggattacaggcacctgccatcatgcccagctaatttttgtatttttactagagatggggtttcaccgtgttggccaggctggtcttgaactcctgacctcaggcgatccgcccgcctcggc

SEQ ID NO: 94650 - DNA, 683 bp, Homo sapiens
cacagggcagattgtgctgggggacaagggggtcccctggtaggcaagtgtattcatgtgatgtgtgtgcctgggcacgtgtgtacattatgtgaggacgtgcacataccactcacctagccctgcttccagctaagagaaaggaagccagaaacatgcaaagatgccaagcaagcaccctgggcacggttttccagacctcgcagggaacagagtaaaagctaggaaygctgggcttcacgaaggagcagagggggcaggtgcggagggaggaggccggcagagagcaggtccctcctggagcagcgcgatcgggcgccgaggcctcatgcaacatccgacaactactcatggcaaggagaattctggactgactttctattgttttgattaaaagtaattttatccaaaaatccaaaatgtactggacgtgccaatcagaatggaacagaaggaaatgccgcactacctggctgcctctcccctcggctgctggtggctgcccatagacccctgtaaacagctgatgcatgtcccacctgcaccatagggcctggaggaagcggctgtagcaggactcgcagagttccccgtgcgtggccaccggccctgcctccatcgctgttgtctccccgcaggccaaggcgaggcaggtggggcgcactgcatggctctcaggggaa

SEQ ID NO: 94651 - DNA, 683 bp, Homo sapiens
cacagggcagattgtgctgggggacaagggggtcccctggtaggcaagtgtattcatgtgatgtgtgtgcctgggcacgtgtgtacattatgtgaggacgtgcacataccactcacctagccctgcttccagctaagagaaaggaagccagaaacatgcaaagatgccaagcaagcaccctgggcacggttttccagacctcgcagggaacagagtaaaagctaggaacgctgggcttcacgaaggagcagagggggcaggtgcggagggaggaggccggcagagagcaggtccctcctggagcagcgcgatcgggcgccgaggcctcatgcaacatccgacaactactcatggcaaggagaattctggactgactttctattgttttgattaaaagtaattttatccaaaaatccaaaatgtactggacgtgccaatcagaatggaacagaaggaaatgccgcactacctggctgcctctcccctcggctgctggtggctgcccatagacccctgtraacagctgatgcatgtcccacctgcaccatagggcctggaggaagcggctgtagcaggactcgcagagttccccgtgcgtggccaccggccctgcctccatcgctgttgtctccccgcaggccaaggcgaggcaggtggggcgcactgcatggctctcaggggaa

SEQ ID NO: 94652 - DNA, 734 bp, Homo sapiens
catgagtccatcaatccattaacctgcccatttaagataaattaataagttctcctatttctttcagcaccagcatcctcccatcagatrcctgtggcttgtaacattaacctcttcttcaacttctccctggcttcttctcccagaggctcatgcagaaacacagagtggcactgagctgcaaatgctgagactgagaaagccttgcctcctgttgaggtctgcgcagatcgcctcctcacccagggcaaaacagctccttggtcagaggggccgaggggagcatcctcacatcatcccctggggcgggcaggcagggcaaccctcactggccacagcagtgtttcttatttgcccctcagttaaagcacagattagaacacagggaaccttagtgcatattccctggttttcattttgtttatttaaagacagttcttttccttcctccgtgaggcagctaagtagatttaacagtgattcattaaagctctgtctgcagatcatcaaatcagtcagtggaaaggtttacattgagtcaaatcactagatatttcctccacatagtgataaattcccaacggtgagtagcttttccactgaagcaaatggttgttttcatgttctgtaacactaatactgtaacaatgtactattgtgtaatatattaattacagcctgcaagcatcataactcagctgaagaagccttgcgtaattttccaaagacgtttt

SEQ ID NO: 94653 - DNA, 734 bp, Homo sapiens
catgagtccatcaatccattaacctgcccatttaagataaattaataagttctcctatttctttcagcaccagcatcctcccatcagatgcctgtggcttgtaacattaacctcttcttcaacttctccctggcttcttctcccagaggctcatgcagaaacacagagtggcactgagctgcaaatgctgagactgagaaagccttgcctcctgttgaggtctgcgmagatcgcctcctcacccagggcaaaacagctccttggtcagaggggccgaggggagcatcctcacatcatcccctggggcgggcaggcagggcaaccctcactggccacagcagtgtttcttatttgcccctcagttaaagcacagattagaacacagggaaccttagtgcatattccctggttttcattttgtttatttaaagacagttcttttccttcctccgtgaggcagctaagtagatttaacagtgattcattaaagctctgtctgcagatcatcaaatcagtcagtggaaaggtttacattgagtcaaatcactagatatttcctccacatagtgataaattcccaacggtgagtagcttttccactgaagcaaatggttgttttcatgttctgtaacactaatactgtaacaatgtactattgtgtaatatattaattacagcctgcaagcatcataactcagctgaagaagccttgcgtaattttccaaagacgtttt

SEQ ID NO: 94654 - DNA, 650 bp, Homo sapiens
ttttwaaattttgtgtttgttgttggtgtctagaaatacaattgacttttgtaaattgttcacacgtccagcagttttgctgaattcttgaattcatttcaatgatgtttctagatgttccatgggctttgctagcaaacactgccagtttgcccaccactttgccagcgtaaggcctgtgcccccagatatattcccagccttttggggaggagcggggagcccctgcaggctgtgcttctcagcctttgggtcattgcccgccgagctttacatttgtttacatttctttttaatgctaatggtatcatgtgtggtctgtaagtgtctatatgtgtagttttagtaagtcttaactttttataaaccagcagcctcctggccggggatagccaatagccccagcccactgaaagcctggtgagcagaaagggaagagaaacaagggtgttcattcactggtaggatgtgtttcctgaacggctcctgctcctgctggacaagcccacagagggcccagcttccaacaggtgagccttcatgccccaccactactttttatttgatttgattttatttttagacggagtttcactcttgttgcccaggctggagtgcaatggcgcaatctcgagtcactgcaacctctg

SEQ ID NO: 94655 - DNA, 683 bp, Homo sapiens
cttctcatgattatcctaagatctaaggttattctttttgcctcccagggtggatggtggcagatgcccttgcatttacttgatagcagactcctctttgataaaggcctttgataaaggcctcattccgccagtttatcttgccacctcaatgaatcgctagctgtgtcaggaatccctacacaatccatttaaatgactgtggcagggcctcttcccctgtggaagctgaaggtggcacgtccatctccgatgaaatgcgaatggggctctgggcacgcggcggaaggcagagaagaggcagagaaagaagctaataactaattacaccgactccacaattacgactaacgttggggrcgaactctttgctaaataaacatttaggtgaaacaaagcttccatttccaatcggcctaactctggtattagcgttggcaggggccatgcaggaggggcagtgagcagtggtggccgcgttgccgacagagggtgagggagctgggcgcgtggtgtgggcgccgaggtcccgagctgaagagctttaaaacctctcaaaacacagaactatcaatcaagtaggaccagactgtgcccccagggaaggtcgcagatttaaggctgcgaggacaagggcaaagaagtgcgaagcgttcgggtggacatgcaagccggcccagcgc

SEQ ID NO: 94656 - DNA, 589 bp, Homo sapiens
cagtctcggcaaggcctggtacggtgggcgtctcagctgcagccagcattgtgtcygccccctccgcgaggcagtgtgtttgtgatcagagcaggagtgtagcctgctggtttcggtacacgtagaatgcgtgccagtgcacgctagcagcatctgttgtgttccttgtgcggcagctccatgccatggccaaggtctcagtctctgtcctgctgattgctggagcaggtgtggtggcccatgtccgaggacggctgtgtcctggagaggtgggcaggggctgggttcatctgcctctggagcctgctggcagcctcctcccgggtttcatggctggcaatcatgaaagctgcctcgatggtggcggggccctgttgatgtcagattggcgtggcctcctgagagttcctcctgtgggtgtgcgcagggcttgcatgtgcaggaaatggactcaccctggagctgggcccccaggggctgccccgggcctgggtgggggccgtgcccttgtctgtccgtctctctgtcagtctggcttcttcctctccaactctacctcttttggggtctcctttctgctctgtgtcac

SEQ ID NO: 94657 - DNA, 733 bp, Homo sapiens
tgcagtgagctatgatcataccactgcactcctagcctgggtgacggggggacaccctttytctaatagtaataataaattataaaatatataaattataaaatgtgtgcttatgataaatctaaacattactacctaacatacatagaaattttattgtaataaaatttctttacccttgcccattcactatcatatcttcacagagccttctggacttgtatctgcctatgttgttttctgttttttttttttttttatttgtttgtttgttttgagacagagtctcgctctgtcgcccaggccagagtgcaatggctagatctcagctcactgcaacctctgcctcccgggttcaagcaattcttctgtctcagccttctgagtaactaggattacaagagagcaccagcacgcccagctaatttttgtatcttgttttagcagaggtggagtttcaccatggctggtctggaacccccgacctcaagtgatccacccgccttggcctcccaaagtgctgggattacaggtgtgagccactgcatctggtctttttttttttttttttttttgagatagagtctcactgtgtcacctaggctggagtgcagtggcacaatcttgactcactgcaacctctgcctcccaggttcaagcagttctctgccttagcctcccgagtagctgggattacaggcgcctgcaccacgccaggctaattttttttttg

SEQ ID NO: 94658 - DNA, 733 bp, Homo sapiens
tgcagtgagctatgatcataccactgcactcctagcctgggtgacggggggacaccctttttctaatagtaataataaattataaaatatataaattataaaatgtgtgcttatgataaatctaaacattactacctaacatacatagaaattttattgtaataaaatttctttacccttgcccattcactatcatatcttcacagagccttctggacttgtatctgcctatgttgttttctgttttttttttttttttatttgtttgtttgtttygagacagagtctcgctctgtcgcccaggccagagtgcaatggctagatctcagctcactgcaacctctgcctcccgggttcaagcaattcttctgtctcagccttctgagtaactaggattacaagagagcaccagcacgcccagctaatttttgtatcttgttttagcagaggtggagtttcaccatggctggtctggaacccccgacctcaagtgatccacccgccttggcctcccaaagtgctgggattacaggtgtgagccactgcatctggtctttttttttttttttttttttgagatagagtctcactgtgtcacctaggctggagtgcagtggcacaatcttgactcactgcaacctctgcctcccaggttcaagcagttctctgccttagcctcccgagtagctgggattacaggcgcctgcaccacgccaggctaattttttttttg

SEQ ID NO: 94659 - DNA, 997 bp, Homo sapiens
aaaatgaagagctgtttattgactcctcatgtgaagaatgtgctgatgattgggttaagcttttcatagattgatttctgatttaggccattgtcctagtctaattggagtgattgattgagtgaacaaatgtgcattttattagggagctacacataatttttgcattgagaaattaaccagttgttatactttgtaaaatatggtgtactagcattgatttttgccaaaatagacagaagtcagattgttagaggaagaccgcgtcagtttgggttatgcacttgtcagtttgggaagcaggtgccacgatgagatgggaagtgcaggaagaaaccctgcagaggatggtgggggagcaccagacctccaggcaggtctgacccccgtgagaggaggcggagggagcagtgctggggaggaggagcctcagacccagccctgagttaggcacagccagcccagtgccaagtggacccccagggtggccctgcgtgagtacccgctttggtcattacccctgaaggggtcccgaaggtgtctcagcaaggaggctgtggctcacctgtctcctcacctgtcaccttgaagcggctytctctggcagagctccatggcggcctcagaaacaaagtttagggacttaaaattttatgcatgtattttagaggtggggcctcactgtgttgcccaggctggactcaaactattgggctcaagcgatcctcccaccttggcctccccagtaactgggactacaggtgctgccaccacacgtggctaagtttagtgacttttgataatccacaaaaacaaaaggaacagtaaagacaatcccaactgtgactcattatgcggcacgggcgggcgggattttggattagttttaggaagcgaaccacagccgtcctccttggactccctgccgtggctggcagtgagctggtgcagggaggcgaagtgctggtgttctgggaattttcaaatgcactacagc

SEQ ID NO: 94660 - DNA, 997 bp, Homo sapiens
aaaatgaagagctgtttattgactcctcatgtgaagaatgtgctgatgattgggttaagcttttcatagattgatttctgatttaggccattgtcctagtctaattggagtgattgattgagtgaacaaatgtgcattttattagggagctacacataatttttgcattgagaaattaaccagttgttatactttgtaaaatatggtgtactagcattgatttttgccaaaatagacagaagtcagattgttagaggaagaccgcgtcagtttgggttatgcacttgtcagtttgggaagcaggtgccacgatgagatgggaagtgcaggaagaaaccctgcagaggatggtgggggagcaccagacctccaggcaggtctgacccccgtgagaggaggcggagggagcagtgctggggaggaggagcctcagacccagccctgagttaggcacagccagcccagtgccaagtggacccccagggtggccctgcgtgagtacccgctttggtcattacccctgaaggggtcccgaaggtgtctcagcaaggaggctgtggctcacctgtctcctcacctgtcaccttgaagcggctttctctggcagagctccatggcggcctcagaaacaaagtttagggacttaaaattttatgcatgtattttagaggtggggcctcactgtgttgcccaggctggactcaaactaytgggctcaagcgatcctcccaccttggcctccccagtaactgggactacaggtgctgccaccacacgtggctaagtttagtgacttttgataatccacaaaaacaaaaggaacagtaaagacaatcccaactgtgactcattatgcggcacgggcgggcgggattttggattagttttaggaagcgaaccacagccgtcctccttggactccctgccgtggctggcagtgagctggtgcagggaggcgaagtgctggtgttctgggaattttcaaatgcactacagc

SEQ ID NO: 94661 - DNA, 767 bp, Homo sapiens
gtgtccctcgctgtcgggcttaccctgccctgcccatccaggtgtacaaaggctacatggatgacccgaggaacacggacaatgcctggatcgagacggtggccgtcagcgtccacttccaggaccagaatgacgtggagctgaacaggctgaactctgtatgtgcctggcctccctgraggcgggagtggggaggcagggacgggtatgggcgtggcctccggggagggggttggcagggatgggggtctggattctggcaggctgaactctgtatgggcgtggcctccggggagagggaaggcggggaccggggtctggattctggacgtgcctcgagggcttccaagggagggacctggccgtgctcctggggcccagggccagaaactggaggctacagggtcagagtcttgcccagaaagtgacaaagggggcaccagggagaggccggggagccacctcaggtggccagagctcacagggctggccaggcgaccatagggccctgtgtagttctgggacctgggtcctccagggaggcctcgaagatggcatccaggggtgaggctggcaaggccccctcagcccccggctgccggcttttagctctttatggggatgtggattcccagtacttggattaatcctgcatgctcctaattcagaactgggatgggaaattccataaataaccccgggctttaaatgcgggctaaatagctcccggcaaagctgcacctgcatcttcttcccctgaaggatcc

SEQ ID NO: 94662 - DNA, 767 bp, Homo sapiens
gtgtccctcgctgtcgggcttaccctgccctgcccatccaggtgtacaaaggctacatggatgacccgaggaacacggacaatgcctggatcgagacggtggccgtcagcgtccacttccaggaccagaatgacgtggagctgaacaggctgaactctgtatgtgcctggcctccctggaggcgggagtggggaggcagggacgggtatgggcgtggcctccggggagggggttggcagggatgggggtctggattctggcaggctgaactctgtatgggcrtggcctccggggagagggaaggcggggaccggggtctggattctggacgtgcctcgagggcttccaagggagggacctggccgtgctcctggggcccagggccagaaactggaggctacagggtcagagtcttgcccagaaagtgacaaagggggcaccagggagaggccggggagccacctcaggtggccagagctcacagggctggccaggcgaccatagggccctgtgtagttctgggacctgggtcctccagggaggcctcgaagatggcatccaggggtgaggctggcaaggccccctcagcccccggctgccggcttttagctctttatggggatgtggattcccagtacttggattaatcctgcatgctcctaattcagaactgggatgggaaattccataaataaccccgggctttaaatgcgggctaaatagctcccggcaaagctgcacctgcatcttcttcccctgaaggatcc

SEQ ID NO: 94663 - DNA, 572 bp, Homo sapiens
cagcccttcccttgagggtgggtgacctgggcagctttcatcctccccaggttggggacaacagcagcccccatctccagggtctttgagatcaggatgacatggggtgatgaccaaatgcaaccgtcactgcacaatgcttgctctcagccttcagatctgcaccccacgatgacagctgcactcatctccaacaagcctgagtttgtgaagctcttcctggagaacggggtgcagctgaaggagtttgtcacctgggacaccttgctctacctgtacgagaacctggacccctcctgcctgttccacagcaagctgcagaaggtgctggtggaggakcccgagcgcccggcttgcgcgcccgcggcgccccgcctgcagatgcaccacgtggcccaggtgctgcgggagctgctgggggacttcacgcagccgctttatccccggccccggcacaacgaccggctgcggctcctgctgcccgttccccacgtcaagctcaacgtgcgtgctggtaacggggcccatcctggactcgtcttcgcgggctactgctatgttcttagagctct

SEQ ID NO: 94664 - DNA, 774 bp, Homo sapiens
aaacagtctcctgcctcagcctccccagtagctgggactataggggcgcaccaccacacctggctgatttttgcgtttttttgtttgtttttgttttttagtaaagatggggcctcaccatgttggccaggctggtctcaaactcctgacctcaagtgatccacccacctcggcctcccaaagtgctgggattacaggcatgagccacygcgcctggcctctaattactcttgggataattttaaataagtggccattaagtagtaagacacttctgttggcccattggaacccgtgaaggaagctctggagctgtttaagggaagagtgctcatgccacaggccctaatgccagctgagcagaaatgccaggcgagtagctggaatagtctctacaggagattttaaatctctgtcaaaacctgtagtggacaggcttcatccagagaaacagaagcaggtggagatacacattagagactcatggcaaggaatggcttatgcagaggtgggctggccaggtttgtgggacgtctgtaggacaggccagccagaaggcagctgatctccccggccgactgaagctgccttccacagcaacatctcccacatgccagcaacaaccacgagtgcatgttccaaagctattagtaatgtctcacactcaatagccattaaagcgtaaaaatgtcattccgaatgttcttttgttctggactctgtgaatagcactgcgttggtctgagtcaccattgtgaaaaataggtggatatc

SEQ ID NO: 94665 - DNA, 854 bp, Homo sapiens
atacaaatactggagctgattgtagcagaaacagctgtgctgcagcctacacggccaagtgcaggagacgctggcatgatgtcttcaagagggtgcaggctcccgagtagtgcagctacaaagctgccccccagggtttaactggccaattcttgcaaaggggcactcaataaataatktgaaatttgaataagtctctccatcctgcctactcccagcacaaaatccatcaacagactggatcttctcgtaacctgttgggcctatgaggacgcagaagtgcaaaatacattccctgccctcaaagggtttattgtcatctaggcccgatggttccttccaaattgtgggtagcctcctacagtggatagtcaaaatcaattaaatgggtcaaaataaacactgtttttaacacacacaaaaaaagaagaaaatgttcctgtggaactcttaattaaaatgtatgtgcccatcacaacattaaaatatattccttactatgggacaaattaaaaataatttcaaaaataactgattactgaagaaaccaggcacatctaaccatttacaaagaacttttacacaattggttttacagaatccagaaatcccaggatccagctatcattattatgccttttttcagtggttcggagatgtggctgccttgttcaaagcaacacagcacggttgggatgtaatcgcagatgggtctgcctccagtatgtcctcaagtaccacaggaggtcagagaagatgatggtgagcaatgagggctagacacaaaaggagagagaggaaacctgaaaggggcctggaaaggcagggaggactttggccagggcagtgggtca

SEQ ID NO: 94666 - DNA, 854 bp, Homo sapiens
atacaaatactggagctgattgtagcagaaacagctgtgctgcagcctacacggccaagtgcaggagacgctggcatgatgtcttcaagagggtgcaggctcccgagtagtgcagctacaaagctgccccccagggtttaactggccaattcttgcaaaggggcactcaataaataatttgaaatttgaataagtctctccatcctgcctactcccagcacaaaatccatcaacagactggatcttctygtaacctgttgggcctatgaggacgcagaagtgcaaaatacattccctgccctcaaagggtttattgtcatctaggcccgatggttccttccaaattgtgggtagcctcctacagtggatagtcaaaatcaattaaatgggtcaaaataaacactgtttttaacacacacaaaaaaagaagaaaatgttcctgtggaactcttaattaaaatgtatgtgcccatcacaacattaaaatatattccttactatgggacaaattaaaaataatttcaaaaataactgattactgaagaaaccaggcacatctaaccatttacaaagaacttttacacaattggttttacagaatccagaaatcccaggatccagctatcattattatgccttttttcagtggttcggagatgtggctgccttgttcaaagcaacacagcacggttgggatgtaatcgcagatgggtctgcctccagtatgtcctcaagtaccacaggaggtcagagaagatgatggtgagcaatgagggctagacacaaaaggagagagaggaaacctgaaaggggcctggaaaggcagggaggactttggccagggcagtgggtca

SEQ ID NO: 94667 - DNA, 854 bp, Homo sapiens
atacaaatactggagctgattgtagcagaaacagctgtgctgcagcctacacggccaagtgcaggagacgctggcatgatgtcttcaagagggtgcaggctcccgagtagtgcagctacaaagctgccccccagggtttaactggccaattcttgcaaaggggcactcaataaataatttgaaatttgaataagtctctccatcctgcctactcccagcacaaaatccatcaacagactggatcttctcgtaacctgttgggcctatgaggacgcagaagtgcaaaatacattccctgccctcaargggtttattgtcatctaggcccgatggttccttccaaattgtgggtagcctcctacagtggatagtcaaaatcaattaaatgggtcaaaataaacactgtttttaacacacacaaaaaaagaagaaaatgttcctgtggaactcttaattaaaatgtatgtgcccatcacaacattaaaatatattccttactatgggacaaattaaaaataatttcaaaaataactgattactgaagaaaccaggcacatctaaccatttacaaagaacttttacacaattggttttacagaatccagaaatcccaggatccagctatcattattatgccttttttcagtggttcggagatgtggctgccttgttcaaagcaacacagcacggttgggatgtaatcgcagatgggtctgcctccagtatgtcctcaagtaccacaggaggtcagagaagatgatggtgagcaatgagggctagacacaaaaggagagagaggaaacctgaaaggggcctggaaaggcagggaggactttggccagggcagtgggtca

SEQ ID NO: 94668 - DNA, 646 bp, Homo sapiens
agtatggggccctgaggacacagaggtgaatgartgggggtcttgcctctaaaggggcttggagctctgtagacaccttaatatactaaaatctgctcctagcccctctcagaagttgctgctgtgagcctttattctcatccactgctgaattatgccagtctcagagttcaatctgtcacaggatagctgcaacttgaattcaagccaagctggcttgaattcatgtgactatgggaatataagtgatcagatatgtcccccagagttctttttttccttcagaattaaatgcacattttaatggtgtacatagagacaatacttctacatttgtcgttgaacccaaagaaatgaccctagtgatggtcatgttaggtcaataagaacagaatagcaaacctgggaagtaagattgtctttggtaggtcccacaggaccgcaaagcatcttgcacacacagaatagacatgaaaatctttaatgtatggttgaaacttgatggatgttaaggatctgaaaaataaggttatatgggttttccctctccatagtaaaccaagctacctggctctgtagcctagtaatactcatactttgagagttttatgtttctcctctgcctaagaacaacagtcttatgtgt

SEQ ID NO: 94669 - DNA, 724 bp, Homo sapiens
ccactcttatgacctcatttaaccttaattatctctgtacargccctatctccaaacacagtcacatttggggttagggcttcaacgtatacattttaagagggcacgagtataacatacagatttgtttgttttcttcctaggaaatgtgtaaaccagtgtgagtcaaatctatatatagcactttggaaaaatggaacatttaactgctaaaattattttctctaattgaatgttctctttatttaagcattgtagagactgaggttcaaaggttattttctcaaagttacagcagcctctgaggtggtggagggtggcagcaggacagtgagctgacggccaacccctgtgcccaagtgtgctgctccgctcaactccatgtgcaccagggaacagccattctctgcaggctgatttgatctggaaccacaattgagtctagttctggaatctcagacacatggagaactacaccttgtctccagttgctacaagtcaagtccacctgcatgcagacagctacaattgtcttgtaaaattagaaaacagaacagggacaacagtattatctatattgactatagattaattattcatttgcattctttgtcttttgtacttataaatatgaaatttgtatataaacgtgtgttttacaacataagatacagatctatatatatgtacctttgaaagattattctctctgctctttggccta

SEQ ID NO: 94670 - DNA, 1629 bp, Homo sapiens
ccagtatgtctcttaccaattatagcatcctcccttcccactatcctgatttttattataactacttccttgcttttcattagtttcaccacctatgcatgcatccctaaaaatcataatttagtttgactaagttttgaactctacataaatgcaatcataccatattattttgaacttgcttcatatgtacattatagttataaaatccacgtttcctgtaactacaatgtattttttctcattgctatatagcattctgttgtatgracatagcacaatttatttattcattctacttttggtggacagtgggttggttcagacattgcataattatgagccatgctgctataaaccttcttgtacatatattcttgggcacatgtgtgtttgtttccctagggcatgaaattctctagaaggggaattgcaggaatgcacagagggcatatatcatcacgtataccagacaatttattttccaaagtagtggtaccagtttacaattccaccaacagtgcatgaaaatgcctttgctctacattcccacctatagtgttttctaagtcttctacatttcagacttgatttttataaaagtttccacctcaacttttaatgaaatacaattatgaagcttagtatgatatctttaccatatgccctctcctcacaacctagcagagcagacaactcccttaacactgttgcccacttctgcacaagtgacaaagtggccagtaggttggtttcatttagcatggatccaagcctcttcacagtctgaaaccttctcctgtgcacatacttcactttttccatatctgtcttaacatgtggtttccaaaactgaatattgtcttccccaaatgagctggtgggtgtggagaatcaggctcactgagaaattattctgaagcatcataaagatacgtcaaggtacatacaggctacttgccaaggaaacagaaggaagacagagcaccatgagtctttgtctgcaagatgaaggtggtctaagtgcttaactattaagaagtgttaggttttcccttccttagagctgaactaaaaagtaatgagactgctggaaaggatctatgagtgtgtttggcaggctcagtaaacagccaacctttactgcctccacttagtaaagcagtgccctgctggccacttaccatttgtagagaatgcaagaatagcatcctctttgctgctcaaaaatataagttagaacacaactgtggttctttagatgatcatatgttaagtaatgctggtgagactcagaaaaccacttgatagttaatggagaacattcattctgaagctggacaagcaaatagaaaaacacatgtatttcaaatgttctaaaataaggaaatcactgctatttatggtgcacatataaattgctgggcactatattaagcgattccatacattgtcgcatttaaccttcccaacagcctgagacctgaaatgctcttcccttccccctttctccatgcccactgcaacttagctcactcctacttagggcttagcactcaccttgaggatctcttcctccagggagcctcctgtgacacaccaaacccaggttgaatctaactcccaagc

SEQ ID NO: 94671 - DNA, 502 bp, Homo sapiens
gtatactattaaaggtcattttatttatatatatgcctatacatacmcacaaacacacacagagtcaaagagagagacttttcccttaacaaattcagaattgatcccatataatttctttcaccagcactcacctgaacaaacttgacttctttctttggcatctttcttcccacatccaccccatttcctcagtaaatctgaaagcttttttgttttttggtttttttttgcatttttgctgatacagcaggcttctgttctacaatatggcataatggaaatcagaattgggaggtgagctggaatctgagtgcactccagtcctactttgtgggaagcagccacgccctcaggcaaagcatttaacatgggctcctgtgccaggatcatcacagcagccatgaagcttatcttaacttctcatttaaacacaaatcgcctgcttctcgttttttctcatctgcaagataactagaataattgtacttatgtcacagag

SEQ ID NO: 94672 - DNA, 688 bp, Homo sapiens
agctatcaatgaagtaaatattttggttgagaatttttaaaggaatgaaccaaatggtgtgcgaaatgcaagtggagaatataaatagccatttatttgtttgtgctaccctacaagtctgctttgttttattatttatttatttatttattttttagaaggggtctccctctttcgcccaggatagagtgcagtggcgtgatctcagcttactgcaacctctgcctcctgggttcaagagattctcttgcctcagcctctcaagtagctggaattacaggcacctgccacagcacctggctaattcttgtatttttagtagagacggggtttcaccatgttggccagctggtctcgaactcctggcctcatgtgatccatccgcctcggcctcccaaaatgctgggattacaggtgtgagcccctactcccggccttcacctttaatttttaaccctactaagttcagtgagcagtcaaaggtcttgtgtgmgaacgagatgtagagaggtgcaaattcaaacaataaaaacaaatgattttgtaaactcaaataaagcaaatcaaagaaagtaaaacattgttccgaactgaagcaaacctagggattgatacattgtatagcacgatgatgtgcagcaaacaatgtcagagtacatatttcaccttagttctcattgatgtgtct

SEQ ID NO: 94673 - DNA, 600 bp, Homo sapiens
tcttggcatgtgtttatatctaaggagctcataccaaggtatggtaaattcaattacagacacggatcttcagaacacctgttttatttcttcccaaatttcagattgaggaatgtatgtcagaaagagttgcttatttgaattaaatgtatattgtggacagaataacaaatgagcagaatatcagtacacttatccatgtatctttacctagatcaatttctattttctatctacccctcygtcttcaaactgtgcttcttgagtcattttcagcatattgttgtatccaagaaaaacacaaaaccaagaccaaggagtctagaagaagaaatttaagttgttaccaaaagttcatagacaaaatgagcaggagatctgcattagttaaaaattcaggttctgaagtcaaactcccaggattcttttatcttctcggtcactggagcatttaacctctgtgtggtacagtttccttacctgtgaaatggccataataaccgttcctgcctcttcgttcattgagagagttaaatgagttattttaaaactgtttctcacatgtggattgtagtgttgataacatgatacactttggta

SEQ ID NO: 94674 - DNA, 901 bp, Homo sapiens
gcatacaactgtatatatatatatatatgcacacacacacaaatagatttatgataagaaattggctcaagtgattatggaggctaagaagtcctaagatctgcagttggcaagctgaagacccagaaagccagtgtttcagtttgactctgaaggcaggaaaagccaatgtcccaggttgaagacagctgggcaggagaaattccctcttactcatgggaaggtcaacctttgtatttgcttcaggccttcaagtgattggatgaggcttgcttacattagggagggccatctgctttactcagtctacccactcaaatgttaatctcatccataaaccccctcacagacatattcagagtaatgtttgactaaatgtctgggcaccccatggcccagtcaagttggcatgtaaaattaaccatcacaatgtccattcttactatagagatataaacaaagttcattcaaatgaattccatcttgggcaatgagagcaggttttgtaaaggaggtaataatagtaacaatacaagtagtggatagatattactatcatctctatttttkttttttttttttgagatggagtgtccttctgtcacctaggctggagtgcagttgcacagtcttggctcactgcaacatctgcctcccaggttcaagcgattcttttgcctcagcctcccgagtagctggggctacaggtgcgcaccaccacacatggctaatttttgtatttttagtagagatggggttttgccatgttgggcagactggtcttgaactcctgacctcaagtgatccactcaccttggcctcccaaagtcctgacattactggtgtgagccaccatgcctggccatctctatttttaaaaagaggaaatagtgaaagatca

SEQ ID NO: 94675 - DNA, 901 bp, Homo sapiens
gcatacaactgtatatatatatatatatgcacacacacacaaatagatttatgataagaaattggctcaagtgattatggaggctaagaagtcctaagatctgcagttggcaagctgaagacccagaaagccagtgtttcagtttgactctgaaggcaggaaaagccaatgtcccaggttgaagacagctgggcaggagaaattccctcttactcatgggaaggtcaacctttgtatttgcttcaggccttcaagtgattggatgaggcttgcttacattagggagggccatctgctttactcagtctacccactcaaatgttaatctcatccataaaccccctcacagacatattcagagtaatgtttgactaaatgtctgggcaccccatggcccagtcaagttggcatgtaaaattaaccatcacaatgtccattcttactatagagatataaacaaagttcattcaaatgaattccatcttgggcaatgagagcaggttttgtaaaggaggtaataatagtaacaatacaagtagtggatagatattactatcatctctattttttttttttttttttgagatggagtgtccttctgtcacctaggctggagtgcagttgcacagtcttggctcactgcaacatctgcctcccaggttcaagcgattcttttgcctcagcctcccgagtagctggggctacaggtgcgcaccaccacacatggctaatttttgtatttttagtagagatggggttttgccatgttgggcagactggtcttgaactcctgacctcaagtgatccacycaccttggcctcccaaagtcctgacattactggtgtgagccaccatgcctggccatctctatttttaaaaagaggaaatagtgaaagatca

SEQ ID NO: 94676 - DNA, 1030 bp, Homo sapiens
atttggagaggtagaattactcttcactgttctcttgaaaaactaaacactgctgagaagcagactgacagatggtcactggatttagtggccttatcaagagatgttcggtcagatgatggaaaaaggataccaggccagagtggtttgatgagtgaatgggtattaatggacaaatccagcggagacagctctttggagagggttgtctgggaagcgaggaaagagcaggggcctgcggggcccagggaggctgtttccctctctctgcctctctaagatgggagttacttgaatgtgttaaagactaaaagctgatgggaggacagaagtagtcacttgagagggacatcatgcctttgcaagatgggctacgctgcagcaggaggttactgggccacacccgggaggagcagatgagaaacacatgtgaggagaggtgggcgcagaggagctgggctgtggatctgcagtgggaagttgaggaaaacatccttctcccctgtctgtgaaggccgaggtyctctgcagagatcaccctcctagcaggatgcagagggctgagggaggggatgaggtgttgttccatgaggcggagagggagccacccagagagccagggtgggaccgtcaggccgagctgaggatggtgcagctgcatgggcacccagcagctctgcgtgcagccctcccgctgtgcttggtgctcaggtccagacagatagaaaataactgcgctcctctggggctggggttttgctggacctggccctaaggtgtgttgcaaggggagtgagggaggtatgtgcattggcaagagtgttattccagcaaaggccagtgaaatctaaagtggaaaggaagaggcgggagaaggaagggctggctagtgggtgggctaggtccatgggcagtgctcttcaggcctttttacatatccactgcggtatgggcatatacagaccacacattcatgtgcaatgaaagcagcgttcatgaaatgacgtttatgcttagtgtatgtaatgca

SEQ ID NO: 94677 - DNA, 1345 bp, Homo sapiens
cccaggaacactagaaaatgttctacagaagcaagtttccatttttatgatgtaaagggagaggagacaacttcacaaaaagacattctgctttataaaattttccaggacagtatctatttcacgaatcaaacacccactgacttgaaccaaaagcaacagctaatggaagtgttgttaattacaggatacctttctctctcccctccacagctcttttaaaaactgaatagatgctgctgcccaaatcacagaaagggaaatgcaaacatttctccccctggtcctaaatgcctaagttttcatttcaaataactgtcccttaaagttctatgatcaagcaaagactcaatttcacaaatataaactcaaaaactagaactcaggattgaaaaaaaaatctagttcaaaatatgtaggcaataaagctcaaaatcttttaagtatcagacagtaactaagcacctgctgctatgtcgactgccattaataataagccagtcttccctcttaggtttctacccctccgcctaaacaacaaaaacagctttagtggccattatttcaggaggtcggagcacatgctgcacctgtgagcttcaacctgtgttcttggcttgtacctgccagcagagcaggatccctccaccatctcamcacacaccttctcaacatgaacacggacatgcacataaatctaggacattctgaaagaaggggaaatactcagccatgagaaatcctgtccatacggatgggggatctcacagtaaacaaaggtctagcccataatgactgaaagttcatttgagagttagaaggagaagataaatctttcctatttaggtaaattaggtgagataaaatatttgttagttaacacacaaaggcttcatgaaattctggagcctttcaacaatagaagacaggaaagaggatcgggcaagcggggaagagagacagagacattctgcactcatttctgttttaaaagtacgtttcagacaaacagactagcctcataacaaactacctggcagggcagtgtgctgaagagctctgagcgagtgagcttattggagatataaccccaggagcacaggaagtcacctgcaaggaatcctggctagagtctcagatagaacccagagagaggctcccagaggctttgccgggggctgggaagccaatgaccaggacatgcaataagcaagagatggtcacagaaagtcaaagcaaataataaagacggcaaatggaaaaacacgtccataagaggtcgaatcgggaggtgcccagaggtcagacacaatccagtgaaaggctaagtggccttgcttgttcc

SEQ ID NO: 94678 - DNA, 1345 bp, Homo sapiens
cccaggaacactagaaaatgttctacagaagcaagtttccatttttatgatgtaaagggagaggagacaacttcacaaaaagacattctgctttataaaattttccaggacagtatctatttcacgaatcaaacacccactgacttgaaccaaaagcaacagctaatggaagtgttgttaattacaggatacctttctctctcccctccacagctcttttaaaaactgaatagatgctgctgcccaaatcacagaaagggaaatgcaaacatttctccccctggtcctaaatgcctaagttttcatttcaaataactgtcccttaaagttctatgatcaagcaaagactcaatttcacaaatataaactcaaaaactagaactcaggattgaaaaaaaaatctagttcaaaatatgtaggcaataaagctcaaaatcttttaagtatcagacagtaactaagcacctgctgctatgtcgactgccattaataataagccagtcttccctcttaggtttctacccctccgcctaaacaacaaaaacagctttagtggccattatttcaggaggtcggagcacatgctgcacctgtgagcttcaacctgtgttcttggcttgtacctgccagcagagcaggatccctccaccatctcaccacacaccttctcaacatgaacacggacatgcacataaatctaggacattctgaaagaaggggaaatactcagccatgagaaatcctgtccatacggatgggggatctcacagtaaacaaaggtctagcccataatgactgaaagttcatttgagagttagaaggagaagataaatctttcctatttaggtaaattaggtgagataaaatatttgttagttaacacacaaaggcttcatgaaattctggagcctttcaacaatagaagacaggaaagaggatcgggcaagcggggaagagagacagagacattctgcactcatttctgttttaaaagtacgtttcagacaaacagactagcctcataacaaactacctggcagggcagtgtgctgaagagctctgagcgagtgagcttattggagatataaccccaggagcacaggaagtcacctgcaaggaatcctggctagartctcagatagaacccagagagaggctcccagaggctttgccgggggctgggaagccaatgaccaggacatgcaataagcaagagatggtcacagaaagtcaaagcaaataataaagacggcaaatggaaaaacacgtccataagaggtcgaatcgggaggtgcccagaggtcagacacaatccagtgaaaggctaagtggccttgcttgttcc

SEQ ID NO: 94679 - DNA, 2382 bp, Homo sapiens
atagataggtatatagattgttgatttcatatttcatgttccaagaagaggttctagatcaaatttctgtgttcagaatcaccagagaaatcaattaagattttggttcattttaaacattgcaatttttgaaagccaagataattccaaatctaattagggaaagctacattttacttmtttgtgtaagttattggtgatttatatgcagtatggaccatcctccccccagaaattattcttatattccaattgtgcattagttttagaaccattttaattttaaaaccataagaaaataattttatgtttgcctatgtccaggagctgaagaaatcagcgattactttaaaaaatatatggcaatgtcaaaataaatgccaagaatcatatttctaggaatgcaaaagtgcttctcatatactcatatattaggtttcacagtattggttgcttactatatttgtttttatttttattatatatcataattacacatttttatttgcatttgttgcttattgtagtaaaaaggtaaaaaaaaaatgaacttgttaatgattagcttttatttgactaaccagttgaccaattttgctctgttttcaaattgcatatgatggggtattatgctgaaactgctaatatattgggtatttattgatacttaggaatagtcagtatttataaatatttaagaatgtcatggtccttatgttttgatgtttaaaatgttcactttgttgtacgttacatagtgtcttattcaaaattgaaaataataaaggtatttctaatagatgtagttttcatatgtcagagtgactgtataggaatggaaaggcttagataaattacaaatttctttccctctgtggttccatttcttcacatacatttgctgctggacccatgtaaactaccttaggtccttagtgcttcacagaacttttattctcaaaagttttattctttcatttgacacatattttagtatttgctatgtgcaaccattattgtagatacttgaaatatatctgtgaacactgaaattacattctagcaggcagacacagatgataagcatacgtaattaaattatataatgcattagaaaatggcaagtacagtggaaaaataaacagagtaaggtaagataaatagtaagggtaggcttccttgagcagagacttgaacgaagagagcacatggagttgtcatctgaaggatatgcttcccaggcataaggaacaacctgtgtgtttgcaaaatgtttcagggggagcccaggccagagtaaaagcagcagagaggaggattcgctttaccctgactgaaatggggttgaggccaaagaagtgaagtgatctgacttaggtttcaacaggacctttctggctgctgtgttatgaatagacttggggtgggggtgggggtgagaagaaacagggacaccagttaagaatgcaagaagtggccgggcgcggtggctcacgcctgtaatcccagcactttgggaggccgaggtgggcggatcacaaggtcaggagatcgagaccatcctggccaacacggtgaaaccccgtctctactaaaaatacaaaaattatctgggtgtggtggcacatgcctgtaatctcagctactcgagaggctgaggcaggagaatcacttgaacctgggaatcggaggttgcagtgagccaagatcaccactgcactccagcctggtgacagagcaagactccgtctcaaaaaaaaaagaatccaagaatcagatggcaatgatggcttgcagcactgtggtggaagcagagagtatgagaagtggggattctgaagggtagagcccacgggcttggggatttgagagaaaggtgtctaagatggcaccaaaattattggctcacttggaagcatggggttaccatcaactgggatgaggagtgggttttggagtaggaagaggtctgggaattgaccatggggtttcacacatggggaccactgttaccctgaggagcagtttccgtggagtgatgtagaagcccgactggagtggatctaagagagaagggagaccagaattggaaatcgcaagaacagacagctccttagagaagagtcatcagtggacttttctaaatccttattttcattttcccctaaatatcattgcttttgattatatccttctttaaatgctgttctcccatggccgttatagtcttacatctctgggtgcattttttcagtctcctttactgactggcattaagtaccccagggaccttgaaggaagaacacatttgggtcacaggagaaatgggaagaaggccattccaaagagaaagactacaatgagcagaggtatgaagatgca

SEQ ID NO: 94680 - DNA, 2382 bp, Homo sapiens
atagataggtatatagattgttgatttcatatttcatgttccaagaagaggttctagatcaaatttctgtgttcagaatcaccagagaaatcaattaagattttggttcattttaaacattgcaatttttgaaagccaagataattccaaatctaattagggaaagctacattttacttctttgtgtaagttattggtgatttatatgcagtatggaccatcctccccccagaaattattcttatattccaattgtgcattagttttagaaccattttaattttaaaaccataagaaaataattttatgtttgcctatgtccaggagctgaagaaatcagcgattactttaaaaaatatatggcaatgtcaaaataaatgccaagaatcatatttctaggaatgcaaaagtgcttctcatatactcatatattaggtttcacagtattggttgcttactatatttgtttttatttttattatatatcataattacacatttttatttgcatttgttgcttattgtagtaaaaaggtaaaaaaaaaatgaacttgttaatgattagcttttatttgactaaccagttgaccaattttgctctgttttcaaattgcatatgatggggtattatgctgaaactgctaatatattgggtatttattgatacttaggaatagtcagtatttataaatatttaagaatgtcatggtccttatgttttgatgtttaaaatgttcactttgttgtacgytacatagtgtcttattcaaaattgaaaataataaaggtatttctaatagatgtagttttcatatgtcagagtgactgtataggaatggaaaggcttagataaattacaaatttctttccctctgtggttccatttcttcacatacatttgctgctggacccatgtaaactaccttaggtccttagtgcttcacagaacttttattctcaaaagttttattctttcatttgacacatattttagtatttgctatgtgcaaccattattgtagatacttgaaatatatctgtgaacactgaaattacattctagcaggcagacacagatgataagcatacgtaattaaattatataatgcattagaaaatggcaagtacagtggaaaaataaacagagtaaggtaagataaatagtaagggtaggcttccttgagcagagacttgaacgaagagagcacatggagttgtcatctgaaggatatgcttcccaggcataaggaacaacctgtgtgtttgcaaaatgtttcagggggagcccaggccagagtaaaagcagcagagaggaggattcgctttaccctgactgaaatggggttgaggccaaagaagtgaagtgatctgacttaggtttcaacaggacctttctggctgctgtgttatgaatagacttggggtgggggtgggggtgagaagaaacagggacaccagttaagaatgcaagaagtggccgggcgcggtggctcacgcctgtaatcccagcactttgggaggccgaggtgggcggatcacaaggtcaggagatcgagaccatcctggccaacacggtgaaaccccgtctctactaaaaatacaaaaattatctgggtgtggtggcacatgcctgtaatctcagctactcgagaggctgaggcaggagaatcacttgaacctgggaatcggaggttgcagtgagccaagatcaccactgcactccagcctggtgacagagcaagactccgtctcaaaaaaaaaagaatccaagaatcagatggcaatgatggcttgcagcactgtggtggaagcagagagtatgagaagtggggattctgaagggtagagcccacgggcttggggatttgagagaaaggtgtctaagatggcaccaaaattattggctcacttggaagcatggggttaccatcaactgggatgaggagtgggttttggagtaggaagaggtctgggaattgaccatggggtttcacacatggggaccactgttaccctgaggagcagtttccgtggagtgatgtagaagcccgactggagtggatctaagagagaagggagaccagaattggaaatcgcaagaacagacagctccttagagaagagtcatcagtggacttttctaaatccttattttcattttcccctaaatatcattgcttttgattatatccttctttaaatgctgttctcccatggccgttatagtcttacatctctgggtgcattttttcagtctcctttactgactggcattaagtaccccagggaccttgaaggaagaacacatttgggtcacaggagaaatgggaagaaggccattccaaagagaaagactacaatgagcagaggtatgaagatgca

SEQ ID NO: 94681 - DNA, 2382 bp, Homo sapiens
atagataggtatatagattgttgatttcatatttcatgttccaagaagaggttctagatcaaatttctgtgttcagaatcaccagagaaatcaattaagattttggttcattttaaacattgcaatttttgaaagccaagataattccaaatctaattagggaaagctacattttacttctttgtgtaagttattggtgatttatatgcagtatggaccatcctccccccagaaattattcttatattccaattgtgcattagttttagaaccattttaattttaaaaccataagaaaataattttatgtttgcctatgtccaggagctgaagaaatcagcgattactttaaaaaatatatggcaatgtcaaaataaatgccaagaatcatatttctaggaatgcaaaagtgcttctcatatactcatatattaggtttcacagtattggttgcttactatatttgtttttatttttattatatatcataattacacatttttatttgcatttgttgcttattgtagtaaaaaggtaaaaaaaaaatgaacttgttaatgattagcttttatttgactaaccagttgaccaattttgctctgttttcaaattgcatatgatggggtattatgctgaaactgctaatatattgggtatttattgatacttaggaatagtcagtatttataaatatttaagaatgtcatggtccttatgttttgatgtttaaaatgttcactttgttgtacgttacatagtgtcttattcaaaattgaaaataataaaggtatttctaatagatgtagttttcatatgtcagagtgactgtataggaatggaaaggcttagataaattacaaatttctttccctctgtggttccatttcttcacatacatttgctgctggacccatgtaaactaccttaggtccttagtgcttcacagaacttttattctcaaaagtttyattctttcatttgacacatattttagtatttgctatgtgcaaccattattgtagatacttgaaatatatctgtgaacactgaaattacattctagcaggcagacacagatgataagcatacgtaattaaattatataatgcattagaaaatggcaagtacagtggaaaaataaacagagtaaggtaagataaatagtaagggtaggcttccttgagcagagacttgaacgaagagagcacatggagttgtcatctgaaggatatgcttcccaggcataaggaacaacctgtgtgtttgcaaaatgtttcagggggagcccaggccagagtaaaagcagcagagaggaggattcgctttaccctgactgaaatggggttgaggccaaagaagtgaagtgatctgacttaggtttcaacaggacctttctggctgctgtgttatgaatagacttggggtgggggtgggggtgagaagaaacagggacaccagttaagaatgcaagaagtggccgggcgcggtggctcacgcctgtaatcccagcactttgggaggccgaggtgggcggatcacaaggtcaggagatcgagaccatcctggccaacacggtgaaaccccgtctctactaaaaatacaaaaattatctgggtgtggtggcacatgcctgtaatctcagctactcgagaggctgaggcaggagaatcacttgaacctgggaatcggaggttgcagtgagccaagatcaccactgcactccagcctggtgacagagcaagactccgtctcaaaaaaaaaagaatccaagaatcagatggcaatgatggcttgcagcactgtggtggaagcagagagtatgagaagtggggattctgaagggtagagcccacgggcttggggatttgagagaaaggtgtctaagatggcaccaaaattattggctcacttggaagcatggggttaccatcaactgggatgaggagtgggttttggagtaggaagaggtctgggaattgaccatggggtttcacacatggggaccactgttaccctgaggagcagtttccgtggagtgatgtagaagcccgactggagtggatctaagagagaagggagaccagaattggaaatcgcaagaacagacagctccttagagaagagtcatcagtggacttttctaaatccttattttcattttcccctaaatatcattgcttttgattatatccttctttaaatgctgttctcccatggccgttatagtcttacatctctgggtgcattttttcagtctcctttactgactggcattaagtaccccagggaccttgaaggaagaacacatttgggtcacaggagaaatgggaagaaggccattccaaagagaaagactacaatgagcagaggtatgaagatgca

SEQ ID NO: 94682 - DNA, 845 bp, Homo sapiens
tgtttttgttattgataaattctggtcgtcttttggacagccgcttgcaggggagagatccagcacgattccaaggaaatgtatttccttttttggaagtttagaaagtggaacaagaaatgattgtcttccagatccattacttatgtaggaaaatgtgtctattaataaggaaattcttyacaagatggaaatcacttcatataatggtaagactataaaatgctttcctgagatagtattgcaatttttaacttctgagtgaattgaaaagtcctagaaataaacagaattctcagacaatgtggttgccaaccaatacacccacagcttagtagaactagattgtaagcctcacatatgacctgctgtggcatgaaatgtaatcatatgaggctattagagaagttcatactatacatggttagtgataagaacgcgaattgagctgtgatcttaggtctgcagctggcttgcatggcttttactttgagggcctctttttaaaaaaatcaactcatgtgagttccagaaaataacaatagctcatactctctgtttccaatttagtttaacagatatccacataatgaagatgctgagagatagacctgaggacaaagagtggtgaaggaagctccatgatggagctacttgtgacccacgggaatctaaggtattactattttatgtgtcttcttcaggattaactagagaacaagagtacaccagaaaactattcctttcctcacttgaaaagcaaatgcaagttgttacagtgcgcaataggaagcactatgaagaaagagccaggaccgagcatatcttcaattttaaagggaggg

SEQ ID NO: 94683 - DNA, 845 bp, Homo sapiens
tgtttttgttattgataaattctggtcgtcttttggacagccgcttgcaggggagagatccagcacgattccaaggaaatgtatttccttttttggaagtttagaaagtggaacaagaaatgattgtcttccagatccattacttatgtaggaaaatgtgtctattaataaggaaattcttcacaagatggaaatcacttcatataatggtaagactataaaatgctttcctgagatagtattgcaatttttaacttctgagtgaattgaaaagtcctagaaataaacagaattctcagamaatgtggttgccaaccaatacacccacagcttagtagaactagattgtaagcctcacatatgacctgctgtggcatgaaatgtaatcatatgaggctattagagaagttcatactatacatggttagtgataagaacgcgaattgagctgtgatcttaggtctgcagctggcttgcatggcttttactttgagggcctctttttaaaaaaatcaactcatgtgagttccagaaaataacaatagctcatactctctgtttccaatttagtttaacagatatccacataatgaagatgctgagagatagacctgaggacaaagagtggtgaaggaagctccatgatggagctacttgtgacccacgggaatctaaggtattactattttatgtgtcttcttcaggattaactagagaacaagagtacaccagaaaactattcctttcctcacttgaaaagcaaatgcaagttgttacagtgcgcaataggaagcactatgaagaaagagccaggaccgagcatatcttcaattttaaagggaggg

SEQ ID NO: 94684 - DNA, 751 bp, Homo sapiens
tcaggagcctgaagacacatgcctggcagtcataggggcactggaaatagttagatttgggtctgaataagctcatccaaacagtataaatggagatgagaaaagacccccaggctgagatctgagttggccaatactgagatggcaagcagaggagcaggtaccaatgaacggacagagaagaagaggcctgggaggtaggaggaaaaccaagagggaagaacgcatttcaagaatgcagagcggtcaaggttcayctgtcctgtctccctgaaaggaggactgctggcaaataaattccttcggcaatgtaaagtctcctggaatgagtgtttttgagagaaatcaaacccttaagcaagagttcagtattattaacgcagtattgcagggagggttttccctgccatgtctttgggccttagtgatgtcaatttataacctttttgaggttatcctgttggaggtagagccaggaggctgaagactgttggcagggaggagatcaagacaccatgttgtaagcacttaaaaattaaactcagcctgtgatatggctgtttagagagacattccttttgtttcaggatggaaggcaacatcattctgtagcaccacattgcttctgagtggacacttgccattgtctcaagctacctgttaggttgggatctaacaagccagacatctgctcctccaacagagctgctaacactaccaacaggacattctgaaaatcgtgtcaaatgta

SEQ ID NO: 94685 - DNA, 705 bp, Homo sapiens
cttgagcccaggagttcaaggccagtctgggcaacatagcaagaccccatccctaaaaaaaaaaaaataagttttattaaatgtggcactttcccctagaagggcagtaaccccaggaaccagtctgcctcttttcgaataaaggagactttttaaaargaaaaaatttctttttagggtggggtgctctttatctagcatctttccttcctccttctctctgcaaaattcaacattcatgacagagggccacaccaaccacgggtttatagagagaggaactgaacagctgttgattcccatctggaatatatttaatgtttgcctgcttgtggagcatggtatttaaagggtgtggatggatgaatgtttaaaaaaaaacacacaaaactatgcacaagctgtatgagagatggctaggtccatctatgattttttttaaaagaagaattttaataccttttctttgacagtgaactgtatttagaaatatgatctttattgtgaaatgctcataaaatgcaaccaaactgcatgtttggccataggctagaataatatattaaaagaattaatggaaagtagtattgtctgggtttcatgaaactattccagataatattctccagcaaaacttatggtaacctgtattttataatgtcaatctgctggaccaagttaatttagaaaataatttttaatcct

SEQ ID NO: 94686 - DNA, 687 bp, Homo sapiens
tgtgaagactgagtgctccctgcccccagcgctgcactcacagtgactccatgtccaactagttttctgtttgggattagaattccatgtaagatttcctctgggggatgcagtggcwaacgcctgtagtcccagacactggagtgagaggatcacttgagcccgggagttcaaggccagtctgggcaacatagcaagaccccatcccttaaaaaaaaaaaaaagttttattaaatgtggcactttcccctagaagggcagaaaccccaggaaccagtctgcctctttttgaataaagcagactttttagaaagagaaaatttccttttagggtggggggaaagttgattaccttaaaaataaagttggagggaggaactctcatgaactggtagctaaagtcttctatgtaaagataagaggagggaaatttttgccatttgggccatatgggaagtggagtcgtaggataaaatgggagcttatttctaagggattttagccacccttagcagggtgtgtttagtgtcctgaagttcacctgtatttatacatctcacttcagttagtaaatatttaagtgcctattgcaatctgggcactgtgctatgcactgcagacacatttgggagcaaaaacatcttaatccctgtcctgctggggatttttggcaaaacagataaggat

SEQ ID NO: 94687 - DNA, 687 bp, Homo sapiens
tgtgaagactgagtgctccctgcccccagcgctgcactcacagtgactccatgtccaactagttttctgtttgggattagaattccatgtaagatttcctctgggggatgcagtggcaaacgcctgtagtcccagacactggagtgagaggatcacttgagcccgggagttcaaggccagtctgggcaacatagcaagaccccatcccttaaaaaaaaaaaaaagttttattaaatgtggcactttcccctagaagggcagaaaccccaggaaccagtctgcctctttttgaataaagcagactttttagaaagagaaaatttccttttagggtggggggaaagtkgattaccttaaaaataaagttggagggaggaactctcatgaactggtagctaaagtcttctatgtaaagataagaggagggaaatttttgccatttgggccatatgggaagtggagtcgtaggataaaatgggagcttatttctaagggattttagccacccttagcagggtgtgtttagtgtcctgaagttcacctgtatttatacatctcacttcagttagtaaatatttaagtgcctattgcaatctgggcactgtgctatgcactgcagacacatttgggagcaaaaacatcttaatccctgtcctgctggggatttttggcaaaacagataaggat

SEQ ID NO: 94688 - DNA, 742 bp, Homo sapiens
attaaacaataactccccatttcttcttttcccagccaaacaccattctactttgtctttctgattttgactacacatttaagtggaacatacaatatgtgtccttttgtaactggcttatttcacttaatataatcttatcaaagttttttcatttatgttgaagcatgtgtcagaatatcacttttttaaagctaaatactattccattgaatgcatataacacatttaggatgttatttaaacccatgcagtaagcccaacttagtagaaccagtctgccaccttgtggaattttaacacaacttcaaattttacaaattgagaagatgactaatttagaaatgatgctactagtgttcaattactagctatttttttggtgtaaatttaaagaactagttttatttaacataactgtgcaagaagtatgtgaagagaaaytcaaatgctgctgatgggccaaaatatttgagtacatgtaaagttatttcctattcttggataggaggaatggactacaaacatgaattaagtggtcatggagaaagacgcaaatggctttttatcatataaaagcttacatattacaggatttcaatctcactcatacaagaaaatgcaatttaaaaattgtctacaaaaaattgtagacaaaacaaatttatctccaaaaacgttgtagacaaaaaattatctacaacatggatgaaccttgaaaacatatgctaagtgggaaaag

SEQ ID NO: 94689 - DNA, 1242 bp, Homo sapiens
ctacctcccaagaatggtaaagaaacaaaaagactgtgtatgtggtaaaaaagtcataaactataagttattaaatatgataactcaactctcttgtatgtactggaactattgtccttagaagagttcttcgattcaattctgataattctgagatgttgatttttcagaagtgcaacttttctcaaaacgctttggtatgatactcacgcatatgaaacaatgtactttagcattatatgcatactttaaatgagaatattctcacttcatgattatgtgaaaatgagaagctagctcaaaatatttatggcatgtttaaggctgattaatcttacgatcttgaaaacatgatcatttcacagtttctaagctaaaatgggatgtacattattgagctataaaggtcttggaatgaaattttctcctatattcatagttgtgtaggaactagcataagaaatggcattttgctggctgagctgcagctcagacgctgctgtctatgtgcactggtgagtggcgagttggggtggctcaacattttccccaacaatgtggatacgtgttttaatcagcatggggctttcatttcataactggaagaagagaatgtagtctgtctgggtatggagactaggttataaaatgttatgaaattgaataggcttttaaaaaagttgttgttgaaaaagaatgtagattctcttttacctggagagggatagatagatgcagtggagtggctggctagcatctccttccttcctggcctggtggatccagggtaagtgaggaatgagggtccaatgctggtggaattgtatttaccagaggattgtgagcctcttggcacaagcaagtaacaaagtgatacaaagtcaaagaggcagttatccccaccacttctaaatgggactctggtgcttgatgagtctctggagaccaaatacaagcatgaattagtgttgcagggacccccaggcactgctggtgggagcacatctcagagcagccctcatggagcatgatacacaagacttggtgaaacaaaatctgtgtcttacaccatggccacccgcgccctattccactcttgtatatacaccatggccacctgcgccctattccactccttgtatataaccccaggaaccttgtatataaccccaggaaccttctycatgtagtagagagtagttgaaagcaacttagtgttgaaaactaggagaatgaataagt

SEQ ID NO: 94690 - DNA, 926 bp, Homo sapiens
tgcatcagaatttcattcctttttaaggctgaataatattccataccatttgcttttttaaaagtccattttctcaaaaaattggttgtcatttccrctccccacccagccaatagaaacagcaaatatattaaattagaattgacctgacagaggaggtaatggaggcctgtaaattattcaaagaattattttagagtctgacagcaaggaagaagacaaaaatgctcttaaaaccagctcaggagtctctgaggctcttctgcgtggggcaggcagtcacaaagatctctacggctcctggagttctcgctggatcgtagcacaggacaatcttagtgattcctaatgatgccactgagtcatcaagacagagttattttctgtaggaagagtcaaagagttcagggaaagtgagtagtaagttacagaaatatctccattccaaatggttaaaattttttaaaagtttaggcttcagtcatctgaaaaatttacttgtgtgaaatgattcagtccagactgtagtgaaagagaggaatcccagcaatatcaaagtaaaatacacacacacacacacacacacacacagagagagagagagaaggagcacaagatctctttcttttttgtttttttctctttttttttgaacaaactcttacatatccttcaagcccaggccaaatggcaccttctctgtgaatgtgtgtgtgttaaataggcagagagaccttcaggggcgtttgctgacttctttcattctttttcatctcctacctccctttctagagtagagaattagtaggaacttgactcaagtggacggggatgtaatttctagggggagtttttgctgtcttactgcatctaaattattctgtctgtgcataaattaagttgtacacatatttagaagagccacc

SEQ ID NO: 94691 - DNA, 926 bp, Homo sapiens
tgcatcagaatttcattcctttttaaggctgaataatattccataccatttgcttttttaaaagtccattttctcaaaaaattggttgtcatttccactccccacccagccaatagaaacagcaaatatattaaattagaattgacctgacagaggaggtaatggaggcctgtaaattattcaaagaattattttagagtctgacagcaaggaagaagacaaaaatgctcttaaaaccagctcaggagtctctgaggctcttctgcgtggggcaggcagtcacaaagatctctacggctcctggagttctcgctggatcgtagcacaggacaatcttagtgattcctaatgatgccactgagtcatcaagacagagttattttctgtaggaagagtcaaagagttcagggaaagtgagtagtaagttacagaaatatctccattccaaatggttaaaattttttaaaagtttaggcttcagtcatctgaaaaatttacttgtgtgaaatgattcagtccagactgtagtgaaagagaggaatcccagcaatatcaaagtaaaatacacacacacacacacacacacacacagagagagagagagaaggagcacaagatctctttcttttttgtttttttctctttttttttgaacaaactcttacatatccttcaagcccaggccaaatggcaccttctctgtgaatgtgtgtgtgttaaataggcagagagaccttcaggggcgtttgctgacttctttcattctttttcatctcctacctccctttctagagtagagaattagtaggaacttgactcaagtggacggggatgtaatttctrgggggagtttttgctgtcttactgcatctaaattattctgtctgtgcataaattaagttgtacacatatttagaagagccacc

SEQ ID NO: 94692 - DNA, 561 bp, Homo sapiens
tgattacctctgtaaaaacccttaattccaaataagtycacattatgaaatagtggggcttaggatgtcaacatctgatttggaagaggggctggggcacaattaaatccattacacaccaccaagggaaattcctaatgaggcagccagacaggggaaaggtctgtttatcaggccatatgaggaactgctaaggaagcagcaatgctgtttctcagggaaaacttgtgagagacaacttttgtctagtctcaatttcttcaaaagtcaaattagaatcaactgatataaattacatgaaaataaatttttattcacttctatatctattttcctctcttaccaagcactttctggctatgcatttgagcctttcagatgattattaaaaaaagaaggaggaagaaattattatggggtgcaaaaatactcaataaaggaaccaagctcaacattaaagacaaaaagtatcactgtcagggcttttatattcactatagtgagggtctcctccccaccaatgacttcagagaggtccctcaggcctttccctgctgtcac

SEQ ID NO: 94693 - DNA, 561 bp, Homo sapiens
tgattacctctgtaaaaacccttaattccaaataagtccacattatgaaatagtggggcttaggatgtcaacatctgatttggaagaggggctggggcacaattaaatccattacacaccaccaagggaaattcctaatgaggcagccagacaggggaaaggtctgtttatcaggccatatgaggaactgctaaggaagcagcaatgctgtttctcagggaaaacttgtgagagacaacttttgtctagtctcaatttcttcaaaagtcaaattagaatcaactgatataaattacatgaaaataaatttttattcacttctatatctrttttcctctcttaccaagcactttctggctatgcatttgagcctttcagatgattattaaaaaaagaaggaggaagaaattattatggggtgcaaaaatactcaataaaggaaccaagctcaacattaaagacaaaaagtatcactgtcagggcttttatattcactatagtgagggtctcctccccaccaatgacttcagagaggtccctcaggcctttccctgctgtcac

SEQ ID NO: 94694 - DNA, 584 bp, Homo sapiens
ggttgtgcattgttattgtatatacatttttaagcgcattgaacgaaatcacgcatctttataaaacagcatagaagtaaactttttggtatatatgtatgtttgtgtgtatatatatatatgtaaaactgtggtggacagggattatttcattagagagagttatgaagacaattgtcctattttaccttcacagtctagggaaattgggcactggccatgcagttgtgttccacaattcctgctaagtacaataggaagggtcggctttatgagtaagcgggaaggcagagctctgtactgtacaagggccttgtagtgttttttgtcacactgcccgggagctacatttacaggtctaraaatttggggttttgaatttttttttaagtgctcccaattcaaatgccagtaacactaggaatccatatcacacgactctggagtggggagtgcctcattaagccaagtacaaagatgtacagaaagaagatatagtctctttctggtaggaagtcagagtcaatgggggttgcagaaggggaaaacggagaaaaatcaagtaggagcacagaaaaggagtg

SEQ ID NO: 94695 - DNA, 1754 bp, Homo sapiens
acctggaagattcttaggggttgggggattagtaagactaggatcaatgattctaggtaaaatgttcaagcacagccttgatcaatagaaacaaaggtcaaaaacattaggaacaatgttacatagaggagacgcaggaccaagaagaaatgaaaagagaagatacaacaaaagagaggaggaaaagtctaaagtaaaattaaaataactgggatttgaagcagggaataaatgttgcagaagaagaagatagtttcatggtgtgaggacccagactacttcttggggaagaaacctgaggaaatatccccactgacatgaactccccaatttgcaaacgtgtcagtcacaacatatcagaaggaagttcaataaaaagaaaatacaagcattattttttaagctacaccatgtaaacttagtatataagccctgcaatgtattatacaacttcaatatccccataaggaatactcctcaagttaggagatagargttgaagtggggtttgagcctcacacccttctattcatatcctcgaacacaaaccttttctcctagaattctcaattatggaatacatccataaggaatgctaagtggcagccaggtggaaaatgctgcattgctttatgggcaagtctcccacattctcccaggaggcttccctggtaatcagcctaggggtagacaccagagtgaggcctcctgctccttctctggcccactgagaataccacctgactgcccacacagatggaaaggtggcaatgaggaaggcagaagttgggcctcatcaggtgtgtccaccatatgggcacaggaagcacaagagagggcaggccctcctaccacccaactgcaaagaagcaaggaagtggggggaaggggatgggatacaatgactgactagcctgttgaggtgtagtgatcctgccccagagtgaggaaaggacacagagattctccttccacaggtaggggtgtcttccagtcctgggtgaagaaaacatttatgcatagcaccctgctcatagcaggggttccacagttccagcagtaatgtttgagataaggactgctctgtcgttgaggcttatccccctctttgtgtctacatgttggagttacccagaaataagaacatctgggttcttaaaaagtagcatcccaacacaccaactttgatgcccactccctccttcgatgctcaactttgccctcagctataggagatccgagaacagtgactattccaagactaaaacctgactccctccttggtacattctaattctcctcaacagcaccactgagtaacaaggacgctgcctaaggtaagtaagggtcctcaattccccccaagtttactagcacatgcataaaatattattaacaccatgaatggaagaggatgacgggataaaagaaattaggcttaataaagtgaatgtctataaaggaagaccagatcctgaaatgaaaaggcaaaacttatttgtgagctttggttaaatttatcatgaaaattacacttattaatgttttattgttattaacagcgtccgaacaatcctcatcttttgaagatgccaggagcaattcggaatactatctgattgaatgtgaacctgcctggttaatttattacctgatttgatgaaccaaggaaagccatgcgtttaaacaaatatttacatttaatatgggaacataaaagagctttaaatattatagactttgtacctgttata

SEQ ID NO: 94696 - DNA, 735 bp, Homo sapiens
ctctaataattcctagtgtgtgctatttcctttgataggctaatcaaagcctaattatttcaaacttgtggtttgacacctgcatatacctggtttcactgtagtcactscttctccaatgctctctacaatcccagttgcctcatgtcccacaatcactggaaacttggacaccattgttccttttatcacatggtcatctgtgcgacagattcctgtggccaaaatctgtgttcaaagacaaaaacattgcaccaatcaacaaactgatcatttcactgttgggagaatatttaacttcttgaagaaattataattgtttaatcaatatctttgcctaatataacaacatttactcttagactattctgagccaaaaatcaaccatcagacaagatccctctctgacggaacttataatattgctcccttataccctaggttgaatcttggtgcctgtctgtagtaaattggtgctcttgtgagggaaccagaatacagatgttactatgtgatggccccaaagtagatttttatagctaggcccttattgggctctcttaacaaagaacagaggaaatggcatgcaagaaggtaagcaaagagcaaaatcttcctgctactgttgtgctcaggtaacagtaagagggtcaaagaaagattggtagcaatgcctactcaacaactggtgtccaaagccaaggttaagctctgtccaaagaaagggaggaaaac

SEQ ID NO: 94697 - DNA, 1156 bp, Homo sapiens
gcattttataatattgttagaagaagataaggatttctttaaagggaagaatgatgttcatcaaatagaattaaaatacattgatgtgtacatcatatactgcttcctattgtattaaatttctttttttaaaaaattattgctctgtaatctaggacggtgatgaatcatctccaattttaacaagttttgaattagtgaaagttcctgacccccagatgtctatggtaagttattgtgcaatttttttatgaaagtacttttcttcagagtaattgtgagttagccacatcatgtactttctttaaacaaagtaatatataactgcctccgttacctaaaagtgattcataaattcactttagcatctaggcactgtttctgatggaattttatgaggaatattaacatcttaaaactaaggtaagggtagagtagggttgggcatccactttgtttgaattgctgaaagagctaggcagtatactctttttttttttcttcaggttgggggkatataatcttgaagtgaagacttggcagaactggtatttgaaagattgccatcatacagaaggagaatttgcctgttacaggaggattctataaccaggatgaatgcgtgaaagttttagggagaccaatttgttggaaaatagggaagattgctgtagccctagaactgttcaatttggaacgtggtaacttggatgatggtgggataccttcttattaacgaatttttgagatgatagctttcagggatatgaggataagaattcatacaatgcaaaagaggtttaattagatgactttagaattacaaacttgtaggcacaaaatccttttagcagcacgatagttaccatgatttttgcagttacagctcatttacatcattccaactctttttgttctaattttatacatttctaattagattagttaccttcctcatcagaccaaagtggattaaaattgggacattggatgatgaaaacatgatgattgagataagtacaggtcatgaaagcaggaacggctgatggcctaatatcaaaggaagagatgggcagcagggaaagtagagtataaaaagttaaaaagaaaaggccacttgcggatctggtaggaacattctaaagaccttgatagt

SEQ ID NO: 94698 - DNA, 771 bp, Homo sapiens
cttcctcagtgttactcaggtaagatataagcaaacatagatttagaactgaggtgctctgggtttgacacctatgttcatgacactaggctacaccgatatataccagaaagtaataattcctgtagaaaaggagggtggggacttttggtctgacttagggaagctggcattctcttctaggtcctgtctctgcatgcagatcttgggggagaggatggagcaagttacatgaggatcctagagaactttttgtttttttataaagccatttatttcaactctttctaagattcagagataaaggagtcttatggtataggagtaggtgcctctcaaaagcccagtgatgtggaagacatcaaggatccccaaataaaatattgttgagtgaatcagaagtctaggatgataacctaaggtcaataccaggtgggtagttgaagttgtcacctctttcaggtgtaggtgctggtcctaggagaaaatgactaagcccagaggtatgtgaaattaaaagtgtgrccagatggtagcctcatcagggcattgctatgcactggatggaccttaaccttcatactatcacctctgcccccacagctcacacataagcatgctgagttcagggtgtgcatagggtttcttgactttttgtgttctatgtctaaacaagttcttgttcaaatggaaaatgtggcctcttgagaatgtcagtgtccccacttattccattgtagatgtaaacggtacctttttttctctctttct

SEQ ID NO: 94699 - DNA, 1006 bp, Homo sapiens
tatggtctaaggacaagaagctttgacatcacctgggagcttgttagaaatgcagaatctcaggcctcacttcagacctattgactcggaatctgtagttttcaagatcttctgggtattcttacatacagtaatgtatatacactgctctgaaattcacaccttaaaaatgcctcaaattcaactcccactctttatctctgaygtaactatcataagctgagctgtgggttctcaaaacttgctgcatagtacaatcccttggggttttttttttgtaaataccaatgccaggttctagacctccagattctgatttaattcatccagagtggagcccaggaatctgtaagtttaaaaagatccccaagatgtttcactatgtagccagaacgaagaaccatttatctaagccaaaatcgccctttaactacatgattataatagtccttaaactagttcctctgtcttcggtctttccagccctccttatttccaatagagtgatctttcttaaaatctgtatgtaagaactttcactggctactgttggctccagcactgagtctgcacagttcaacatctgccccctgcttatttatccaaggccttttctcgccatagcctgtgctccccttgtactcttctgtgtcgcaaccaactgagttatttgcagttcatcaaatggaccatggggttttgtgccatcgtctttgcttttaatgctccctttctctgcagtggccttcttggtcctgatgctgaagatctactctttgcatactcaatttaagcatcaccttctctgttatgcctatccagaccttacccttacctccctgtggtagacctcatcactccatctctttgccacttttacatttagtgcatatctacaataccacattatagttatattctaattattttttgttattcctaactctatcagtctacaaattggaagcaagaagcatgtaattcccttctgcatctccagagcttc

SEQ ID NO: 94700 - DNA, 1677 bp, Homo sapiens
  misc_feature (1)...(1677): n = A,T,C or G
gcacagkggtgtgatcatggctcactgcagcctcaacctctcagacttaagtgatccttctacctcagcctcctgagtagctgggaccacaggcatgcaccaccatgcctggctaatttggtattttttgtagagagagggtttcactatgttgccccagctggtctcgaactcctgggctcaagtgatcctcccaccttgacctcccaaagtgttggggttacaggcatgagccactgtgcatggtgctgagactttttttcagtgtctcagagactgttgtatctagaaagagatcttagaggtaatctaatctggtctagagtttttttttttaaggctttatttatatacaatgtacatatcatgtaagttacatgatgtgactgtatatcatatatgattacgtatcccatttaaagtgtaccattcaactttttttttataggattgtacaatcgtcacgccaatttaaaatgttttagttacccctaaaagaaacttggtacccattagcagtcgctccccataaccctctccagccttaagcaaccacttatctactttctgtctctatagaagtggaatcttgcgactggtttctttgggcataatggttacttttttttttttttttttttttggaaaggggtttccctttgtttcccccatnnnnnnnnnnnnnnnnnnnnnnnnnnnnnnnnnnnnnnnnnnnnnnnnnnnnnnnnnnnnnnnnnnnnnnnnnnnnnnnnnnnnnnnnnnnnnnnnnnnngaattcagcataaatgaaaggaaacagtgtggaatgtggacaaagacaaacaaaatgttcatcgaatcaatgtgtgtaaaagcagaaactgtgttggtaattgtcgaagtgggtcacgggcacaggggttcattacaccgttcgattcattttcatgtgtgtttgaaatattttgaaatgaaagaattaatagaaaacataaaggtctagcaatataaatctaaataaattatgatgcagctgtgcaaaggaataatgtctacagacattaaaaatgctactgtcttttgtttttaattatttatgacagctttatcgatatgtaatttatatatcatacaattcacccatttaaagtatacaattcaatggctttcagtatatgcacaaagttttgaaccagcacagtcaattttataacattttcatctccccctaacaaaactccatgcccattagctgacactcttcatttctccccagacctccccaccccccagcctatacatttactttctgtctctatagatttgtctattctagatattttgtatgagtggagtcatacaatatgtgatcttctgcgtctggcttctttgatttagcataatgtttttaaggtccatctatgttgtagtatgtatcagtacttcattcctttttgtgactgaatcatattccattgtgtggatatatcacatttcattgatccattcattcattggtggacatttatgttgtttcaattttttaagctattataaataatgctgctatgaacattctgtacaagttttgtgtgtggacacatgtttttatttctcttgaatatatacctagcagtgaaacttctgggtcttatggtaaccctatgcttacctatttgagggacctccaaactgttt

SEQ ID NO: 94701 - DNA, 1677 bp, Homo sapiens
  misc_feature (1)...(1677): n = A,T,C or G
gcacaggggtgtgatcatggctcactgcagcctcaacctctcagacttaagtgatccttctacctcagcctcctgagtagctgggaccacaggcatgcaccaccatgcctggctaatttkgtattttttgtagagagagggtttcactatgttgccccagctggtctcgaactcctgggctcaagtgatcctcccaccttgacctcccaaagtgttggggttacaggcatgagccactgtgcatggtgctgagactttttttcagtgtctcagagactgttgtatctagaaagagatcttagaggtaatctaatctggtctagagtttttttttttaaggctttatttatatacaatgtacatatcatgtaagttacatgatgtgactgtatatcatatatgattacgtatcccatttaaagtgtaccattcaactttttttttataggattgtacaatcgtcacgccaatttaaaatgttttagttacccctaaaagaaacttggtacccattagcagtcgctccccataaccctctccagccttaagcaaccacttatctactttctgtctctatagaagtggaatcttgcgactggtttctttgggcataatggttacttttttttttttttttttttttggaaaggggtttccctttgtttcccccatnnnnnnnnnnnnnnnnnnnnnnnnnnnnnnnnnnnnnnnnnnnnnnnnnnnnnnnnnnnnnnnnnnnnnnnnnnnnnnnnnnnnnnnnnnnnnnnnnnnngaattcagcataaatgaaaggaaacagtgtggaatgtggacaaagacaaacaaaatgttcatcgaatcaatgtgtgtaaaagcagaaactgtgttggtaattgtcgaagtgggtcacgggcacaggggttcattacaccgttcgattcattttcatgtgtgtttgaaatattttgaaatgaaagaattaatagaaaacataaaggtctagcaatataaatctaaataaattatgatgcagctgtgcaaaggaataatgtctacagacattaaaaatgctactgtcttttgtttttaattatttatgacagctttatcgatatgtaatttatatatcatacaattcacccatttaaagtatacaattcaatggctttcagtatatgcacaaagttttgaaccagcacagtcaattttataacattttcatctccccctaacaaaactccatgcccattagctgacactcttcatttctccccagacctccccaccccccagcctatacatttactttctgtctctatagatttgtctattctagatattttgtatgagtggagtcatacaatatgtgatcttctgcgtctggcttctttgatttagcataatgtttttaaggtccatctatgttgtagtatgtatcagtacttcattcctttttgtgactgaatcatattccattgtgtggatatatcacatttcattgatccattcattcattggtggacatttatgttgtttcaattttttaagctattataaataatgctgctatgaacattctgtacaagttttgtgtgtggacacatgtttttatttctcttgaatatatacctagcagtgaaacttctgggtcttatggtaaccctatgcttacctatttgagggacctccaaactgttt

SEQ ID NO: 94702 - DNA, 1677 bp, Homo sapiens
  misc_feature (1)...(1677): n = A,T,C or G
gcacaggggtgtgatcatggctcactgcagcctcaacctctcagacttaagtgatccttctacctcagcctcctgagtagctgggaccacaggcatgcaccaccatgcctggctaatttggtattttttgtagagagagggtttcactatgttgccccagctggtctcgaactcctgggctcaagtgatcctcccaccttgacctcccaaagtgttggggttacaggcatgagccactgtgcatggtgctgagactttttttcagtgtctcagagactgttgtatctagaaagagatcttagaggtaatctaatctggtctagagtttttttttttaaggctttatttatatacaatgtacatatcatgtaagttacatgatgtgactgtatatcatatatgattacgtatcccatttaaagtgtaccattcaactttttttttataggattgtacaatcgtcacgccaatttaaaatgttttagttacccctaaaagaaacttggtacccattagcagtcgctccccataaccctctccagccttaagcaaccacttatctactttctgtctctatagaagtggaatcttgcgactggtttctttgggcataatggttacttttttttttttttttttttttggaaaggggtttccctttgtttcccccatnnnnnnnnnnnnnnnnnnnnnnnnnnnnnnnnnnnnnnnnnnnnnnnnnnnnnnnnnnnnnnnnnnnnnnnnnnnnnnnnnnnnnnnnnnnnnnnnnnnngaattcagcataaatgaaaggaaacagtgtggaatgtggacaaagacaaacaaaatgttcatcgaatcaatgtgtgtaaaagcagaaactgtgttggtaattgtcgaagtgggtcacgggcacaggggttcattacaccgttcgattcattttcatgtgtgtttgaaatattttgaaatgaaagaattaatagaaaacataaaggtctagcaatataaatctaaataaattatgatgcagctgtgcaaaggaataatgtctacagacattaaaaatgctactgtcttttgtttttaattatttatgacagctttatygatatgtaatttatatatcatacaattcacccatttaaagtatacaattcaatggctttcagtatatgcacaaagttttgaaccagcacagtcaattttataacattttcatctccccctaacaaaactccatgcccattagctgacactcttcatttctccccagacctccccaccccccagcctatacatttactttctgtctctatagatttgtctattctagatattttgtatgagtggagtcatacaatatgtgatcttctgcgtctggcttctttgatttagcataatgtttttaaggtccatctatgttgtagtatgtatcagtacttcattcctttttgtgactgaatcatattccattgtgtggatatatcacatttcattgatccattcattcattggtggacatttatgttgtttcaattttttaagctattataaataatgctgctatgaacattctgtacaagttttgtgtgtggacacatgtttttatttctcttgaatatatacctagcagtgaaacttctgggtcttatggtaaccctatgcttacctatttgagggacctccaaactgttt

SEQ ID NO: 94703 - DNA, 1677 bp, Homo sapiens
  misc_feature (1)...(1677): n = A,T,C or G
gcacaggggtgtgatcatggctcactgcagcctcaacctctcagacttaagtgatccttctacctcagcctcctgagtagctgggaccacaggcatgcaccaccatgcctggctaatttggtattttttgtagagagagggtttcactatgttgccccagctggtctcgaactcctgggctcaagtgatcctcccaccttgacctcccaaagtgttggggttacaggcatgagccactgtgcatggtgctgagactttttttcagtgtctcagagactgttgtatctagaaagagatcttagaggtaatctaatctggtctagagtttttttttttaaggctttatttatatacaatgtacatatcatgtaagttacatgatgtgactgtatatcatatatgattacgtatcccatttaaagtgtaccattcaactttttttttataggattgtacaatcgtcacgccaatttaaaatgttttagttacccctaaaagaaacttggtacccattagcagtcgctccccataaccctctccagccttaagcaaccacttatctactttctgtctctatagaagtggaatcttgcgactggtttctttgggcataatggttacttttttttttttttttttttttggaaaggggtttccctttgtttcccccatnnnnnnnnnnnnnnnnnnnnnnnnnnnnnnnnnnnnnnnnnnnnnnnnnnnnnnnnnnnnnnnnnnnnnnnnnnnnnnnnnnnnnnnnnnnnnnnnnnnngaattcagcataaatgaaaggaaacagtgtggaatgtggacaaagacaaacaaaatgttcatcgaatcaatgtgtgtaaaagcagaaactgtgttggtaattgtcgaagtgggtcacgggcacaggggttcattacaccgttcgattcattttcatgtgtgtttgaaatattttgaaatgaaagaattaatagaaaacataaaggtctagcaatataaatctaaataaattatgatgcagctgtgcaaaggaataatgtctacagacattaaaaatgctactgtcttttgtttttaattatttatgacagctttatcgatatgtaatttatatatcatacaattcacccatttaaagtatacaattcaatggctttcagtatatrcacaaagttttgaaccagcacagtcaattttataacattttcatctccccctaacaaaactccatgcccattagctgacactcttcatttctccccagacctccccaccccccagcctatacatttactttctgtctctatagatttgtctattctagatattttgtatgagtggagtcatacaatatgtgatcttctgcgtctggcttctttgatttagcataatgtttttaaggtccatctatgttgtagtatgtatcagtacttcattcctttttgtgactgaatcatattccattgtgtggatatatcacatttcattgatccattcattcattggtggacatttatgttgtttcaattttttaagctattataaataatgctgctatgaacattctgtacaagttttgtgtgtggacacatgtttttatttctcttgaatatatacctagcagtgaaacttctgggtcttatggtaaccctatgcttacctatttgagggacctccaaactgttt

SEQ ID NO: 94704 - DNA, 1677 bp, Homo sapiens
  misc_feature (1)...(1677): n = A,T,C or G
gcacaggggtgtgatcatggctcactgcagcctcaacctctcagacttaagtgatccttctacctcagcctcctgagtagctgggaccacaggcatgcaccaccatgcctggctaatttggtattttttgtagagagagggtttcactatgttgccccagctggtctcgaactcctgggctcaagtgatcctcccaccttgacctcccaaagtgttggggttacaggcatgagccactgtgcatggtgctgagactttttttcagtgtctcagagactgttgtatctagaaagagatcttagaggtaatctaatctggtctagagtttttttttttaaggctttatttatatacaatgtacatatcatgtaagttacatgatgtgactgtatatcatatatgattacgtatcccatttaaagtgtaccattcaactttttttttataggattgtacaatcgtcacgccaatttaaaatgttttagttacccctaaaagaaacttggtacccattagcagtcgctccccataaccctctccagccttaagcaaccacttatctactttctgtctctatagaagtggaatcttgcgactggtttctttgggcataatggttacttttttttttttttttttttttggaaaggggtttccctttgtttcccccatnnnnnnnnnnnnnnnnnnnnnnnnnnnnnnnnnnnnnnnnnnnnnnnnnnnnnnnnnnnnnnnnnnnnnnnnnnnnnnnnnnnnnnnnnnnnnnnnnnnngaattcagcataaatgaaaggaaacagtgtggaatgtggacaaagacaaacaaaatgttcatcgaatcaatgtgtgtaaaagcagaaactgtgttggtaattgtcgaagtgggtcacgggcacaggggttcattacaccgttcgattcattttcatgtgtgtttgaaatattttgaaatgaaagaattaatagaaaacataaaggtctagcaatataaatctaaataaattatgatgcagctgtgcaaaggaataatgtctacagacattaaaaatgctactgtcttttgtttttaattatttatgacagctttatcgatatgtaatttatatatcatacaattcacccatttaaagtatacaattcaatggctttcagtatatgcacaaagttttgaaccagcacagtcaattttataacattttcatctccccctaacaaaactccatgcccattagctgacactcttcatttctccccagacctccccaccccscagcctatacatttactttctgtctctatagatttgtctattctagatattttgtatgagtggagtcatacaatatgtgatcttctgcgtctggcttctttgatttagcataatgtttttaaggtccatctatgttgtagtatgtatcagtacttcattcctttttgtgactgaatcatattccattgtgtggatatatcacatttcattgatccattcattcattggtggacatttatgttgtttcaattttttaagctattataaataatgctgctatgaacattctgtacaagttttgtgtgtggacacatgtttttatttctcttgaatatatacctagcagtgaaacttctgggtcttatggtaaccctatgcttacctatttgagggacctccaaactgttt

SEQ ID NO: 94705 - DNA, 1671 bp, Homo sapiens
tggtggtttaattttgagcataaatgagccacctatccaaaggcaagcttttgtttgcagtattctgctattatctctttcacaatagccaaaacacaaaaacactttcaaggaaatgataaaccccaaagtagaagacaactcagtgtattagtaatctagattaactctgttagatatctagtccagggaacagaatattcaacctttaaataaatacacaataaaaatagcacacccttactatagggttactggactgtagcagtaaatgaactgaataaaattttatggcttcttaacatgctgaggtttttgcagtgtcttccatcttgtagcttaacaacattttgcagtctgctatcagtgaaactaatagtgcagatgaaaattttacaaaaaatgggaaatctacattggttttatattatgtcagtgaaatgaataaagatcatattttggcattaacagctaatggtgggaaaaggagtgggggctggttgctccattttgggtcccggaattgatattttttaaagagtcagctgtaattatgatatttgaatgtcattatcattaaactgatgaattatttagaaagaaggtgaacaaggcaaagagttcctcagtgtgttcatgcattttacttgtattttgccggttgaggtgcttctttcggtgggcggtattaatctcatggatggtgcagctatgttgtgttattatttctctcagcaaggtcgaagttttctaccacagagcatttgagggtaggaatagaggaagggcggatgagaaattgtgaaataatgagtcatgttacaaatgctgatggaaaacagtctctactctttgaaacagattattttatatcttccatttgagttgttataatgaattctttttaaaccttctggtctcccaccttgattggcttgaaaaaagcttatttgataagaaggaaccatgatttgaaaaaaactattaaaattatatcttgtgatgagaaaaatattaagtgtaagatacaagcaactttgcctgtgaacattttccttgaaccaaatggcaaattaataatgaacaacatttattttctcatttctttctcttccatcctctctccaggaaataacatttgcttgtttatagtgctttcattccttaggagtctgtaaaataattttccttctagatctatttgcaaacttaggtttcrtttgcctgacctgaattgataagtctctgcttttgagaagaaacttgccactttgagtccttcatgccagtctttgattgatgcttattgagtaatcaaggtacataattttgtgtggcatatgagatggaaaagacagagctttttacttttggatgttattgttagcagaatatcatacttaaactacgtcctacaaaatgcaagtcaatatattcttgtatcctgcagattttcatgcctttccatagtttgtagtatgaagacttcggttgaatcgcatgctgaattgtcttacttggtcatggaagtccttacttttctgaagaatcccatttatggttccagtaatgtgatctcttccaactgcccttatatttctcgcttttctctcattgtggagctgagtacagttttaatggggcttcccctttgattcaggtcccagaaga

SEQ ID NO: 94706 - DNA, 1246 bp, Homo sapiens
ataaaataagtgtgagctaacatagttatcaaagagggtgacctcactggattatgctattatcatcttttagtagaaagaactctccagctaggtctcttgccattttctgttccatcctggcagaaaagtgcagctacacctgacctgtcccatatcctcagatgattggccacctaaggtcttcagctgcttgaggacactaacaatgtctttctcatgttgtttatccttgtgtttgacctgaaatgaaggattacaaataagcctgcattaagttaataagcctcctaaaatgtcaagctagccttttatgtgtttctccattggctagtttgccagaattttgctatcacaaattatttggtgagtgttatcaatttctttgacctaaacaaacaaacaaacaaacaaacaaaaaacacgaagaaactagagttgaaaaatataaaggataaataacatgataaggaagaggaatggcatagacagttctagcccttcagttactcccactagaatcatttttatgcatatgaggtgcacatgaaccagaaggtactggttcttcaaaaccagcctgtgcgggactgcatttgggtgagctgacatcaggcaggttgggcttttgctaaattccctttcttaaaaagcagatcttttcctgttcacaggtttaackgttgtatggatccttccgcaaactgggtttcaaagttagaggagagaatagtgcatgagatgcttaccctgcctcttggactaaatagagtgactgttgtttatcctctcttgaggtgcgactctgtattgtgagatgcagcaaatattgcattacaaatttgagacattgctgtgaattgttaatgttgtatccatcccatacttggtgactctgcaagggtcttatttgctccccacttcctgaggaggtagctgtgttgcagtgattttgtccatccaacttagcactagcctgcaaggtctcttgtgacatgaataatgtcccggataatccgaaccactgcaaggccccacaatcagcagagcatttgtggtcttggggctgggcctgagttccgcctgggacttaactatgtaaataaatgctagaaatgagattcagagagcttaatactgcattggaagaaaggctggagccagcctaagctccagacaagctttcactcagaactgcaataaaatttgaccatttcaacttttatttctcattatttgtcagaaa

SEQ ID NO: 94707 - DNA, 624 bp, Homo sapiens
cattctccctctcagagctgaggtcctatgacccagccaacaacattcaactagagatatgtcaccccacttgtccccttccctcccacctcccctcaagatgtaccgaagtcagagttcctgactgacttaactcctgaccacaagtgaagtgactgttaaggaaagtaacacaatcagaaagttgcttttattgttattgttgttaagaaacaagatcttgctctgtcacccaggctggagtacagtggcacaatcatagctcactataacctccaactcctggagtcaactcctcctcctcagctccccaagtagctagaactasagacacacactgccacacccagctcattttttttaaaaaaaatattttttgttgagacagggtctcgctatgttacccaggctgatcttgaactcctggcctcaagcaatcctcctgtctcggcctcccaaagtgctgggactataggcgtgagccaccacgcccggccaggaagcttttatatataactatgttggcctcttccagatgaccctaccagaggaaaggatgagataaatgaagtgaaagttctgtgggggaaaaaaaacacacacacacagaaacacatataggaa

SEQ ID NO: 94708 - DNA, 810 bp, Homo sapiens
tgggactgaagggacactcttcttacaccaactgatgaaggcatcacaagacccaggggatctgaaccagctgttttcatctttgtgttaaagagtggggagccttgaaatttttctcctccagacacccatgaactagttcctctggactctccaatcccacgagctgaggaagcagcttcttcatagctggataagaaaggtgcttactctgcagaaaactgcacacaaagtccagtctctctgacaccggctgcttcaagatttgctgtccctcttcagtgccatggctagaaaaagagcaagtattaggaccagagtattcagcaatctttgcctccttgctgctgcatttcatagtacctccccattccttccagtcttgatctctgctggatctggaagagatccagatcagatcctggaggcaggtgacagataccaggacaccatttatccagatggaactgtgtggtgggtgggaagaggggacttgaggcatggggttcttctggaaaagatggcactctgccaccctatttgcaaacataaaaaagctctgtggaaaggggccgagaggagayggaggcagcacagatgaacgggaagctatattacaccatctggaatggctcaactctaaactgtcaggaagcctggagaacacacctaggttaagagtgagagaagaccatggggagggaaaaacatccaagaactgaaagaacaggaggaaacaaggctctgaagtgacagggtgaagttcccccactaggctgaaggctgagatggcaaaagcctcccagagga

SEQ ID NO: 94709 - DNA, 771 bp, Homo sapiens
cattttgcagataaagaaaaagactraaagaggttatgttgcttgtctaaggtcctatgaccctggtcacattaaatcagcatccagacccaggtctgtctgaaaaccatgtttgttccatatttaagggcatcatgtcccaaagagtagggttgaaggccagctttggatgttgtattttctgtggaactgaaaaattacatggggtagacattgagttaaatgcacaattctttcctgtcgtctctgatgtaagctctatagtaattgtcatgtgtactcagctttctaaaaattcccatggtgtcttggtggattcagtgaagagtgatttaagtgttgagaattggcaaattgaaccatttcgcctttatttcttgatcatggatatctgatatgattaactgcttttcttcctctcttgggttccaggcgcattggagtgactgtctggcatcaccaagatgacactccacgccacccggggggctgcactcctctcttgggtaagtagtcttcctctcttttgttggctatacttctccaggaagcttgagagagttaggagaggagttttgtaggagccagggctatgtaaagtcttctcatttctagactaaatagttttcctttagacagcatggaaatgcattttcatctgctctgtgtgtatttttctgaataaaagggtaaatgtgggccgggtgcggagcttatgcctgtaatcccagcactttgggaggccgaggcaggtggatcacctgaggtcag

SEQ ID NO: 94710 - DNA, 1089 bp, Homo sapiens
tgctctgcacaccacctaggtgggaacgtccgttacagaagtgcagttgtctccgagaggccctagccctaaacacggggaatgtgaggaatggtccttggttcacgtgatgaatcctcttctgaacctgtctcctcaggatgaccttttctagtgcccagcctcggtgacttgggagcccaggtgacaraggcagtgctggatggctgctgctcctctgagatggccagaggccagcaggctctgggtggaggggctggccttggggtccactgcaaccaaggctctgggaggtcctgtgaccattacttatgtcttgagttctctgtcctatttgatagggagcatcttgggagctgcgccaagcctgcacccatgacactgggttggggagggagaatggtgcgtgctcagcccagctggctcagctggtggtacatgggcagaaggggactggcgctcaggagtcaacccgaccctgggaacctctgtgcccatagcccaccctccaccactgtgcttcttactcagtggcacttccacctctggccaggtcacttccaatgctggacactgcttagctgctgggaacactgggggctgggaggggcaggggtcctttgtgcttctaactgaggcagtggcagctgtggtggtctgcgagacaggtgtggctctgaccaggagagtgacgacgtgggcacacaggagcaggacccacaaagggctgaggtctgaggaaaggacagttacaggtcagcggctctggagacagagtgggctgcccgggtaaggatgtaactccagcccagagatgtctgggttctagccagggaatcagagcgggaagagggacccctcagcacccaccccttagccctttattgaacagagtacagagaagctttagactggagccagagctacaatatctgcccaggttcttaaagcaacagcaccaggtgcgctgggtggtttgccttggagtgaaggctccgggttagcccattgctccattctgttcatagacctcaccctaccccgcctgcccatgcgtagccccaaggcctacctggtgtccagttgtgt

SEQ ID NO: 94711 - DNA, 717 bp, Homo sapiens
ggatccccgggcagcctataatttgctcaaaagctggaaatgtttctgcacctctgcagagcctggcctgcrgcttcctgtgttttcccaccttcctgcctcccattgtgcctcagagcaggataataccactttaaacatgtcacattagctgtcaaaggggttttgactcattctcaaggagagaagattgaaacagacccagctgtggaatacagagagctccttggcacctaaatcgctaccccaatcatccgtaaagagctgccaggaaaccatatcagcgggatctcagggaggctcactttagcacccccttcagacttaccagactggacgaggttagacaaatattaagattcaagtgtctacagggttttacagtgtgcagagattttgcaaatttgccttgtttgattctcacagtcattcccgtaatggagaaaccattgtccccattttacagctgagaaaactaaggcacagagaggtgaagtgactagtcccaagtcacacacctataggggccatgtttctgggatctaagagccctgtgttctaatctcacctccaccttcacagatctacctcttaatctcatctgtaaaatgatggcgatgccctctggatagtgttgcaagagcattatgacaatgtacataaagggcctgccagtgtccctggaacagagatactcaaaaaaagctcattaaataa

SEQ ID NO: 94712 - DNA, 717 bp, Homo sapiens
ggatccccgggcagcctataatttgctcaaaagctggaaatgtttctgcacctctgcagagcctggcctgcagcttcctgtgttttcccaccttcctgcctcccattgtgcctcagagcaggataataccactttaaacatgtcacattagctgtcaaaggggttttgactcattctcaaggagagaagattgaaacagacccagctgtggaatacagagagctccttggcacctaaatcrctaccccaatcatccgtaaagagctgccaggaaaccatatcagcgggatctcagggaggctcactttagcacccccttcagacttaccagactggacgaggttagacaaatattaagattcaagtgtctacagggttttacagtgtgcagagattttgcaaatttgccttgtttgattctcacagtcattcccgtaatggagaaaccattgtccccattttacagctgagaaaactaaggcacagagaggtgaagtgactagtcccaagtcacacacctataggggccatgtttctgggatctaagagccctgtgttctaatctcacctccaccttcacagatctacctcttaatctcatctgtaaaatgatggcgatgccctctggatagtgttgcaagagcattatgacaatgtacataaagggcctgccagtgtccctggaacagagatactcaaaaaaagctcattaaataa

SEQ ID NO: 94713 - DNA, 792 bp, Homo sapiens
aaggaacttacaaaatactaatggttgcagggtgggagtatgagtgaattttctatattctctgtttctagttttccaggtggcttatttttagctagctctrgggtgggccttctcctagatttatacttggctcagtggctgagatagggggtacagcaaacagttggtggccaataagtgcacattcatcattgtggacatcagaaggcgggactctatgcaggatcatacttctcagaagatggggtgcaggcacccctgtcttcacacagctgtggcctagagggagtgctgaactgttggcagtgtcacagagacagggctaaggatactgggacttcctaacatccttcccatggtctgcaaagtacacagtgtgcaccctctgagggcctacaaagtgacaggcaccatgctaggcactgtcgaagacagatgaatcaaacatgatccctgccatcagagaactcccagtttactaaaacttgggcacaaaacagtagaacacagtgggtagtcagagatcactggaaattgttacattcatttattttttgagcatcaattatgaaccaggctcaggtactgaggataccatggtaacaaaatagaccaagctcatttctgtttgtaaggaaagaaattactaaatgattacaagtgtgatggcttttataaaacagttgttcatgacatactttttgttagtttatgtacagaaaagtatgttatcagtatcaacctacctctgcagtgcctccccgtgtactccatgtaccagtagcttta

SEQ ID NO: 94714 - DNA, 938 bp, Homo sapiens
tgcatggagcaaacacctcctcatgtagaagttatgcaaacctatgcaaaccccatacaaatgagctggccaggccagtgtctagttgggcaaaaatatcggaaatattgtgcacaccagcctgtcattgctgtcacagaaggagagcaacaaggagaagggttatctctggtgcatttctggattaaatcataactttagaatacttttctcttttacaaagtctgactgtctctctaagtaagacatcttggataaatgtccctttccctctccgtgtttcmgcattgcatgttaatttcaggtggcagtttatctcattagtcattgtcacttccactgatcacccctttgaagctacatgtaaactttacttttaaactttctaaaaatgcggctttccccccttgctttaggttccagaaaacgctttgttcctggcactgtccaaccttagggatcacataggagtcaggctcacaggcttctggggccagaggagcactttaataccaggtcagcagtcactcagttgtttctgaagttggaatggcagatttgtctcagtggttctccttttaaacccttttatgccggaggttgcaattttttgaattgcagacgtgtgaaaaatcagaccttggcaatgaccttgagcagtaggatataaataactcccacatgcttagcgttccaataatggaacactgcgcataaatgggttaattaacctccggtgatttaagtttaactctgtaaagtaagctgagaagtgtgcatgggaagtgcagtttctgtccgcgatgaaagggctgaaggtggtccaggtggctgctcttggcagcacctgagggctgggggcacgtcagacagacggcccagccggtgtgcggaagcgttgaccaagataacggccccttctccacaaggcttaatca

SEQ ID NO: 94715 - DNA, 938 bp, Homo sapiens
tgcatggagcaaacacctcctcatgtagaagttatgcaaacctatgcaaaccccatacaaatgagctggccaggccagtgtctagttgggcaaaaatatcggaaatattgtgcacaccagcctgtcattgctgtcacagaaggagagcaacaaggagaagggttatctctggtgcatttctggattaaatcataactttagaatacttttctcttttacaaagtctgactgtctctctaagtaagacatcttggataaatgtccctttccctctccgtgtttcagcattgcatgttaatttcaggtggcagtttatctcattagtcattgtcacttccactgatcacccctttgaagctacatgtaaactttacttttaaactttctaaaaatgcggctttccccccttgctttaggttccagaaaacgctttgttcctggcactgtccaaccttagggatcacataggagtcaggctcacaggcttctggggccagaggagcactttaataccaggtcagcagtcactcagttgtttctgaagttggaatggcagatttgtctcagtggttctccttttaaacccttttatgccggaggttgcaattttttgaattgcagacgtgtgaaaaatcagaccttggcaatgaccttgagcagtaggatataaataactcccacatgcttagcgttccaataatggaacactgcgcataaatgggttaattaacctccggtgatttaagtttaactctgtaaagtaagctgagaagtgtgcatgggaagtgcagtttctgtccgcgatgaaagggcygaaggtggtccaggtggctgctcttggcagcacctgagggctgggggcacgtcagacagacggcccagccggtgtgcggaagcgttgaccaagataacggccccttctccacaaggcttaatca

SEQ ID NO: 94716 - DNA, 929 bp, Homo sapiens
cttggtagaccaattattctaaaaaccaggtttcaaggaaaaagtcactttctggcagaggccttacatgacaagttccgttccgcagtggattaaaatggttgtgaagagatgctaacataacttcaactacggcagtgtgaacacaccactgtaataattcatttagaatgatggcacctgagacctaatttaaaagtcctagatgaatactagtctcacattcaaccctgagggctgcggcaaacatacgtaagaaagtctaagaaccatagtgagtctaattgaattggacttaaacggaccattgagatggcctcactgagctcaggggaattcacgttgtctatactgtatcagaatcacagcttgaactgaataactggttacattcaatcatgttacagtaactcatgcctgaggtaaaggggaaaccttttgctatcagcaagactggatggaaaacaatttcaaatcactttaaacccagttggcaactactttgccaattatggaatccagtgggaaaggtgtgttcgagggctcaggactaaatgatttatgtcaggcatctgggcctcccgaggaatgcgggagagtgtgcggaggaggggcgtgtggctaattatttctcctaagaatactttagtgaggtaatttgtgcctgcagatgagtcacactgcaggctggatgaaaggcaaggtaagcacagacattcctaagatcccatttagagatggataaagagggagcctaaagattcaaatacactttctcatctcttcgctctgaaacatttggagataaaaaacggaaagagcaaacttagttctcggctctaacaggcaagttgcgatcaaagtctgtaatttgtactgcaggtattgcattggctgccttctaacacagacttactggcamaggtgac

SEQ ID NO: 94717 - DNA, 1338 bp, Homo sapiens
tttggaagggacacattctcccagtttactgcaatatcctcgctccctattaattacacccagtgattaagcccacaatgccttttaaactttcccagcaagccttgtacaacaatccaaatcaggccaaaagtaggaggagagctattttcttcctgcctgctttccctctgagcatacaaatttggaggccccataacaactgctcccctcttcatgctggcagagcctaattatttctcaacttatccctaaacaaagaatagatcaccaaaatacttcagatgaaacgtagagcagacaggtcctgggctgggaatccaggagactgatgcaacaaatgcaacaaagagcattaagagactagcaatgtccatgaagaagggaacctaataagtaagctgccacagctcaagtcctcctggccaaagccaggtcatgtccctctataaccagccagtgagaagggaatgaggtccctaaacgggttcgggggattcatgattctctctggggactggagagagagcctggaggtctcactttcttgagcacatcggggtgactgatggaccctgccgggtggtcaaggtgagatggcttctggcacaggtattggatgtgacataatccttgcgaagggcctagacagttaaggaagtgcaccctacctcctgaaagctccctccatacctggcactaaaaggtattatcaccagttcagatattttgatatatatggttcgcttctgtctgatgactccctgcaaaaaggctaccctccaagctaccctctagggtgagtcattagacagaacaaggatataacacatcccctgctctcctaaggaaattctctcagtgtgaattttcttgtgctgaatgaacaaagattttttttgtttgtttgttttttttggtttgtttttagacagtctcagtctgtcacccaggctggagtgcagtggcacgatcttggcttactgcaacctccgcctctggggttcaagtgattcttgtgcctcagcctcccgagtagctgggattacaggcacctgccaccacgcccagctaattttttttttttkgtatttttgtagagatggggtttggccatgttggtcaggctggtcttgaacccctgacctcaagtgatcctcccgccttggcctcccagagtgctgggattacagacatgagccactgcgcctggcctgaatgagtaaaggttttgctaaaaaatttcccacactgcctcagcataaagccttacttcagtgtcaacttttggtgctgaacaaggcactccttggctgaaaccttcccacattctatgca

SEQ ID NO: 94718 - DNA, 1338 bp, Homo sapiens
tttggaagggacacattctcccagtttactgcaatatcctcgctccctattaattacacccagtgattaagcccacaatgccttttaaactttcccagcaagccttgtacaacaatccaaatcaggccaaaagtaggaggagagctattttcttcctgcctgctttccctctgagcatacaaatttggaggccccataacaactgctcccctcttcatgctggcagagcctaattatttctcaacttatccctaaacaaagaatagatcaccaaaatacttcagatgaaacgtagagcagacaggtcctgggctgggaatccaggagactgatgcaacaaatgcaacaaagagcattaagagactagcaatgtccatgaagaagggaacctaataagtaagctgccacagctcaagtcctcctggccaaagccaggtcatgtccctctataaccagccagtgagaagggaatgaggtccctaaacgggttcgggggattcatgattctctctggggactggagagagagcctggaggtctcactttcttgagcacatcggggtgactgatggaccctgccgggtggtcaaggtgagatggcttctggcacaggtattggatgtgacataatccttgcgaagggcctagacagttaaggaagtgcaccctacctcctgaaagctccctccatacctggcactaaaaggtattatcaccagttcagatattttgatatatatggttcgcttctgtctgatgactccctgcaaaaaggctaccctccaagctaccctctagggtgagtcattagacagaacaaggatataacacatcccctgctctcctaaggaaattctctcagtgtgaattttcttgtgctgaatgaacaaagattttttttgtttgtttgttttttttggtttgtttttagacagtctcagtctgtcacccaggctggagtgcagtggcacgatcttggcttactgcaacctccgcctctggggttcaagtgattcttgtgcctcagcctcccgagtagctgggattacaggcacctgccaccacgcccagctaattttttttttttggtatttttgtagagatggggtttkgccatgttggtcaggctggtcttgaacccctgacctcaagtgatcctcccgccttggcctcccagagtgctgggattacagacatgagccactgcgcctggcctgaatgagtaaaggttttgctaaaaaatttcccacactgcctcagcataaagccttacttcagtgtcaacttttggtgctgaacaaggcactccttggctgaaaccttcccacattctatgca

SEQ ID NO: 94719 - DNA, 1075 bp, Homo sapiens
caaattttttaaaaaaattttttgtagagatgggcggggggtggggggcagtcttagttgctccctcatttctacaaagaataaaaaaattagccacacgtggtctcagcctatgttgctcagactggtcttgaactcctgagctcaagcaatcctcccacctcagcctcccaaagtgctgggataacaggcatgagccactgggcctggccctgagctcacttcttttaagattctcacttcactggaaaacattccatccacaaagggctaactttccttattacctaaagactcaggtcgaacacacccagactcaatcctatataggagggtgtgagaggagaaaatggttggttttggccattcattatccattctgtcttccgaacagtaccccacatttatttgggcaaatacctcttcgccaatatgagcctatgcaatatgctaaggggttggctccagttttatcttctagtcatagttgattggttcatttaaagccaagtgatctgattaggccccatgagagcaagatccagggctttggagactgttaaggaagctgaacaaccccagctggttataaagctgagggaaggtaaaggctagagctactgcagccaccttgtgatcatggraagaccctggctcagaatgaagtcaacacattgaggtgcgggtcaaaagtcaaagtatttaataaggatatgccacaggcactaatcagtcagagtgtacacaagctggtatgctgtcctgggactctgcctgtaggaactcatagcttttgaaaaaaaaagttttattcatgatgtattatctcaaataaaaatactatcatgtaatgatatacctataatttttatttgtacataaccttgccatattgctcctaaaatatttacaataatttcttaatattatctaaaactaagattatcttcagttttccccatttgtttcaaaaaattttaaaaaaatagtttgtttgcttgaatcaagatttaaacaaagttacggtattttattgctaataaaaaggactccttattctggaaactgttagaaa

SEQ ID NO: 94720 - DNA, 351 bp, Homo sapiens
tgataacttatactgggaaaaaaatcataccatgaaagaagtccatttttccttactcaagttactttcttaattttataaacacaaaactctagtttttattgataatgattttcttcagagcttctttcacctccttattctggaggctatagattamgggattcaacatgggaatgatcactgtgtagaagacagaggccatcttgtctgtgtccagggcatggctagagctaggctgtaagtacataaaaatgagggtcccatagaatatggtgactgccagcatgtgagagccacacgtcgagaaagccttctgtcttccctcagctgaatgcatcctcaggatgg

SEQ ID NO: 94721 - DNA, 1499 bp, Homo sapiens
tacatggcaaaaggcaatcattcatcagtgactgagttcatcctcctagggctcacagataatcaggaacttcaagtcattctctttggtgtattcctactgatttacttagttactgtgttgggtaatcttggtttgattgtgcwaatccatatcagtcctcagcttcacacacctatgtattttttcctcagccatctggcttttgtggatttttacggtacctctgctatcactccaaacacccttgtcaactctttgcatgaaattaaaagcatgtcattttatgcatgtgccactcaagtgtgctgcttcattacactttcagtctgggaattattgttgctctcatggcatatgatcggtatgttgccatctgcaaccctttactctatgtagttctcatgcctaggagactctgcattcaaatggtcactggcttatatatttatggtttcaccatgggactcatacaagcagtggccacattccacatgtcgttttgtgactctaatgtggtcaaccagttctactgtgatgatgttcctctgattgctctggcttgttctgatacacaagtcaaggaattgatgttgttcatcattgctgcgttcaatgttttttgttctcttatcattgttctcatctcctatgtattcatcgtctttgctatctaaggatccactctgccgtaggaagacagaaagccttttctacctgtgcttctcacatgttttctatttccatatattatgggaccctcagttttatgtacctacagcctaagtcaagccactcactagataaagacaaatttgcctcagtattctatgcagtggtgattcccatgctaaacccattgatctatagcttgaggaatcaagaggtaaaaaaatgctatgaaaaaaattattgaaaaaatgtgttctagtaatcaacagtaaaatttgttggtactaaaagaaatactacgtacagagtcaggacattttgaatcaaggtttgtacagtgctagtatatgtagaagcctttgtcctttggaacttattttctttgaaaatatgtcttttattgctttggcttacaaatgataggcattttgtaaatgtttcacttttgaactgcaaaagagagataagaataatctactctctttaaccatgagatgcttcaatactaaatagaaataaagaagaaagcaccttgaaattatgactttatcttatttcactatgatattgagaactttaggtcatcttgagagacatgtgctattattattactgcatataatattgcaaatactaggcaaggttttcttccatagttgaactggggggaaaatggtgagatgcttggctgaaagattttggtttgaatatcccttacaagttagattatccttcattttacaatatctctattgatttgactgaatatttttacctgatcattcaagcatcatccctcccatattaccctcacattcagccagcac

SEQ ID NO: 94722 - DNA, 1499 bp, Homo sapiens
tacatggcaaaaggcaatcattcatcagtgactgagttcatcctcctagggctcacagataatcaggaacttcaagtcattctctttggtgtattcctactgatttacttagttactgtgttgggtaatcttggtttgattgtgctaatccatatcagtcctcagcttcacacacctatgtattttttcctcagccatctggcttttgtggatttttacrgtacctctgctatcactccaaacacccttgtcaactctttgcatgaaattaaaagcatgtcattttatgcatgtgccactcaagtgtgctgcttcattacactttcagtctgggaattattgttgctctcatggcatatgatcggtatgttgccatctgcaaccctttactctatgtagttctcatgcctaggagactctgcattcaaatggtcactggcttatatatttatggtttcaccatgggactcatacaagcagtggccacattccacatgtcgttttgtgactctaatgtggtcaaccagttctactgtgatgatgttcctctgattgctctggcttgttctgatacacaagtcaaggaattgatgttgttcatcattgctgcgttcaatgttttttgttctcttatcattgttctcatctcctatgtattcatcgtctttgctatctaaggatccactctgccgtaggaagacagaaagccttttctacctgtgcttctcacatgttttctatttccatatattatgggaccctcagttttatgtacctacagcctaagtcaagccactcactagataaagacaaatttgcctcagtattctatgcagtggtgattcccatgctaaacccattgatctatagcttgaggaatcaagaggtaaaaaaatgctatgaaaaaaattattgaaaaaatgtgttctagtaatcaacagtaaaatttgttggtactaaaagaaatactacgtacagagtcaggacattttgaatcaaggtttgtacagtgctagtatatgtagaagcctttgtcctttggaacttattttctttgaaaatatgtcttttattgctttggcttacaaatgataggcattttgtaaatgtttcacttttgaactgcaaaagagagataagaataatctactctctttaaccatgagatgcttcaatactaaatagaaataaagaagaaagcaccttgaaattatgactttatcttatttcactatgatattgagaactttaggtcatcttgagagacatgtgctattattattactgcatataatattgcaaatactaggcaaggttttcttccatagttgaactggggggaaaatggtgagatgcttggctgaaagattttggtttgaatatcccttacaagttagattatccttcattttacaatatctctattgatttgactgaatatttttacctgatcattcaagcatcatccctcccatattaccctcacattcagccagcac

SEQ ID NO: 94723 - DNA, 1499 bp, Homo sapiens
tacatggcaaaaggcaatcattcatcagtgactgagttcatcctcctagggctcacagataatcaggaacttcaagtcattctctttggtgtattcctactgatttacttagttactgtgttgggtaatcttggtttgattgtgctaatccatatcagtcctcagcttcacacacctatgtattttttcctcagccatctggcttttgtggatttttacggtacctctgctatcactccaaacacccttgtcaactctttgcatgaaattaaaagcatgtcattttatgcatgtgccactcaagtgtgctgcttcattacactttcagtctgggaattattgttgctctcatggcatatgatcggtatgttgccatctgcaaccctttactctatgtagttctcatgcctaggagactctgcattcaaatggtcactggcttatatatttatggwttcaccatgggactcatacaagcagtggccacattccacatgtcgttttgtgactctaatgtggtcaaccagttctactgtgatgatgttcctctgattgctctggcttgttctgatacacaagtcaaggaattgatgttgttcatcattgctgcgttcaatgttttttgttctcttatcattgttctcatctcctatgtattcatcgtctttgctatctaaggatccactctgccgtaggaagacagaaagccttttctacctgtgcttctcacatgttttctatttccatatattatgggaccctcagttttatgtacctacagcctaagtcaagccactcactagataaagacaaatttgcctcagtattctatgcagtggtgattcccatgctaaacccattgatctatagcttgaggaatcaagaggtaaaaaaatgctatgaaaaaaattattgaaaaaatgtgttctagtaatcaacagtaaaatttgttggtactaaaagaaatactacgtacagagtcaggacattttgaatcaaggtttgtacagtgctagtatatgtagaagcctttgtcctttggaacttattttctttgaaaatatgtcttttattgctttggcttacaaatgataggcattttgtaaatgtttcacttttgaactgcaaaagagagataagaataatctactctctttaaccatgagatgcttcaatactaaatagaaataaagaagaaagcaccttgaaattatgactttatcttatttcactatgatattgagaactttaggtcatcttgagagacatgtgctattattattactgcatataatattgcaaatactaggcaaggttttcttccatagttgaactggggggaaaatggtgagatgcttggctgaaagattttggtttgaatatcccttacaagttagattatccttcattttacaatatctctattgatttgactgaatatttttacctgatcattcaagcatcatccctcccatattaccctcacattcagccagcac

SEQ ID NO: 94724 - DNA, 729 bp, Homo sapiens
cctactatgtgacaagcactggactcagtgcaagtgacatggtgataaataagaggcatctcgaggggctcacagattagtgggggacatatgcatgcatacgagttagtgtgctagctggacaagcacagctaccttgtggttttgggttcctgggacatgaaggagggtgtggtcaggtctgcctgaagagtgacgcggtgtttcagcctctgagttgagttctaacctcacggattgaggagggtctaggaaaggcactctaggctgatagcacagcgggttaggcatgwctcccagctgtaaggatggaaacccaactccaactcacgtttttaagcaaggaaaatgtcacggtggtgttactgaaagtccaggggctccttttcccatcagcgcagctagatctaggcattcagacgtcttaatgaatccctcctgaccctgtttccctttgttttggccttattctcaggcaggcattcctcatatgatgacaaagggacccctgcaagcttatctactaccagccttgtaaccaaacggaaaaaaacagtgccactttttctatagctccagaaaaatcttgtgattgcctctgattggcctgaccaaagtcacatatttgcctgaatcagtcaccctagccagggtgctgagcatggagtttgatgggtgatgtggagggagggggcaggacagagaagaagaatcaacaagcctgcattt

SEQ ID NO: 94725 - DNA, 821 bp, Homo sapiens
ggatccttaaactcctggttcagaaatttgggctttctcctctccagtgttttctaaagtatagttcccaagattattttagattatacatagacagactctatttcaaaaattatgtatttattttagtaaactggaaaaatatagttagatatagcaaatcattatttcatagtgatattgaatttctatgttaaataaagttaagaaaataaatgaattgaaaaatgctaagtgagtaataggacagatggtatgtgaatatggcaacagcataaaagcagtacccaaataagtgacttttagaaaacactgctccaggcctgggtggtatactcggatgcctagaaaccaggcaggtgacattagtgcaggaagctacagagatggcctgtggctgatcatagggtctgggcctgccctaaatgagaagagattattcccatgttggatcttccaatttaaaaacttttttttkgtatttaacaagttctaagtatcgaaatagatatatgaaagccaacatgaagatttttctttgacctcatttttaaaaagttctggcaactaattcaaatttttgaaaacactacataaacagaagtgtccatagggctcctgtttgtaatatctactccagatgataagggacagtaaccctatggaaggctactgccccttatcatctggagtagacatcacaaaggggcaggcctggagacagaagtccacttagaatgctgatgcagcagtccaggccatgagtaacatggcctggatatttccattttccaggtacagtccaagccaacatagaggtt

SEQ ID NO: 94726 - DNA, 703 bp, Homo sapiens
ccaaagcatrgtccttattctcgaggagcactgggaaggctttagcctttagagtcactacaccggtctaggtctgaattccaaccgtgtgacttctgagggtgtgatttggagaagtcactgtatctgagtctcagtttacttattagtgaaatgagaaaactatttgccttacacagttgtgaaaaataaaaccaccatatatatgcacctggtacataaaagatactcaggaaatattagtttactcctgtataagctctgtgattttcaaactttatccttgtcagccatctgaaagcttgttaaaacatggattgctgggccctacccaccagagtttccaatttaataggtctggggtagggtctctggtgatgataatatccttgggctggggctttgagaaccgctcgtctggaagaaagacagactttacacacaagtctgtaaaaaacaagccagagggggcagaaagatctaaactacccaagaatgcaaaagagcttgtggaccagttccaaagaggagggcttggtcctccaggaggtagtatttgaatagctcttaaagaatatacaggcttttgaaatgcaaagcagttctgggcaagatggaggtcaagtaagagtaagagccagatccagaataatcatttttgctgctcccacacagtgaccggctgatcataatgccaacttca

SEQ ID NO: 94727 - DNA, 617 bp, Homo sapiens
ccccatctgaggttgctgccatatagccaccagattttcacctccttcrgccctgcgcctggcatagagtaggcaccctgtaaatatttgcgagtgaaagagcaggtgaattatagacaatggctgcatcctcaggccagcaacagctcagaaccacaggcaggggcagtgaccgtcattccttgcctcttagacttgactctgtacaagtgcctggactctcattaggcccttccagccacctccatatgaggaaagcaggggttattgtgagaaaatgaggtgcagaggttaagggggctgctcagagtgacactgacttggaagggacagagttgagccctgagccctcttctgaccacagatctagattatcttccatgagattccagagcggagaggggtggggcatcattagaatttacccactgtacaccagatcttaagttttggtgatagtgcatgacatggattctagagaaatcatcccagtgggtgccagaggaagtacctgcaaacctcagtgtccccctcccttacccaaacctgctcttgacgccactactaactgtataaggggcttcaccaaggcatgataccaggcactgggatgagca

SEQ ID NO: 94728 - DNA, 1215 bp, Homo sapiens
gattagctgtcactgataaagaaaagcacttttgatttttgtaagttgactttgtaactagcagcactgctcaacttttcctgttacttctaccgtgtatcagttgactgtgttgggttttctacacagctgatcccattgtctgaaaataatggcagttctatctcttctcttccaattcttacagacatttcttttcttggccagkaattctagtattttacagcatggccttgagaatggacacctttgtcttgctctcagtcttcattggcatgtgcctcaagttcatcctttaggtgtgacatcctctaagcttcaaccacggtatccaccgccctgtgaacacgtctgtgctcttcttccattcattgcctggcattgcctccacccttctgacctttccaaacccctctatccttcaaatcccagctcaagtctgacttttcctacaaagcctctgactgctccagcccaaagcaagctcccactccgaggaagaggagtcttgaagaactgcttcatccagaatacaaattgtgcatacttacaaatctgcccaactactttgttggatccttgaggacaggggctgtgtattaaatctctctccctcctcttcggtacagagaacttgcatagtaaatagtagtgagtatgtgaaggtgccacatcttatcagctctggaggtgtgttgtgagttcaaggccagaaggcaaaactggaggcatcaaagaattcttcctgcctggagcaggaagccgcatgcaccttccaccctcctggattgcgtgccttccacgggcttcccatgcaccaccccagctcatcttcgcaaaggccaaaaaggccagtattagaatcctcatttttcagatgaagacacaaggtttacagagattagctaaagcatcacacacacacagtgactgaaatgagagctgcagccatatttccaggactcccagatctaatgacttcactgcagcaggcttcccatggaaatgtcacttccacagccaggtgagcaacagacctgtggccaggcacacctggagaagaccagaacagtccccttttactcaacgatttcacctccaggaatttgttttaaggaaattactagacaggtgcccaaagatgtgtttactaatgttcatttcagagttgtttatcaaaaatccattaagaaggcacaaaaaatgtgaagcaac

SEQ ID NO: 94729 - DNA, 1215 bp, Homo sapiens
gattagctgtcactgataaagaaaagcacttttgatttttgtaagttgactttgtaactagcagcactgctcaacttttcctgttacttctaccgtgtatcagttgactgtgttgggttttctacacagctgatcccattgtctgaaaataatggcagttctatctcttctcttccaattcttacagacatttcttttcttggccagtaattctagtattttacagcatggccttgagaatggacacctttgtcttgctctcagtcttcattggcatgtgcctcaagttcatcctttaggtgtgacatcctctaagcttcaaccacggtatccaccgccctgtgaacacgtctgtgctcttcttccattcattgcctggcattgcctccacccttctgacctttccaaacccctctatccttcaaatcycagctcaagtctgacttttcctacaaagcctctgactgctccagcccaaagcaagctcccactccgaggaagaggagtcttgaagaactgcttcatccagaatacaaattgtgcatacttacaaatctgcccaactactttgttggatccttgaggacaggggctgtgtattaaatctctctccctcctcttcggtacagagaacttgcatagtaaatagtagtgagtatgtgaaggtgccacatcttatcagctctggaggtgtgttgtgagttcaaggccagaaggcaaaactggaggcatcaaagaattcttcctgcctggagcaggaagccgcatgcaccttccaccctcctggattgcgtgccttccacgggcttcccatgcaccaccccagctcatcttcgcaaaggccaaaaaggccagtattagaatcctcatttttcagatgaagacacaaggtttacagagattagctaaagcatcacacacacacagtgactgaaatgagagctgcagccatatttccaggactcccagatctaatgacttcactgcagcaggcttcccatggaaatgtcacttccacagccaggtgagcaacagacctgtggccaggcacacctggagaagaccagaacagtccccttttactcaacgatttcacctccaggaatttgttttaaggaaattactagacaggtgcccaaagatgtgtttactaatgttcatttcagagttgtttatcaaaaatccattaagaaggcacaaaaaatgtgaagcaac

SEQ ID NO: 94730 - DNA, 517 bp, Homo sapiens
agctccactccctgctgaggactaattcagagcaccctagagccagagtgaccctccgccctgtagtcagcaaacagattccaaggagactggccaccccatctcacagatggctgctcgaggcccaggaaacggcccaccttggtgttgggactgagctaagaatgaagcagaagagggaaggaagactccccccactgcggtgaggtaggctcggggcctggtaaccacccttttgggattttggttccagagtgcctggcccctgataagtgtctgctgggcagggaggctgcctggagtcatcccataagcactgctcatcccaggagtgtgctcccrcgctcagccctggatgtgagcacagagaccagggcaccccctccaggacacccaccagggactccccagcatcgtgcagctgtgtccccattcccccttcctccccaggagaggagacattcaaaacaggcgggacagatgtgcctcctggtggtggctgggatgtctgcattcc

SEQ ID NO: 94731 - DNA, 686 bp, Homo sapiens
gatccatctggaacacccatgaagtctaagttaatgaatggggcaaattctgaacccctatttggttctgcaaaaatagcttaagccttttagttacacacagaatactactcaagtggtagcatgttctagtaagaaaaaaagctaggtttatattctgatcacgtgggtctctgcaggyaacttgtaaatctctatctaataatccaatgtacacacagcccctgggccaggtgtctgattcccatccctccattcccctcacctctctagcaaccatatttctagatgactcctctagtgtgatctatcagtttttgctcaaagattgtatgaacatgtctcaacatcagcctggtccaagtagagtttggtgtgcaatttgctaaccacactcctgaagaagcagatggcagtgggttcaggtttgcctgtagtttaaaaagactcatgttgctggtccctcagagaaggaagataattaatcattggttctaaaggattctgggtcataacatgtctgagatggaagagaattctgacctgtgtctctgtccacatgtgtgagccattcccagggtggtgtggtctgcggggacctggactccactgcctcctgtggctcagggggtgtggccatcagcagtggtgcactgtgttgcccctctgcagtgggggcctgctcc

SEQ ID NO: 94732 - DNA, 678 bp, Homo sapiens
tatgaaccgtatggaatacttcctcattcctcatcactcatcatttgcctggtgaaatgctttgtcccgaacctgccctatattactttatacatgttgtaccttcttcctgctatgttattcttcctcttgcccctgtttccaccccatccacctagcaaatttctgcttttattatctcagtgaagctttcacccagctacagtcaggcattccctcagggtgctctatctctagtctgctatgaatctattaatagttgtaatataacttttctcacctgtgttttacacacatatacacaacacagatgtgcacmtatatgagtatctgtaggctgggagtttaactactacgacagttttttttggtttccccaggggtttggcacacatagccttattaaatgtgtaaatgaatgagtatagaaaaaatttgaacttgtaaacataaatagattttccccagtctcggcaacatagtgagacctcatctctacagaaaattaaaaaattagctgggtgaggtggcacatgcctatagacccagtgacttgggaggctgaggcaggaggattacttgagcctgggaggacaaggtgccgtgaagccgtgatcacaccactgcattccagcctaggtgacagagcgagaccctgtctcaaaaaaaaaaaaaaaa

SEQ ID NO: 94733 - DNA, 704 bp, Homo sapiens
gagtgcagcggcgcaatctcagctcactgcaacctctgcctcctgagttcaagtgattctcctgcctcagcctccctagtagctgggactataggcgcctgccaccacgcttagctaatttttatatttttagtagagayggggtttcactattttggccaggctggtctcgaacttctgacctcaggtgatccactcgcctcagcctcccaaagtgttggggttacaggcgtacaggcgtgagccatggcgcccagccaagagaccatatttgaagtatagatggtcaccgtgactactccctgctgctcctggccaggtcggtgcaagccacagtggaggaaggtagatgccataagggcttgagggcttcagttccaaatgctaagatttgaattccctgttggccagacccacagggggctatctctgcctagctatcctactcctccctttgaatccttgccactgatccaatgccaggagagtgagattgtagcagacgaggaccttgcctggtctacatgcagggggcacaaagctgactttactgaacgcctgctatgtaccaaagtactatcctagatgctctcctttgcagcaaacctgggaggtaggaattaccatctgcatttcacagataagaaaactgagactcagattttacatgattgccccaagtcacacctctcaagtccaggatc

SEQ ID NO: 94734 - DNA, 704 bp, Homo sapiens
gagtgcagcggcgcaatctcagctcactgcaacctctgcctcctgagttcaagtgattctcctgcctcagcctccctagtagctgggactataggcgcctgccaccacgcttagctaatttttatatttttagtagagatggggtttcactattttggccaggctggtctcgaacttctgacctcaggtgatccactcgcctcagcctcccaaagtgttggggttacaggcgtacaggcgtgagccatggcgcccagccaagagaccatatttgaagtatagatggtcaccgtgactactccctgctgctcctggccaggtcggtgcaagccacagtggaggaaggtagatgccataagggcttgagggcttcagttccaaatgctaagatttgaattccctgttggccagacccacagggggctatctctgcctagctatcctactcctccctttgaatccttgccactgatccaatgccaggagagtgagattgtagcagacgaggmccttgcctggtctacatgcagggggcacaaagctgactttactgaacgcctgctatgtaccaaagtactatcctagatgctctcctttgcagcaaacctgggaggtaggaattaccatctgcatttcacagataagaaaactgagactcagattttacatgattgccccaagtcacacctctcaagtccaggatc

SEQ ID NO: 94735 - DNA, 728 bp, Homo sapiens
tctatatgagtaggcctgaggaccccatgggcaaggatttgacagctgccaccccaggcattttagatttttaattcagaggtctttgattttgggggtggggaacattttggaggacaaggcctgaaggaagttgtttttatagacagcaggtcctcagagattatggtttagaggaacgggtgaagcaggcctggaagtatgtttggacagccgtttggagggggtgttgcayagaagcttggtcttgtctggatgttgccaggagttcatcactggtttagtcctaaaggtgagaaggagtataataggacgaggaatagaagtttaggctgtggggagattttggggcaccggatagtaccatggggttgttagaagcagcaactgcagtatggaatgattggtgatggcctggatgcggttttgtgtgaattgagggactaaatgaaagacaaaaggcccaaataagagaaggagaaaaacaggtaccaggggactaagagtaggaaggagccaagacgcccagttaaaaagtgcccaggtaggtccagcataattatttgcctggctggcgagttttggggccctaactttaagcttttttatgttgtcatatagcaggctggattgatttagataaaaacaacattcttcatttaaaaatatgcagagttctcctttttcagcagtgagtaggtcaaggccttggtgattttggaggacaa

SEQ ID NO: 94736 - DNA, 742 bp, Homo sapiens
ccatttggaatgggtcaaatgcaagaggatagttcaaatgacctcttaaacatggccagtgacagttacagaactctaaatggtgtttaatctacttacaagcattttatattaagtcacccttaaatgggaacatactcattgaaaatcaaagtgagtccttcatcattagggttcttggagtccagtgggatagaaaaaagcaaaatcatcatatagtatggtatataaaattatatgaaaatgtgtggaagaacaagtacaaaatgaagtggctagaaaaactagaaaaccatttttaaaagccaagggaaggccgggcacagtggctcacgcctgtaatcccagcactttgggaggctgaggcgggcagaccacgaggtcaggagttcgagaccagcatggccgatatgatgaaaccccgtctctactaaatatacaaaaattagccaggtgcagtggtacgctcctgtaatcacagctactcagggtgctgaggcaggagaatcgctttgaacccaggaggcggaggttgcagtgagccaagattgcatcactgcactccascctgtgagacagaatgagactccgacacacacacacacacacacacacacacacacacacacacacaccacacacgcgcgcgcgcgcaccaagggagagactgtatggtggcaatagcctctatagcctctggaagagccattggccaggaatggaaagggaaggcacttggcac

SEQ ID NO: 94737 - DNA, 742 bp, Homo sapiens
ccatttggaatgggtcaaatgcaagaggatagttcaaatgacctcttaaacatggccagtgacagttacagaactctaaatggtgtttaatctacttacaagcattttatattaagtcacccttaaatgggaacatactcattgaaaatcaaagtgagtccttcatcattagggttcttggagtccagtgggatagaaaaaagcaaaatcatcatatagtatggtatataaaattatatgaaaatgtgtggaagaacaagtacaaaatgaagtggctagaaaaactagaaaaccatttttaaaagccaagggaaggccgggcacagtggctcacgcctgtaatcccagcactttgggaggctgaggcgggcagaccacgaggtcaggagttcgagaccagcatggccgatatgatgaaaccccgtctctactaaatatacaaaaattagccaggtgcagtggtacgctcctgtaatcacagctactcagggtgctgaggcaggagaatcgctttgaacccaggaggcggaggttgcagtgagccaagattgcatcactgcactccaccctgkgagacagaatgagactccgacacacacacacacacacacacacacacacacacacacacacaccacacacgcgcgcgcgcgcaccaagggagagactgtatggtggcaatagcctctatagcctctggaagagccattggccaggaatggaaagggaaggcacttggcac

SEQ ID NO: 94738 - DNA, 682 bp, Homo sapiens
aaggaaggaaggaaggaaggaaggaaggaaagaaagaaaraaagaaagaaagaaagaaagaaagaaagaaagaaagagaaacagaaagaaagaaagaaaaaacctaactgtgtaagggatgagtatcttaattagctgactgtagtaaaattttcactatgtatatgtatatcaaaacatcatgttgtacagcttaaataaatagaaatgaaaatgaatataaatcttggtttgacattctgaaccagtttacaaagttggtttgaatcctttgacatatccagtgaattctatactgttattggaacaatgcatgaacacaacactcttagaaatcatctccagtgtctattttgcccgtctccactggacagttacatagtcaattttagtaactaataagcataggttgtctcatggaaggaatgactaaaaagacattatctttgtggatgaagggttgttaccagaagtgattttgtcttcagttctcgcttactgcaaaaaatgctgttggcatgtggtatcatttaggatctgttgaaaacactgttaggggatcggttcaagttttgggagtttgcttgaactctgataaaagctgaaagcaagatctctccacttacttttaagctggctttctctaagagaaagcttcttctgatttctggctccaaagcct

SEQ ID NO: 94739 - DNA, 533 bp, Homo sapiens
cttagactgatcaaccattctgctgacatctgctattatattagttctaatctgattctttcgtgtttagattgaacatattttacacacttgtttgctttacttgccatttattatttatttcttcttatagacagtcttctgtggagtcctgttttcttctagaattacatatatattgtgtgtttatgtgtttgtgtgtgtgtgtgtgtgtgtgtaaagatctctcatcttgggatcaacattacaaataaaaacttaatttgagttcacataaaatcrgaagcctgtatttaggaagtcaaaatttaagaagaaaacatgtttaggtgagcctgttaattatgtaaatagtaaaattagtttgaaacacgaaattgtcatttttgtaggctaaaatgaagtgttacacatttcatataacctaacctgtacatttttcctccttataatgtctttaaaatgtttgcagaagcttttcttaccttaggacctaaatatacaacattaaagattaatctaaaaaagaatct

SEQ ID NO: 94740 - DNA, 533 bp, Homo sapiens
cttagactgatcaaccattctgctgacatctgctattatattagttctaatctgattctttcgtgtttagattgaacatattttacacacttgtttgctttacttgccatttattatttatttcttcttatagacagtcttctgtggagtcctgttttcttctagaattacatatatattgtgtgtttatgtgtttgtgtgtgtgtgtgtgtgtgtgtaaagatctctcatcttgggatcaacattacaaataaaaacttaatttgagttcacataaaatcagaagcctgtatttaggaagtcaaaatttaagaagaaaacatgtttaggtgagcctgttaattatgtaaatagtaaaattagtttgaaacacgaaattgtcatttttgtaggctaaaatgaagtgttacacatttcatataacctaacctgtacatttttcctcctyataatgtctttaaaatgtttgcagaagcttttcttaccttaggacctaaatatacaacattaaagattaatctaaaaaagaatct

SEQ ID NO: 94741 - DNA, 738 bp, Homo sapiens
ggatccagaagtaggcagcgaataaacaatcccaggacgattcattccttggcttaaagggagccaggcctttgggaaggcaggttagcaaagatagcttggttggttgagtgctccctgtgtaggggccaatgaatctgcatataatatctcatctcatcattcacagttttctttgaagcaagtactgctcttttcgttatatagatgaggaaatgaaggcggagataggttaactgcccggagccacatagaaagtggrcgggctggatttagattcaggtctgccttgctacaaagctgttgccctttccctctatgctacactagcaaatgccaaagtgggctgaatttgggatgcccaggcactgaaaacaagatggggaatctaaacttatgaggaatagaaattggggttttaagtggaggaggaaataagaagcacctggtaccctcacacatgcctagaccaggggattggatatatgtagagaggggtcctgtgctgagagacagcctatgttcctccagagcaggtgggagctacacctccatgggcttgattgccttggcagtcctggcgtgcttgctgttcctcctcattgtgggctttacctcccggtttaagaggcaaacgtaagtctcccctttccctttcctcaacctctctccccttcattcctggcttcccttttccttaatggtctttccctttctattctctcacagttcctatca

SEQ ID NO: 94742 - DNA, 766 bp, Homo sapiens
gctcaagtgaatctcatgcctcagcctcccgagtagctgggattacaggtgtgtgctgccatacctggctaatttttgtacttttagtaaagaccaggttttgccatgttgccgaggctggtcttgaacccctggcctcaagcaatccacccaccttggcttctcaaagtgctgggattacaggtgtgagccaccacatctggctaatgttattttttgtttcactgttgactcaatgtttcaacttgtggaacttccaatagtatttcttattgttcccttggagatataaaaagttcccagtaaatagatgtgtgctcacatctttacttagagaccatggaatactttatctcctttctcatttcatgkttggataaactgaagtccacatgattatgtctgaatattattcattctttcgttctatattctgatcagcttcaggtagctgaagttaacgttttccactttggagagtgagttgccttgggtttatagtaagtgacaaaaacaacaatctctctgttacataagaaggaaaactattagcaaatttcctaatccttggtcagagagataacctgttcttcacattagagaaggcctccaaactggctatcagttattcttttgcatattttgcctaattcttcttttagcaggcattttaatgggggaatgaagaattccatcaaatatctggaaatgcctgccacctgcaaactttgtgtgaaatttcccgtacatttccactctcctttct

SEQ ID NO: 94743 - DNA, 766 bp, Homo sapiens
gctcaagtgaatctcatgcctcagcctcccgagtagctgggattacaggtgtgtgctgccatacctggctaatttttgtacttttagtaaagaccaggttttgccatgttgccgaggctggtcttgaacccctggcctcaagcaatccacccaccttggcttctcaaagtgctgggattacaggtgtgagccaccacatctggctaatgttattttttgtttcactgttgactcaatgtttcaacttgtggaacttccaatagtatttcttattgttcccttggagatataaaaagttcccagtaaatagatgtgtgctcacatctttacttagagaccatggaatactttatctcctttctcatttcatggttggataaactgaagtccacatgattatgtctgaatattattcattctttcgttctatattctgatcagcttcaggtagctgaagttaacgttttccactttggagagtgagttgccttgggtttatagtaagtgacaaaaacaacaatctctctgttacataagaaggaaaactattagcaaatttcctaatccttggtcagagagataacctgttcttcacattagagaaggcctccaaactggctatcagttattcttttgcatattttgcctaattcttcttttagcaggcattttaatgggggaatgaagaattccatcaaatatctggaaatgcctgccacctgcaaactttgtgtgaaatttcccrtacatttccactctcctttct

SEQ ID NO: 94744 - DNA, 544 bp, Homo sapiens
ccctcctcatcaggggcacagcttttaccaccaagagcaaattcaccctctacccaagaggctacaaaacagttagttcctacctctaacccaactaaaggctggggaaacttgagcagatacgttctatcagtttgaacccaattaccatcttaccattttccaaagatatgctatacctggtttctttactaaaatgtttctgcttgactctctgggcttgggaatagtaggcgagtgcgggagaggtgcagagatgagttagaatagcttaggcaggagggtgcaaaaggcttagggaattttcctgggtgggtgccacgacaargcctctaaatctcccacctcctgtctcttagcaaccaccaggttagctcctgattggttcgtcctcaattgaaaggcgggatttagggaccgattgagacgcgggagacattctgaaacagaaaggaagggagagaaaatgaagagaaaggaaataatttacaaacctaaattatgctctggtttccaaccacagttcatgaatgtgttctagtat

SEQ ID NO: 94745 - DNA, 950 bp, Homo sapiens
gtttgtaaggcataaacctgtaaccacactacaaatagtgagaatattgctgtgaaactgcatactctatgcactcccaacaatcaataatagaaaataagtggtgctcaatgatgctagagaaaagaataaattatatttctagtttgtctataaaaatgatattacaatatctctgtctgaggaagaggagatcaaataacatgtaataacaatattttgaaaaggaagaggatagtggaatatctgtttactttytgatgaattttataatgtttatgtcatttgtcagctggtatatttttaaccttttgtgattaactttcttgtcctaaatagtaattttaatatctaatattgtattcaaaaatttctactggattttttaaggaagcccccttaaactgtttaagtttcagggcctcaaactggatctacctctgctacctacacacacatatattttttaatcagtaaaattcccagttttaatataaagaagaaataaagggaaataacattataataggaaaatatgtccttcatgaatatgagtgctacaaaaacagactgatatgagaataaggtattggtgacacaaatatcatgaacagtgtagctacaggtgatctgattttctgaaacagtgaaaaattcaaggatgtttttccagtaaaagccaaggataatctttcctcaatatacatggtagtttcttttctgtaaaatacagtatgtatgagaaatgcaaaagatgcttttgtgtttttcacagtcgtgtttaaggctcagataattataaaatatctggctgcacattgaaaagatgtgcagaatcaggccaattatttagtatgcaaggctgccttcagtattgcagggcatttgtttgcctgctaatgctacaaatgtctcctgtatactcatcattgaaacaagcaaccctcaat

SEQ ID NO: 94746 - DNA, 605 bp, Homo sapiens
tgcagcattgaattagagagtctgatcattctaaacttacaaaacccaaaagttagttaataacatgctatacaatttgctcaggggtgcaggccttctctacttaaagtcaaaatgcagaaagagcttaaacacagaactaacttgaggttacagtgctctacaaaccaaaatccaatacaagagatttaatttaacagaacaatggcatgaatcacattaaatcgatgttgctaagtgtgacttttactagttttacagctacttttatttacttatttatttattgagayggagtctcactctttcacccaggctggagtgcagtggcgcgatctcagctcactgcaagctctacctcccgggttcacgccattctcctgcctcagcctcccgagtagctgggactacaggcacctgccaccatgcctggctaatatttgtatttttagtagagacggggtttcaccatgttagccaggatggtctcgatctcctgacctcatgatccgcctgccccagcctcccaaagtgctgggattacacgtgtgagccaccgcgcccagccaacagttacttttgtttttaattttgtaaaaatatct

SEQ ID NO: 94747 - DNA, 752 bp, Homo sapiens
cagacaatgccaaaaggcaacaagaagaaaatagagaacacttaaacgcattacccagagataaccaacgtaaatgtattggtggatatccttagacgttcttctatgtgacagaatatatctatttatctttaagaaaataatagattgattccattttctaagtgagctcggaaattttcttttggcttttttatgaccatgttattatttaataaaacctgtcattgtggagacttagaaaacatccttcctttacttcttcrggaatgagaaattacacgtaggcaatttattcaacatttttcattatgtcagcatgattagatgccaaatggctgtttggaatttttgaaggtatgttttttggacactttgccagggaaatcataactcttaaaattctccagtaaccctaaccatacaattggagttatggatagatactatgttccatgttttgttgttttctcactgtttcagtatctgggattaatgccaaaaactattcagcctcactcatttattaaatgagggtgtccaactaagtttatacaatagagtttagaaaaaaaagaagaccttgtttgtttatcattctagttaggtgtttttacatgagcaagaaagaaaagtattgtttcttaaattccttgatgaacttgcctggttgagaagtagagtatcatggataacagaattaattacctgacacccgagccacaagcagacatccttgcttattccaaacc

SEQ ID NO: 94748 - DNA, 916 bp, Homo sapiens
agcagtaacacactgttgtacctcttgttttcacatgcgcttctccttattagactataaactccattcaccatctttctggagctgtcatctttcattaggaacatcgtaatagcctttcagctagtagcccgcccccctccactgttacctgcttttgaagtgattctccccatctccagagtaagtgggctcatcaaactatgcttctctgtgtgaaaggtgtggtggtgggaactgggtgaaattagctccaggacaccattagcacttggtctaatttatttactacagtaggtatccatgtgctgagaggttctcaagaaggatggggagtggggaagagtaggagtaagtggagaaagtaggggctgagaaactaggtgaagaatcagaatcaggtgtagacagccatacgagtcacagatctgaaaaggtcgagttagccagagttcaaccagggctgccagaacttgtgtggttagggtgtgccaggcagtgccgttaggagcttccatgtattcaagggttggagtggtcatgaaatgaraaaacgctgtgcagtgacaaaaagtagttgcaaaattctgagtttggagccgagaggaacatacactgtgggagatacaacgagcagcctaagtcagagtcttgtcaaaatccatttcatgaaaagctgaactttcaaaatagtgtagttatatttggtgcattgcaatgccacataatttcctccttgaccactatattaaagggttgctttcaaacgtcttccccaaatggtaaacatgattccaagtggtttaagttcacatttctgtcaacagaaatttaacttttgtggttctgatgggtgagaagtgataactcaggattactttagtttggatctttctgattactgttcagatcatgc

SEQ ID NO: 94749 - DNA, 916 bp, Homo sapiens
agcagtaacacactgttgtacctcttgttttcacatgcgcttctccttattagactataaactccattcaccatctttctggagctgtcatctttcattaggaacatcgtaatagcctttcagctagtagcccgcccccctccactgttacctgcttttgaagtgattctccccatctccagagtaagtgggctcatcaaactatgcttctctgtgtgaaaggtgtggtggtgggaactgggtgaaattagctccaggacaccattagcacttggtctaatttatttactacagtaggtatccatgtgctgagaggttctcaagaaggatggggagtggggaagagtaggagtaagtggagaaagtaggggctgagaaactaggtgaagaatcagaatcaggtgtagacagccatacgagtcacagatctgaaaaggtcgagttagccagagttcaaccagggctgccagaacttgtgtggttagggtgtgccaggcagtgccgttaggagcttccatgtattcaagggttggagtggtcatgaaatgagaaaacgctgtscagtgacaaaaagtagttgcaaaattctgagtttggagccgagaggaacatacactgtgggagatacaacgagcagcctaagtcagagtcttgtcaaaatccatttcatgaaaagctgaactttcaaaatagtgtagttatatttggtgcattgcaatgccacataatttcctccttgaccactatattaaagggttgctttcaaacgtcttccccaaatggtaaacatgattccaagtggtttaagttcacatttctgtcaacagaaatttaacttttgtggttctgatgggtgagaagtgataactcaggattactttagtttggatctttctgattactgttcagatcatgc

SEQ ID NO: 94750 - DNA, 631 bp, Homo sapiens
cttgagcctaggagttcaaagttgcagcgagctattaccacgccactccactccagcgtgggcagcagaatgagaccctgtctcaaaaagtaccatacatgcataaatacataataaacaaaataaaataaaaaacacttcaggtgattcccatgtccagtcaaggttaaaaaacactgtgttagaggttccaggatgggattcaagtatgtatattaacaaacgtctccagagccgaaatctgaagrgcatccctgctgtaggaccccaactttgaaactaagaggatttgttaaactctattctgtttatgtgtgtttttctcaacctagagagactctgggcttctcgggttcagagccgttttgcttatccttgtcaccacaggataatgtgtgataaacatttgtttaatgcatgaataaacacttaaaaaaagaaactgtgagccgatcgaagcttctcactcccgggaatgacctaggagacattcttgaagggagataagaccgctgggtgagactcagggccctttttttttatgaccttactctacgccagaaccttgatgtcttccaggctgctcagaaataatcactcccaagaaaacgtttcccatgggaatgaggaa

SEQ ID NO: 94751 - DNA, 1243 bp, Homo sapiens
gtcaggagttcgagaccagcctgactaacatggtaaaaccccgtctctactaaaaatacaaaaattagttagatgtggtggagtgtgcctgtaatcccaactacttgggaggttgaggcaggagaattgcttgaacctgggaggcggaggttgcagtgagctgagatggcgccaccacacttcagcctgcatgacagagcgagactccatttcaaaaaaacaaaaacaaaaacaaaaaaaccttcagtcattctttactctaaaaacatttgctttgccttttgtacaaagggtgcttgcaaaaagttgacacccatttgcacccttatctaacaccttctcacagtaacagagaagaagcaatcccaacttgttcttaacttgtctgagagtacagccctagccaaactccttcgcagctcctgagccaagaataaaatattttcatgttgaatttaggagtcacggatcatcattctgcagtggttaagaattcaccttccatatgttaatgcttcatttcccccatagaatcaactatgtttggcgcagaagcagagaaatgcatttaaatgcttatgatgaataatctcttaagcttattatgagtatgtttgtgccaagtgataagtgaaagccaatacctctttatacagtgtctgcataggtccccatgatgtttaaggagcacttactgaataaaaaagcgtctcagygattatagccaaatgtctctgtcaattccattgcgtataataatttggggaccattatgctaatcacatctgccataatacttggagtattgctgctcttaacgttacgagatgacacttttccagtttgtgcatgcgcccagtcatactattccttgatggccttttaagggtgggattgtcggtgggagagaagggagggttgtggaggcctggggcctctggctgtggggtgatcatgttcttgtgcttttgtccatcctaaacagtcaaaaatgtgtcctgccacaggtgaggcctggagctaggaaggggtatgtgctcaatggttttatgtgtgcacggggctggggatgaggcagtgaaggtgaaggctcatagctttctgctcacaatcctccaggccatgtgacatccacgcagatgagggcattcagcaccatttccttgcattgaatattaaagaatagctaatcattccctaagatcattttgaaggtaacagcaataataatgtccttgtgaat

SEQ ID NO: 94752 - DNA, 1243 bp, Homo sapiens
gtcaggagttcgagaccagcctgactaacatggtaaaaccccgtctctactaaaaatacaaaaattagttagatgtggtggagtgtgcctgtaatcccaactacttgggaggttgaggcaggagaattgcttgaacctgggaggcggaggttgcagtgagctgagatggcgccaccacacttcagcctgcatgacagagcgagactccatttcaaaaaaacaaaaacaaaaacaaaaaaaccttcagtcattctttactctaaaaacatttgctttgccttttgtacaaagggtgcttgcaaaaagttgacacccatttgcacccttatctaacaccttctcacagtaacagagaagaagcaatcccaacttgttcttaacttgtctgagagtacagccctagccaaactccttcgcagctcctgagccaagaataaaatattttcatgttgaatttaggagtcacggatcatcattctgcagtggttaagaattcaccttccatatgttaatgcttcatttcccccatagaatcaactatgtttggcgcagaagcagagaaatgcatttaaatgcttatgatgaataatctcttaagcttattatgagtatgtttgtgccaagtgataagtgaaagccaatacctctttatacagtgtctgcataggtccccatgatgtttaaggagcacttactgaataaaaaagcgtctcagtgattatagccaaatgtctctgtcaattccattgcgtataataatttggggaccattatgctaatcacatctgccataatacttggagtattgctgctcttaacgttacgagatgacacttttccagtttgtgcatgcgcccagtcawactattccttgatggccttttaagggtgggattgtcggtgggagagaagggagggttgtggaggcctggggcctctggctgtggggtgatcatgttcttgtgcttttgtccatcctaaacagtcaaaaatgtgtcctgccacaggtgaggcctggagctaggaaggggtatgtgctcaatggttttatgtgtgcacggggctggggatgaggcagtgaaggtgaaggctcatagctttctgctcacaatcctccaggccatgtgacatccacgcagatgagggcattcagcaccatttccttgcattgaatattaaagaatagctaatcattccctaagatcattttgaaggtaacagcaataataatgtccttgtgaat

SEQ ID NO: 94753 - DNA, 619 bp, Homo sapiens
tcctgtgttctttcctaagcaggagtctacttcaaactcagttataataggagaacaaataattttttgcatgctttgcatgatcttttcccttcttctgtgagcatgttctttccattgcttccttgtttaaaaacatcaaaatcccaaactttagtgaacctaaagcatgtagggatctcctgggttccacccaraaattctgattctatgttttttataaaacattataaaaatgatgtttttactagggtggtctttttgccatattgagtttcctcttgttctcctgtctagaagatcaatttttgacaatttctattttccaggccctctgtgagctgattcctccttgcctccctggattccttacatcagccaagctagattcctgatcttcttcagatagacttgcttctttcctgcctgtgcacctgcagcaaggttttgccctcagcaggaactcctgtaccctcaaccttgtcttcctactttccttatcactgaaacccaccatccatcagtgcaaacagaagcatggattttatagcaaaagagaccttgatatattcatatcatcagaacttctcaaaatgtgatgcaaagaccaccctaatgg

SEQ ID NO: 94754 - DNA, 520 bp, Homo sapiens
tagccagagtcattttggggcccagagtgaggtctggatagatgacaggctggtttaaaagggagatatgtattagcagggcatagtggcacatgcctgtagtctcagctmctcaggaggcggaggtgggagcatcacctgagctcgggaggttgaggctgcagttagccaaggtcgtgctgctgcactccatcctgggtgacagagtgagaccctgtcaccgaaaaaaaaaaaaaaaaaggctgggggagatctgtgttggtgagtagaacacagacctggacctgtgcatgggcggctgtgactctccctttggccatggccagttgtcgcctctctgctcctttctgtttgcctttgggattttctcttgctgtcctttggttgtgagcaggatacttccaggagacctactgcctccaaacacagggctggagaaagacgtttttgtctttctctgcagcccagttggggtcaaatcaaagcttttgcagtggtgtctggctgtcagcactgtcta

SEQ ID NO: 94755 - DNA, 520 bp, Homo sapiens
tagccagagtcattttggggcccagagtgaggtctggatagatgacaggctggtttaaaagggagatatgtattagcagggcatagtggcacatgcctgtagtctcagctactcaggaggcggaggtgggagcatcacctgagctcgggaggttgaggctgcagttagccaaggtcgtgctgctgcactccatcctgggtgacagagtgagaccctgtcaccgaaaaaaaaaaaaaaaaaggctgggggagatctgtgttggtgagtagaacacagacctggacctgtgcatgggcggctgtgactstccctttggccatggccagttgtcgcctctctgctcctttctgtttgcctttgggattttctcttgctgtcctttggttgtgagcaggatacttccaggagacctactgcctccaaacacagggctggagaaagacgtttttgtctttctctgcagcccagttggggtcaaatcaaagcttttgcagtggtgtctggctgtcagcactgtcta

SEQ ID NO: 94756 - DNA, 520 bp, Homo sapiens
tagccagagtcattttggggcccagagtgaggtctggatagatgacaggctggtttaaaagggagatatgtattagcagggcatagtggcacatgcctgtagtctcagctactcaggaggcggaggtgggagcatcacctgagctcgggaggttgaggctgcagttagccaaggtcgtgctgctgcactccatcctgggtgacagagtgagaccctgtcaccgaaaaaaaaaaaaaaaaaggctgggggagatctgtgttggtgagtagaacacagacctggacctgtgcatgggcggctgtgactctccctttggccatggccagttgtcgcctctctgctcctttctgtttgcctttgggattttctcttgctgtcctttggttgtgagcaggatacttccaggagacctactgcctccaaacacagggctggagaaagacgtttttgtctttctctgcagcccagttkgggtcaaatcaaagcttttgcagtggtgtctggctgtcagcactgtcta

SEQ ID NO: 94757 - DNA, 667 bp, Homo sapiens
ttgctccttatgtgtggtcatcagcatcagctcacctaggagctgagcataaacgcagaatgacaggcctcctccaaacctactgaatcagtatctgcacttaagcaaaatccccaggcgatttctgtgcacactaaggtttatgaagccctgctccagacagtggttctagtacctcagagaacaggtccacctggaaaggattactgaagctggttgtaggaactaggagttcagaagtgctgggccccatgtggaacctcctctgagccaggctgggaaactggcataggtcatggtgagtcttcaagtgggcacccaggggattgtagctggcatggtctgaggggaggagtgttttcttcagtggacttgaaggctggattgttggatctatcacactaggaggtattggcactaaggggaaccctttgccacctgtgtctctaggaggtccagccatgttttgtgtgggctggaagtgccgacagggtgcaccctactgctgatttttccaccccacctaaaaattcactgccttagacttcctgagccccctacaaaccyttgatatctggtccaatctggggtgcgcttaagcaagtgtatacctttattgtaatttacttatgtatgtatgtatgtgtatgacaggtctcactctgtc

SEQ ID NO: 94758 - DNA, 667 bp, Homo sapiens
ttgctccttatgtgtggtcatcagcatcagctcacctaggagctgagcataaacgcagaatgacaggcctcctccaaacctactgaatcagtatctgcacttaagcaaaatccccaggcgatttctgtgcacactaaggtttatgaagccctgctccagacagtggttctagtacctcagagaacaggtccacctggaaaggattactgaagctggttgtaggaactaggagttcagaagtgctgggccccatgtggaacctcctctgagccaggctgggaaactggcataggtcatggtgagtcttcaagtgggcacccaggggattgtagctggcatggtctgaggggaggagtgttttcttcagtggacttgaaggctggattgttggatctatcacactaggaggtattggcactaaggggaaccctttgccacctgtgtctctaggaggtccagccatgttttgtgtgggctggaagtgccgacagggtgcaccctactgctgatttttccaccccacctaaaaattcactgccttagacttcctgagccccctacaaacctttgatatctggtccaatctggggtgcgcttaagcaagtgtatacctttattktaatttacttatgtatgtatgtatgtgtatgacaggtctcactctgtc

SEQ ID NO: 94759 - DNA, 2025 bp, Homo sapiens
tatgcgacacctttgctgtatttggcaaagctgtcctagctgaaaagcatttagtcagttatgtttccccaaaaccctttccataagttttaaaacagctgttgctatctcttattaaaagccaatttagccttttcctttacagtttcaaaaattaatttagctaatgaagtccttcttcaaattaagggtgagaataagaataagaatatgatgataaagcagtataattcatacttattgagcataattcctgcctatatactaagcactttgtatttgttacttcacttaatcctcatactagccttatgaggtgggtcctgttagcaagagaagagaagttaaatcacttgcccaaggtcacttagttccctgagtgttgaagctgggattcaaacccaagcagtctgactctagaatatgtgtccctatctgcagagcacacattttgtaccaggtgctgtgttagggcctgagaacaaaaagatgaatatgacatggtatttctcctcaaggagcttagagtcttttcagagcacacatatctgattattctgagacttgttcttagagctatgtggcctatttggaaaatcaggtaccacccaactaatgtaaatgtttaaaatggaaggaattactttgcctctagggaacactcttcaaagacaaaacttaccaaagtcaggccttctctgaaaaggaaaacaaacaaataaacaaacagaccatctgctccctgaggtcagggatctgtttgtccccttgtctccagaccctggcgcaggtgcctagtacacagtgggtgctccatagatgctcgttggacgaatgaacacagtagtactagaaagtagtccttaaaatttcttaacttgctcttgggtctcttcctttctcaggccacccaccctggttgccagcatcttaattctggtggaccaggggccataacagatgggcagggtgacatgagatggggtggaaagagtgaaaggtgtatgtatgtggggcggggggagggaaaaacaaaagtacaatggtattgtcacaaacagatctgagcatcttgtggggagaatgacactccaggtatatcaaccaccttgtgaccgaaaacccatcccctttgggcaatggatgctgcgacaaaactggggatgcattagcttccagacatcatgcttatgtggtgtatatacatttttatatacacatttcttcttttatactcatacacaaacacacacacaaagacaacaggaaaatagaggaaggaagaccatacctttaactaccctatccagatagtgagctagggagataaaagacaggacatttaaggtaggatccagtaagtgcaatatcgcctgccacataaccatgccagatgctacacagacaaagggattgtgccccacgtttgggacaggcmtatgccatggtggggaaaataaaaccaaagacaggatgacatgagagaggagaagggagagcaagcattctccagggatggccaaaaggaacttcaactcattctgtgatccaggcatttggaaatgtgatcacagaaacaagaagacatatgaataaggaaaacagacaaagaaggatgggaaactgcaaaagtggccacactcctgctctgccagcttcgtctggctttacggaaaactagagcccgtccctttgactactcagagcagcatccaacctccctacaggtgaagcagccataacaagaacaagtggtaccccatctcggcagaggcctttccaagaagttggaatttagaaatacgcaaaatttgaatcatctctgatatgcactagtgaagggggttgagtctttggtcaaatatactgctggattatctgtttgccattcttgaattttccatgtacacatgtgcccacatatgcttgaatgcaaaatgcttagcgttctaagtaagatgcattcctcctttgtgcatcgtacacagactatgaggtgcaggtcaatggatgtcactgtgaaaa

SEQ ID NO: 94760 - DNA, 2025 bp, Homo sapiens
tatgcgacacctttgctgtatttggcaaagctgtcctagctgaaaagcatttagtcagttatgtttccccaaaaccctttccataagttttaaaacagctgttgctatctcttattaaaagccaatttagccttttcctttacagtttcaaaaattaatttagctaatgaagtccttcttcaaattaagggtgagaataagaataagaatatgatgataaagcagtataattcatacttattgagcataattcctgcctatatactaagcactttgtatttgttacttcacttaatcctcatactagccttatgaggtgggtcctgttagcaagagaagagaagttaaatcacttgcccaaggtcacttagttccctgagtgttgaagctgggattcaaacccaagcagtctgactctagaatatgtgtccctatctgcagagcacacattttgtaccaggtgctgtgttagggcctgagaacaaaaagatgaatatgacatggtatttctcctcaaggagcttagagtcttttcagagcacacatatctgattattctgagacttgttcttagagctatgtggcctatttggaaaatcaggtaccacccaactaatgtaaatgtttaaaatggaaggaattactttgcctctagggaacactcttcaaagacaaaacttaccaaagtcaggccttctctgaaaaggaaaacaaacaaataaacaaacagaccatctgctccctgaggtcagggatctgtttgtccccttgtctccagaccctggcgcaggtgcctagtacacagtgggtgctccatagatgctcgttggacgaatgaacacagtagtactagaaagtagtccttaaaatttcttaacttgctcttgggtctcttcctttctcaggccacccaccctggttgccagcatcttaattctggtggaccaggggccataacagatgggcagggtgacatgagatggggtggaaagagtgaaaggtgtatgtatgtggggcggggggagggaaaaacaaaagtacaatggtattgtcacaaacagatctgagcatcttgtggggagaatgacactccaggtatatcaaccaccttgtgaccgaaaacccatcccctttgggcaatggatgctgcgacaaaactggggatgcattagcttccagacatcatgcttatgtggtgtatatacatttttatatacacatttcttcttttatactcatacacaaacacacacacaaagacaacaggaaaatagaggaaggaagaccatacctttaactaccctatccagatagtgagctagggagataaaagacaggacatttaaggtaggatccagtaagtgcaatatcgcctgccacataaccatgccagatgctacacagacaaagggattgtgccccacgtttgggacaggcctatgmcatggtggggaaaataaaaccaaagacaggatgacatgagagaggagaagggagagcaagcattctccagggatggccaaaaggaacttcaactcattctgtgatccaggcatttggaaatgtgatcacagaaacaagaagacatatgaataaggaaaacagacaaagaaggatgggaaactgcaaaagtggccacactcctgctctgccagcttcgtctggctttacggaaaactagagcccgtccctttgactactcagagcagcatccaacctccctacaggtgaagcagccataacaagaacaagtggtaccccatctcggcagaggcctttccaagaagttggaatttagaaatacgcaaaatttgaatcatctctgatatgcactagtgaagggggttgagtctttggtcaaatatactgctggattatctgtttgccattcttgaattttccatgtacacatgtgcccacatatgcttgaatgcaaaatgcttagcgttctaagtaagatgcattcctcctttgtgcatcgtacacagactatgaggtgcaggtcaatggatgtcactgtgaaaa

SEQ ID NO: 94761 - DNA, 2025 bp, Homo sapiens
tatgcgacacctttgctgtatttggcaaagctgtcctagctgaaaagcatttagtcagttatgtttccccaaaaccctttccataagttttaaaacagctgttgctatctcttattaaaagccaatttagccttttcctttacagtttcaaaaattaatttagctaatgaagtccttcttcaaattaagggtgagaataagaataagaatatgatgataaagcagtataattcatacttattgagcataattcctgcctatatactaagcactttgtatttgttacttcacttaatcctcatactagccttatgaggtgggtcctgttagcaagagaagagaagttaaatcacttgcccaaggtcacttagttccctgagtgttgaagctgggattcaaacccaagcagtctgactctagaatatgtgtccctatctgcagagcacacattttgtaccaggtgctgtgttagggcctgagaacaaaaagatgaatatgacatggtatttctcctcaaggagcttagagtcttttcagagcacacatatctgattattctgagacttgttcttagagctatgtggcctatttggaaaatcaggtaccacccaactaatgtaaatgtttaaaatggaaggaattactttgcctctagggaacactcttcaaagacaaaacttaccaaagtcaggccttctctgaaaaggaaaacaaacaaataaacaaacagaccatctgctccctgaggtcagggatctgtttgtccccttgtctccagaccctggcgcaggtgcctagtacacagtgggtgctccatagatgctcgttggacgaatgaacacagtagtactagaaagtagtccttaaaatttcttaacttgctcttgggtctcttcctttctcaggccacccaccctggttgccagcatcttaattctggtggaccaggggccataacagatgggcagggtgacatgagatggggtggaaagagtgaaaggtgtatgtatgtggggcggggggagggaaaaacaaaagtacaatggtattgtcacaaacagatctgagcatcttgtggggagaatgacactccaggtatatcaaccaccttgtgaccgaaaacccatcccctttgggcaatggatgctgcgacaaaactggggatgcattagcttccagacatcatgcttatgtggtgtatatacatttttatatacacatttcttcttttatactcatacacaaacacacacacaaagacaacaggaaaatagaggaaggaagaccatacctttaactaccctatccagatagtgagctagggagataaaagacaggacatttaaggtaggatccagtaagtgcaatatcgcctgccacataaccatgccagatgctacacagacaaagggattgtgccccacgtttgggacaggcctatgccatggtggggaaaataaaaccaaagacaggatgacatgagagaggagaagggagagcaagcattctccagggatggccaaaaggaacttcaactcattctgtgatccaggcatttggaaatgtgatcacagaaacaagaagacatatgaataaggaaaacagacaaagaaggatgggaaactgcaaaagtggccacactcctgctctgccagcttcgtctggctttacggaaaactagagccygtccctttgactactcagagcagcatccaacctccctacaggtgaagcagccataacaagaacaagtggtaccccatctcggcagaggcctttccaagaagttggaatttagaaatacgcaaaatttgaatcatctctgatatgcactagtgaagggggttgagtctttggtcaaatatactgctggattatctgtttgccattcttgaattttccatgtacacatgtgcccacatatgcttgaatgcaaaatgcttagcgttctaagtaagatgcattcctcctttgtgcatcgtacacagactatgaggtgcaggtcaatggatgtcactgtgaaaa

SEQ ID NO: 94762 - DNA, 682 bp, Homo sapiens
caaggttcactgaaaatcactgacatgaagcagattgattaagagaagaaaagaagtatagatttatgtaacgtgtatacatgggagccttcacaatgaagactcagccctccaatagggtacaggaatttatatgccatctgggggttccagaaagaatgcaggctcacagcacgggcaaacataggttttagtgacaagatagcttaagggagggagaaaggaagatgcctggctagcaaaggtggtcttgtcatgtagatgaaacctcacaggtagcagcccttagagagaatagatggtaaatgtctctcagatctttaaaatgtcggactctcagttaatctctcctagatctggacaagggaaagcctggctgcattaatggagattctctacagatgtaaatttcccccacattaatactgcacaaaaatccctttcaaatgagaaaacmaaattttacctttgtatcagtaaaactttgcagggccacatcagtcagctgaccctgtgggagtcatctcaaaatatgtcaaagaaatatattttggggtaaaatattttgatttccttcaaggatgaactcaaggtgccttaaagcccagtccacagaatcttctggtatctcttctcatgcaccatgaggccctgctgaggagagggttgaacctgcagccgg

SEQ ID NO: 94763 - DNA, 682 bp, Homo sapiens
caaggttcactgaaaatcactgacatgaagcagattgattaagagaagaaaagaagtatagatttatgtaacgtgtatacatgggagccttcacaatgaagactcagccctccaatagggtacaggaatttatatgccatctgggggttccagaaagaatgcaggctcacagcacgggcaaacataggttttagtgacaagatagcttaagggagggagaaaggaagatgcctggctagcaaaggtggtcttgtcatgtagatgaaacctcacaggtagcagcccttagagagaatagatggtaaatgtctctcagatctttaaaatgtcggactctcagttaatctctcctagatctggacaagggaaagcctggctgcattaatggagattctctacagatgtaaatttcccccacattaatactgcacaaaaatccctttcaaatgagaaaaccaaattttacctttgtatyagtaaaactttgcagggccacatcagtcagctgaccctgtgggagtcatctcaaaatatgtcaaagaaatatattttggggtaaaatattttgatttccttcaaggatgaactcaaggtgccttaaagcccagtccacagaatcttctggtatctcttctcatgcaccatgaggccctgctgaggagagggttgaacctgcagccgg

SEQ ID NO: 94764 - DNA, 824 bp, Homo sapiens
atagtttcataccatttaaatcctgcaagttccttttttctcaacattttgtttttgagaaagagctttcattttcttttgtttgctaaatgacattttaaaagttagcacgtgcttctgtcatttataagaagtggcacttcattaccccaacttagaaataatctcacaacaaagaacaatcctttgttaaactgtacacatttatgtttataggaggtactgccttcgttttgttattctatctaaacttggtgaaaatgtcattccaagccaaaaacagtgtacaggatagcagtgctcatatgcagcactgctggcctctttagtggcatctctgagtctgtgcattctttcagggatctgtgaggaatccttagcaagaaaaccaggatatcttagggtcttggcttggagttaacttcaaagttacattttgtctctgcccacattttgtcaccatgtacacatgtaacaaaaacagagctccctaaactatataaggaaattaaacgtaaatagtgtattagttcattttcacgttgctataaataacttccctgagactgggtaatttatttaaaaaaaaaaaagaggtttaattgattcacagttccacatggctgggaagacctcaggatacttackgtcatggtggaaggggaagcaggcatgtattacatggtggcagccaagagagagtgagaggggaaatgtcagatgcttataaaaccattagatctcatgagaacttcctcactatcatgagaacagcatgggggaaactgctcccatgatctaatcacctcccatcaggtccctcc

SEQ ID NO: 94765 - DNA, 905 bp, Homo sapiens
aatatttttaaaatataaacgtatataaatttatatatttttactatatgtgtacatataaaaacggcaattagtaagactgaaggctctttctacccccaattttaccccartttctgttttaatcatccaaagaaacacatgtgcatgtgctcacatcctacactcacacccacactccacagcacacacacacgtgcgcaaacacacacgcacatgcgtacacatgcgcacacacacacactctctctctgtctctttctctctctctctcctttttaattgtcagctaggattccagctgattgctcaatttcacccacacagaagtcttgggctgttgccactccagccagttaacccacggaggtcctcggagcctcctttagggctcaggagcacagacttcagacccaggccatctaggtttgaaatctgtctctaccaccttctactgtgagcccgtggggaagctgtttcatgtctctgtacctcagtctcttatctgtaaaatggggataataataatattcacctctggggtgttgtgaagatgaaatgaattgacacataaaagacacataaaataaaccatggtaagatttattacatccttttaactaacaccttgtaaatgctcattgagtgttagctattattattctccttattgcgtcagtttctgctggagtgtcagagattgtatgtatcttaaactttctcccagttatgtagtatttgtttaattaaactatacgctataaaatgaggaaaattagaataccgaataagtttttcatagagtaaactgtattacattttaaaatcctttagtcctttagagattatgttctaatttttatattttatgtaattttgtcagtggtagatagtaattatcttta

SEQ ID NO: 94766 - DNA, 905 bp, Homo sapiens
aatatttttaaaatataaacgtatataaatttatatatttttactatatgtgtacatataaaaacggcaattagtaagactgaaggctctttctacccccaattttaccccaatttctgttttaatcatccaaagaaacacatgtgcatgtgctcacatcctacactcacacccacactccacagcacacacacacgtgcgcaaacacacacgcacatgcgtacacaygcgcacacacacacactctctctctgtctctttctctctctctctcctttttaattgtcagctaggattccagctgattgctcaatttcacccacacagaagtcttgggctgttgccactccagccagttaacccacggaggtcctcggagcctcctttagggctcaggagcacagacttcagacccaggccatctaggtttgaaatctgtctctaccaccttctactgtgagcccgtggggaagctgtttcatgtctctgtacctcagtctcttatctgtaaaatggggataataataatattcacctctggggtgttgtgaagatgaaatgaattgacacataaaagacacataaaataaaccatggtaagatttattacatccttttaactaacaccttgtaaatgctcattgagtgttagctattattattctccttattgcgtcagtttctgctggagtgtcagagattgtatgtatcttaaactttctcccagttatgtagtatttgtttaattaaactatacgctataaaatgaggaaaattagaataccgaataagtttttcatagagtaaactgtattacattttaaaatcctttagtcctttagagattatgttctaatttttatattttatgtaattttgtcagtggtagatagtaattatcttta

SEQ ID NO: 94767 - DNA, 1223 bp, Homo sapiens
attttcttaatccagtctatcattgttggacatttgggttggttctaagcctttgctattgtgaatagtgccacaacaaacatacatgtgcrtgtgtctttatagcagcatgatttatagtccttcgggtatatgcccagtaatgggatggctgggtcaaatggtatttctagttctagatccctgaggaatcaccacgctgacttccacaatggttgaactagttgacagtcccaccaacagtgtaaaagtgttcctatttctccacatcctctccagcacctgtttcctgactttttaatgattgccattctaactggtgtgagatggtatctcattgtggttttgagttgcatttctctgatggccagtgatggtgagcattttttcatgtttttttaatctaaagtcttagactcaaactagggagaaaataacattaaagtataagaattagaaaaaacatacataaaattatcataatttttgatatgattgtattcatacaaaatccaaaaggatctgaagataaactgttagaagatataaatcattaagatgatattaaagtataagaattagaaaaaaatacacaaaattattatcaggccaagcatagtggctcatggctataatcccagcactttgggagactgaggtagatggatcccttgatgccaggagttcgacaccagactggtcaacatggtgaaaccccatctctactaaaaatacaaaaattatccaggcatggtggtacacttctgtaatcccagctactcaggaggctgaggtaggagaatcgcttgaacctgggaggtggaggttgcagtgagttgagatcacaccactgcactccagcttgggtgacagagtgagactctgtctcaaagaaataaaaaataaataaataaattataattttagttaatatgattgtggtcatggaaaatcctaaagaacctgtaaattattgaaagagataaatcattaaataaattgttacttttttggaaataatgtcacccaggctgaaatgcagtggcctaatcatggctcactgaagcctcaagtagtcctcccacctaagcctccctgtagctgggactgcagatgcacaccattgcacctggcgaatttttgtagagaaggggttttgctatgttgcccaggctggtcttgaactcctgggctcaagtaatttgcccacttcagtcttccaa

SEQ ID NO: 94768 - DNA, 1223 bp, Homo sapiens
attttcttaatccagtctatcattgttggacatttgggttggttctaagcctttgctattgtgaatagtgccacaacaaacatacatgtgcgtgtgtctttatagcagcatgatttatagtccttcgggtatatgcccagtaatgggatggctgggtcaaatggtatttctagttctagatccctgaggaatcaccacgctgacttccacaatggttgaactagttgacagtcccaccaacagtgtaaaagtgttcctatttctccacatcctctccagcacctgtttcctgactttttaatgattgccattctaactggtgtgagatggtatctcattgtggttttgagttgcatttctctgatggccagtgatggtgagcattttttcatgtttttttaatctaaagtcttagactcaaactagggagaaaataacattaaagtataagaattagaaaaaacatacataaaattatcawaatttttgatatgattgtattcatacaaaatccaaaaggatctgaagataaactgttagaagatataaatcattaagatgatattaaagtataagaattagaaaaaaatacacaaaattattatcaggccaagcatagtggctcatggctataatcccagcactttgggagactgaggtagatggatcccttgatgccaggagttcgacaccagactggtcaacatggtgaaaccccatctctactaaaaatacaaaaattatccaggcatggtggtacacttctgtaatcccagctactcaggaggctgaggtaggagaatcgcttgaacctgggaggtggaggttgcagtgagttgagatcacaccactgcactccagcttgggtgacagagtgagactctgtctcaaagaaataaaaaataaataaataaattataattttagttaatatgattgtggtcatggaaaatcctaaagaacctgtaaattattgaaagagataaatcattaaataaattgttacttttttggaaataatgtcacccaggctgaaatgcagtggcctaatcatggctcactgaagcctcaagtagtcctcccacctaagcctccctgtagctgggactgcagatgcacaccattgcacctggcgaatttttgtagagaaggggttttgctatgttgcccaggctggtcttgaactcctgggctcaagtaatttgcccacttcagtcttccaa

SEQ ID NO: 94769 - DNA, 774 bp, Homo sapiens
tcttcagtgtcaggggagcgtgggcatgtgtgagggctcaggcctcgccctcctctccactgtcatgcacgctggcctgtctcaccaccttccggaacctgggcgtagaggaaatgcagggctctccctgcccctgcccctgcccctgctcctgctcctggaaggcctgggtccggttggccaccacggcactgccctggagggtaaccactgactggygggacttcagggcaggctgaggccccctgtccacctgctggcctcccttggtccttgcaagctgtgggaagggctgcagaggctcttcatgtgaagactcgtgggaagagaagacctggacaggtgtgaggatacggaagccatgggaggcctttctggggcaggggtgcccaagcacagagccgggaagatctggggcaggggtgccaagcacagagccaggaggaggcgagggccggaatgtttgtggcacgcacgccaaaagccaagctgtccacagccacgcttcctcgggagggaggacaacaccccagccctgctgccccgctccttgaaccctacctgcttgtagcttccttctggcccccagaagccctcctcagctccctggagacccaggcctccctgccctcctcccctcctatgctttctctgcctttgcgtaggcagccggcaggtgaaacccgtgccggcaccagcccctgagctgggctgggtggatgcgtgcgtccggtgctgggtgaggacctcttgcctttagcaacgcccacaccc

SEQ ID NO: 94770 - DNA, 669 bp, Homo sapiens
tgcattcactgcaagttagagaaaaaagagtaacaagagtataatactataaacctcgggtattaattctagatttccattctcatatagcattcagaagcattttcacaagctggaatataactgaatgaataaagataatccttcaaaacctgtttacatcctcaaaaaggacttaaaggcttcctttggccatatttcagaccaatggctacatagagggaaagttggtttagatcttaatttgctgatttcacagtgaatctatccaaaattcgtgttcccttccactatttattatacttccaagtacagaaattatcttgtccttctaaaatcacttctttggcttcatttggagaactctgattcaggaatctagaaacaggactattgagatttactaagtgctgtgccaatggtgtaatgacagtgaactagatgaatactaatttctactgaacactagccaagaaggtgaacttaatctataattctttccagatacgaatggggacaattccctaacagattcatttccagggtatattaagtatacatgaactgaagcaaagtcatacaaccaacttcagattccaacccctatcacaactatgaccatacctttyccccttgatggatgtgataccaaacagaggtaccaccaaa

SEQ ID NO: 94771 - DNA, 1435 bp, Homo sapiens
ccccacctgggtttctttttgttttgagacagggtctccactctgttgcccaggctggagggctgtggcacaatcttggctcactgcaacctccacctcccaggttcaaacgatcctcccgcctcagcctcccgggtagctgggagtacaggcgcgtgccaccatgcccggctaatttttttggtattttttggtagagacagggtttcaccatgttggccaggctggtctcaaactcctgacctcaagtgatctgcgctccttggcctcccaaagtgctgggattacaggcgtgagccaccatgcccggccccagcctgagtttgaatcccagagccgccactttctggctgtgatccagggtgagttccttaaacccgagccagctgctcacttctaagcaggcaggggcctggtgccgcagcagccggcgaccctcaccttcctcatggcccagctgcttgttcttggctttcttgcgagcctccagccggtctgtctcagcgttgatggtgtcgaagacagtctctgccacctcctgctgccaccgctccgagatggtgagggggaagttgcggtagagctcctgatcactgtccagtaactttaccaggtggatggggcaggggcacatgggtggacagagatgccggaataccatcagccacaggctgcccagacccagggccctgggtagggatggtcagtgcaactgccaccccccagggaagttggccaaggaggaactgaggcctacaagctggcagggctggcacagggtctcacaggtgataagaagggagagggatccttccccaggccaggatcacagcctaggtacaagaggccaggcaaggcccagtaccttgattccttttgtgtcctcctcatcgaaggagccaatgtcgaaggcgtcggccgcgttcacctcccctcgtggggggatcagcgggggagggtactgcagcagaacaggggtcatgggcattagctcggggstggggctgcagagcacccccagtccctgccgcacgactgttaccatctgcaagaagaccatctgtcagaccagggagcggaaaaaggggctctctttcactcctgagccctgtggggagaggccacgtcatctgggctcagccccaccctgagtcccgggcttaagctcctgattgagccactttctggctctgtgaacttgggcaagttccttaagcctgagctgttcctcatctctcaaatgggagaacagaagttcctacatcgtagggttgtgggttttaacactggtaaattttgcaaccctatgcccagtgcttaataaatgtttgataaacataaaaagctgctatcatcatcatctgtgacaagggcccctctggaagccagttactagctggttccagcagctccaactcccagggcagcccctcca

SEQ ID NO: 94772 - DNA, 1435 bp, Homo sapiens
ccccacctgggtttctttttgttttgagacagggtctccactctgttgcccaggctggagggctgtggcacaatcttggctcactgcaacctccacctcccaggttcaaacgatcctcccgcctcagcctcccgggtagctgggagtacaggcgcgtgccaccatgcccggctaatttttttggtattttttggtagagacagggtttcaccatgttggccaggctggtctcaaactcctgacctcaagtgatctgcgctccttggcctcccaaagtgctgggattacaggcgtgagccaccatgcccggccccagcctgagtttgaatcccagagccgccactttctggctgtgatccagggtgagttccttaaacccgagccagctgctcacttctaagcaggcaggggcctggtgccgcagcagccggcgaccctcaccttcctcatggcccagctgcttgttcttggctttcttgcgagcctccagccggtctgtctcagcgttgatggtgtcgaagacagtctctgccacctcctgctgccaccgctccgagatggtgagggggaagttgcggtagagctcctgatcactgtccagtaactttaccaggtggatggggcaggggcacatgggtggacagagatgccggaataccatcagccacaggctgcccagacccagggccctgggtagggatggtcagtgcaactgccaccccccagggaagttggccaaggaggaactgaggcctacaagctggcagggctggcacagggtctcacaggtgataagaagggagagggatccttccccaggccaggatcacagcctaggtacaagaggccaggcaaggcccagtaccttgattccttttgtgtcctcctcatcgaaggagccaatgtcgaaggcgtcggccgcgttcacctcccctcgtggggggatcagcgggggagggtactgcagcagaacaggggtcatgggcattagctcggggctggggctgcagagcacccccagtccctgccgcacgactgttaccwtctgcaagaagaccatctgtcagaccagggagcggaaaaaggggctctctttcactcctgagccctgtggggagaggccacgtcatctgggctcagccccaccctgagtcccgggcttaagctcctgattgagccactttctggctctgtgaacttgggcaagttccttaagcctgagctgttcctcatctctcaaatgggagaacagaagttcctacatcgtagggttgtgggttttaacactggtaaattttgcaaccctatgcccagtgcttaataaatgtttgataaacataaaaagctgctatcatcatcatctgtgacaagggcccctctggaagccagttactagctggttccagcagctccaactcccagggcagcccctcca

SEQ ID NO: 94773 - DNA, 1435 bp, Homo sapiens
ccccacctgggtttctttttgttttgagacagggtctccactctgttgcccaggctggagggctgtggcacaatcttggctcactgcaacctccacctcccaggttcaaacgatcctcccgcctcagcctcccgggtagctgggagtacaggcgcgtgccaccatgcccggctaatttttttggtattttttggtagagacagggtttcaccatgttggccaggctggtctcaaactcctgacctcaagtgatctgcgctccttggcctcccaaagtgctgggattacaggcgtgagccaccatgcccggccccagcctgagtttgaatcccagagccgccactttctggctgtgatccagggtgagttccttaaacccgagccagctgctcacttctaagcaggcaggggcctggtgccgcagcagccggcgaccctcaccttcctcatggcccagctgcttgttcttggctttcttgcgagcctccagccggtctgtctcagcgttgatggtgtcgaagacagtctctgccacctcctgctgccaccgctccgagatggtgagggggaagttgcggtagagctcctgatcactgtccagtaactttaccaggtggatggggcaggggcacatgggtggacagagatgccggaataccatcagccacaggctgcccagacccagggccctgggtagggatggtcagtgcaactgccaccccccagggaagttggccaaggaggaactgaggcctacaagctggcagggctggcacagggtctcacaggtgataagaagggagagggatccttccccaggccaggatcacagcctaggtacaagaggccaggcaaggcccagtaccttgattccttttgtgtcctcctcatcgaaggagccaatgtcgaaggcgtcggccgcgttcacctcccctcgtggggggatcagcgggggagggtactgcagcagaacaggggtcatgggcattagctcggggctggggctgcagagcacccccagtccctgccgcacgactgttaccatctgcaagaagaccatctgycagaccagggagcggaaaaaggggctctctttcactcctgagccctgtggggagaggccacgtcatctgggctcagccccaccctgagtcccgggcttaagctcctgattgagccactttctggctctgtgaacttgggcaagttccttaagcctgagctgttcctcatctctcaaatgggagaacagaagttcctacatcgtagggttgtgggttttaacactggtaaattttgcaaccctatgcccagtgcttaataaatgtttgataaacataaaaagctgctatcatcatcatctgtgacaagggcccctctggaagccagttactagctggttccagcagctccaactcccagggcagcccctcca

SEQ ID NO: 94774 - DNA, 1435 bp, Homo sapiens
ccccacctgggtttctttttgttttgagacagggtctccactctgttgcccaggctggagggctgtggcacaatcttggctcactgcaacctccacctcccaggttcaaacgatcctcccgcctcagcctcccgggtagctgggagtacaggcgcgtgccaccatgcccggctaatttttttggtattttttggtagagacagggtttcaccatgttggccaggctggtctcaaactcctgacctcaagtgatctgcgctccttggcctcccaaagtgctgggattacaggcgtgagccaccatgcccggccccagcctgagtttgaatcccagagccgccactttctggctgtgatccagggtgagttccttaaacccgagccagctgctcacttctaagcaggcaggggcctggtgccgcagcagccggcgaccctcaccttcctcatggcccagctgcttgttcttggctttcttgcgagcctccagccggtctgtctcagcgttgatggtgtcgaagacagtctctgccacctcctgctgccaccgctccgagatggtgagggggaagttgcggtagagctcctgatcactgtccagtaactttaccaggtggatggggcaggggcacatgggtggacagagatgccggaataccatcagccacaggctgcccagacccagggccctgggtagggatggtcagtgcaactgccaccccccagggaagttggccaaggaggaactgaggcctacaagctggcagggctggcacagggtctcacaggtgataagaagggagagggatccttccccaggccaggatcacagcctaggtacaagaggccaggcaaggcccagtaccttgattccttttgtgtcctcctcatcgaaggagccaatgtcgaaggcgtcggccgcgttcacctcccctcgtggggggatcagcgggggagggtactgcagcagaacaggggtcatgggcattagctcggggctggggctgcagagcacccccagtccctgccgcacgactgttaccatctgcaagaagaccatctgtcagwccagggagcggaaaaaggggctctctttcactcctgagccctgtggggagaggccacgtcatctgggctcagccccaccctgagtcccgggcttaagctcctgattgagccactttctggctctgtgaacttgggcaagttccttaagcctgagctgttcctcatctctcaaatgggagaacagaagttcctacatcgtagggttgtgggttttaacactggtaaattttgcaaccctatgcccagtgcttaataaatgtttgataaacataaaaagctgctatcatcatcatctgtgacaagggcccctctggaagccagttactagctggttccagcagctccaactcccagggcagcccctcca

SEQ ID NO: 94775 - DNA, 743 bp, Homo sapiens
cacaaaatgaatttcaggtaattaaatacatacgtcttaaaagtraaactatataacttttcaaaaaatatgaacgaatactcatgatttgtaagcatttactaaacaagagaaaataaaagtacaagctataaaagtggagactgcgtaataaatgttaattaattacatcagagaattttatttatcctaatatttgttactcagttttcagtgcttgagaatacatcagtaagcaagacaaatatctttgctctcttggggtttatatcctagtaacgagacatactgcaaacaatttttttaatgcacattataaaaatgtcattacacaatatgttagaaagttacacagggttaagttaaaagtagactaaagacattggaatttctgaagtgagaattaagagaaattgtcattttttaagggaaacctgggtaggtcttgtgaaaaggtgatgtttggaaaaaaaatattggaaagagataaagcatcaacaaccatggagataactggggggaaagcattcctgggacaaggaagagtgtgtacaatagtcttaaagtataaaaagttttcatgtatttgagaacacgatgaggtcaatatagctaaagcagagtgagcaaagggcagaatattagtaggcaatatcagaggtagaatgatcaaatagaatattgatttccatgttatgtttcaaaaatcgttgcttattctggataataaagatattcacacg

SEQ ID NO: 94776 - DNA, 743 bp, Homo sapiens
cacaaaatgaatttcaggtaattaaatacatacgtcttaaaagtaaaactatataacttttcaaaaaatatgaacgaatactcatgatttgtaagcatttactaaacaagagaaaataaaagtacaagctataaaagtggagactgcgtaataaatgttaattaattacatcagagaattttatttatcctaatatttgttactcagttttcagtgcttgagaatacatcagtaagcaagacaaakatctttgctctcttggggtttatatcctagtaacgagacatactgcaaacaatttttttaatgcacattataaaaatgtcattacacaatatgttagaaagttacacagggttaagttaaaagtagactaaagacattggaatttctgaagtgagaattaagagaaattgtcattttttaagggaaacctgggtaggtcttgtgaaaaggtgatgtttggaaaaaaaatattggaaagagataaagcatcaacaaccatggagataactggggggaaagcattcctgggacaaggaagagtgtgtacaatagtcttaaagtataaaaagttttcatgtatttgagaacacgatgaggtcaatatagctaaagcagagtgagcaaagggcagaatattagtaggcaatatcagaggtagaatgatcaaatagaatattgatttccatgttatgtttcaaaaatcgttgcttattctggataataaagatattcacacg

SEQ ID NO: 94777 - DNA, 570 bp, Homo sapiens
aaaaaagattgatattctaagttttaaaatataaaatattgaatgttcattatacgtggttctcaatcttgtttggggaaaaactatagaaaaaaaacttatcaaaatgccttaaggctttttcaaactctatacaagttcctgaggctttcatcccttttactcagtcttcccccaacccctaacactcatacacaaaataaatgctatatattttctaaaattgagtgtttaataaattgacattgtggaaaatacaagaaatattttagttcagcatatatagaatggcctaagcagagaagacaccttgaagtcaaagataatatgcaaaatttcctaaaatgtttttaaattcacatatagtgttcaaattaaaacacacaatcatttttctgtatattactcattttgtgtacacatgtatggtaattcacaaawaccagttttgcttatataaataatcaaatttccatctacttttgtggtgttttcacatctcagacaagcatatcttgatatatgtgtgaaagaagctaaagtgctttttaaatttagtacatctttgtg

SEQ ID NO: 94778 - DNA, 813 bp, Homo sapiens
tattttttgtaacagcttacatttgcctgactcttgaaataatttttataacgtgtggatccatagacccctgtgaagcagagggagcaaggattttattctctcttaaaaaaatgaagaaacagactcacaaagggagcaggactaatctgaggacacagaactggttacrggcaaatctgagactaataggtaagctccatctttaggcccatgttcatcccacagcacagctctgttccaaagagtgggatggtaggatggacagcctgcactctcaccccaaccttgccattctcaaattgtgtgagtctaggccagttcccaaacctcttttggctcagtttctcccccataagatactgaaaacaatggtaccaaccttatgagagttattgggaaaacaattgaaagaagtaaagtcatcatttaaagtgcttagaacaatgcctggaacacagtaaatgctcaatacattttacttattatcataatcacgaactgatgatggtactagtaattttaaaactttcagatatgtccccatcatttgggtcaggtagctctaggttaaaaagtgaaggtgatgcaaaattttattgtttttcctaaatttttcctgtaagaaaaataaaatcccactaacgactgagacctatcagataatcattatctaaaagagtgttggtctctggagataaaggtctaccataaattttctttaatacatttatatggatattcaagttgctgtatatagaaaattagtatttgagcataaaattggatgtcaggtgtgggtttgagttcacc

SEQ ID NO: 94779 - DNA, 652 bp, Homo sapiens
atatggtttatctcataccccctgtagcacatgtgctttaccaagatctccaatattctagtaacaacttgtgtaacttgctctgtcattatgatgttatcaatgtaataaatcagtatgatgttttgagaaatgcttaggtggacaatatcttcattctatatttccttgggcaggaaaactaacatagtcttgagacataattgaaagtgaatacagtatcgttcatctcacatgaatgtaagtcatttctgatcctcttttctaaccgcaacagaaaataattcattccccaaatcactgactgtatcatatactggagaccttttaaatgattctgtgtttagtataacactgctattggggctactacttggctgaactcgaggcagtctatattcattctctagaaaacatakgggtcttcagggtccaggctgatgaattaaatagagagggaaaagagacaactgctgctacattttttatgtctttagtggtggcattaatttccaattcaagtgttctggaatcctatcatctccagtgactccaggaagcctagatccatagcagcatctcaaacgactgagcttttcaccaagctggtggctctctagtgcttatctttattgctttagtggaaaaagtg

SEQ ID NO: 94780 - DNA, 719 bp, Homo sapiens
gggtatatactcaaaggactataaatcatgctgctataaagacacatgcacacgtatgtttattgcggcactattcacaatagcaaagacttggaaccaacccaaatgtccaacaatgatagactggattaagaaattgtggcacatatacaccatggtatactatgcagccataaaaaatgattagttcatgtcctttatagggacatggatgaaattggaaatcatcgttctcagtaaactatcgcaaggacaaaaaaccaaacaccgcatgttctcactcataggtgggaattgaacaatgagaacacatggacacaggaaggggaacatcacactctggggactgttgtggggtggggggagtggggagggatagcattaggagatatatctaatgctaaatgaagagttaatgggtgcagcacaccagcatggcacatgtatacatatgtaactaacctgcacattgtgcacatgtaccctaaaacctaaagtataaaaaaaaawaatccagaaggacattttttccaattatctgctagacatcttcatttaggttttcttttcataccataaactcaaggtgcttaaaagcagcccttcgcttttgcttcacattctagttttcttcatcctctactttgctgccacctacaatccaaactttggggtgtctttgggttcccctgaatgtttaattacttaccatattctat

SEQ ID NO: 94781 - DNA, 867 bp, Homo sapiens
attgggggaatgcgcatgtggtacaagaaagaacccctgacccctttccttctctgtggtccccggcattagattgggggttctgggagaggcaggtgaatgtcctaatgtgaattgttcggtttgtaactggagtgttttgaagtctttggtgttgctctgagagaggacatcgccacctggtgttcatgaggtgtctgtgcagaacaataaatggcaaatgaacaaccacaaaattgttgctgttgttaaccttccgccttttgtagattagtgcacctattctgtgagggatttgggttgtcttcctgagggcaaccacaagccctaccactggatgcgggaaaagtcccttcagcacccacttaaaaaatatatcttccacattgttctcacccacacatttgacctggttagactcttcacctaacggaacagacaatatggctgggaaaataagtaagtgaacatgtgggagaaaaaccatcgttaaaattgtgaatgttcatttttaaaggttccttcgcctgactacaatatgaagtatgtttgaattgttgcttctgcctgttgtttctcaaataaatgtttaatgttaatcatctcaaaactgacaagaacacaaaaataaaatgtaaatgcagagcctcctttgtcacccaaatctgtgtctatttctgatagtccatggaatgtggttttcttggaagccagggttggtctccccacagaccctagcctaaggttaccagttagggrcccaggacttggaaggcagagcctgtgagctcttccatcagggatctgactccgcaaaacgacttgatgaatgcaactggcaaactcccatgttcggacttcatatgc

SEQ ID NO: 94782 - DNA, 696 bp, Homo sapiens
agagagaaaaaaaaagagttgtcataagcagaagcctgaatgcaagaaattgttctgaatttctaagaggcagattccggaaatacagctctgtgactgtacattcaatagcctattctggatcaccgacctgtgaacccttcagaaagaagcagtgagcacaagaagccagctagaacacagcaggaacaaggcaaaacaatcgacttcttttccttcaggagcctctgggctgttagctgaggaaactgcaataagcctaatatatcttgattttttaaagcaccccagtgaggtgccatcattcatctttttgacccatagcttcccagcagttatgcagggggagctgccagctcacaaaaccttgcttcatgtgatctctygtgttcccagaggctggggaggcaccctaaggacatctgattgcatatgcatcactgccctattcacagactatgtcattattggctgcctctttgccccaaaaggataagattccttaatgtctaaagccaaatcttgctgaatgtgggattaggaacagtcctgacccaaagacctgcatggtcaagagtctgggttgtgaatcagattacctctcagaggaatcacagctcattttcactagggatgaggaagaatatctggaaggcgagataggaaatacttgtttagcccacctgatgtttagaa

SEQ ID NO: 94783 - DNA, 581 bp, Homo sapiens
aattaggaaaacaagttatttaaattatttcatttgaaaaaaccctaccagcacattcaggtcaagactaactcctccataaaacctccctaattttttcttcacccacccccaccccrtctccagccaggagatctctaagcctcctctgagctcagacagcattttgaaataataaatctcagtaaggaaggacaggctcaagaagagtagtcctgtgtcaaaattcggggatctccattcatgcccgtaatgacccccactcccaccactcttccatctctgccccagcctttgtgctttgagggaaatcaggaataaaacaaaatgggtctcactagtattctcagtctctggatgtctcagcaaggtttctcagatgagaggaaacttcaagcctccctcctccctaacattaccacctgcccccggaatcccaagtgctttggaagaatgttacctcacctctgtgaaggaggcaccattaattcaaatttacaggccacaaaaccaaggctcagaaagaaggaagaattagagatgaatctgggagacctgcttgcgatctgcctgggagaagg

SEQ ID NO: 94784 - DNA, 1009 bp, Homo sapiens
taatgactaaggctgagtgcaagttcctttgtctttggcttgtaacagtattctgattagtctttctgccgctgatcttacctgcctcaaacattcttcacctgccaccagctcattcactcatctacaaatatcagtacctacaacatgtcaagtattgttctaagacctagactgtagcagcaaacaaataatcacttctctagccaatgttacattcaagtgagagaacagtcaattttcaaaataaatgagcaatrtatgtaatatgttgcaagtagcaaatgctaggaaggaaaagagaacagaaaaaaagactagagagtgctaggggtgggtgggggagtagacctcacaatttaaaataagaggatcagaggagactcattgagaaagagacacttgagcaaagacttgaagcacacgacgaaggatgccatgtggctatctgagggcaaattgctccaaggagagagatcagcaagtgcaaaggctctgggggcagaagtgtcctgagatgtgcaaggaatagcaaggaggccagagtagcatgggaatagtcagccaaggtggaagatgagttgagagcaatgaggtgggggtgaggggagtagatcctatggggctgtgttggacaaggtggagatttggcttttattctgagtcagtatagcaaataaagggcaccaatgaggccagcctggtgaagcaaaggtaccaagtagggttgaaattataaggcagactccagttatcgaggttaaaaaatcatgtcttcatgtttacagttatttaatgagaaggagcaagactttctgaaatatgtaaccatttgactgtaggcttttaaatgtaatttttaaccacacatcttatgtttaattatgaaattgaacatatgatttcttttaggaaattgctttttaaattgtttttaaaaaataaccaatgatttctctgtctctgcctcccttcatggaaatagctattacattttgtaaagaatttg

SEQ ID NO: 94785 - DNA, 1009 bp, Homo sapiens
taatgactaaggctgagtgcaagttcctttgtctttggcttgtaacagtattctgattagtctttctgccgctgatcttacctgcctcaaacattcttcacctgccaccagctcattcactcatctacaaatatcagtacctacaacatgtcaagtattgttctaagacctagactgtagcagcaaacaaataatcacttctctagccaatgttacattcaagtgagagaacagtcaattttcaaaataaatgagcaatgtatgtaatatgttgcaagtagcaaatgctaggaaggaaaagagaacagaaaaaaagactagagagtgctaggggtgggtgggggagtagacctcacaatttaaaataagaggatcagaggagactcattgagaaagagacacttgagcaaagacttgaagcacacgacgaaggatgccatgtggctatctgagggcaaattgctccaaggagagagatcagcaagtgcaaaggctctgggggcagaagtgtcctgagatgtgcaaggaatagcaaggaggccagagtagcatgggaakagtcagccaaggtggaagatgagttgagagcaatgaggtgggggtgaggggagtagatcctatggggctgtgttggacaaggtggagatttggcttttattctgagtcagtatagcaaataaagggcaccaatgaggccagcctggtgaagcaaaggtaccaagtagggttgaaattataaggcagactccagttatcgaggttaaaaaatcatgtcttcatgtttacagttatttaatgagaaggagcaagactttctgaaatatgtaaccatttgactgtaggcttttaaatgtaatttttaaccacacatcttatgtttaattatgaaattgaacatatgatttcttttaggaaattgctttttaaattgtttttaaaaaataaccaatgatttctctgtctctgcctcccttcatggaaatagctattacattttgtaaagaatttg

SEQ ID NO: 94786 - DNA, 1009 bp, Homo sapiens
taatgactaaggctgagtgcaagttcctttgtctttggcttgtaacagtattctgattagtctttctgccgctgatcttacctgcctcaaacattcttcacctgccaccagctcattcactcatctacaaatatcagtacctacaacatgtcaagtattgttctaagacctagactgtagcagcaaacaaataatcacttctctagccaatgttacattcaagtgagagaacagtcaattttcaaaataaatgagcaatgtatgtaatatgttgcaagtagcaaatgctaggaaggaaaagagaacagaaaaaaagactagagagtgctaggggtgggtgggggagtagacctcacaatttaaaataagaggatcagaggagactcattgagaaagagacacttgagcaaagacttgaagcacacgacgaaggatgccatgtggctatctgagggcaaattgctccaaggagagagatcagcaagtgcaaaggctctgggggcagaagtgtcctgagatgtgcaaggaatagcaaggaggccagagtagcatgggaatagtcagccarggtggaagatgagttgagagcaatgaggtgggggtgaggggagtagatcctatggggctgtgttggacaaggtggagatttggcttttattctgagtcagtatagcaaataaagggcaccaatgaggccagcctggtgaagcaaaggtaccaagtagggttgaaattataaggcagactccagttatcgaggttaaaaaatcatgtcttcatgtttacagttatttaatgagaaggagcaagactttctgaaatatgtaaccatttgactgtaggcttttaaatgtaatttttaaccacacatcttatgtttaattatgaaattgaacatatgatttcttttaggaaattgctttttaaattgtttttaaaaaataaccaatgatttctctgtctctgcctcccttcatggaaatagctattacattttgtaaagaatttg

SEQ ID NO: 94787 - DNA, 1009 bp, Homo sapiens
taatgactaaggctgagtgcaagttcctttgtctttggcttgtaacagtattctgattagtctttctgccgctgatcttacctgcctcaaacattcttcacctgccaccagctcattcactcatctacaaatatcagtacctacaacatgtcaagtattgttctaagacctagactgtagcagcaaacaaataatcacttctctagccaatgttacattcaagtgagagaacagtcaattttcaaaataaatgagcaatgtatgtaatatgttgcaagtagcaaatgctaggaaggaaaagagaacagaaaaaaagactagagagtgctaggggtgggtgggggagtagacctcacaatttaaaataagaggatcagaggagactcattgagaaagagacacttgagcaaagacttgaagcacacgacgaaggatgccatgtggctatctgagggcaaattgctccaaggagagagatcagcaagtgcaaaggctctgggggcagaagtgtcctgagatgtgcaaggaatagcaaggaggccagagtagcatgggaatagtcagccaaggtggaagatgagttgagagcaatgaggtgggggtgaggggagtagatcctatggggctgtgttggacaaggtggagatttggcttttattctgagtcagtatagcaaataaagggcaccaatgaggccagcctggtgaagcaaaggtaccaagtagggttgaaattataaggcagactccagttatcgakgttaaaaaatcatgtcttcatgtttacagttatttaatgagaaggagcaagactttctgaaatatgtaaccatttgactgtaggcttttaaatgtaatttttaaccacacatcttatgtttaattatgaaattgaacatatgatttcttttaggaaattgctttttaaattgtttttaaaaaataaccaatgatttctctgtctctgcctcccttcatggaaatagctattacattttgtaaagaatttg

SEQ ID NO: 94788 - DNA, 527 bp, Homo sapiens
tctcactttgttgcccaggctggtctctaactcctgggctcgagcaatgcccctgcctgggcctcccaaagagctgagattagaggcatgactcaccgtgtctggccaaaaaaaattaatcttcctttttaattaccatgatgggaaggatactcatatgacttatacttatttttttcttacaacataatatagttaggaaatacaccatgttcaaatgttcaaagattgattaataytgataatatgttatctatccatctatactactatgactaaaaggtaaattaaaggtaggaatcacagcatcatctgggagatggctggaaatgtagaattttgaaaaccactcgattatataaattagtttttgtatttttaaaatatcctaagataattaaaatgcatagtaagtttctggggcactgattaaactaaggcacaaaattttctaactttccaacatacaatttatctgaactttggtaatggtattattcaaaaataactatttgccaaaaaactga

SEQ ID NO: 94789 - DNA, 527 bp, Homo sapiens
tctcactttgttgcccaggctggtctctaactcctgggctcgagcaatgcccctgcctgggcctcccaaagagctgagattagaggcatgactcaccgtgtctggccaaaaaaaattaatcttcctttttaattaccatgatgggaaggatactcatatgacttatacttatttttttcttacaacataatatagttaggaaatacaccatgttcaaatgttcaaagattgattaatactgataatatgttatctatccatctatactactatgactaaaaggtaaattaaaggtaggaatcacagcatcatctgggagatggctggaaatgtagaattttgaaaaccactcgattawataaattagtttttgtatttttaaaatatcctaagataattaaaatgcatagtaagtttctggggcactgattaaactaaggcacaaaattttctaactttccaacatacaatttatctgaactttggtaatggtattattcaaaaataactatttgccaaaaaactga

SEQ ID NO: 94790 - DNA, 527 bp, Homo sapiens
tctcactttgttgcccaggctggtctctaactcctgggctcgagcaatgcccctgcctgggcctcccaaagagctgagattagaggcatgactcaccgtgtctggccaaaaaaaattaatcttcctttttaattaccatgatgggaaggatactcatatgacttatacttatttttttcttacaacataatatagttaggaaatacaccatgttcaaatgttcaaagattgattaatactgataatatgttatctatccatctatactactatgactaaaaggtaaattaaaggtaggaatcacagcatcatctgggagatggctggaaatgtagaattttgaaaaccactcgattatataaattagtttttgtatttttaaaatatcctaagataattaaaatgcatagtaagtttctggggcactgattaaactaaggcacaaaattttctaactttccaacatwcaatttatctgaactttggtaatggtattattcaaaaataactatttgccaaaaaactga

SEQ ID NO: 94791 - DNA, 527 bp, Homo sapiens
tctcactttgttgcccaggctggtctctaactcctgggctcgagcaatgcccctgcctgggcctcccaaagagctgagattagaggcatgactcaccgtgtctggccaaaaaaaattaatcttcctttttaattaccatgatgggaaggatactcatatgacttatacttatttttttcttacaacataatatagttaggaaatacaccatgttcaaatgttcaaagattgattaatactgataatatgttatctatccatctatactactatgactaaaaggtaaattaaaggtaggaatcacagcatcatctgggagatggctggaaatgtagaattttgaaaaccactcgattatataaattagtttttgtatttttaaaatatcctaagataattaaaatgcatagtaagtttctggggcactgattaaactaaggcacaaaattttctaactttccaacatacaatttatctgaactttggtaatggtaytattcaaaaataactatttgccaaaaaactga

SEQ ID NO: 94792 - DNA, 758 bp, Homo sapiens
agtcagccacttagaaattcggcaccaaaatatctcaggcattgtttttaaaattttgttctaatggactcaaacttcaatttcatatattgttctggtttccaacttctatttccctgtccctacaacataataagaaaaagatttttaaaagattatacttttagtcattctctctgtgtactttcttttgtggatggataaattattattgcactcacacaagtaaataatatcaacctttagractatacatatttgcattaaaatatatcaacatatgtatgtgtttataagaagagttattctttgtccttgaaagaggattgactatgtaaagtgtttggttgaaaaaaagaaaagtcctggtgcagtggctcatgtctgtaatcctggcactttgggaggccgaggcgggcggattacctgaggtccggagtttgagacccgcctggcccacatagtgaaaccccgtctctacttaaaataccaaaattagctgggcatggtggcaggcacctgaaatcccagctactcgggaggctgaggcaggagaatctcttgaaccccggaggcggaggttgccgtgagcccagatggtgtcactgcactcccgcctgggagagagagggtgactctgtctcaaaaaaaaaaagctccccacgagtttttttcttacttacattatttgcagttacacttctatctttctagtcctttccacttcaactaactagaaaatctctaatcaataaatt

SEQ ID NO: 94793 - DNA, 758 bp, Homo sapiens
agtcagccacttagaaattcggcaccaaaatatctcaggcattgtttttaaaattttgttctaatggactcaaacttcaatttcatatattgttctggtttccaacttctatttccctgtccctacaacataataagaaaaagatttttaaaagattatacttttagtcattctctctgtgtactttcttttgtggatggataaattattattgcactcacacaagtaaataatatcaacctttaggactatacatatttgcattaaaatatatcaacatatgtatgtgtttataagaagagttattctttgtccttgaaagaggattgactatgtaaagtgtttggttgaaaaaaagaaaagtcctggtgcagtggctcatgtctgtaatcctggcactttgggaggccgaggcgggcggattacctgaggtcmggagtttgagacccgcctggcccacatagtgaaaccccgtctctacttaaaataccaaaattagctgggcatggtggcaggcacctgaaatcccagctactcgggaggctgaggcaggagaatctcttgaaccccggaggcggaggttgccgtgagcccagatggtgtcactgcactcccgcctgggagagagagggtgactctgtctcaaaaaaaaaaagctccccacgagtttttttcttacttacattatttgcagttacacttctatctttctagtcctttccacttcaactaactagaaaatctctaatcaataaatt

SEQ ID NO: 94794 - DNA, 758 bp, Homo sapiens
agtcagccacttagaaattcggcaccaaaatatctcaggcattgtttttaaaattttgttctaatggactcaaacttcaatttcatatattgttctggtttccaacttctatttccctgtccctacaacataataagaaaaagatttttaaaagattatacttttagtcattctctctgtgtactttcttttgtggatggataaattattattgcactcacacaagtaaataatatcaacctttaggactatacatatttgcattaaaatatatcaacatatgtatgtgtttataagaagagttattctttgtccttgaaagaggattgactatgtaaagtgtttggttgaaaaaaagaaaagtcctggtgcagtggctcatgtctgtaatcctggcactttgggaggccgaggcgggcggattacctgaggtccggagtttgagacccgcctggccmacatagtgaaaccccgtctctacttaaaataccaaaattagctgggcatggtggcaggcacctgaaatcccagctactcgggaggctgaggcaggagaatctcttgaaccccggaggcggaggttgccgtgagcccagatggtgtcactgcactcccgcctgggagagagagggtgactctgtctcaaaaaaaaaaagctccccacgagtttttttcttacttacattatttgcagttacacttctatctttctagtcctttccacttcaactaactagaaaatctctaatcaataaatt

SEQ ID NO: 94795 - DNA, 758 bp, Homo sapiens
agtcagccacttagaaattcggcaccaaaatatctcaggcattgtttttaaaattttgttctaatggactcaaacttcaatttcatatattgttctggtttccaacttctatttccctgtccctacaacataataagaaaaagatttttaaaagattatacttttagtcattctctctgtgtactttcttttgtggatggataaattattattgcactcacacaagtaaataatatcaacctttaggactatacatatttgcattaaaatatatcaacatatgtatgtgtttataagaagagttattctttgtccttgaaagaggattgactatgtaaagtgtttggttgaaaaaaagaaaagtcctggtgcagtggctcatgtctgtaatcctggcactttgggaggccgaggcgggcggattacctgaggtccggagtttgagacccgcctggcccacatagtgaaaccccgtctctactwaaaataccaaaattagctgggcatggtggcaggcacctgaaatcccagctactcgggaggctgaggcaggagaatctcttgaaccccggaggcggaggttgccgtgagcccagatggtgtcactgcactcccgcctgggagagagagggtgactctgtctcaaaaaaaaaaagctccccacgagtttttttcttacttacattatttgcagttacacttctatctttctagtcctttccacttcaactaactagaaaatctctaatcaataaatt

SEQ ID NO: 94796 - DNA, 758 bp, Homo sapiens
agtcagccacttagaaattcggcaccaaaatatctcaggcattgtttttaaaattttgttctaatggactcaaacttcaatttcatatattgttctggtttccaacttctatttccctgtccctacaacataataagaaaaagatttttaaaagattatacttttagtcattctctctgtgtactttcttttgtggatggataaattattattgcactcacacaagtaaataatatcaacctttaggactatacatatttgcattaaaatatatcaacatatgtatgtgtttataagaagagttattctttgtccttgaaagaggattgactatgtaaagtgtttggttgaaaaaaagaaaagtcctggtgcagtggctcatgtctgtaatcctggcactttgggaggccgaggcgggcggattacctgaggtccggagtttgagacccgcctggcccacatagtgaaaccccgtctctacttaaaatacmaaaattagctgggcatggtggcaggcacctgaaatcccagctactcgggaggctgaggcaggagaatctcttgaaccccggaggcggaggttgccgtgagcccagatggtgtcactgcactcccgcctgggagagagagggtgactctgtctcaaaaaaaaaaagctccccacgagtttttttcttacttacattatttgcagttacacttctatctttctagtcctttccacttcaactaactagaaaatctctaatcaataaatt

SEQ ID NO: 94797 - DNA, 811 bp, Homo sapiens
ttttcaccttaaaaaaatcattcatgattgggagaaaatcaagccttattaaaaagtgcagcaacttggaaagatcacacaagtatttagtgatgaatctggtttaaatccagtgccatgggttccataaagtgtttttttgtttgttttttctcttatttagtaatatcacctcagcaaagtatcattgcctactaccaaactgtgtatttcctactaccaaactatgaaatcagattgtcttatgatttgaaataatcagtgcatattattaattagccccgtagtaaaatttagacaaaaataattaactcatgaaaagcctttaaagataaggtctctgaccttcaaggtatcagcatattcctccctgaattgtctcagctgctaaaggatagttgaaactttgctaatacatggctggagagtgtgtaaagtctgcaytgatgacaagataggaaaacaggcttctgagccagataaaaagatttggtagtactggttccttcagtactaattgtatgaagtcgggtaaatcatttaacttatttaaattttcttatttatacatttaaggtaataacattacctacattttcaaggttttgttctagtatgcataaaccttgtaccacaagctggaatatggtaattactaaaaataaacaaacaaacaaaaaactagtatgtgaaagaatttcttcattttaaaaggacaaaaactcaaaccatcttaatgtaaaagtaaacctgtggcatgtataactaggaattccaaagagcagtactagctttaggcatggatggatcc

SEQ ID NO: 94798 - DNA, 715 bp, Homo sapiens
ggatccttaacctcctgtctaatagaatgcttgtcaatgacagaaatgctccatcttcattatctaagaatgttgccactagcgcatatggtcactgagcactttaaatgtgggtagtgcaactgaggaatggaattttacacttactttacttgaattaatttaaatttaaatagccatctgtagctagtggctactatgttggacaatgtgtctttatattatgacttttcatcgcagctgcttaattaatgtgtgccaagtaagcatatgagtagtttaggggattattgcatcattcatacatgattttggattctatattaggcgtacctttgaaatttttgttcatagacctgaatgaaatcaaagtcataatttttactgttctaacacattttgccttaaaaaagttttaaaattttacattcctcctgagaacatamgttttttaagcttttaaagtgttgtaacataaatttaatgtttggcattgtttatattacctgtgggtaatattattcacatttgtaattaactctttaattgttaaatttaaaaaattaatagaataaaatttaaaattgttaacatagtttttctataaattgtaatacatttttcctctaagttagccagaatatcatactctctaaccattctttaaaaagtaattaaataaatgcatcctgagtatattagttcgctagggctg

SEQ ID NO: 94799 - DNA, 1007 bp, Homo sapiens
tgcatttttaaacatagaatatttttccttatgacattaaacacatttaagaaacagatattaaaagctactatgtgcagaatattccatgaaatcctcaaacaaatgatgcagactgaaaaagacactggaaagctgactgctaaaaaggaaacattaagtgtttagaacattaaacagggaatcaaaagagggacggtttagttctagcttggtcccataaagggtgatattagctacaaaattgtgaataagttgctttacttttgaggctacttgttctttttaaaatagaaatacaaattcttaatttgtcagggttattttaatttgtaactacgacaaggatgtgagagtccttactacmgattaaagctcatatacttagaaaaacaatgtagttatcaatagaaaaatgacatagttattaaacacctgctctgagctgttgaagcatcttacataccttacctcatttaactatcgcgcgcgcgcgcgtgcacacacacacacacacacacacacacaaactctaggaagtagatattattaatattattattattatcctaattttaaagacgtgagaaagagatgctcaaagagtttaaacaacatctccaaaattcacataggcaagatgtcatggagttatgattcaagcccagaaaatatgatttcattatattaaaatcatctcatcttatatctcacagtctgtctccttctctactttgtacaaactgaaaatgcgacaagcctacttacaaaaccaggagcagctgaaagcaagtaaggtgaaatgacaaaaatacacattcaatatcagcatcatgaagaatacagttgggtaagaaacaaaatatgccagaattttgttaactcttgacaccaccaggaaatgttacctggacagatggtatcccaggcctccaaggagcattgacataatgaaaaagatgaaagggaagagaaggcaggcaagcattcatcagccagagtggact

SEQ ID NO: 94800 - DNA, 1007 bp, Homo sapiens
tgcatttttaaacatagaatatttttccttatgacattaaacacatttaagaaacagatattaaaagctactatgtgcagaatattccatgaaatcctcaaacaaatgatgcagactgaaaaagacactggaaagctgactgctaaaaaggaaacattaagtgtttagaacattaaacagggaatcaaaagagggacggtttagttctagcttggtcccataaagggtgatattagctacaaaattgtgaataagttgctttacttttgaggctacttgttctttttaaaatagaaatacaaattcttaatttgtcagggttattttaatttgtaactacgacaaggatgtgagagtccttactacagattaaagctcatatacttagaaaaacaatgtagttatcaatagaaaaatgacatagttattaaacacctgctctgagctgttgaagcatcttacataccttacctcatttaactatcgcgcgcrcgcgcgtgcacacacacacacacacacacacacacaaactctaggaagtagatattattaatattattattattatcctaattttaaagacgtgagaaagagatgctcaaagagtttaaacaacatctccaaaattcacataggcaagatgtcatggagttatgattcaagcccagaaaatatgatttcattatattaaaatcatctcatcttatatctcacagtctgtctccttctctactttgtacaaactgaaaatgcgacaagcctacttacaaaaccaggagcagctgaaagcaagtaaggtgaaatgacaaaaatacacattcaatatcagcatcatgaagaatacagttgggtaagaaacaaaatatgccagaattttgttaactcttgacaccaccaggaaatgttacctggacagatggtatcccaggcctccaaggagcattgacataatgaaaaagatgaaagggaagagaaggcaggcaagcattcatcagccagagtggact

SEQ ID NO: 94801 - DNA, 1007 bp, Homo sapiens
tgcatttttaaacatagaatatttttccttatgacattaaacacatttaagaaacagatattaaaagctactatgtgcagaatattccatgaaatcctcaaacaaatgatgcagactgaaaaagacactggaaagctgactgctaaaaaggaaacattaagtgtttagaacattaaacagggaatcaaaagagggacggtttagttctagcttggtcccataaagggtgatattagctacaaaattgtgaataagttgctttacttttgaggctacttgttctttttaaaatagaaatacaaattcttaatttgtcagggttattttaatttgtaactacgacaaggatgtgagagtccttactacagattaaagctcatatacttagaaaaacaatgtagttatcaatagaaaaatgacatagttattaaacacctgctctgagctgttgaagcatcttacataccttacctcatttaactatcgcgcgcgcgcgcgtgcacacacacacacacacasacacacacaaactctaggaagtagatattattaatattattattattatcctaattttaaagacgtgagaaagagatgctcaaagagtttaaacaacatctccaaaattcacataggcaagatgtcatggagttatgattcaagcccagaaaatatgatttcattatattaaaatcatctcatcttatatctcacagtctgtctccttctctactttgtacaaactgaaaatgcgacaagcctacttacaaaaccaggagcagctgaaagcaagtaaggtgaaatgacaaaaatacacattcaatatcagcatcatgaagaatacagttgggtaagaaacaaaatatgccagaattttgttaactcttgacaccaccaggaaatgttacctggacagatggtatcccaggcctccaaggagcattgacataatgaaaaagatgaaagggaagagaaggcaggcaagcattcatcagccagagtggact

SEQ ID NO: 94802 - DNA, 1007 bp, Homo sapiens
tgcatttttaaacatagaatatttttccttatgacattaaacacatttaagaaacagatattaaaagctactatgtgcagaatattccatgaaatcctcaaacaaatgatgcagactgaaaaagacactggaaagctgactgctaaaaaggaaacattaagtgtttagaacattaaacagggaatcaaaagagggacggtttagttctagcttggtcccataaagggtgatattagctacaaaattgtgaataagttgctttacttttgaggctacttgttctttttaaaatagaaatacaaattcttaatttgtcagggttattttaatttgtaactacgacaaggatgtgagagtccttactacagattaaagctcatatacttagaaaaacaatgtagttatcaatagaaaaatgacatagttattaaacacctgctctgagctgttgaagcatcttacataccttacctcatttaactatcgcgcgcgcgcgcgtgcacacacacacacacacacacacacacaaactctaggaagtagatattattaatattattattattatcctaattttaaagacgtgagaaagagatgctcaaagagtttaaacaacatctccaaaattcacataggcaagatgtcatggagttatgattcaagcccagaaaataygatttcattatattaaaatcatctcatcttatatctcacagtctgtctccttctctactttgtacaaactgaaaatgcgacaagcctacttacaaaaccaggagcagctgaaagcaagtaaggtgaaatgacaaaaatacacattcaatatcagcatcatgaagaatacagttgggtaagaaacaaaatatgccagaattttgttaactcttgacaccaccaggaaatgttacctggacagatggtatcccaggcctccaaggagcattgacataatgaaaaagatgaaagggaagagaaggcaggcaagcattcatcagccagagtggact

SEQ ID NO: 94803 - DNA, 305 bp, Homo sapiens
caaagtgaaggtggcagttcaacagaaggaatgtcaaatgtgccttttcaagattctaaggcaggtgtggtatggtgaggagaaggatctctggttctacttctcattctgctgagtgtaaacgccacagaaacttgaaaaattctgacaatgtacaagaggacattctgcctctgtgctatcatcctcgggcagcacagaaggaatgaacttccatctttctaggctgattcatctaaatctttgttttctcagtmtgccagaacttttctcaggcctgcctttagggttgttttgttttgttt

SEQ ID NO: 94804 - DNA, 754 bp, Homo sapiens
ccccccaaaattcaaatattgaaatctaaatcccaatggcatgatattggaggtgaagcccttgggaggtaattagatcatgagagtagagcttttatcaatgggattagtgtccttattaaagagaccccagaaaactagctaaccccttccaccatgtgaagacacagaaataaggcaccatctatgaaccagttaacagttcctcaccagtccctaaatctgccagtgccttgatgttggacttcccaatctccagaactgtaagaaataaatttctgtggtttataaattagccagtatattagtctgttctcacactgccaataaagacatatccaagactrggtaatttataaaggaaagaggtttgactgacagttcagcataactggggaggtctcaggaaacttacaatcatggtggaaggggaagcaaacacatccttcttcacatggcagcagcaagaggtgcagagggaattggggggaaagtccctgataaaaccatcagatctcttgcgaactcactcactatcagagtaacagcatggaggtaaccacccccatgattcaattacctcccactgggtccctcccatgacatgtgaggattatgggaactacagatgaactacatttggaactacagatcgcaaatgtcccctcctttgtgagccttctctgtggcccccaggtagtcagaaaatcccattctctgtattgttgtgtcaccttgtttgtatatataagga

SEQ ID NO: 94805 - DNA, 1282 bp, Homo sapiens
cccaaactcctttcacatcaccacactgcctccaatagcagggggacctgaaaggaccatgtatcagccccagtcaccctgaccaatcagctagctggctactccagtaccacactggtacctccagaaactacgagcctggactaagtaaatgaccttctcagtagaacagggtcgtatttccagcaagggtaagtgaagaactgggcttgtctacaagagcctccaaaaataaaaactgcagctgaagcatcttagagagaggggacaaggataatgcagaattggacccagatcaagaacagtggcaccactggttctgtgtccagactggaagaagcagaagagagcagtgagctttcccttcactgcagccaaagcaggcttgcagaagacaaagtcaatcccacatctttctgctgaaggcctttcaatggatccctggctctcaggatcaagaccatcatccttgcacagcccataaggtcctgcatagcaaggccctgccccctccagcctccttatacacatggacccttgctcaggggaccctagccccacccagggtcctttggttcctcccacagcatgctctgtcctgtatctggttcctgcctgccctctgctcctgggtgacacccwaacttttgccttcaggtcacagctctgttacatgcccctgagggaagctttctctgagccccagacaaaggccggttctcccttctgcacactctcatagtgcctcctgcctcgcccttgtaacaatcaccaccactgtcatctgacttcgttgtttgatgattggttacaatctaccttcctatagactgtaagctccatgagggcaagtaccatgactgttccactcatggtatcctcagtagcatagcacctggaatgtgataggtgctcagaatccgactgttgcatgagcaaaggaacccaagaatgcttcatcaaaaagtgaaggtttggaaactgatgcaataatagggtgggatagacacttcctgggaaactggagggtgggggaggcatgccgttgctttggaaacatgaaccctatgctcaaaatgtctggtccatcccaaccctgccctgactccaggacctggccccactctgacttggaggctcagcctttgctagactatgcacatttctacagtttgcaaccctctcatctgatgcagcattctcatgtacaacacacccccatcccattcccgtggaggtaggcattatcaaatagccccatttttcagatgagaaaaaaaac

SEQ ID NO: 94806 - DNA, 652 bp, Homo sapiens
ctgtggccaaaagtaccagcaagaaccagagagggatctagtgatgccccaagggaccgaggaccctacgggctgggaggtcaggaaagaaccctggaggaggcagggtctccactggcccctggaagctgacactagaagcttagaatgaggacctggaagctcagagggtttctagtaccccccaatccctcagtaaggggaactgggaggggtggcctccmacaagaatcaaactactgctcccctgtccaccagccctcacataaccgtgccctttcccgacaccaaggcaaaatcccaccctcttctgttttaaagcaagctgaggggggcggtcagtgtgaagggggttgtccctcctacccactgcactgatgccttggcactgcactgatgccctgcccggaacctgcactgatgctctggcgctgcactgatgtccgggacctgcactgatgccctggcagtgcactttctgcctgggacctgcagacttcccacatgctcctcatctccacctgccaatcatcaaccacatggagtccgctgagagtcttgctcctcctgcctctgccctcaggcctgggacctgagtacttcagtgctgaagaaaaccgaccaaggagtcctggctggaaaccaagccatg

SEQ ID NO: 94807 - DNA, 1236 bp, Homo sapiens
gcatgctaccagaagtatttcaaatttcagatatttttgtatattggaattcagctgtatacttactggtttagcatccctaatccaaaaacctataatttgaaatgtttcaataaacatttcctttgaatatcatgtgggcgctcacacagtgttggattttagagcatttcaaaattcraatttttggattaaggattctcagcctgtaaacctagagttcttgactcaaatggactttcagtaccctttcctcaaccttcccacactcccgaccatacacatgtacctgcccacagacattcatacagtttccttattttaatgtcctgggaagaggtagaaacatcttgtcaaagtcactctttcagtggtgggcatctgcgctctaccatctggctgctcaaatgaaaatcgaacctaaaagagtaaggaaagtctgtagcccttttttttgctgagttttttttttcaagaatttcttgagttatgccaaaaaactacaacaaatatagcaaaataagtgacaaaaacaaaaagtacttccatctgcaacaagtataaccatatatgtatgtaagcattgaatgaccctcctcagggcattttaaatctgctgctggatctaatagccatgagagacacaggtaaattagagtccattcatttgtctctgcagggcaggagcggggtgaaactaaatgattgttttctcaaggctgtgggtcttaatagattggattaggctcctgggtttgtccactctccaaagaactccaaaactcttttggaaagaagagcattattggaagataaacttgtctggatctgctttctatgcttccaattgcaatagccaagcattcagggaagtagagtgaaaatagcatccactagcatcttaccttgcggaaaatttcctccacatcacaggaacaggcatattcttgcatatgttcaatgagtcttccaataaaaacagagcccattgtgggatgtctccaagaaacattatctatggataaagcacatttcaaatctcaagactggctcttgcctgaagaaagagaagaaaccctagtatttatactccagctgagggatgtttgaaatcataaatttagtagcaaataaggaaaaggcggaatggggtagaggggagtgattgggatttggaaatgaaatatctaaatgtgcattcccaaagtggtattactgactgtgatttaagttaat

SEQ ID NO: 94808 - DNA, 539 bp, Homo sapiens
gtttgtataaggcaaacacccagctgtcaccaatccagctgtttctgtacctcacttctgtctttagtccgtcactttcctttctccataaatgttattcaaccacgtagtagccccgggtttgctctgaacctrttctggttctgggggcagcccaactattgtatcattctctgctcaaacactgttaaatttaatttgtctaaagtgtttcttttaacaaagagaaggtgtattagatttccacctaatttgaaaatttcaaagccataatggagaagcgcaggcactactggtcatttttgtccagtagatggagccctagtagaaaggaaacagtctggcaagtatcaaaatttctcagaggaagatttgaacggggaattcactgtggattccacaccctaagagtccattaggcagcctgccagagttctccccagccagtctgagtgagaactcccagcggaaggaccctgaaatgaactaataaagtaaccagcaggacaaagcaatgtgccatggaaagaacaacagat

SEQ ID NO: 94809 - DNA, 1200 bp, Homo sapiens
ggcataggatggatcctcttaggtaagcaggaaagtgggacatcaacagtaagcagaaggaatggcatgcacttaccaggcactcagcgcaacggacacaaagcctcgccatacacgcctcttcctcctcctgatcagtgctgtaaaaagaggacaaaccaaatctgaatcaccactatcctcaatagagtagagcagttgaaagtacaggtgttgaaatcagacaggtctggttttagattccagttcttccactcactagctgggtgactgggcaaattgtttaagccccagaagcctgtttcctcatctataaaatgcacacattggccaggcgcagtggctcatgcctgtaatcccagcactttgggaggatgaggtgggtggatcacctgaagtcaggagtttgagaccagcctggccaacatgacaaaaccccgtctctactgaaaatacaaaaattagctgggmgttgtggcgcacacctgtaatcccacttactcaggaggctaagatggggaatcacttgaactcagaaggcagaggttgcagtgagccaagattacaccactgcactccagcctgggtgtcagagtgagtgagactcccatatcaaaaaacaaacaaacaaaaaatgcacatattaccacccacccttaaagcacagttgttaggaataaataaaaaataaatacatgtgaaacacataccatagtgcctggcacataataaatgctcaataaattatccctcattcagaagtgtactgagcactgacaaagtctgagcattgtgctagcctagaggtaaaaagataaataaaacttgagcctgtgaagggctcatgatgggggtgagagacctgttaaaacttaacaaatatgttataatgcagtgtgataagtgttttaatagagttaacatcaaactgctgcagcagcaaagagtgaggagtgactaattgtcccctgaggtctcagggaaactcaagagaaggggctatttcagctgggtcttggaggataagaaagagtttccaggcaaacaagagaaggaaagagggcattcccagcaagtcaaaaggaggggtcttagaggatgagaatgagttaggaaaaatatacgaatgaagtacagtatgttagggcacataaataagttcatggcagctgggacgtggggagatgtcagggaacaatg

SEQ ID NO: 94810 - DNA, 1200 bp, Homo sapiens
ggcataggatggatcctcttaggtaagcaggaaagtgggacatcaacagtaagcagaaggaatggcatgcacttaccaggcactcagcgcaacggacacaaagcctcgccatacacgcctcttcctcctcctgatcagtgctgtaaaaagaggacaaaccaaatctgaatcaccactatcctcaatagagtagagcagttgaaagtacaggtgttgaaatcagacaggtctggttttagattccagttcttccactcactagctgggtgactgggcaaattgtttaagccccagaagcctgtttcctcatctataaaatgcacacattggccaggcgcagtggctcatgcctgtaatcccagcactttgggaggatgaggtgggtggatcacctgaagtcaggagtttgagaccagcctggccaacatgacaaaaccccgtctctactgaaaatacaaaaattagctgggagttgtggygcacacctgtaatcccacttactcaggaggctaagatggggaatcacttgaactcagaaggcagaggttgcagtgagccaagattacaccactgcactccagcctgggtgtcagagtgagtgagactcccatatcaaaaaacaaacaaacaaaaaatgcacatattaccacccacccttaaagcacagttgttaggaataaataaaaaataaatacatgtgaaacacataccatagtgcctggcacataataaatgctcaataaattatccctcattcagaagtgtactgagcactgacaaagtctgagcattgtgctagcctagaggtaaaaagataaataaaacttgagcctgtgaagggctcatgatgggggtgagagacctgttaaaacttaacaaatatgttataatgcagtgtgataagtgttttaatagagttaacatcaaactgctgcagcagcaaagagtgaggagtgactaattgtcccctgaggtctcagggaaactcaagagaaggggctatttcagctgggtcttggaggataagaaagagtttccaggcaaacaagagaaggaaagagggcattcccagcaagtcaaaaggaggggtcttagaggatgagaatgagttaggaaaaatatacgaatgaagtacagtatgttagggcacataaataagttcatggcagctgggacgtggggagatgtcagggaacaatg

SEQ ID NO: 94811 - DNA, 1200 bp, Homo sapiens
ggcataggatggatcctcttaggtaagcaggaaagtgggacatcaacagtaagcagaaggaatggcatgcacttaccaggcactcagcgcaacggacacaaagcctcgccatacacgcctcttcctcctcctgatcagtgctgtaaaaagaggacaaaccaaatctgaatcaccactatcctcaatagagtagagcagttgaaagtacaggtgttgaaatcagacaggtctggttttagattccagttcttccactcactagctgggtgactgggcaaattgtttaagccccagaagcctgtttcctcatctataaaatgcacacattggccaggcgcagtggctcatgcctgtaatcccagcactttgggaggatgaggtgggtggatcacctgaagtcaggagtttgagaccagcctggccaacatgacaaaaccccgtctctactgaaaatacaaaaattagctgggagttgtggcgcacacctgtaatcccacttactcaggaggctaagatggggaatcacttraactcagaaggcagaggttgcagtgagccaagattacaccactgcactccagcctgggtgtcagagtgagtgagactcccatatcaaaaaacaaacaaacaaaaaatgcacatattaccacccacccttaaagcacagttgttaggaataaataaaaaataaatacatgtgaaacacataccatagtgcctggcacataataaatgctcaataaattatccctcattcagaagtgtactgagcactgacaaagtctgagcattgtgctagcctagaggtaaaaagataaataaaacttgagcctgtgaagggctcatgatgggggtgagagacctgttaaaacttaacaaatatgttataatgcagtgtgataagtgttttaatagagttaacatcaaactgctgcagcagcaaagagtgaggagtgactaattgtcccctgaggtctcagggaaactcaagagaaggggctatttcagctgggtcttggaggataagaaagagtttccaggcaaacaagagaaggaaagagggcattcccagcaagtcaaaaggaggggtcttagaggatgagaatgagttaggaaaaatatacgaatgaagtacagtatgttagggcacataaataagttcatggcagctgggacgtggggagatgtcagggaacaatg

SEQ ID NO: 94812 - DNA, 503 bp, Homo sapiens
tacaaagatagacagctttgtttatcatcgagctctccagaaagcaccacagcagtcacagagcactgcagaagaaggttggtggcaatgagcttacccctttctgtgactgttagctctgtcatgggaatattatggtgcacatctgggggattcttcacagcacagctgaatgtcccattgtcctttatggtagggttgcttatacttatagatgcatcccctttgtatacatttccaacccaggaaatccgatcccgaaatgtgcctgctgtggttgggtactggaaagactgataatgaaatatctaagaaagcaacaccatgagagaaaaagttaacttggaaaatgcaatgaaaatataaagctcagtaggtccaaaataaaatacaactgtataayggtgtgttttttttcagttgggcaactttttatgcttttttaacctccatcctataggttaataaaactgatcagaaaaaggcccgatgagagacttctg

SEQ ID NO: 94813 - DNA, 628 bp, Homo sapiens
cttgttgtacgcatcactgttttgcttctcctgtgagctgggccttgygctagattcagttatagaaacaggttagaccaggtgcttgctcctgtggaccttattttctaatgaaggacacaaagaacaagactaaagatatatcagaggtatgagaaagtggtcattgctgcaaagaacaacaaaatattcacaacagctgaatgctgtcatagatggcctgcccaggggcagtggcctgtaagccccccaaggcagcctgtaggagcaggtgctgtttcagctgagacttggatgagtggatggtgatgtccaaggacacatctggggaagagaattccagggagagggaactgcaagtacagaagcttgaggacagatggcactggcaaggtaaggaagggaaggaacgtggccacatagaatcaggaaaaggacgggacagcctcacatgatagaaagcccatccctgtttaattaggggcacagtgaaggtcataggaacaagaaaaacaaagttggctcaggtaaaaaaagaaaaaagaaaaaaaaagaagtcgatgaaacagccagaggaatgaatccattgttaattccctgtgaatgcattgttttctctctggattac

SEQ ID NO: 94814 - DNA, 761 bp, Homo sapiens
taaactgggataatactagaattcgtatgtttcatacctgcattttttacttaaccatatttagtaaatacttcaatatgtaatgaacattttgctgtacatgattataaatatcgtaaaagtacagttgacccttgaacaacatggctttgaattatgcaagcccacttatacatgggttttcttcaatacaaaatacagtgttggccaggcgcggtagctcacgcctgtaatcccagcactttgagaggccgaggcaggtggatcatgaggtcaggagttcaagaccagcctggccaagatggtgaaatccyatctctactaaaaatacaaaaattagctgggtgtgatggcgggtgcctgtaatcccagctattcgggaagctgaggtacagaattgcttgaacccgggaggtggaggttgcagtgagccgagatcgcgccactgcactccagcctgggcgacagagcgagactccgtctcaaaaaacaaaacaaacaaacaaaaaaccagtgttacttttcaataaagtcacactgagtgtgcctgtctccggcctccccttctgcctcctttacctcttcagtctctgccactcctgagacagccagatcaacccctcttcttcctccttctccttagcctattcaatgtgaagacaacaaggatggcttcacaatgatccacttccatttaatgaataggaaatctaatttttcttccttatgatgttcttaataacattccctttactctagct

SEQ ID NO: 94815 - DNA, 1087 bp, Homo sapiens
gtggtaactgccatataagtgtaagttgttgttgttattgttactatgtgctcctttgcaaaataacgtcctttgggattagtcctggtggattctttatttaaggtatttgtcagtttatctgtattttaaagagaggcattgtaaaatggtcagaaagacttcagattcttcctatttaaaatgacaataataatatatacctcctgggttttatgaggatttcatgagataatcattaaagtgttcaacacagagcctgacatactaagactcacagggttaatttcctttctccatccctgcctagatcaggccttctcaaccttggtaccaccgatgttttggactaaataattcttttttttttttttttttttttaagagacagggktttgcttcatcacccaggctgggaatgcagtggcatgatcatgtctcactgcagccttgcatttctgggctcaagcaatcctcctgcctcagcctcccaagtatttaggactacaggtgtgtgccatcatgcctggctaagggactgaacaattctttgttgtggggggctgtcctgtgcattgtaggatatttagtattagcatccctggcctctacttattagacaccagtaagcaccaggtccccaaggtatgacaactaaaaatgcctccagacttgccacatgtttcctggagagaagactcatccccagttgagcaccacactgtcaggtcctgtcacaggatccccggtagacggcgtggttgctgcctctgcttacccacgtgagagtagaaagtacacagcacgtgtatcctagagtacttactaaatgtggtgccaggcagtgggtccaaggtgaacttcttagaaagccttctgtagcagtacccttcagggggtctgcttattttctaattcaattcgtttcagcaatttatttattttctgcagagtcataaggatctgagttcgaatcctgattctcttcctcataagctgtgtggcttcagtagagttacctacctctttaagcctgcttccttattttgaaaatggaagattatagtacctcctgcataggctgttg

SEQ ID NO: 94816 - DNA, 1087 bp, Homo sapiens
gtggtaactgccatataagtgtaagttgttgttgttattgttactatgtgctcctttgcaaaataacgtcctttgggattagtcctggtggattctttatttaaggtatttgtcagtttatctgtattttaaagagaggcattgtaaaatggtcagaaagacttcagattcttcctatttaaaatgacaataataatatatacctcctgggttttatgaggatttcatgagataatcattaaagtgttcaacacagagcctgacatactaagactcacagggttaatttcctttctccatccctgcctagatcaggccttctcaaccttggtaccaccgatgttttggactaaataattcttttttttttttttttttttttaagagacaggggyttgcttcatcacccaggctgggaatgcagtggcatgatcatgtctcactgcagccttgcatttctgggctcaagcaatcctcctgcctcagcctcccaagtatttaggactacaggtgtgtgccatcatgcctggctaagggactgaacaattctttgttgtggggggctgtcctgtgcattgtaggatatttagtattagcatccctggcctctacttattagacaccagtaagcaccaggtccccaaggtatgacaactaaaaatgcctccagacttgccacatgtttcctggagagaagactcatccccagttgagcaccacactgtcaggtcctgtcacaggatccccggtagacggcgtggttgctgcctctgcttacccacgtgagagtagaaagtacacagcacgtgtatcctagagtacttactaaatgtggtgccaggcagtgggtccaaggtgaacttcttagaaagccttctgtagcagtacccttcagggggtctgcttattttctaattcaattcgtttcagcaatttatttattttctgcagagtcataaggatctgagttcgaatcctgattctcttcctcataagctgtgtggcttcagtagagttacctacctctttaagcctgcttccttattttgaaaatggaagattatagtacctcctgcataggctgttg

SEQ ID NO: 94817 - DNA, 1125 bp, Homo sapiens
ccttaacctcctgggctcaagcaatactcccagctaagcctcccaagtagctggaactataggtgcatgccatcatgctggctaggttttttttgtactttttatagagacaaggtcttactttgtttcctaggctggtctcaaatttttggcctcaagtgattccccactttgccctcttaaagtgccagagttacttacaggcatgaggcaccacacccagccccatcaaagaaatttctgaactttactctgaccaaagcaaactgaaccaaccaggagaaattcacatgttgattggcatagcctaggtaactcatccctcraccaatcagtgtagcaacagggctggtgttatcctaattgattggatcaaccatggcctatttctggagtttgggatgcaggcttttctaaccaaattacatggctgctttcaaatggaggaagagatgaatagatgttgaaaagccagatgaatgtccattcatttaatcctcacaacacgctgtgaattagatcccagggagaggtgagaaaaatgacctcagagaagcaacttgctcaagatcaggcagctagtaattagcaacattgggatccaaactcaggtctgtctgacttcaaagtctatgcacttggcctctagactccagtgccccaaatctcagctattgtatgaatctctccagttgcctccaagagaaacctgttcttgggatcacccctagctgttctagggaacaacctgggctcaggttgaactcctttaaaaagggtcaaggaccctccacaaagcccaggctgtgagatcagcttcagaggcctggggacgccagccttaatttggggagcagcaaacacctgcttggggactaagaggttgctgtaaaaccaggacagacagtccctgttcttctatcagtggtcattcatcaagcagttactgagcatctgctctctgaggacccatctgcctgagctaaagcctgaaactctttccagtgtccttgtctagtctttcatttttgtctgtttctttgtcatgcaccccttcttctcttctcctgggctgaactttctggactaatgttggttctttgtctcagacctgcacccagcttt

SEQ ID NO: 94818 - DNA, 1125 bp, Homo sapiens
ccttaacctcctgggctcaagcaatactcccagctaagcctcccaagtagctggaactataggtgcatgccatcatgctggctaggttttttttgtactttttatagagacaaggtcttactttgtttcctaggctggtctcaaatttttggcctcaagtgattccccactttgccctcttaaagtgccagagttacttacaggcatgaggcaccacacccagccccatcaaagaaatttctgaactttactctgaccaaagcaaactgaaccaaccaggagaaattcacatgttgattggcatagcctaggtaactcatccctcgaccaatcagtgtagcaacagggctggtgttatcctaattgattggatcaaccatggcctatttctggagtttgggatgcaggcttttctaaccaaattacatggctgctttcaaatggaggaagagatgaatagatgttgaaaagccagatgaatgtccattcatttaatcctcacaacacgctgtgaattagaycccagggagaggtgagaaaaatgacctcagagaagcaacttgctcaagatcaggcagctagtaattagcaacattgggatccaaactcaggtctgtctgacttcaaagtctatgcacttggcctctagactccagtgccccaaatctcagctattgtatgaatctctccagttgcctccaagagaaacctgttcttgggatcacccctagctgttctagggaacaacctgggctcaggttgaactcctttaaaaagggtcaaggaccctccacaaagcccaggctgtgagatcagcttcagaggcctggggacgccagccttaatttggggagcagcaaacacctgcttggggactaagaggttgctgtaaaaccaggacagacagtccctgttcttctatcagtggtcattcatcaagcagttactgagcatctgctctctgaggacccatctgcctgagctaaagcctgaaactctttccagtgtccttgtctagtctttcatttttgtctgtttctttgtcatgcaccccttcttctcttctcctgggctgaactttctggactaatgttggttctttgtctcagacctgcacccagcttt

SEQ ID NO: 94819 - DNA, 1125 bp, Homo sapiens
ccttaacctcctgggctcaagcaatactcccagctaagcctcccaagtagctggaactataggtgcatgccatcatgctggctaggttttttttgtactttttatagagacaaggtcttactttgtttcctaggctggtctcaaatttttggcctcaagtgattccccactttgccctcttaaagtgccagagttacttacaggcatgaggcaccacacccagccccatcaaagaaatttctgaactttactctgaccaaagcaaactgaaccaaccaggagaaattcacatgttgattggcatagcctaggtaactcatccctcgaccaatcagtgtagcaacagggctggtgttatcctaattgattggatcaaccatggcctatttctggagtttgggatgcaggcttttctaaccaaattacatggctgctttcaaatggaggaagagatgaatagatgttgaaaagccagatgaatgtccattcatttaatcctcacaacacgctgtgaattagatmccagggagaggtgagaaaaatgacctcagagaagcaacttgctcaagatcaggcagctagtaattagcaacattgggatccaaactcaggtctgtctgacttcaaagtctatgcacttggcctctagactccagtgccccaaatctcagctattgtatgaatctctccagttgcctccaagagaaacctgttcttgggatcacccctagctgttctagggaacaacctgggctcaggttgaactcctttaaaaagggtcaaggaccctccacaaagcccaggctgtgagatcagcttcagaggcctggggacgccagccttaatttggggagcagcaaacacctgcttggggactaagaggttgctgtaaaaccaggacagacagtccctgttcttctatcagtggtcattcatcaagcagttactgagcatctgctctctgaggacccatctgcctgagctaaagcctgaaactctttccagtgtccttgtctagtctttcatttttgtctgtttctttgtcatgcaccccttcttctcttctcctgggctgaactttctggactaatgttggttctttgtctcagacctgcacccagcttt

SEQ ID NO: 94820 - DNA, 571 bp, Homo sapiens
accttttattcctgagcatagcaggttctggacatccttagccatttggaggttttcctctagaactggtgcaggaacatctcggactgttgggaaaagtagactcaaaccaccattttgtgcccaaatgtgaagctgtcatcaaactcattagaaagatarataaaacctgccacataacaccagcctcttggacacttgaagcggagagataaggtgtcagggctgatatatgacagcccccaaacccgtaaatttttacagagaactcaggatttttatcctccttcctttatctagcaaataagaccaatacataatgatggtgtttactacggaaagccatgaactcagagaagtcgactgacttaattccaaacctaaaaccacatttcagctgtgattttatctattattttgctccaagatgatttcctgactttttccccctttactgcagatgtatctttggccgtgtgctataattggagtcattaatatgcagcagaaattggctataataaatttttatccctttggtttctgagtcttttctcttgaattatttgta

SEQ ID NO: 94821 - DNA, 571 bp, Homo sapiens
accttttattcctgagcatagcaggttctggacatccttagccatttggaggttttcctctagaactggtgcaggaacatctcggactgttgggaaaagtagactcaaaccaccattttgtgcccaaatgtgaagctgtcatcaaactcattagaaagataaataaaacctgccacataacaccagcctcttggacacttgaagcggagagataaggtgtcagggctgatatatgacagcccccaaacccgtaaatttttacagagaactcaggatttttatcctccttcctttatctagcaaataagaccaatacataatgatggtgtttactacggaaagccatgaactcagagaagtcgactgacttaattccaaacctaaaaccacatttcagctgtgattttatctattattttgctccaagatgatttcctgactttttccccctttactgcagatgtatctttggccgtgtgctataattggagtcattaatatgcagcagaaattggctatrataaatttttatccctttggtttctgagtcttttctcttgaattatttgta

SEQ ID NO: 94822 - DNA, 598 bp, Homo sapiens
aaagaaagaaagaaaaaaggccagatgaacatttttcatttagaagatgaagtagccacttcccaaacccacatagctgagccaaactttttattttaaattcaaattggctcaattatcatggacttttcatttgagttacacacagcattttgtcctccatggccgaactgtctgttttactcttggtggtattcacattcagaaaattgtgcagacctgtcactgatttgtgcttcttccactccagatgtggatgtcagcactgcccatcccctttccaacagggccattccataggcttccaggtctggcagccaaaagcactaacttttttttttttycaccttctgtcacctgagcactcttacaagtcctgggacaccattggcacagtactctacatttaatcgacatcttattccgaaaaaactcttaatccccagggttatctaaatcctaaaatcatattcaaaataaatggaatatgaaaagcttcatatgtaaaagtctttcttcatttctattggagttctgcacatcaaagttgatttgaagttagatgaggccaggttcaaattctggccctgcctattgc

SEQ ID NO: 94823 - DNA, 598 bp, Homo sapiens
aaagaaagaaagaaaaaaggccagatgaacatttttcatttagaagatgaagtagccacttcccaaacccacatagctgagccaaactttttattttaaattcaaattggctcaattatcatggacttttcatttgagttacacacagcattttgtcctccatggccgaactgtctgttttactcttggtggtattcacattcagaaaattgtgcagacctgtcactgatttgtgcttcttccactccagatgtggatgtcagcactgcccatcccctttccaacagggccattccataggcttccaggtctggcagccaaaagcactaacttttttttttttccaccttctgtcacctgagcactcttacaagtcctkggacaccattggcacagtactctacatttaatcgacatcttattccgaaaaaactcttaatccccagggttatctaaatcctaaaatcatattcaaaataaatggaatatgaaaagcttcatatgtaaaagtctttcttcatttctattggagttctgcacatcaaagttgatttgaagttagatgaggccaggttcaaattctggccctgcctattgc

SEQ ID NO: 94824 - DNA, 598 bp, Homo sapiens
aaagaaagaaagaaaaaaggccagatgaacatttttcatttagaagatgaagtagccacttcccaaacccacatagctgagccaaactttttattttaaattcaaattggctcaattatcatggacttttcatttgagttacacacagcattttgtcctccatggccgaactgtctgttttactcttggtggtattcacattcagaaaattgtgcagacctgtcactgatttgtgcttcttccactccagatgtggatgtcagcactgcccatcccctttccaacagggccattccataggcttccaggtctggcagccaaaagcactaacttttttttttttccaccttctgtcacctgagcactcttacaagtcctgggacaccawtggcacagtactctacatttaatcgacatcttattccgaaaaaactcttaatccccagggttatctaaatcctaaaatcatattcaaaataaatggaatatgaaaagcttcatatgtaaaagtctttcttcatttctattggagttctgcacatcaaagttgatttgaagttagatgaggccaggttcaaattctggccctgcctattgc

SEQ ID NO: 94825 - DNA, 598 bp, Homo sapiens
aaagaaagaaagaaaaaaggccagatgaacatttttcatttagaagatgaagtagccacttcccaaacccacatagctgagccaaactttttattttaaattcaaattggctcaattatcatggacttttcatttgagttacacacagcattttgtcctccatggccgaactgtctgttttactcttggtggtattcacattcagaaaattgtgcagacctgtcactgatttgtgcttcttccactccagatgtggatgtcagcactgcccatcccctttccaacagggccattccataggcttccaggtctggcagccaaaagcactaacttttttttttttccaccttctgtcacctgagcactcttacaagtcctgggacaccattkgcacagtactctacatttaatcgacatcttattccgaaaaaactcttaatccccagggttatctaaatcctaaaatcatattcaaaataaatggaatatgaaaagcttcatatgtaaaagtctttcttcatttctattggagttctgcacatcaaagttgatttgaagttagatgaggccaggttcaaattctggccctgcctattgc

SEQ ID NO: 94826 - DNA, 598 bp, Homo sapiens
aaagaaagaaagaaaaaaggccagatgaacatttttcatttagaagatgaagtagccacttcccaaacccacatagctgagccaaactttttattttaaattcaaattggctcaattatcatggacttttcatttgagttacacacagcattttgtcctccatggccgaactgtctgttttactcttggtggtattcacattcagaaaattgtgcagacctgtcactgatttgtgcttcttccactccagatgtggatgtcagcactgcccatcccctttccaacagggccattccataggcttccaggtctggcagccaaaagcactaacttttttttttttccaccttctgtcacctgagcactcttacaagtcctgggacaccattggcacagtactctacatttaatsgacatcttattccgaaaaaactcttaatccccagggttatctaaatcctaaaatcatattcaaaataaatggaatatgaaaagcttcatatgtaaaagtctttcttcatttctattggagttctgcacatcaaagttgatttgaagttagatgaggccaggttcaaattctggccctgcctattgc

SEQ ID NO: 94827 - DNA, 744 bp, Homo sapiens
tatctcagcaccatttattgaatagggagtcctttccccattgcttgtttttgtcaatgttgttgaaaatcagatggctgtaggtgtgcagcattatttctagattccctattctgttccagtggtctgtgtgtctgtttttgtaccagtaccttgctgtaaaagctctatttttatatttttcttcctgaaaatcccattcttttcttctcttcctccctttcttatacaaaattttaaaaacactttcagcatcttgactgtagctctttctttttctccctttagtatttttccctcactatagtctctttatatattctcttatgcaaatgcttcttgtctctttttcgtaatgatagctaacatttttgatgcttactgtttttcagggactacgctatgtatttcacatgcrttctctcaataacagtaacaatcagtcaataacaatctcattatccctattttcagatgaagaaactgaggctttgagatgtcaagtgacttgtctgtagtcacagagctcccaagttttagagctgtggtgagatcccagatctatctggctgtgaccaagcctcccaagccatgttcttaggttctgtgctgtgatatatgtccagtataaaacatttgaaagaaacataaaagtagaaatgtgctttttaaagcgctcataatctccatacccacaaaggacccaaattaaaacttcgctatctttctcttcagtgtgtttta

SEQ ID NO: 94828 - DNA, 744 bp, Homo sapiens
tatctcagcaccatttattgaatagggagtcctttccccattgcttgtttttgtcaatgttgttgaaaatcagatggctgtaggtgtgcagcattatttctagattccctattctgttccagtggtctgtgtgtctgtttttgtaccagtaccttgctgtaaaagctctatttttatatttttcttcctgaaaatcccattcttttcttctcttcctccctttcttatacaaaattttaaaaacactttcagcatcttgactgtagctctttctttttctccctttagtatttttccctcactatagtctctttatatattctcttatgcaaatgcttcttgtctctttttcgtaatgatagctaacatttttgatgcttactgtttttcagggactacgctatgtatttcacatgcattctctcaataacartaacaatcagtcaataacaatctcattatccctattttcagatgaagaaactgaggctttgagatgtcaagtgacttgtctgtagtcacagagctcccaagttttagagctgtggtgagatcccagatctatctggctgtgaccaagcctcccaagccatgttcttaggttctgtgctgtgatatatgtccagtataaaacatttgaaagaaacataaaagtagaaatgtgctttttaaagcgctcataatctccatacccacaaaggacccaaattaaaacttcgctatctttctcttcagtgtgtttta

SEQ ID NO: 94829 - DNA, 744 bp, Homo sapiens
tatctcagcaccatttattgaatagggagtcctttccccattgcttgtttttgtcaatgttgttgaaaatcagatggctgtaggtgtgcagcattatttctagattccctattctgttccagtggtctgtgtgtctgtttttgtaccagtaccttgctgtaaaagctctatttttatatttttcttcctgaaaatcccattcttttcttctcttcctccctttcttatacaaaattttaaaaacactttcagcatcttgactgtagctctttctttttctccctttagtatttttccctcactatagtctctttatatattctcttatgcaaatgcttcttgtctctttttcgtaatgatagctaacatttttgatgcttactgtttttcagggactacgctatgtatttcacatgcattctctcaataacagtaacaatcartcaataacaatctcattatccctattttcagatgaagaaactgaggctttgagatgtcaagtgacttgtctgtagtcacagagctcccaagttttagagctgtggtgagatcccagatctatctggctgtgaccaagcctcccaagccatgttcttaggttctgtgctgtgatatatgtccagtataaaacatttgaaagaaacataaaagtagaaatgtgctttttaaagcgctcataatctccatacccacaaaggacccaaattaaaacttcgctatctttctcttcagtgtgtttta

SEQ ID NO: 94830 - DNA, 850 bp, Homo sapiens
tttactataagagatactccaaaagaagggaaggatgaatattggcaaggtactaaaaaagaggaatgcaaatgagtgtgtgtgtttgtgtgtgtgtgtgtgtgtgtgtgtatgtgtgtgtgtgtgttgatttgctgtggcatttgatggtggtgtgaccctgtaattcagggcttctgagaggagccaagctcagagatgaggataaataaacaaggaatggcaaaaggcatgggcccagtaggcatggcatccccattagcaaccaaggtcttctttgagtgcatcaggtttaacccatccaaaaacttcatttgttgattcactgatttatctacttactcactcacatagtcatcattgctagccactgtaatatatgctgcatctgtggatgaagcaaagtggcattgccccaccttactctggaagtgacaagagaccacaagaactggaggtcccaatttgcatgatgatcacattcctcccaaagtccarttgtagtgctagatgctaaaacaataataatcagaggtataccttgttaactatatcataattacttataataaggagaaggattagaacatcgtctgtcatattctctactactgacttaatctatgtaaacgacaaagagtaaatagatctgcacataccttgcatgtggcaatagtggcgctgcagctttagtctacctctatattttaaatattagatatcactcttgtatgaggccttaatatatttgtgtttcggtgcctctttaaaggttgtgtgtttctctagaatatggctgtatcttaaaatattttctcagtatctgtcactgttcttgacactttatgca

SEQ ID NO: 94831 - DNA, 561 bp, Homo sapiens
taactataatgagggagcacatatgatatgtgcagaattttcggaatgactaggatagatcagagacaaccagagggttaggctaaaaactaaagcaggctagaaaataaggcaaatacacatatactccgaacataaagccaaagataaattgctttaggaaaggtataacccaatgtgctctaggaccttagaagtgggagcagttgctttcatttgtaaggattagggtgcgtgagatcaagtgagacttcttggagcaaatgacaattaattcaagccctaaaggaagaatagaataagaggtgagggaaagtctgagagcaaagttgcaaggcttatcaggaccatatatttacaaagtaaagtgaatastggggtttgattaggtgacgcttaagtggaaaaccacagtgagaaataggcgttggaaagcaaagtgcaacataataacaaagtgccataaatgttatgcctaataaatttagactttattccctaagcagtagggagccaatgcacgtttcacttgtccctctaacattcatttgacacttaaaa

SEQ ID NO: 94832 - DNA, 528 bp, Homo sapiens
gcaacctttattcacaaaatacccttccctctcccccaccactatccctacttccattccaaaggaacacattacattttggtttctcagaggaagctaacgctggaaaaccaagttagaatataaactttttagaattctcaaatttctacaccaggaaattccagcacagcgacagcagtccccagcccccagtttatgcatttcgttttctakccccagctccttcttacctcatgagagccctgagtgcatgcctacaatactacaacttgtacacctaaactccacctactttttcttcaaatagttgccctttggtcacttttgagcctagggttattcataaagctggcactgtcaacccttagaggtatgaactgtggagaaaggttcacatatctactggagtgaactgcggccctctggtcaaggaattcctgattatgtctgttggggtgaatgagagtaaagcctctctgggatcttgtagactttccatgaagtgatcacttaaatgctaactat

SEQ ID NO: 94833 - DNA, 676 bp, Homo sapiens
gactgccagtcaagttgggggcagggtgggacctggtaaagatttgagtttggatgcaatagtctgagttattgttgcgacactgtctcagtctcttttatactgctatggtagaatactacagattgggtaatttgtagtgtagaaatgtatttcttatggttctacaagtgggaagtctaatatcaagccaccgccatctggtgagggcctccttgctgtgggatgacggaagatggaagggcaaaaggaatgaacacggagtccttacatggcagcagagtggaagagcaagctagccaaatgctgcacaaagtcccttttaaaaggcccttactcttactaaaaaaggaggagctctcatgtctaaaaattcagacaggtacgagggctaagaccctccagactatcatggagggtaatagtgagacgaagttagaagcaaaagggaagtgagtgtattctggtcatttcattttgtgttgttataatctcctttgagagcaggcagtgtatttacacacttgcttcatttcttgaacaatgtcaaacactgtgctgttatttcagtatatagctagcaaaatcaatcartggatgactggatgaataattgtgcaaatttaatttatttcatcactattcattgctcaggtacatatggaagatgttgtta

SEQ ID NO: 94834 - DNA, 973 bp, Homo sapiens
tgcatacactcacaatacagcacggtgagtgcagtcccatctactggagacataggaacccagggacaccttatattgaactaacaggagtcaacgagtatttttatyggttacttacccatctgacctccccagctagactgtagttctttaagtactgagattgcgtcttattcttctgagcatgcactgggcctctactggtccttgagcagatgaaaatgagtgaatatctactttgcatctggagaaggggcagaaattccatcagcctgacttccccagtcaagatgtggtagaattgggaatgggagccaggtccagccgcaatctgtgcatgctgttcccctccactccctaggaattttactcgacaagggattgtcccccttggggtcaaatgctacaagggtcacagaaaagacctaaagcagattttttttttgtcctcaaacttcgcccaggctggggtgcagtggcaagatcagggttcactgcaaccttcacctcccaggctcaagcgattcttgtgcctcagcctccaggttagctgagactatagctctgtgccaccacacctggctaattttggtatttttagtggagacagggtttcaccatgttggccaggctgttctcaatctcctgacctcaagtgatccacccgcctcggcctcccaaagtgttgggattacaggcatgtgccaccgtgcctggcctaaagcagaatttctaagagttggagatctctaagagaaaataaagtatcacacccatgaaacaattagaagacaaggaaagacaaaagtagatcaagtgcagagacatctaggaagaggtgagaagcaggagatcacccaggcgggtgatctaaagcagggcattgaaggaatgttgatgtggggaggcaagaaggaaaggaaagtgtcatcccaggcaagagtacaccaatagcaggaaagacaacaatgca

SEQ ID NO: 94835 - DNA, 1117 bp, Homo sapiens
aaacaggaagcttcagcttcccaagaaaccataagctagttggcttcaacaacagctgcttcaacaaaactgtgaagttccacattagggtttccatcttcaacaaacccaagggaatcgaaaatatgtaaaattggcttttaataatgcacagaactcaggagaaatcaaataccccacggagtcccttagcttctacttacccagtaacactggcagcaggatgagtttcagtgggcaaaacatgctgctctcaactttcaaatcttaagataaaagaacaaaaatcacaaaatcatgtcaagagaagctcattaatttaaaaaaccaatagtgaaggactatacggagcagcctctgtttgagacactggtatgcagcattgaacaagaaaaacagacgaggtcccagctcatttgcagtttgtatgcagcgggaggtggagaaaaaagaagcaaataaatgaatgaatgaataagaaaataccagatgtcaataagtgctatgatgaaacaaaacagagtagtgtttgaagagtcacttgggggctgctttagattggccataagggaagattagatgaaagttgcttttcaagagaaaaaaagcaaatgattgcaggatgcccttgagatgacaaccctagattttccactacctgtatgtttcacacaaacaaaaaattataggatatccagcctgaaatttttccccatctctccacctaaattagaattactacttttttgggaggaagaggttgggggagggaacagattctcactctgttgcccaggctggggtgcagtgacgtgatctccagggctcaagcaaccttcctgtctcagcctcctgagtagccgagactacaggcatgctacaccacacttgctattttttttttttaagtagtagagaggtctcactgtgttgcccaagctggtctcaaactcctgggctccagtgatcctccacctcagcctctcaaagtgttgggattacaggcgtgggccactgcacctggcccatggtgcactttttatcttatttttytttttaactttttaaaggcagggcagtgtggctagaatgagagttgggctgtgcattggacaaa

SEQ ID NO: 94836 - DNA, 644 bp, Homo sapiens
aatgaggggactgaggtacagagaggttaggtgacatggcctctggctaccttagctctgtagaaggccagggagaggcacagggctgggtgcagggcccacggctcctgccacaattctccccctactcttgctcctctcctcaccactgtcccttctctctccctctccaggaaggagtgtctcgtgagctcctcggggaatgacmacacggagaacggcttgcctggctccaaggcagaggagaaaccaccttcaaaagtgtgaccactgcttcgggctgagcagctgcagggagccccctttcatgatgatgaaactgatgcttgagccccgaccgtagaacccacgtgcctgagacatctgctgcttggctcaaactgtagtctttccgggcacaagaaaccagagtcctgcccagcctgcccatccccttcccagtcagggctccccagggacaagggatggccaggggagggggtctgtggaagattcaggagaaagaaaggagaggctagggtggtgtggaggggctggtcacctgacacctgggcagatggggtctccttcagtctccctaccctgcacaagcagggccttgattttcctccaggcttctcttcacaagagactgggaggatccg

SEQ ID NO: 94837 - DNA, 644 bp, Homo sapiens
aatgaggggactgaggtacagagaggttaggtgacatggcctctggctaccttagctctgtagaaggccagggagaggcacagggctgggtgcagggcccacggctcctgccacaattctccccctactcttgctcctctcctcaccactgtcccttctctctccctctccaggaaggagtgtctcgtgagctcctcggggaatgaccacacggagaacggcttgcctggctccaaggcagaggagaaaccaccttcaaaagtgtgascactgcttcgggctgagcagctgcagggagccccctttcatgatgatgaaactgatgcttgagccccgaccgtagaacccacgtgcctgagacatctgctgcttggctcaaactgtagtctttccgggcacaagaaaccagagtcctgcccagcctgcccatccccttcccagtcagggctccccagggacaagggatggccaggggagggggtctgtggaagattcaggagaaagaaaggagaggctagggtggtgtggaggggctggtcacctgacacctgggcagatggggtctccttcagtctccctaccctgcacaagcagggccttgattttcctccaggcttctcttcacaagagactgggaggatccg

SEQ ID NO: 94838 - DNA, 644 bp, Homo sapiens
aatgaggggactgaggtacagagaggttaggtgacatggcctctggctaccttagctctgtagaaggccagggagaggcacagggctgggtgcagggcccacggctcctgccacaattctccccctactcttgctcctctcctcaccactgtcccttctctctccctctccaggaaggagtgtctcgtgagctcctcggggaatgaccacacggagaacggcttgcctggctccaaggcagaggagaaaccaccttcaaaagtgtgaccmctgcttcgggctgagcagctgcagggagccccctttcatgatgatgaaactgatgcttgagccccgaccgtagaacccacgtgcctgagacatctgctgcttggctcaaactgtagtctttccgggcacaagaaaccagagtcctgcccagcctgcccatccccttcccagtcagggctccccagggacaagggatggccaggggagggggtctgtggaagattcaggagaaagaaaggagaggctagggtggtgtggaggggctggtcacctgacacctgggcagatggggtctccttcagtctccctaccctgcacaagcagggccttgattttcctccaggcttctcttcacaagagactgggaggatccg

SEQ ID NO: 94839 - DNA, 644 bp, Homo sapiens
aatgaggggactgaggtacagagaggttaggtgacatggcctctggctaccttagctctgtagaaggccagggagaggcacagggctgggtgcagggcccacggctcctgccacaattctccccctactcttgctcctctcctcaccactgtcccttctctctccctctccaggaaggagtgtctcgtgagctcctcggggaatgaccacacggagaacggcttgcctggctccaaggcagaggagaaaccaccttcaaaagtgtgaccactgcttcgggctgagcagctgcagggagccccctttcatgatgatgaaactgatgcttgagccccgaccgtagaacccacgtgcctgagacatctgctgcttggctcaaactgtagtctttccgggcacaagaaaccagagtcctgcccagcctgcccatccccttcccagtcagggctccccagggacaagggatggccaggggagggggtctgtggaagattcaggagaaagaaaggagaggctagggtggtgtggaggggctggtcmcctgacacctgggcagatggggtctccttcagtctccctaccctgcacaagcagggccttgattttcctccaggcttctcttcacaagagactgggaggatccg

SEQ ID NO: 94840 - DNA, 635 bp, Homo sapiens
agacaccagagaaggaactattctctctggactcctacagccagggctacccggctcacctggaaacctgagaagcgcatctcttctaatgaagaacaagaagccgttctggagataatttaggctgaaaagcagcttcaacttctctattatcactcaagccactttcagtccgtatgggagaggtaattttaagtgaatgaagagagagaggggagatgggattccatttgaccatcctgtctacatttctgaggaccagggagtgccgcgaaaccagcagggggcagcaggagctcagcaagacgccaatccgaagggctcctggcctttccggggggcggagcagaataacccccacaaacacccsacccaagccccaagcaggagctctgcgcctgccctgtcggggtcccttggcctttgatctcatgaccatttgccttctgaacatactttctttttttctattttggcctaagtcagaactaaaaaaaaaaaaaaaaaattcaaggtttaagctagaaaagaaaccatatgttttggtctcaggggaaatattttccttgtatttcctgctttaaaagttgattcttctcactgtcaaataattcagataatacagaaagtagaca

SEQ ID NO: 94841 - DNA, 622 bp, Homo sapiens
caggcccctttctgtgacagtcagggtcctttgagctgctgcgtcttaatgacagctctcccaagaacccattaagctgggtattcctagggagagctggagcagggactcaggcccaggcagaggtcagagcccaagccctgtccccgaaggaaatgtgtcccatgctaactactccatagctgaggcctggagggaagtcagggaccctgggactggttatcctggccttgactcattactgttccggagacctaaacgcaccctgagccaccagacgtgggtgttaacacctgaggtcaaccccctgacgcttccggctgctctggaggaagctggtcctccctcccacctcctgttttccgtgccagcctggtacagagtcaaggggcttggctgggcttggctgggctcagaaacgtggcagtcaggagccagcctgcrggcagcggggtgctgggagcactgcagggtccaccctgactggggcacagaatccagaagcccactcggccctggcagtgccatcctaggctctgaggtggtaaactgagctgggcagtgggaaggtcctaaagggcaagacaggcaaggaggggctgcttgctttgcctgctctcct

SEQ ID NO: 94842 - DNA, 716 bp, Homo sapiens
  misc_feature (1)...(716): n = A,T,C or G
agtctgtcttggtaggcctgttatttgaagtctagtggaccagaaagagatacatcctgttaatatgttaaatacaggattaagcctaatactaagactgcatagtatcatttcaatatgtttgtgttaaattggtcaacagtagggtgggtgtctatgcttgaaacaaacatttctgcttcttgaatcttgctttgatttttttaatttggtctctaaatgtttttaaattatgttatctttcaaratgtacatggtacagaaataaatttcaaaggatgtatgtggaaataaactctcccctccagcgtgaatccgtgggttctctgcaccaattttctactaagagattttagtgcccttcaaagtattttctattcctgttcttttcccatgtgtagtacacnataggtaattaatatttgaataaatacacaaatgtgtatgtatgtgtgcatattacatacgtgtatgatgtttaaaaaatagaatctgttctggccttatttttgtttttgttgtgtgggtgtgggcatgggtatgtatttatgttcactttaaagatacttccagaatatataggtctacttttaatgtataagagcctccaagcattccataactatgatattgtttaatcagtcccaattattgggaattttgatagtttctgattttcaattgttacaaataatgctgccacaagcatcttgtat

SEQ ID NO: 94843 - DNA, 716 bp, Homo sapiens
  misc_feature (1)...(716): n = A,T,C or G
agtctgtcttggtaggcctgttatttgaagtctagtggaccagaaagagatacatcctgttaatatgttaaatacaggattaagcctaatactaagactgcatagtatcatttcaatatgtttgtgttaaattggtcaacagtagggtgggtgtctatgcttgaaacaaacatttctgcttcttgaatcttgctttgatttttttaatttggtctctaaatgtttttaaattatgttatctttcaagatgtacatggtacaraaataaatttcaaaggatgtatgtggaaataaactctcccctccagcgtgaatccgtgggttctctgcaccaattttctactaagagattttagtgcccttcaaagtattttctattcctgttcttttcccatgtgtagtacacnataggtaattaatatttgaataaatacacaaatgtgtatgtatgtgtgcatattacatacgtgtatgatgtttaaaaaatagaatctgttctggccttatttttgtttttgttgtgtgggtgtgggcatgggtatgtatttatgttcactttaaagatacttccagaatatataggtctacttttaatgtataagagcctccaagcattccataactatgatattgtttaatcagtcccaattattgggaattttgatagtttctgattttcaattgttacaaataatgctgccacaagcatcttgtat

SEQ ID NO: 94844 - DNA, 564 bp, Homo sapiens
cattcattatgcttgcatatgatactttctatcttggtactttcaagctttaactacattgttgtttacttgcatattctctgcctcctagctacattttaatcaccttgataacagagaacacgtttctttccttaggtgctcaagaaatatttgttgcatgcagttaggaggaagagacatgaagaacagtctcagttaggtagttacatcctactccttttttcgaagacctgctgagaaagaccttagacttgcaataggaactttgggaaatcagagcaaagacaaccagcatcatwttatcttactagagagaaagaaaaattgaatgaagaactgtgtgacatatatacaaaggaaaggtaatggcaaataaagtacaccagagagcatcaattcaaggaaaatatttttacagaactttgataagacatctgccaatttaatagtaaagacagaatgaaatttgtaacagaactctatgctgtttgcaaatgctgtcagctcttaaggagaactagctaccttgagtggacatgtaattattttaggcaagatctc

SEQ ID NO: 94845 - DNA, 564 bp, Homo sapiens
cattcattatgcttgcatatgatactttctatcttggtactttcaagctttaactacattgttgtttacttgcatattctctgcctcctagctacattttaatcaccttgataacagagaacacgtttctttccttaggtgctcaagaaatatttgttgcatgcagttaggaggaagagacatgaagaacagtctcagttaggtagttacatcctactccttttttcgaagacctgctgagaaagaccttagacttgcaataggaactttgggaaatcagagcaaagacaaccagcatcatattatcttactagagagaaagaaaaattgaatgaagaactgtgtgacatatatacaaaggaaaggtaatggcaaataaagtacaccagagagcatcaattcaaggaaaatatttttacagaactttgataagacatctgccaatttaatagtaaagacagaatgaaatttgtaacagaactctaygctgtttgcaaatgctgtcagctcttaaggagaactagctaccttgagtggacatgtaattattttaggcaagatctc

SEQ ID NO: 94846 - DNA, 691 bp, Homo sapiens
  misc_feature (1)...(691): n = A,T,C or G
tggaaaagaagaaaaaaaaagacgttaggcaaatactaaggacatctcaataaagtatggacttcaggtactaataatatagtaatactggttcactaattgttaaaaattcatcatactaatataagatattagtaatagggaaaactgggtataggagctcttatagtatctttacaatttttcagtacattttacattgttctaaaataaagtttatttgaaaaaataattagaaactaagaaatttaacatgaaataatagtacattcaattgcaataaagaatgaacaaatacacattttgcaaacctgacaaagtaatcttaaatatatacatacatgtttataactacagatacatgtatattatatataaattattattacataggtactaaatataacactacatataatgcatatatgatatctatcatatgtgtgggtgtgtgtgtgtgtgtatatatatatatatatayatatatcagagggaaaattatataaaacatgaaaaacataatttgcttaatcacttatacagaaaggagacaatatcctagtaaagatatagaaaatatcacacagagtnnnnnnnnnnnnnnnnnnnnnnnnnnnnnnnnnnnnnnnnnnnnnnnnnnnnnnnnnnnnnnnnnnnnnnnnnnnnnnnnnnnnnnnnnnnnnnnnnnnng

SEQ ID NO: 94847 - DNA, 668 bp, Homo sapiens
gtacttcctggtaaaaatgtactccgagctcactcattcagaatctaatttacacattgatttgtacactttacaatcagttaagtatagtagtgcaacagaagaattattcaaatttcactatgaatatctttatctctgggtttcctggaaaaacagaagccagtacatggggctttctcacttaatctaggtggggtgtaaccttgaactcagcttcccacagagtcagcttccagataattggcagctggcattcccagaatacttctgtaaaaactggcatctaatccagaaakggggacaaagggttaggagagcagtccgaaaagtttcttggggaaggccttgcaagcatgagtagaaaaaagaatggggtcagtcattttagacagagagggtaatatggtttggatgtgtgtcctctccaaatctcttgtccaaatgtgtttctcaatgttagaagggaggctgttgggaggcgattggatcgtcaaggcgcatctctcatgaatggtttagcaccgtccctttggtgataagtgagttctctctcgattcatgcaagatatgattatttaaaagtgtgtggcacctctcccttttctctcttgctccttcttttaccatgtgatacaacagcttccccctttgccttctgccatgat

SEQ ID NO: 94848 - DNA, 1142 bp, Homo sapiens
  misc_feature (1)...(1142): n = A,T,C or G
ctttaatttttttctatcccttcctcaattacagaccctttaaatacctaatttctaaaagctaattcttttccatcttttctttcctgcacaatctagatcttctctcttcaatattatagccatttgctgctgcatnnnnnnnnnnnnnnnnnnnnnnnnnnnnnnnnnnnnnnnnnnnnnnnnnnnnnnnnnnnnnnnnnnnnnnnnnnnnnnnnnnnnnnnnnnnnnnnnnnnntccagactcattatgtctcagagaatactcagtcttatcctgctagctccaatgtgtttttcatgtggagaaggtttctaacctgtaaattctctttctctaagtcatattgcactgtggtaaatgtntgcaacaaaaaagctacatccctattcctaactttcttccctcccctaaatcatcacagcattctgctgtgttgttttcaacagctttggaacaggaatatatgaaataacattaaaatttaaaaaaaaacctaaatcatatcactgttgagatgggctagcaatattgaaagctgttggtgaattgtcatctgtgggatgaaatgtaatttcttgatctgaactgttttgatattaaatttctcatattaaaacgagtatttttgtgctcaaaaacatccactaattatcattttggctattaaaatgacacaactaaagaagaaaagcctagaaattattgtttatactgtttggatatggaattaaaaatttgcaggtcttcttgcttgaaaaatataatactttctaaacatgtcataaaactgagaaactaaatatattttatttttaaaatctctatttcatgtttaaaaaggacaagtggaagaataggttatcctctgtagggtcataatatcttaaatttgaaagattttaagttataatgtatayagaatgaaatactaacatcttaagtgtaccatttaatcagttttgatgaatcatatgttgaaggtacattcaactcattttgatgaataataggaagaaacgtaacatttctcatgcctcttcctatacaattctcctcctagataatttcaccatagtctgattttgcctattcttcaatttcatattaataggataagagagcctgtatatttcggtgt

SEQ ID NO: 94849 - DNA, 1072 bp, Homo sapiens
taggtattagatctcaagggaagaatacaagttgatggcagttccacaaagaaggaatgagaatcatgcttggagtccattagatcattgatacatatctcagtacttccatatccacaaatagtggcacatgaaaaagtgcagtcctatgaagaatgccacaaggaactgtaagcttgagacaattaaggttatcccaccagattaaatagctctagcagctaagttctgacagaaggccaaaggaatggaaaaaagtaagtggaatgatgatccatgattatcagcctaatttttgtgaccagctacagaggcagggacaatcacagtgggttattggcttaaaccattttctctactctaaccgtatcctcacacacaactttctctctgactcctttctctctttctctctgtctctcttttactcttcctttcctttccttttttcttctttctttctttctctctttctttcttctcactctttcacccagacttgagtgcagtgattcaatcataactcactgcagcctgaatttcctggcttaaaggaatcctcctgccttggcctctcaaggtgctgggattacaggtgtcagccaccattcttggctcagctttcttatatgtagagcacagacggtggctagtttcataatgagatttcaatgatatcactgaatatcactgaagtgaacaccctgcagtgacacagtgactaacatgactgttttctctttgtggtaacatagattgtatgtatgtttctcacttaaagaaagacactggtagtggtgggtggcaaaattgataccagatctattctttgctattcaaaagactgcttttacttttgtaggctcaggagaggcaagaacagagattttaggctattgatttccctcaccttctccctgacagatcatgggacagtagtgccttgatagggacagtggctgtgttgctctaccaatgaccacggtttccctcagatgattaaactctcctggccacaacttccagaaagtcttctcccttccactgtccttttggtcatccasttgagtga

SEQ ID NO: 94850 - DNA, 767 bp, Homo sapiens
tgatgtttatactgaaatatctccacagtaaaatttttaaatgaaattttgaataacaataaaaagttaaagatgagcaaaatattatgacagattatgccaatagtttaataagtaaaaggtttgatttttgatgagaaatagtgtaaagaaatgaactaagcataatgctcaaaaagattgcctttaaaaaagaagcactagggaaattatgaataattaaataattcagataaaggtaaaacmaagcaaaaagtttgtaaaaaggaaaatagtgaggttgtcttaaaaatccaaaaatttattctaaagacattaataaccaaaacccaaaccaaaaaaaaaattcagtcttcccttccactccaacttcaagtcatttgtctctgcatttgcaaagaggccactggcaaccatagacaaataatatagcttatgtgcagtttatatgaggctttgctgtgctttttgtaaaaataggtggtccaaggtttctattccttacaacaaggcaaatgatagaaaattagcatcaggcagcaaatcatgaaatgaaattgtacttcaaaaacctgtgaactcccaaaggatgaaaattcatcatcagacttgcacgactttgccaggtcattctgaaacccaaaagaaaagaaagagctgaaggagcactttgagtctcactgcccttcagggaaagagaatgcagagcctggacagcagaaatcagaggatctgcagcaggggcctggagactttgctgctccggc

SEQ ID NO: 94851 - DNA, 849 bp, Homo sapiens
cacttaactggttagawgccagaaaacagaaagaatgagtatgagtaaattctctccccagactccaaaggcaggtggggcttatcactcatgtggatataaattatagaaccaaattattgtactgagccctcatctacataactgcaagcagtctagtcccttcctcaagcaggagtactgaaaccttgcacaaatccatcttcattgccgttcagcagctttttctccaagtcattgcttcaggtttctctgtccattacctcagatttctcatagatgctatcaacactgctttgacgctcctctgtgttctttccctcaaagtgctgatataaatatctccatttatggctctaagcacagctaatacagaactgtaatatttttaagacttgactgaagtttaggggaaaagaagctacaagaattaaaggggaaattaaaattacactatgataagcaactttcccagaatacagtggccagtctctccaaaggggcccaaatagtcatccctatttttcaacgtcttgcggggtaacccgggctcactgaccaccaggacaggagccatttccagttgttttccttccctcttattcaggtaactcatcccaactctctggccacaagcagaggaataaaaatcttgctaacttcatgacatcctctccaaatatatatatgaagacagccttatttaattattaaacagaatatctaacacataagtctgaagtatctgaatttagattatttcccctaagtttaagaattcttaaaaatgatgggtgctatctgcctcaaagctgcataaaagcaatgcttaaaaaggtgaccctttct

SEQ ID NO: 94852 - DNA, 849 bp, Homo sapiens
cacttaactggttagaagccagaaaacagaaagaatgagtatgagtaaattctctccccagactccaaaggcaggtggggcttatyactcatgtggatataaattatagaaccaaattattgtactgagccctcatctacataactgcaagcagtctagtcccttcctcaagcaggagtactgaaaccttgcacaaatccatcttcattgccgttcagcagctttttctccaagtcattgcttcaggtttctctgtccattacctcagatttctcatagatgctatcaacactgctttgacgctcctctgtgttctttccctcaaagtgctgatataaatatctccatttatggctctaagcacagctaatacagaactgtaatatttttaagacttgactgaagtttaggggaaaagaagctacaagaattaaaggggaaattaaaattacactatgataagcaactttcccagaatacagtggccagtctctccaaaggggcccaaatagtcatccctatttttcaacgtcttgcggggtaacccgggctcactgaccaccaggacaggagccatttccagttgttttccttccctcttattcaggtaactcatcccaactctctggccacaagcagaggaataaaaatcttgctaacttcatgacatcctctccaaatatatatatgaagacagccttatttaattattaaacagaatatctaacacataagtctgaagtatctgaatttagattatttcccctaagtttaagaattcttaaaaatgatgggtgctatctgcctcaaagctgcataaaagcaatgcttaaaaaggtgaccctttct

SEQ ID NO: 94853 - DNA, 849 bp, Homo sapiens
cacttaactggttagaagccagaaaacagaaagaatgagtatgagtaaattctctccccagactccaaaggcaggtggggcttatcactcatgtggatataaattatagaaccaaattattgtactgagccctcatctacataactgcaagcagtctagtcccttcctcaagcaggagtactgaaaccttgcacaaatccatcttcattgccgttcagcagctttttctccaagtcattgcttcaggtttctctgtccattacctcagatttctcatagatgctatcaacactgctttgacgctcctctgtgttctttccctcaaagtgctgatataaatatctccatttatggctctaagcacagctaatacagaactgtaatatttytaagacttgactgaagtttaggggaaaagaagctacaagaattaaaggggaaattaaaattacactatgataagcaactttcccagaatacagtggccagtctctccaaaggggcccaaatagtcatccctatttttcaacgtcttgcggggtaacccgggctcactgaccaccaggacaggagccatttccagttgttttccttccctcttattcaggtaactcatcccaactctctggccacaagcagaggaataaaaatcttgctaacttcatgacatcctctccaaatatatatatgaagacagccttatttaattattaaacagaatatctaacacataagtctgaagtatctgaatttagattatttcccctaagtttaagaattcttaaaaatgatgggtgctatctgcctcaaagctgcataaaagcaatgcttaaaaaggtgaccctttct

SEQ ID NO: 94854 - DNA, 849 bp, Homo sapiens
cacttaactggttagaagccagaaaacagaaagaatgagtatgagtaaattctctccccagactccaaaggcaggtggggcttatcactcatgtggatataaattatagaaccaaattattgtactgagccctcatctacataactgcaagcagtctagtcccttcctcaagcaggagtactgaaaccttgcacaaatccatcttcattgccgttcagcagctttttctccaagtcattgcttcaggtttctctgtccattacctcagatttctcatagatgctatcaacactgctttgacgctcctctgtgttctttccctcaaagtgctgatataaatatctccatttatggctctaagcacagctaatacagaactgtaatatttttaagacttgactgaagtttaggggaaaagaagctacaagaattaaaggggaaattaaaattacactatgataagcaactttcccagaatacagtggccagtctctccaaaggggcccaaatagtcatccctatttttcaacgtcttgcggggtaacccgggctcactgaccaccaggacaggagccatttccagttgttttccttccctcttattcaggtaactcatcccaactctctggccacaagcagaggaataaaaatyttgctaacttcatgacatcctctccaaatatatatatgaagacagccttatttaattattaaacagaatatctaacacataagtctgaagtatctgaatttagattatttcccctaagtttaagaattcttaaaaatgatgggtgctatctgcctcaaagctgcataaaagcaatgcttaaaaaggtgaccctttct

SEQ ID NO: 94855 - DNA, 849 bp, Homo sapiens
cacttaactggttagaagccagaaaacagaaagaatgagtatgagtaaattctctccccagactccaaaggcaggtggggcttatcactcatgtggatataaattatagaaccaaattattgtactgagccctcatctacataactgcaagcagtctagtcccttcctcaagcaggagtactgaaaccttgcacaaatccatcttcattgccgttcagcagctttttctccaagtcattgcttcaggtttctctgtccattacctcagatttctcatagatgctatcaacactgctttgacgctcctctgtgttctttccctcaaagtgctgatataaatatctccatttatggctctaagcacagctaatacagaactgtaatatttttaagacttgactgaagtttaggggaaaagaagctacaagaattaaaggggaaattaaaattacactatgataagcaactttcccagaatacagtggccagtctctccaaaggggcccaaatagtcatccctatttttcaacgtcttgcggggtaacccgggctcactgaccaccaggacaggagccatttccagttgttttccttccctcttattcaggtaactcatcccaactctctggccacaagcagaggaataaaaatcttgctaacttcatgacatcctctccaaatwtatatatgaagacagccttatttaattattaaacagaatatctaacacataagtctgaagtatctgaatttagattatttcccctaagtttaagaattcttaaaaatgatgggtgctatctgcctcaaagctgcataaaagcaatgcttaaaaaggtgaccctttct

SEQ ID NO: 94856 - DNA, 606 bp, Homo sapiens
ctgtggcatcaccccccaagacccagggtttatacactataggtaaatatggtgcagaagggatgtgtggtacaattgtagtatgataacatcaagtttgctttgacctaaggtcyggaattatggtacgtacatgctcttacacaaggaaaaatagataaactggacatctgagaggccatcctgaaactggggttaatcagaaaccaatatggtggattagcatccaagatggagttgcattaacctccacatctttctctaagcttccacctatataaaatagctaaaatattaagcctagctatctaaggctgttatgaagaacaacaaatagcgaagattaaaatgtcttatgaaaaggaattcgactgcaaaggtagtgtgtggcttaatgaaagtaagatgaaggacccttgccttagtccattttctatcataatgagctagaaacagttgtacctataatgtcttgacacttcaattacaccattagccccatattaaatttacttaatgataattatagaaataatacataaattcattttcatcttcaaatttaaaatataagtacacctaaagtctcccttgaatcctactttg

SEQ ID NO: 94857 - DNA, 737 bp, Homo sapiens
ctttgtaattagtaaaacgaaagcacccctggatttgtataaactcaggtttccatacctcagatccgtttgaagtgaagcactctcaaattccctcagttagtgataatggtggtccttacaggaagtacctttgtttcattccctaacatttgttttcctcaccaaggtgttaccattaactttgaatgggtcaagttcatgctcccccaatgctgcctctttattgacttgtcctgctctatgtggatgaagaggctccagagatcctaaagctgtactctggacatagcttagtggcaagcacagggaaaagtgtacagaggaagacaataggctggaatcggaggcttccaaaaataaaattgattttctttctttaagaattcccaactttgtcttagggacaaagccgctggatttagcaaataaaaatacaaagcacccagttaaatttgaatttcagataaacaacaagtaatgttttaatataaatgtcttgtgtattgcatgagatacccttatacttaaacattactcatagtttatcttaagttcaaatttaactggcaycttgtgttttatctggaaagcttacctggtaacatggggagctgcttgctgtcctcagcactgaggtgtaaaatatgtaggatgactggcacaaaataggcaacaacaatagcaacaaataaacagtcacaacagcagtagcagcactcaacaaacgccagcct

SEQ ID NO: 94858 - DNA, 1185 bp, Homo sapiens
ttcctattacaaaacagtctgacaaggtgctggtctggagcagagtctctttggcaggtaattttgatgaggcccagaggtaagggggtgggtgtctctgatgggtttccggtcctgttatcagccacgtccagcaaccccagacatggctgctgtctgtacatagggctgtttctggcttggagcccatgcctgctgagagcctcagtcattcatcagggctaatccattaactttttctacttaggccgaggaagcctgggtatgaggcaaacactcagtccccctctggcagagaacttggtcattgaacactcggtagtaaccctaccagttctgactgggcactcatactttgattttttggttgttgttgttctcattttagaaaagtaaagtagcaattctaaacactaacaaacagacttagtacagagagaaggtaaataccatgtgagaaaatactcccctcgacagcgagctatctgcagaagagaggatccagtgatattttttgcacagggaagttttctctatggcttcaaaccagattttatattgcctttggttttcgggaaaatacaggtatcttagcaacaaggcccagctaaaacctactgaggtttgtaacctgagtcctattctacttactgcccttctagtgggtacttccagaaactggcttycccctgcactcaactttactgtttagatggaaaaaacacagctggaaaagacctagtaagatttgtcattaagaaaaaaattgttcttagccttaattggctttgctagattagaacgccttctttttctgaagaacaccagatgtcaggagacttggtatgtagtccaactctgtgattaacaataacattaataataacaaaacataacagaagcatttaacattcagtgacatttaacactaacaatatcaggctattactctgtgttaatatggactagtgtatgcatgtcacatacattgtgtgatttaaacttcatcacagctctgacaatgtaggtgttatcagcattgtctcttttttacaaatgaagaaacgaagccttagagaggtgaaataacttgttctaggacaatacttattaaaatatgaaggtagaatttatacccagctttatctgtttcctcatgtggaaagtagggatggggacagggat

SEQ ID NO: 94859 - DNA, 767 bp, Homo sapiens
tccatagaaaaagaaccaagagaatatgtcaatccacccttgtttgtttgattgattgagtagttgcctcatcccagttgtcaggactgtcaagtctgaaacccatatgtcaggctcacagtgtggaaactctggtaggatttgatgctacagatttgatgctaggkccttgagacagaattcctcctccagggtatcccttagactgtccttcaacagacgaatggttcagcttactgtgctgttcagctttcaattgattggatgacattcgtccacattatcatgggtaataccttttacttaaagacaactgcatcagcaaaataacttcacagtaacacccagactagcgtttgattaaataacctgctttttagctgagttaaccagaagactaaccataacaactagtatagtgttgagttaaagaatattcccttttcaataaaacattagggattccgcaaaatagagttaatgctctgaaatttgtcagcgtttgtaacagattttacatttctgccagtccatgtcaatattttcttcatgcgtctagtttccagtttatttagttaaagatgcccaaaccacttggtgattgagcaaatgactttgtttccaatggcattatgtataggaatattttaataggaacttgttcacaagtctacatttatgcacatttttgaatgttaaaaaatttacagaattttttaaatcaatgggcataaccatgtagaatcttagaactgcatgggccttca

SEQ ID NO: 94860 - DNA, 767 bp, Homo sapiens
tccatagaaaaagaaccaagagaatatgtcaatccacccttgtttgtttgattgattgagtagttgcctcatcccagttgtcaggactgtcaagtctgaaacccatatgtcaggctcacagtgtggaaactctggtaggatttgatgctacagatttgatgctagggccttgagacagaattcctcctccagggtatcccttagrctgtccttcaacagacgaatggttcagcttactgtgctgttcagctttcaattgattggatgacattcgtccacattatcatgggtaataccttttacttaaagacaactgcatcagcaaaataacttcacagtaacacccagactagcgtttgattaaataacctgctttttagctgagttaaccagaagactaaccataacaactagtatagtgttgagttaaagaatattcccttttcaataaaacattagggattccgcaaaatagagttaatgctctgaaatttgtcagcgtttgtaacagattttacatttctgccagtccatgtcaatattttcttcatgcgtctagtttccagtttatttagttaaagatgcccaaaccacttggtgattgagcaaatgactttgtttccaatggcattatgtataggaatattttaataggaacttgttcacaagtctacatttatgcacatttttgaatgttaaaaaatttacagaattttttaaatcaatgggcataaccatgtagaatcttagaactgcatgggccttca

SEQ ID NO: 94861 - DNA, 767 bp, Homo sapiens
tccatagaaaaagaaccaagagaatatgtcaatccacccttgtttgtttgattgattgagtagttgcctcatcccagttgtcaggactgtcaagtctgaaacccatatgtcaggctcacagtgtggaaactctggtaggatttgatgctacagatttgatgctagggccttgagacagaattcctcctccagggtatcccttagactgtccttcaacagacraatggttcagcttactgtgctgttcagctttcaattgattggatgacattcgtccacattatcatgggtaataccttttacttaaagacaactgcatcagcaaaataacttcacagtaacacccagactagcgtttgattaaataacctgctttttagctgagttaaccagaagactaaccataacaactagtatagtgttgagttaaagaatattcccttttcaataaaacattagggattccgcaaaatagagttaatgctctgaaatttgtcagcgtttgtaacagattttacatttctgccagtccatgtcaatattttcttcatgcgtctagtttccagtttatttagttaaagatgcccaaaccacttggtgattgagcaaatgactttgtttccaatggcattatgtataggaatattttaataggaacttgttcacaagtctacatttatgcacatttttgaatgttaaaaaatttacagaattttttaaatcaatgggcataaccatgtagaatcttagaactgcatgggccttca

SEQ ID NO: 94862 - DNA, 767 bp, Homo sapiens
tccatagaaaaagaaccaagagaatatgtcaatccacccttgtttgtttgattgattgagtagttgcctcatcccagttgtcaggactgtcaagtctgaaacccatatgtcaggctcacagtgtggaaactctggtaggatttgatgctacagatttgatgctagggccttgagacagaattcctcctccagggtatcccttagactgtccttcaacagacgaatggttcagcttactgtgctgttcagctttcaattgattggatgacattcgtccacattatcatgggtaataccttttacttaaagacaactgcatcagcaaaataacttcacagtaacacccagactagcgtttgattaaataacctgctttttagctgagttaaccagaagactaaccataasaactagtatagtgttgagttaaagaatattcccttttcaataaaacattagggattccgcaaaatagagttaatgctctgaaatttgtcagcgtttgtaacagattttacatttctgccagtccatgtcaatattttcttcatgcgtctagtttccagtttatttagttaaagatgcccaaaccacttggtgattgagcaaatgactttgtttccaatggcattatgtataggaatattttaataggaacttgttcacaagtctacatttatgcacatttttgaatgttaaaaaatttacagaattttttaaatcaatgggcataaccatgtagaatcttagaactgcatgggccttca

SEQ ID NO: 94863 - DNA, 509 bp, Homo sapiens
aggtagtgtccaggcttttggcttgagatgtaacattattcatctttttcctctctcctgtattgtctccttgaggaaagagataatgtattctgattggtcgttttctgttttgggtttttattttttgtatttttcacaacataaagaacaatattttgcacacagcagatgctcaataaatgccttttaaacaatgaatgatttcaatttcatataaatgcaagacttgttctgtggactccacctttcagaagagtgggtagagacagaggtcacctcttcttatctgcctcggaagcttattgaaaaaagaagtgtgcggcccagaagaaacaagggtgctgagagsctctagggagagccaccttggtccgaaatgaagaatgcagaggtttatccttcagccttgagtaataaatccctcaaaccttgaattatttttcactataaacaagaaggcattctctgagtacttaaaaattcttgagatagcagcaggtcatggg

SEQ ID NO: 94864 - DNA, 1319 bp, Homo sapiens
atttttttcaacaaacgtatttacacgttttcttcatattacttgtctttttatggcctagctgagtgctaaatgcaagtgattcctggtaggtttagttttgaagctccaacttcaaagaagtttctataacattaaggaaaaaaaccaaattaggttctttttttcctaatttaaggttaacgacatggccacagatgatagcttggctgcacaagctaaaccaaggaatgtgatttgtgattgttcctattgcctgcaagtgctatactccatgtaaccaagatttaataagccagaagagttataaaatacttacctctgaaaaaagtctacttcctgtaaaaatttttcacacatcccaaataaggggtcaagtctgtagaaaagaaatgtaaaataatttgcttgtgaaatctgcaaactgaggaggaccaaaagtcccagaaacctgagcctaaattaaaggaaaattagcatattayactataaaaatgatctctaaaagtaacagaagactcctaatggacctgggggaaacacctgtcgggatcccaagacctgattaaaccactgcagtgcccattaagctcaaagaatattaaaaatcaaagagtatcacaggctacacttggcactagactcactacgaatacaggagagaagcatagcatgtgggcagtacagtgtcaagttccccttctgcaggagtccttgcttcattagcatctcagctagtatggtctctatacctacctgatttagatctcatctccttgcacatgagctgtcagcattgggatgaaagctcccagatagctgtgtggactgctgcaagatctatccagtttcaagaatcactgcactcaatgaagcctacagccattgtatcggcatctggaaactagttcatttatatttccttctggtctacatgcaatttactcagagatcattttttccatagcggtatagcctactaatgtagttgatactgtaagggctccaagaaacatacctaaaaagttaactaaattcctgtgcaagaggggaaaaggttttgttactattttggcgacagacatagatggtgttccttcctctctatcttgaattacttggcctcacagtacttgagaacatttcatttcactaaaaagttattgcatacctaaataatccaggcaacatgctaggtcagtatgacttactaagttttgacctttgcatattttcttcctatttcttgtatgtaatttctgcatgaaatttcccacttgttttctttaatatattattcattggaggaataaagttcc

SEQ ID NO: 94865 - DNA, 557 bp, Homo sapiens
cggcttcacctgcagccaacggcctggaatcgcaaagagacaccactctgggcagagcagagcagggtatggggtggggagagggtggagggttttataaacaaacttaacagcaatattgaaaggaggtgggggattgagggagggacagagtgttggagggccagagactagtcctgagatggaaacagcaacttgtacagtggctgagaaaataggatatagttttgatttttttaattgtaaaatattttggagggagaacaaaatcttttaacattttgaataaatttagagttttataaaataggccacttgttttctacacattccctgctttttaagggagcacatattatgtgccaggcactgctgggaaagacagaataaactataaacctggtgttgaggctacaacttaagtgatgtcaagatgtcctgaggtgccaaccagctgtcagtgtgactgtaacaaaggcttcaaatctgtcaagaagtaaggaaaagttttgtttgarttttgtttgggtatttctgttttgggagtcactggatta

SEQ ID NO: 94866 - DNA, 1135 bp, Homo sapiens
gcatagtctcttgtctgatgattaatctcagttctytttatacttgcaattccagggtactgaaatggctaaatattttgaatctctggtcagaaacgacccttcctttgaaattcctgccaagaggcaccttggcctggtggtttttcgtctaaaggtaataccatcttccaagcccctctgtgaatgatgtcttgtggtgctccagagcctctcggaaacacaaactgggctctggggatgctgacagggggtgcgatggagacttcacttcctttatttttcaaacagggtcctaattgtctcacagaaaatgtgttaaaggaaatagctaaagctggccgtctcttcctcatcccggccactatccaggacaagttaatcatccgtttcactgtgacatcccagtttaccactagggatgacatcctgagagactggaatctcattcgagatgctgccactctcatcctgagtcagcactgtacttcccaacccagccctcgggttgggaacctcatctcccaaatcaggggtgccagagcctgggcctgtggaacgtcccttcagtctgtcagtggggcaggagatgatccagtccaggccaggaagatcatcaagcagcctcagcgtgtgggagccggtcccatgaaaagggaaaatggcctccatcttgaaaccctgctggacccagttgatgactgcttttcagaagaggccccagatgccaccaagcacaagctgtcctccttcctgttcagttacttgtctgtgcagactaagaagaagacggtgcgctccctcagttgcaacagtgtgccagtgagtgctcagaagccactgcccacagaggcctctgtgaagaatgggggctcctccagggtcagaatcttttccaggtttccagaagacatgatgatgctgaagaaaagtgccttcaaaaaactcatcaaattctacagcgtccccagctttcctgaatgcagctctcaatgtggactccagctgccctgttgccctctgcaggccatggtttagacacagggccttcagccagagtctgaggatatacttcagggactctgtgaacccctcacaattgtatgccaactttgtgtgcttatgtgtacatgca

SEQ ID NO: 94867 - DNA, 798 bp, Homo sapiens
gcccctcttcgtctgatccgtcctaatcacagcagtcctacttctcctatctctcccagtcctagctgctggcatcactatactactaacagaccgcaacctcaacaccaccttcttcgaccccgccggaggaggagaccccattctataccaacacctatcctgatttttcggtcaccctgaagtttatattcttatcctaccaggcttcggaataatctcccatattgtaacttactactccggaaaaaaagaaccatttggatacataggtatggtctgagctatgatatcaattggcttcctagggtttatcgtgtgagcacaccatatatttacagtaggaatagacgtagacacacgagcatatttcacctccgcyaccataatcatcgctatccccaccggcgtcaaagtatttagctgactcgccacactccacggaagcaatatgaaatgatctgctgcagtgctctgagccctaggattcatctttcttttcaccgtaggtggcctgactggcattgtattagcaaactcatcactagacatcgtactacacgacacgtactacgttgtagctcacttccactatgtcctatcaataggagctgtatttgccatcataggaggcttcattcactgatttcccctattctcaggctacaccctagaccaaacctacgccaaaatccatttcgctatcatattcatcggcgtaaatctaactttcttcccacaacactttctcggcctatccggaatgccccgacgttactcggactaccccgatgcata

SEQ ID NO: 94868 - DNA, 798 bp, Homo sapiens
gcccctcttcgtctgatccgtcctaatcacagcagtcctacttctcctatctctcccagtcctagctgctggcatcactatactactaacagaccgcaacctcaacaccaccttcttcgaccccgccggaggaggagaccccattctataccaacacctatcctgatttttcggtcaccctgaagtttatattcttatcctaccaggcttcggaataatctcccatattgtaacttactactccggaaaaaaagaaccatttggatacataggtatggtctgagctatgatatcaattggcttcctagggtttatcgtgtgagcacaccatatatttacagtaggaatagacgtagacacacgagcatatttcacctccgctaccataatcatcgctatccccaccggcgtcaaagtatttagctgactcgccacactccacggaagcaatatgaaatgatctgctgcagtgctctgagccctaggattcatctttcttttcaccgtaggtggcctgactggcattgtattagcaaactcatcrctagacatcgtactacacgacacgtactacgttgtagctcacttccactatgtcctatcaataggagctgtatttgccatcataggaggcttcattcactgatttcccctattctcaggctacaccctagaccaaacctacgccaaaatccatttcgctatcatattcatcggcgtaaatctaactttcttcccacaacactttctcggcctatccggaatgccccgacgttactcggactaccccgatgcata

SEQ ID NO: 94869 - DNA, 798 bp, Homo sapiens
gcccctcttcgtctgatccgtcctaatcacagcagtcctacttctcctatctctcccagtcctagctgctggcatcactatactactaacagaccgcaacctcaacaccaccttcttcgaccccgccggaggaggagaccccattctataccaacacctatcctgatttttcggtcaccctgaagtttatattcttatcctaccaggcttcggaataatctcccatattgtaacttactactccggaaaaaaagaaccatttggatacataggtatggtctgagctatgatatcaattggcttcctagggtttatcgtgtgagcacaccatatatttacagtaggaatagacgtagacacacgagcatatttcacctccgctaccataatcatcgctatccccaccggcgtcaaagtatttagctgactcgccacactccacggaagcaatatgaaatgatctgctgcagtgctctgagccctaggattcatctttcttttcaccgtaggtggcctgactggcattgtattagcaaactcatcactagacatcgtactacacgacacgtactacgttgtagctcacttccactatgtcctatcaataggrgctgtatttgccatcataggaggcttcattcactgatttcccctattctcaggctacaccctagaccaaacctacgccaaaatccatttcgctatcatattcatcggcgtaaatctaactttcttcccacaacactttctcggcctatccggaatgccccgacgttactcggactaccccgatgcata

SEQ ID NO: 94870 - DNA, 1232 bp, Homo sapiens
aagctttaagaagagaagagctgcacactgatgtgtatgtgttgggagagtttgggggarggtggtttctgttgttagttgggggaagtatttttcatttatattctctttttagactgttttcccaagtgatttctgactcagagtggaccagagctcagttgtgctccataggattagttaacaatctttgacagtgctgcattctcagtggaagtcaggcttcctgcaaaacactgaattattcacaccaaacaggtcacatttgctgaagtagtaagtagaattttgtgtgtcaaagaaagactcattaaattgagtgcttcagtaaagcaagcaccactggggtttaatttattgctgctgcttgacatctgctttcccaaagtgatggggactgcctctacccacgtgggcagacagagtgagcccatttctggctgtgactagaacacttgtctcatgagggccagtcccaagctctgtccttcacccatgatatcaatgtttggatcatagaacctgctatacccaaagctctgtggggtagagataagactggtcgtttttttggatgaggtgggcgctctcaccctagcatccaataatgctgtctttacaacaagttattttggttgcaataaaatgaacattttattatattaacccaggtagaaggagttgacaggtggacaaaggtagatctcatcagaagtcatcagatgactaggttctctagccttccctctccctctctgtagatgtgtgatagaaagaatgaatatatgaacaaatggatgtaatacatgaataaataggaatccaagtgcatgaactatggtaggtggccacacaacttctgcttgaatatgctccctgacaacctggatatagcctaacctaagtttctgcgagaggtggaaacacatgttgctgtccatggtcctaaataatcactgagcacagtttttgtttgtttgttttctcctagcactgcctcagcacatcccaactgagcatcaggtggcctatagagatggaggtaaaattgctgagctggaagtcttggctaatgctagcatctgcatattcagttctaagcagttcaaagcccttctcagttagagtctgcaataagtgccttgagtaggcccaggggatcaagcaacccaattaacctgctttcaccccagtgtaatgtgccaatttttatgaatatgtgtgtgcatgca

SEQ ID NO: 94871 - DNA, 1232 bp, Homo sapiens
aagctttaagaagagaagagctgcacactgatgtgtatgtgttgggagagtttgggggagggtggtttctgttgttagttgggggaagtatttttcatttatattctctttttagactgttttcccaagtgatttctgactcagagtggaccagagctcagttgtgctccataggattagttaacaatctttgacagtgctgcattctcagtggaagtcaggcttcctgcaaaacactgaattattcacaccaaacaggtcacatttgctgaagtagtaagtagaattttgtgtgtcaaagaaagactcattaaattgagtgcttcagtaaagcaagcaccactggggtttaatttattgctgctgcttgacatctgctttcccaaagtgatggggactgcctctacccacgtgggcagacagagtgagcccatttctggctgtgactagaacacttgtctcatgagggccagtcccaagctctgtccttcacccatgatatcaatgtttggatcatagaacctgctatacccaaagctctgtggggtagagataagactggtygtttttttggatgaggtgggcgctctcaccctagcatccaataatgctgtctttacaacaagttattttggttgcaataaaatgaacattttattatattaacccaggtagaaggagttgacaggtggacaaaggtagatctcatcagaagtcatcagatgactaggttctctagccttccctctccctctctgtagatgtgtgatagaaagaatgaatatatgaacaaatggatgtaatacatgaataaataggaatccaagtgcatgaactatggtaggtggccacacaacttctgcttgaatatgctccctgacaacctggatatagcctaacctaagtttctgcgagaggtggaaacacatgttgctgtccatggtcctaaataatcactgagcacagtttttgtttgtttgttttctcctagcactgcctcagcacatcccaactgagcatcaggtggcctatagagatggaggtaaaattgctgagctggaagtcttggctaatgctagcatctgcatattcagttctaagcagttcaaagcccttctcagttagagtctgcaataagtgccttgagtaggcccaggggatcaagcaacccaattaacctgctttcaccccagtgtaatgtgccaatttttatgaatatgtgtgtgcatgca

SEQ ID NO: 94872 - DNA, 1123 bp, Homo sapiens
tagtttcatgcctctaggcatcagggaagtgagctttgctttttcttgtttccatggggttatggccatccattgatccaggcctgatgttctgtgtggcacacaaggatttcaattctccaaaaaattcaatgtggaaaggggaaaaggaaagagagtgacaagaagtgatgatgaatagcataacagatatgtaatgggacaagatgtgagtgtcacatttttggagggggggattgtcacctgctaacagaagaaattattgagtgtgtgactagtgcaggggacatttcaagccagattgttcctcagactgcaatctaattttactatctgtcactagccacctcagtcaaagatttcaaggtaaaaaattcaactgactcaaacacgcactgctaaaatggtgacaataaagggtgtragaaatgaaaatctctccaatatttgagtaagccctacattatctacaattttcctgccagaagaataagtccttctttctagcagtgttagcatataaatgaagataaattaggccccccattattgggaagctctggaagttccaaaggcctgttaacctaaaaatagctgctaaattctaacttcaggtcagcaatgaatagcttttaggatgaccacatgtcatgcactaaaatacatcctgtattttatctggcaaccctactttaaaatatttttaaagcacataaaaaaagttacaaaatttttaaaagcatataaaaataaaaacaatttcccagatacagagtggtaaaatgcctctattcactaaatttattggaaagtctttcatgtatggaagcttgttttaaaaagaattttaaaaggcattaacttctagaatctttgtccttaagacggtctgattttactctttttttaaaaattgacataattctattttgtcagtactttgttaactgcctttatatcatgctaaagtagaatgctaatttgagtttgaaatacggtggctaatagagctaagaaaacacattcatcatcattctctggtattttctagtgtcttctggtagctcccactcatccccagagtagccaggtagaacttgaaccctgggatggagacttggta

SEQ ID NO: 94873 - DNA, 1123 bp, Homo sapiens
tagtttcatgcctctaggcatcagggaagtgagctttgctttttcttgtttccatggggttatggccatccattgatccaggcctgatgttctgtgtggcacacaaggatttcaattctccaaaaaattcaatgtggaaaggggaaaaggaaagagagtgacaagaagtgatgatgaatagcataacagatatgtaatgggacaagatgtgagtgtcacatttttggagggggggattgtcacctgctaacagaagaaattattgagtgtgtgactagtgcaggggacatttcaagccagattgttcctcagactgcaatctaattttactatctgtcactagccacctcagtcaaagatttcaaggtaaaaaattcaactgactcaaacacgcactgctaaaatggtgacaataaagggtgtaagaaatgaaaatctctccaatatttgagtaagccctacattatctacaattttcctgccagaagaataagtccttctttctagcagtgttagcatataaatgaagataaattaggccccccattattgggaagctctggaagttccaaaggcctgttaacctaaaaatagctgctaaattctaacttcaggtcagcaatgaatagcttttaggatgaccacatgtcatgcactaaaatacatcctgtattttatctggcaaccctactttaaaatatttttaaagcacataaaaaaagttacaaaatttttaaaagcayataaaaataaaaacaatttcccagatacagagtggtaaaatgcctctattcactaaatttattggaaagtctttcatgtatggaagcttgttttaaaaagaattttaaaaggcattaacttctagaatctttgtccttaagacggtctgattttactctttttttaaaaattgacataattctattttgtcagtactttgttaactgcctttatatcatgctaaagtagaatgctaatttgagtttgaaatacggtggctaatagagctaagaaaacacattcatcatcattctctggtattttctagtgtcttctggtagctcccactcatccccagagtagccaggtagaacttgaaccctgggatggagacttggta

SEQ ID NO: 94874 - DNA, 1028 bp, Homo sapiens
cctttgggtgttcttttcccagaggagctctacggtgactttgaagacttggaaacaggggacgtgcacaagggaaaatcgggccccgatactcaggtatgactttgtcgtagctggctgttcttggtcattgtgttctgagagaggcccgcattgagaaatgcaaatcttacttgtgatgtgtgaagattgcagactggatggatagattccttcctaaagtgtggggatgtggggaccaaagagaagctttcttatttacttgttaagttttggactacagttactaccgtttcttgccatagtcatttgccaagtccactgtgatttttcactcacagaagtcttagcttctcagacttacattcaaccattgccatcattctcctctttttaaatttaagtgtcatttaaaagaatgaaatccctgttctycctaatatttctttagaacagggtctgggagcatctgggtgagggacatgtctgttatttttattctagtttgtgttcccagccagcttaaggaatagcagctagttgtaatgcagatgtaacaatttcctgtagcagtaccatgttattcagagacaaaggttatgttgtgttttgttttgttttattgataatgataacagatttttgctaagatttttgtttaaatagaactttaaaaaatctaatgtttaaagaaaagaccttcataaacatacacaaaattttttcttctggaaatttaagaatgaagatgtagagaaacaaggaagaaattgaccctgacgaagaagaaagtgccaagaaaaagcatttggataagaagagaaaattgaaggagatgtttgatgtggaatatgatgaaggagaaagcacatattttgatgatcttaaaggagaaatgcagaaacaagcacaggtgagaaacctcagttcctctcagccccttgtcaagactatcacatagtgtaggaatccctgactttctttgggtccctgcttcctatcctgcttctgtgcctttcacttggact

SEQ ID NO: 94875 - DNA, 641 bp, Homo sapiens
aaagatgcttcagccaatacagggattttactcatctccgggctccagtctgaggatgaggctgactattactgtatgatttggccaagcaatgcttctcacagtgacacacacagatgggraagtgggacaaaaacctcaccctgctttaggtcttgttcttaaaaaattttaaattttaaaataactggcctaggcacaaactacatttggaagtactttctagttgtaaaaggctcttctctcaatttcccatccattcgtctgaagtctcagtaaaacaaaacaaaaccaaagcaactgatgacactgaagtcttggctggttgtcatatgtgctaacaccactgcctgtggagctggacttttgttcttgaaagaagcaaaatgaggctttcctagctcacatcatggtcagagcctggggacatcctagcaggtgaacagtgccctgcagcatggactctgctcttccagcgtacgggcagagacctccccttccatccccagtagtctgttctcagggctgtctgtggctcactgtgtcccaggaacaaggcactcaaatatgaaatgctgcctgaggacacaggtcagggaattctagatatagtgctgacctggctcagtcctgggtacctg

SEQ ID NO: 94876 - DNA, 633 bp, Homo sapiens
tcctcctctcacatcactgagtccctgtcctggaaacaccctacaggtggacaatctccccatagtatggaagtttccaaaatggctccacagggaagagttgagctgaacacacccactctttctcatgggcatcaaatatatctaatttttctggggaaatcatcaatttctagctggaatcctgattaatcgacagactgtgagaattaaaaattttaaaaatattcagacatatccagagtccagtayttaaattctctggaattttgtgagccaatctttaaacatagttattattgtagtttagagttcatgaacctgaattaaatagattctagtaaacataaagtgccttagttgtctattgttgcataaaaattactcctaaaattaacatattcttaatgagaacacatatgcattaatctgttttcgcactgctataaagaaataccttatttataaaagaaagaggtttaactggctcacagttccacatggctggggaggcctcaggaaacttacaatcatggtagaaggcaaaggagaagcaagaactttgttcacaaggtggcaggtgagaagagctggggagggtgaacttccaaatacttttttttttgagatgga

SEQ ID NO: 94877 - DNA, 633 bp, Homo sapiens
tcctcctctcacatcactgagtccctgtcctggaaacaccctacaggtggacaatctccccatagtatggaagtttccaaaatggctccacagggaagagttgagctgaacacacccactctttctcatgggcatcaaatatatctaatttttctggggaaatcatcaatttctagctggaatcctgattaatcgacagactgtgagaattaaaaattttaaaaatattcagacatatccagagtccagtatttaaattctctggaattttgtgagccaatctttaaacatagttattattgtagtttagagttcatgaacctgaattaaatagattctaktaaacataaagtgccttagttgtctattgttgcataaaaattactcctaaaattaacatattcttaatgagaacacatatgcattaatctgttttcgcactgctataaagaaataccttatttataaaagaaagaggtttaactggctcacagttccacatggctggggaggcctcaggaaacttacaatcatggtagaaggcaaaggagaagcaagaactttgttcacaaggtggcaggtgagaagagctggggagggtgaacttccaaatacttttttttttgagatgga

SEQ ID NO: 94878 - DNA, 1820 bp, Homo sapiens
aactataagactcagagttagaaaacagaatcataaattccccatgtaagccactacttccacccctggtcctggactcagatatgttactaatgaggaacacagttcctcatagtggctgctgattgaggacatggtgggcaaactgtggttgatggacacatctgtcttgcatcctgcattggaacacagtcttgctcatgtctttatgagtgacatgtggctgttttcatgctgcaatacaaggcttggttgtggtgacagagatcctatggtctgaaaatctgaaatactatactaaaggtcccatactgtatcatgtcwtctacatgaattatctacaatagacaaatccatgcaggcagaaagaagatgagtggttgcccagaattggagaaggtgatgaaagaggagaggctgctcactgggtgcagaattttcttttgggtgatgaaaatgtaggagaactacacacacagctggtggctgcccaacaaagtgaaggtgctaagtgccactgcgttgtacattttgaagtgattaattctaggttatatgaattccacacaatacaaaactatgattttcagaaattgactgttataattgtgttattatatctacaactttatgatggcactaaaggaccatgagcagtcaatgcaaaggatccagacaatatttcaagggctcttccagagtaacaagacatgaaaaggcagctctggttctctcttgcctggcgtattttaccctcggagttttttgtttttttgtgttgttgttgttgttgttgttgttattgttgttgttgttgttacagagtctcgctctgtcgcccaggttggagtgcagtggcgcgatctcggctcactgcaagctctgcctcccgggttcacgccattctcctgcctcagcctcctgagtagctgggactacaggcgcccgccaccgcgcccggctaattttttgtatttttagtagagacggggtttcaccgtgttagccaggatggtctcgatctcctgacctcgtgatccgcccgcctcggcctcccaaagtgctgggattacaggcttgagccaccgcgcccagccaaccctcggagtttttatgagcaccgaagggtgcagggagctggaagctacccaccaggtgcctggctcactcatgtctgggtgcagcagctcccccaacaggcagctggcagaactgaaagggaagagctatatccttctgagcccccacaattgtggtgcaggattgttcccgacactcccatccagtctgcttgctcctgcacacttagaaatgatcattatttctgcccaggacctccctggtcttgctctcccctcttcctccccaggcgaccttgggaactttactcaccctctggcccttccctcctctgtccagtgttttccccacccactgtgatcagctcagatcagcgagtctgtgggacattagggatcagtcacccatgtgaggccctcgacggggtcccaggatggagcagtgtatgtccccacaaggctgcttattgcacaagtaatggaggaacaaaggggtgggtaagccccctcctgggcagcttcagaccctgctaaaataggaaacagcctggggcaggtctgaccccacttgtgtctctcctgcccccaccccagcagcagcgtcctggaggccataccatgtgctaagcagatgccaagatcacgtcattcatcatcacctggaaattcccctaaccacaccttaatacgctgcactcgtgcctcagctaaaagtatcacacactgcattgcaatgagttt

SEQ ID NO: 94879 - DNA, 1820 bp, Homo sapiens
aactataagactcagagttagaaaacagaatcataaattccccatgtaagccactacttccacccctggtcctggactcagatatgttactaatgaggaacacagttcctcatagtggctgctgattgaggacatggtgggcaaactgtggttgatggacacatctgtcttgcatcctgcattggaacacagtcttgctcatgtctttatgagtgacatgtggctgttttcatgctgcaatacaaggcttggttgtggtgacagagatcctatggtctgaaaatctgaaatactatactaaaggtcccatactgtatcatgtcttctacatgaattatctacaatagacaaatccatgcaggcagaaagaagatgagtggttgcccagaattggagaaggtgatgaaagaggagaggctgctcactgggtgcagaattttcttttgggtgatgaaaatgtaggagaactacacacacagctggtggctgcccaacaaagtgaaggtgctaagtgccactgcgttgtacattttgaagtgattaattctwggttatatgaattccacacaatacaaaactatgattttcagaaattgactgttataattgtgttattatatctacaactttatgatggcactaaaggaccatgagcagtcaatgcaaaggatccagacaatatttcaagggctcttccagagtaacaagacatgaaaaggcagctctggttctctcttgcctggcgtattttaccctcggagttttttgtttttttgtgttgttgttgttgttgttgttgttattgttgttgttgttgttacagagtctcgctctgtcgcccaggttggagtgcagtggcgcgatctcggctcactgcaagctctgcctcccgggttcacgccattctcctgcctcagcctcctgagtagctgggactacaggcgcccgccaccgcgcccggctaattttttgtatttttagtagagacggggtttcaccgtgttagccaggatggtctcgatctcctgacctcgtgatccgcccgcctcggcctcccaaagtgctgggattacaggcttgagccaccgcgcccagccaaccctcggagtttttatgagcaccgaagggtgcagggagctggaagctacccaccaggtgcctggctcactcatgtctgggtgcagcagctcccccaacaggcagctggcagaactgaaagggaagagctatatccttctgagcccccacaattgtggtgcaggattgttcccgacactcccatccagtctgcttgctcctgcacacttagaaatgatcattatttctgcccaggacctccctggtcttgctctcccctcttcctccccaggcgaccttgggaactttactcaccctctggcccttccctcctctgtccagtgttttccccacccactgtgatcagctcagatcagcgagtctgtgggacattagggatcagtcacccatgtgaggccctcgacggggtcccaggatggagcagtgtatgtccccacaaggctgcttattgcacaagtaatggaggaacaaaggggtgggtaagccccctcctgggcagcttcagaccctgctaaaataggaaacagcctggggcaggtctgaccccacttgtgtctctcctgcccccaccccagcagcagcgtcctggaggccataccatgtgctaagcagatgccaagatcacgtcattcatcatcacctggaaattcccctaaccacaccttaatacgctgcactcgtgcctcagctaaaagtatcacacactgcattgcaatgagttt

SEQ ID NO: 94880 - DNA, 1820 bp, Homo sapiens
aactataagactcagagttagaaaacagaatcataaattccccatgtaagccactacttccacccctggtcctggactcagatatgttactaatgaggaacacagttcctcatagtggctgctgattgaggacatggtgggcaaactgtggttgatggacacatctgtcttgcatcctgcattggaacacagtcttgctcatgtctttatgagtgacatgtggctgttttcatgctgcaatacaaggcttggttgtggtgacagagatcctatggtctgaaaatctgaaatactatactaaaggtcccatactgtatcatgtcttctacatgaattatctacaatagacaaatccatgcaggcagaaagaagatgagtggttgcccagaattggagaaggtgatgaaagaggagaggctgctcactgggtgcagaattttcttttgggtgatgaaaatgtaggagaactacacacacagctggtggctgcccaacaaagtgaaggtgctaagtgccactgcgttgtacattttgaagtgattaattctaggttatatgaattccacacaatacaaaactatgattttcagaaattgactgttataattgwgttattatatctacaactttatgatggcactaaaggaccatgagcagtcaatgcaaaggatccagacaatatttcaagggctcttccagagtaacaagacatgaaaaggcagctctggttctctcttgcctggcgtattttaccctcggagttttttgtttttttgtgttgttgttgttgttgttgttgttattgttgttgttgttgttacagagtctcgctctgtcgcccaggttggagtgcagtggcgcgatctcggctcactgcaagctctgcctcccgggttcacgccattctcctgcctcagcctcctgagtagctgggactacaggcgcccgccaccgcgcccggctaattttttgtatttttagtagagacggggtttcaccgtgttagccaggatggtctcgatctcctgacctcgtgatccgcccgcctcggcctcccaaagtgctgggattacaggcttgagccaccgcgcccagccaaccctcggagtttttatgagcaccgaagggtgcagggagctggaagctacccaccaggtgcctggctcactcatgtctgggtgcagcagctcccccaacaggcagctggcagaactgaaagggaagagctatatccttctgagcccccacaattgtggtgcaggattgttcccgacactcccatccagtctgcttgctcctgcacacttagaaatgatcattatttctgcccaggacctccctggtcttgctctcccctcttcctccccaggcgaccttgggaactttactcaccctctggcccttccctcctctgtccagtgttttccccacccactgtgatcagctcagatcagcgagtctgtgggacattagggatcagtcacccatgtgaggccctcgacggggtcccaggatggagcagtgtatgtccccacaaggctgcttattgcacaagtaatggaggaacaaaggggtgggtaagccccctcctgggcagcttcagaccctgctaaaataggaaacagcctggggcaggtctgaccccacttgtgtctctcctgcccccaccccagcagcagcgtcctggaggccataccatgtgctaagcagatgccaagatcacgtcattcatcatcacctggaaattcccctaaccacaccttaatacgctgcactcgtgcctcagctaaaagtatcacacactgcattgcaatgagttt

SEQ ID NO: 94881 - DNA, 588 bp, Homo sapiens
atctcttgtggcaatgaggggtgatgtagcaggagcagcaccacgactgaaatgagaccagatgccatgttgactccacaggggtgtgtggttgcttaaatgacccaaatattcccactgaataatcagcaagtgtcctaatgacacagcacagcatttagatgaaatgaacaagaggggactgagtctgagggaccaggaggaggaagatcatgggtccctgggccacctgctgctgwgtcaggtgtcatcatgatctctccacagagcccagctcagccccatggccaacctcctggaaggtccacagctctgctgagcctggcccaggacagaccccaggtcagcgaggtttgggacagtggtcatgaggttaattcccacaaaggtctatgatcacagggcttgaaggctgcagctgattttctaaccagagaccctgcttgttcctcctgttgcctgtgctgccctcacagctggtttgagagacatctctccaggaagagccacagaggatgtaaatttgcataaacgcttaacactgactgcccccgaaagcctgagagggaataagagaggcctgcggag

SEQ ID NO: 94882 - DNA, 588 bp, Homo sapiens
atctcttgtggcaatgaggggtgatgtagcaggagcagcaccacgactgaaatgagaccagatgccatgttgactccacaggggtgtgtggttgcttaaatgacccaaatattcccactgaataatcagcaagtgtcctaatgacacagcacagcatttagatgaaatgaacaagaggggactgagtctgagggaccaggaggaggaagatcatgggtccctgggccacctgctgctgagtcaggtgtcatcatgatctctccrcagagcccagctcagccccatggccaacctcctggaaggtccacagctctgctgagcctggcccaggacagaccccaggtcagcgaggtttgggacagtggtcatgaggttaattcccacaaaggtctatgatcacagggcttgaaggctgcagctgattttctaaccagagaccctgcttgttcctcctgttgcctgtgctgccctcacagctggtttgagagacatctctccaggaagagccacagaggatgtaaatttgcataaacgcttaacactgactgcccccgaaagcctgagagggaataagagaggcctgcggag

SEQ ID NO: 94883 - DNA, 588 bp, Homo sapiens
atctcttgtggcaatgaggggtgatgtagcaggagcagcaccacgactgaaatgagaccagatgccatgttgactccacaggggtgtgtggttgcttaaatgacccaaatattcccactgaataatcagcaagtgtcctaatgacacagcacagcatttagatgaaatgaacaagaggggactgagtctgagggaccaggaggaggaagatcatgggtccctgggccacctgctgctgagtcaggtgtcatcatgatctctccacagagcccagctcagccccatggccaacctcctggaaggtccacagctctgctgagcctggcccaggacagaccccaggtcagcgaggtttgggacagtggtcatgaggttaattcccacaaaggtctatgatcacagggcttgaaggctgcagctgattttctaaccagagaccctgcttgttcctcctgttgcctgtgctgccctcacagctggtttgagagacatctctccaggaagagccacagaggatgtaaatttgcataaacgcttaacactgactgcccccraaagcctgagagggaataagagaggcctgcggag

SEQ ID NO: 94884 - DNA, 588 bp, Homo sapiens
atctcttgtggcaatgaggggtgatgtagcaggagcagcaccacgactgaaatgagaccagatgccatgttgactccacaggggtgtgtggttgcttaaatgacccaaatattcccactgaataatcagcaagtgtcctaatgacacagcacagcatttagatgaaatgaacaagaggggactgagtctgagggaccaggaggaggaagatcatgggtccctgggccacctgctgctgagtcaggtgtcatcatgatctctccacagagcccagctcagccccatggccaacctcctggaaggtccacagctctgctgagcctggcccaggacagaccccaggtcagcgaggtttgggacagtggtcatgaggttaattcccacaaaggtctatgatcacagggcttgaaggctgcagctgattttctaaccagagaccctgcttgttcctcctgttgcctgtgctgccctcacagctggtttgagagacatctctccaggaagagccacagaggatgtaaatttgcataaacgcttaacactgactgcccccgaaagcctgagagggaataagagaggcctgcrgag

SEQ ID NO: 94885 - DNA, 1282 bp, Homo sapiens
tattccctcttctgagctcacccacccagcactgctggtagctctggcagctcagagctgtgccytcactgagaagggctgtcagcagagaaaactgtctcctccaggtttatgccccttcttagcaaggtgtggtttcataactgcctgaggtgaagctctcaagactccctttcaatatgggagaaacagaaaatcctcccagcttcacagctccttattgggatggtagaagactcaatgtgggtcagagtgtccttgtgcccggtgttgcctccctcacttagtttcacacctactgtgaaagcaaagctccatctcagagtctgcttccaggcatcccaaaataacataaccagtcatcccgaacgtgagccatcaggaacctcaggaggccacagtataccagaaagcaccagtttattcctaatgatcattgtgagtttgcaaatgcccaatgagatctgagtgtttcttgcatttgtatggaatgaaaagggccctggcatgccaggcactgtggggtctgagggagagttggagtcagatctccctgcagggaaacctggggcaggaggagcagcctcatcccatgcagggaccacagatgcacctgcagggtgagctgcaggatggacactgcccacctccaccctccacattctgtgcaaaaaatcattctttccacccctccttcagcctatcaaagttgacacttaaaaagccaccacagcccacccttgtcaacaggaaacccattcacatctccatcagccacacaatctccacataaagattcttcaaaaaataataacacttgccatgcaaagtatatatataagatgtctcaaataattgtacttagattgcatatgaaagtgatactattttgatatgctaggtaaataaagtaaattatttaactcatttacttcttccctttgtatttttaatgcgatgactagacattcagatttccatgaggctcacatcatattgtgaatgaacagtgctggtctgcaccccttcaggttacagtggctgaggagtgacctggtgcaggaagccccatctccatccataggacattggtgtgaacccagggagaggcgctggtgtaagagagatgagaacacaggtgtgaaccacctgcttgtgcaggggactgagccttcactttgagccaaacaagcttcttttcctatcttcaatcctgagcaagaggactttccggacttctttttgttttcaggtttgtgcccctccaggcctgaggctgtct

SEQ ID NO: 94886 - DNA, 1282 bp, Homo sapiens
tattccctcttctgagctcacccacccagcactgctggtagctctggcagctcagagctgtgccctcactgagaagggctgtcagcagagaaaactgtctcctccaggtttatgccccttcttagcaaggtgtggtttcataactgcctgaggtgaagctctcaagactccctttcaatatgggagaaacagaaaatcctcccagcttcacagctccttattgggatggtagaagactcaatgtgggtcagagtgtccttgtgcccggtgttgcctccctcacttagtttcacacctactgtgaaagcaaagctccatctcagagtctgcttccaggcatcccaaaataacataaccagtcatcccgaacgtgagccatcaggaacctcaggaggccacagtataccagaaagcaccagtttattcctaatgatcattgtgagtttgcaaatgcccaatgagatctgagtgtttcttgcatttgtatggaatgaaaagggccctggcatgccaggcactgtggggtctgagggagagttggagtcagatctccctgcagggaaacctggggcaggaggagcagcctcatcccatgcagggaccacagatgcacctgcagggtgagctgcaggatggacactgcccacctccaccctccacattctgtgcaaaaaatcattctttccacccctccttcagcctatcaaagttgacacttaaaaagccaccacagcccacccttgtcaacaggaaacccattcacatctccatcagccacacaatctccacataaagattcttcaaaaaataataacactwgccatgcaaagtatatatataagatgtctcaaataattgtacttagattgcatatgaaagtgatactattttgatatgctaggtaaataaagtaaattatttaactcatttacttcttccctttgtatttttaatgcgatgactagacattcagatttccatgaggctcacatcatattgtgaatgaacagtgctggtctgcaccccttcaggttacagtggctgaggagtgacctggtgcaggaagccccatctccatccataggacattggtgtgaacccagggagaggcgctggtgtaagagagatgagaacacaggtgtgaaccacctgcttgtgcaggggactgagccttcactttgagccaaacaagcttcttttcctatcttcaatcctgagcaagaggactttccggacttctttttgttttcaggtttgtgcccctccaggcctgaggctgtct

SEQ ID NO: 94887 - DNA, 1282 bp, Homo sapiens
tattccctcttctgagctcacccacccagcactgctggtagctctggcagctcagagctgtgccctcactgagaagggctgtcagcagagaaaactgtctcctccaggtttatgccccttcttagcaaggtgtggtttcataactgcctgaggtgaagctctcaagactccctttcaatatgggagaaacagaaaatcctcccagcttcacagctccttattgggatggtagaagactcaatgtgggtcagagtgtccttgtgcccggtgttgcctccctcacttagtttcacacctactgtgaaagcaaagctccatctcagagtctgcttccaggcatcccaaaataacataaccagtcatcccgaacgtgagccatcaggaacctcaggaggccacagtataccagaaagcaccagtttattcctaatgatcattgtgagtttgcaaatgcccaatgagatctgagtgtttcttgcatttgtatggaatgaaaagggccctggcatgccaggcactgtggggtctgagggagagttggagtcagatctccctgcagggaaacctggggcaggaggagcagcctcatcccatgcagggaccacagatgcacctgcagggtgagctgcaggatggacactgcccacctccaccctccacattctgtgcaaaaaatcattctttccacccctccttcagcctatcaaagttgacacttaaaaagccaccacagcccacccttgtcaacaggaaacccattcacatctccatcagccacacaatctccacataaagattcttcaaaaaataataacacttgccatgcaaagtatatatataagatgtctcaaataattgtacttagattgcatatgaaagtgatactattttgatatgctaggtaaataaagtaaattatttaactcatttacttcttccctttgtatttttaatgcgatgactagacattcagatttccatgaggctcacatcatattgtgaatgaacagtgctggtctgcaccccttcaggttacagkggctgaggagtgacctggtgcaggaagccccatctccatccataggacattggtgtgaacccagggagaggcgctggtgtaagagagatgagaacacaggtgtgaaccacctgcttgtgcaggggactgagccttcactttgagccaaacaagcttcttttcctatcttcaatcctgagcaagaggactttccggacttctttttgttttcaggtttgtgcccctccaggcctgaggctgtct

SEQ ID NO: 94888 - DNA, 1282 bp, Homo sapiens
tattccctcttctgagctcacccacccagcactgctggtagctctggcagctcagagctgtgccctcactgagaagggctgtcagcagagaaaactgtctcctccaggtttatgccccttcttagcaaggtgtggtttcataactgcctgaggtgaagctctcaagactccctttcaatatgggagaaacagaaaatcctcccagcttcacagctccttattgggatggtagaagactcaatgtgggtcagagtgtccttgtgcccggtgttgcctccctcacttagtttcacacctactgtgaaagcaaagctccatctcagagtctgcttccaggcatcccaaaataacataaccagtcatcccgaacgtgagccatcaggaacctcaggaggccacagtataccagaaagcaccagtttattcctaatgatcattgtgagtttgcaaatgcccaatgagatctgagtgtttcttgcatttgtatggaatgaaaagggccctggcatgccaggcactgtggggtctgagggagagttggagtcagatctccctgcagggaaacctggggcaggaggagcagcctcatcccatgcagggaccacagatgcacctgcagggtgagctgcaggatggacactgcccacctccaccctccacattctgtgcaaaaaatcattctttccacccctccttcagcctatcaaagttgacacttaaaaagccaccacagcccacccttgtcaacaggaaacccattcacatctccatcagccacacaatctccacataaagattcttcaaaaaataataacacttgccatgcaaagtatatatataagatgtctcaaataattgtacttagattgcatatgaaagtgatactattttgatatgctaggtaaataaagtaaattatttaactcatttacttcttccctttgtatttttaatgcgatgactagacattcagatttccatgaggctcacatcatattgtgaatgaacagtgctggtctgcaccccttcaggttacagtggctgaggagtgacctggtgcaggaagccccatctccatccataggacattggtgtgaacccagggagaggcgctggtgtaagagagatgagaacacaggtgtgaaccacctgcttgtgcaggggactgagccttcactttgagccaaacaagcttcttttcctatcttcaatcctgarcaagaggactttccggacttctttttgttttcaggtttgtgcccctccaggcctgaggctgtct

SEQ ID NO: 94889 - DNA, 967 bp, Homo sapiens
tgcatatttaataaaccacccagatttataataggaaattagacaaatgttgacattttttgatccttgaatacatcaccaccaacacgcagctatgcaacctgtgaccaaccccagcaacccctcatgaccccttgtcatctccctccctcccttccccrgtgctatcctgtgcagccacagatctgtctctgtcactattgtttgctttccattttttggaatgtatcagtgttatcagacattatcttcccatttgttctggcttttttcacactgcaaactccttttgggattcttcctgttctcgctgaattgcacccatcccatagagggctcattactacctttgagggcctttaggttgattattcctgattttgtttatttattttaaagtttgaatttatcgtccatcaaaatcaaactcttggagttatgttcatctaaggtgacaggagagtctgtgatgtcttgtcgggattcttgcttcttcatctcttgcctctcgttctgtctatattggaagaggttctcatattctatttatttacttatttatttatttgggtttttaaggatttcagtgtttttttctctttaattattaatttttttattttaataggtttttagggaatcggtggtatttggttacataaataagttctttagttgtgatttctaagatattggtgcactcatcacccaagtagcgtacagtgtacccagtgagtagtcttttatccctcaccccgcttctaccatttcctcccagtcctcaaagtccattgtatcattgttatgcctttgtgttctcatagcttatctcccacttatgggtgagaatatgccatgctttgttttcaattcctgagttactgcacttagaataacagtccccaattctatccaggttgctgggaatgccattattttgttcctttttatggctgcatagtattcc

SEQ ID NO: 94890 - DNA, 781 bp, Homo sapiens
cctcttcattcagatgggaagaaaagggaaacaaaattcggtaggaacttctatgcatccacacagaggaggcaatgacaagaaaacacaggatgcaagcacagtggtaataatgtatttctacctaatattgaataaaactcaatattgcctgtattctgtaaacaataactatttacaaaactgactgtaaattatgmttttaaaaaccacagcttatgaagaagagaaacctcaaacaatgacacccctgaattgcaaatctaagacatggcacacatttattttcagttccatatgtggcctggatttatttacaagacaatattatgatattatatgtcactattccattttagatggtgtatttaaaatctcacagtactgcaactacctagtaatctactcatcagtataaacatcaatgtgacaatcctgctatccttctctacccctgcataaccccagcaaaaattcattatgaattcacagaatgtaatatcagaactgttgtagccacatacacagtttgtttcattttatgttttgataaagtaatcttttttgtttaagcttattgttttttaaaaaatatattacatactagatgtcattacaaatcagagattaataatttctcttatgcttatactactcccacagcactcattactgaatgtaaaccatatttatattttctttctttttttttttttgagacagggactcactctatcacccaggctggagtgcagtcgcacaatctcggctcattgtaacc

SEQ ID NO: 94891 - DNA, 781 bp, Homo sapiens
cctcttcattcagatgggaagaaaagggaaacaaaattcggtaggaacttctatgcatccacacagaggaggcaatgacaagaaaacacaggatgcaagcacagtggtaataatgtatttctacctaatattgaataaaactcaatattgcctgtattctgtaaacaataactatttacaaaactgactgtaaattatgattttaaaaaccacagcttatgaagaagagaaacctcaaacaatgacacccctgaattgcaaatctaagacatggcacacatttattttcagttccatatgtggcctggatttatttacaagacaatattatgatattatatgtcactattccattttagatggtgtatttaaaatctcacagtactgcaactrcctagtaatctactcatcagtataaacatcaatgtgacaatcctgctatccttctctacccctgcataaccccagcaaaaattcattatgaattcacagaatgtaatatcagaactgttgtagccacatacacagtttgtttcattttatgttttgataaagtaatcttttttgtttaagcttattgttttttaaaaaatatattacatactagatgtcattacaaatcagagattaataatttctcttatgcttatactactcccacagcactcattactgaatgtaaaccatatttatattttctttctttttttttttttgagacagggactcactctatcacccaggctggagtgcagtcgcacaatctcggctcattgtaacc

SEQ ID NO: 94892 - DNA, 838 bp, Homo sapiens
ctgtaatcaagtagaaaaactgtaagtccaatcattgtaagtctgggaccatcttgtccatagtcttatgacagaatactgtttaaaagtgtagatctatccgaatgttgatgaatttattgtgaaatgcttccccttgtgttgcttctatgtgatctatgtgcagcagtggacattttttttttaagtgaaaaacaaatcatgcccctcccttcattctctcccccgtgatgtttcccttagagaacattcctcccttcccttcccagtccccacctcagagatggggcaactcctccctttttatcacacttcttccactctgaggctctaggcaatcagttctcggtcactcccacccatgtgaaggtttttttttttttttttttttttgagttggagtctcgctctgtcgcctaggctggagtgcagtggtgcaatctcggctcactgcaagctccgcctcccgggttcacgccattctcctgcctcagcctcccgagtagctaggactacaggcacctgccaccacgcctggctaatttttttgtatttttagtagagatggggtttcaccatgttagccaggatggtctcgatctcctgacctcgtgatccgcctgccttggcctcccaaagtgctgggatyataggcgtgagccatcgcgcctggccccgtatgaaggtttttgatgatgcttgctagaatggacccagataattttcgtgtggacagaaggtagatttttagtagctcttgttagaggtcatgtaggagattgtctcagcttgagctgctattgcaaataccgatactgtagactgggtggcttgaaaa

SEQ ID NO: 94893 - DNA, 838 bp, Homo sapiens
ctgtaatcaagtagaaaaactgtaagtccaatcattgtaagtctgggaccatcttgtccatagtcttatgacagaatactgtttaaaagtgtagatctatccgaatgttgatgaatttattgtgaaatgcttccccttgtgttgcttctatgtgatctatgtgcagcagtggacattttttttttaagtgaaaaacaaatcatgcccctcccttcattctctcccccgtgatgtttcccttagagaacattcctcccttcccttcccagtccccacctcagagatggggcaactcctccctttttatcacacttcttccactctgaggctctaggcaatcagttctcggtcactcccacccatgtgaaggtttttttttttttttttttttttgagttggagtctcgctctgtcgcctaggctggagtgcagtggtgcaatctcggctcactgcaagctccgcctcccgggttcacgccattctcctgcctcagcctcccgagtagctaggactacaggcacctgccaccacgcctggctaatttttttgtatttttagtagagatggggtttcaccatgttagccaggatggtctcgatctcctgacctcgtgatccgcctgccttggcctcccaaagtgctgggattataggcgtgagccatcgcgcctggccccgtatgaaggtttttgatgatgcttgctagaatggacccagataattttcgtgtggacagaakgtagatttttagtagctcttgttagaggtcatgtaggagattgtctcagcttgagctgctattgcaaataccgatactgtagactgggtggcttgaaaa

SEQ ID NO: 94894 - DNA, 680 bp, Homo sapiens
acagagcttgaggagagcttgaggagagcaggaaaggtggaacattgctgctgctgctcactcagttccacaggtgggaggaacagcagggcttagagtgggggtcattgtgcagatgggaaaacaaaggcccagagaggggaagaaatgcctaggagctaccgagggcaggcgacctcaaccacagcccagtgctggagctgtgagtggatgtagagcagcggaatatccattcagccagctcaggggaaggacaggggccctgaagccaggggatggagctgcagggaagggagctcagagagaaggggaggggagtctgagctcagtttcccgctgcctgaaaggagggtggtacctactcccttcacagggtaactgaatgagagactgcctggaggaaagctcttcaagtgtggcccaccccaccccagtgacaccagcccctgacacgggggagggagggcagcatcaggaggggctttctgggcacacccagtacccgtctctgagctttccttgaactgttgcattttaatcctcacagcagctcaacaaggtacatacmgtcaccatccccattttacagatagggaaattgaggctcggagcggttaaacaactcacctgaggcctcacagccagtaagtgggttccctggtctgaatgtgtgtgctgga

SEQ ID NO: 94895 - DNA, 710 bp, Homo sapiens
agtcacttacataaagcaattgtctctgaaaatgcattcttcttgacaaattagcatagcctaattctccatcctaagggggactgttttacaagtctacatataaaagtacctaaatggttgtcttctgaatccctccctagtagaaattgaatttggcatcagtggagccagtgactgtacctgggattcagtgcatatagaattgcattgactgtgaccctttaggcaaatggatgtaagactttggctcttaggattttcccaaacaccaataagagcatcttgaagagaatccatttactttatgatatataaggatatttcaggtttgatattatgatccttattaggtccagtctagctgagctggacatgaattgaagaaccagaattagaactagaaaatgaaacccaggctgagtgcggtggctcacgcctgtaatcctaacacttttgggaggccgaggcaggtggattgcttgagaccagcctgggcaacatgacgaaatcccatctctacaaaaatagaaaaattagccaggcgtagtggcatgcatttgtagtcccagctacttgggaggctggggtgggagaatcacctgagccggagaggtcaaggctgtggtgagctgtgatcatgccactgcactccagtcagggattgagaacctatctcaaaaaaaaaaaaaaaaraaggaaagaaagaa

SEQ ID NO: 94896 - DNA, 710 bp, Homo sapiens
agtcacttacataaagcaattgtctctgaaaatgcattcttcttgacaaattagcatagcctaattctccatcctaagggggactgttttacaagtctacatataaaagtacctaaatggttgtcttctgaatccctccctagtagaaattgaatttggcatcagtggagccagtgactgtacctgggattcagtgcatatagaattgcattgactgtgaccctttaggcaaatggatgtaagactttggctcttaggattttcccaaacaccaataagagcatcttgaagagaatccatttactttatgatatataaggatatttcaggtttgatattatgatccttattaggtccagtctagctgagctggacatgaattgaagaaccagaattagaactagaaaatgaaacccaggctgagtgcggtggctcacgcctgtaatcctaacacttttgggaggccgaggcaggtggattgcttgagaccagcctgggcaacatgacgaaatcccatctctacaaaaatagaaaaattagccaggcgtagtggcatgcatttgtagtcccagctacttgggaggctggggtgggagaatcacctgagccggagaggtcaaggctgtggtgagctgtgatcatgccactgcactccagtcagggattgagaacctatctcaaaaaaaaaaaaaaaagaargaaagaaagaa

SEQ ID NO: 94897 - DNA, 710 bp, Homo sapiens
agtcacttacataaagcaattgtctctgaaaatgcattcttcttgacaaattagcatagcctaattctccatcctaagggggactgttttacaagtctacatataaaagtacctaaatggttgtcttctgaatccctccctagtagaaattgaatttggcatcagtggagccagtgactgtacctgggattcagtgcatatagaattgcattgactgtgaccctttaggcaaatggatgtaagactttggctcttaggattttcccaaacaccaataagagcatcttgaagagaatccatttactttatgatatataaggatatttcaggtttgatattatgatccttattaggtccagtctagctgagctggacatgaattgaagaaccagaattagaactagaaaatgaaacccaggctgagtgcggtggctcacgcctgtaatcctaacacttttgggaggccgaggcaggtggattgcttgagaccagcctgggcaacatgacgaaatcccatctctacaaaaatagaaaaattagccaggcgtagtggcatgcatttgtagtcccagctacttgggaggctggggtgggagaatcacctgagccggagaggtcaaggctgtggtgagctgtgatcatgccactgcactccagtcagggattgagaacctatctcaaaaaaaaaaaaaaaagaagraaagaaagaa

SEQ ID NO: 94898 - DNA, 654 bp, Homo sapiens
agattcttttgaaattcctcctgcaccaatatcagcatttctaccttctctgtaggttggcttgcctcacgttacaatggctgcagcaatcagaagtgtcacatcctcagtaatacttaatattattactattatttaataatatttagaactgtgccatccctgtttcaatttatcaggctcccagcagactactccttatctttcaaatgtcaaaactgcatcctgagctcttgcctaaactaatctggggtgaggtgaatggaagtagcactttaattgtattcattctttgtagctggacctgggcctgggctatctcctgacatttgcccacaagaaagatttctgaagttaggtaggamtggctgttgagtaggccagtgcttgccaaacctttacacatcctcacatatgtcataatatgcagataaaaagataatcccttatacaacttgctgggataaactcaggaggcttacagcatgacctgcttgaaggttcttcctgccttagaccttgctcagctgctccaggatgaggggatttacatcacagcacaactgtattttattcacagcataaaccatctctttccttctcagttgacgagttcagatgggcaataacagtgtctgccaaagagaaaaaaaa

SEQ ID NO: 94899 - DNA, 574 bp, Homo sapiens
tttcccatgtttgcatatctcattatactgtacaatataattagtaatgttattttgaaaagctttatgcagtaattagcgaactactggaaagtttgaagttcctaggattatatacatctggattcagaggaaggaaataaaatctataaattttgaaaagtatgactaggctgtaagaactttgataaaatatgtcagatgagaatgtgagcaaactggaactctgttctagcatgagtcactataggtttgaaattcgtataaagctggtacttcttggacgctgttcatggtaatttaattactgaaataataagagaacctcattatgcggatcatatgtctgaggtgttctcattgcaaggactccaaggacagcattttagagaactctggcatagtaggtactattaaaaagaacattctgttgccaagtaactaataacttcattgcaaaatgaagtgwccttttctcaattcccatttaatttgatctttttgtcacagagtacactgttgactgctcccttcttgaaattttccccccttggatttcattgttcctcttaca

SEQ ID NO: 94900 - DNA, 3005 bp, Homo sapiens
catcgagaagaaccatggtaataagagatacaggaagtttgccgaaaacactggtatgataaaaaagctgggagaaaaagggatcatgctgtttcctggagttcactcacagctgacttggggtgagggaagaatttgcatttctgacgagatcccaggtgatgttgaggctgctgtttgggggcctcgcttgagaagctccggtgcagagtggacgccttagtctgttagggagccgcctaacaaactgtatccccagcctcagggcctcagcctttctgcctttccttccagggtggacccgaactccccggtgctcttggaggacccagtcctttgtgccttggcaaaaaagcacaagcgaaccccagccctgattgccctgcgctaccagctgcagcgtggggttgtggtcctggccaagagctacaatgagcagcgcatcagacagaacgtgcaggtgaggagcggggctgtgggcctcaggtctcctgcacagtgtccttcacacgtgtgcttcttgtaaggctctcaggacagccttgggccagctccatttccctgtatttcctatgcatgaactctttgtgtacgtcataagggtttcttctactctagcacaggagaggcaacagaggtggagagtaataggatgggatcagaactacagatttgggttagcgttaagtcagtgatatccatatccctctgctggggccatgtccttttctttattttttataatgaagcattgattagatgttctttagtctccaactcatggcggatttttcttcttgtatgtttatgtagtataaattccttatatttattctcttagaattttatctttgcgaagtgcttgtttaactctgcctttttttttggcgaggtggttgtgtgtctttatttttatgtgtaggagaccatatttataccaataccttaggatataagacaaacccacttaatatagaggcttaatgcacaagcatttattgagctcaaggttccatggttagaaaattagcctgggctcagcctaaactcagtccattccttctattcctggctgggctctcatgtgtgttctgggcagtgaaggagctctgcttcaggatgtccctggggcatttgtgtgagtgcccccctctcccatgcagttctttatcctccagccatccagcccagggttcacctcagcacagggcatagtgaatggacatgtgcaaagcctttttaggtctaggctcagagacaccaaccattgcttctgggaaattctatcacctaatgcaagttacaggacaggtagactaaggggtggggaaacacacaccacctcttactggaaggaactgaaattcgatatagccaagcaagtggacacagggacatatgactgttagagggcatgttcctaattgaatcgtatcgattcatatgatatgtgtgaaataatatatcaatagttatatgtatgaatatgaatatatataaattgatatattatttcatatattctcaagaattcatacaagtctctaaagaattaacatccagaatacatacatatgtgtatgttttctaattaggtagatacataaaatatacatcatgtatgatatatattataaaacctatgtcatatatatgacatatatcatgtatatgtatatacgtcactatttgctaaaacattaagtaaaataagtgaagaaatcgataggatactctgaaatagtgatacagagaacgagagaataaaaaatgacaataatgaaacaattgatgaatcgaggtaatggcattccttaaattatttttaaaatatttttggacattagagaattccaaaaaaaaaatgaaaagttatgaaagaatgtggaaattataagtattaatacatatgtgtatgtctctaatcgatctagtatatataagatatatatgatatatgacatatgtgtatataatatatatgtagatactagaaccatacatatatatgtattatctgatataatcttagagacttgaatgtatcttgaaataacatctcccaaatttatctgcgttgycatattctctgtggttatgtttttcacaaacaaaagtttctatccttcatgtagactaatttttcatgcctctttcttgtggttggtgtgtgttgtgtcttatcctatattgggaatatcacaatattttactgtgttatcttacaaaattgttaatattctttccttataaatttggttaattctaatgggtatgacttttaaaatattatgtgaaataaggatccaaatatgcgtatctaatttttgaatttttagcaaaatttaccatttattgaaaagtttatatttgctcacataacttgaatttttttacctgacacatatatgaaatgtccatgagcaattatctggcctctcttccatcttcagttaacttattcacttttctgtgctataatgttaaaaagtaagtttcacttcatatggacaatattttctacttcttcatttatttaataatatcttagttattcttgactaatgtgttatttaaaattttgaatcatcttattaacttccacaggcaagtaaatgttttagtctctcattgatcattgtaataagcctgcagatcaatgcagagagaactgaatctttgataatattgagatttccagtccatcgatcataatatgaatatcccactacttattaataaatcatctcttaataaatatatcattaattgcataaatttctccacgactgatcattttttttttgagacagagtctcgttctgtcacccagggtggagtgcagtggcacgaactcggctcactgcaacctccacctcccgggttcaagcagttctcctgcctcagcctccagagtagctgggactgctggcgcatgctgccatgcccagctaattttttgtattttagtagagacggggtttcactgtgttgcccaggctgtt

SEQ ID NO: 94901 - DNA, 721 bp, Homo sapiens
gcgcggtggctcacgcctgtaatcccagcactttgggaggctgaggcaggtggatcacgaggtcaggtgttcaagaccagcctggccaagatggtggaaccctgtctctactaaaaatataaaaattagccaggtgcagtggtgggcacctgtaatcccagctacctgggaggctgaggcaggagaattgtttgaacccgggaggcggaggttgcagagagccgagatcgtgccactgtactctagcctgggtgacagagcaagactctgtctcaaaaaaaaaaaaaaaagaaaagattgcatttcatggatgtgraacagttttttagcaatatatctcaggaactttgccttcctgtgccatgtttgtttcaggaacagttcatatcagaactgtgtctccctgagaaagctgcatgcacacgaacccaggccatcggtgatagtcatcttgtgctcttatcctcacagctgatacatactgagcactcatctcttattttgagaaaaattcacataaaatttactgttttaaccatttaaagtgcacatttcagccagatgcggtagctcacacctgtaatcccagcactttgggaggccaaggcgggtggattgcttgaggtcagggattcgagactaggctggccaacatggtgaaaccccatctctactgaaaatacaaaaattagccgggggtggtggtgcgtgcctgtagtcc

SEQ ID NO: 94902 - DNA, 505 bp, Homo sapiens
gtaatggccatcattattgggtagaaaacacaacatgaggctgggcaccgtsgtcacgcctgtaatccaagcactttgggaggccaaggtgggtggatcacctgaggtcaggagttcgagaccagcctggccaacatggaaaaaccccatctctactaaaaaatacaaaaattagctgggcttggtggctcgtgcctatggttccagctactccagaggctgaggcaggagaatcgcttcaaccaagggggcggaggttgcagtgagctgagatcacctcactgcactccagcctggagacaagacgccatctcaaaaaaaaaaaaaaaaaagcgcaaagacttggagatagacgctttgagcagtgaagctggcttcagtagcataagatagactcacatgagtccatgagagccctaggctggtgcagtcagtgatggatcacagctggtttgtgggaaggaggggcagaggggaagtaacccaacatttgggggatttgcag

SEQ ID NO: 94903 - DNA, 648 bp, Homo sapiens
ggatcccttgaggaagggtgktttgggtgtgatgtatgaacgtggtggtccatagaacttcacccctgtaatctcagtactttgggagactgaggcaggcaaatcatgaggttaggagtttgagaccagcctggccaacatggtgaaaccccgtctctactaaaaatacaaaaaattagttgggtgtggtggcgcgtgcctctgagctcagctacttgggaaggaaagaaaagagttaactggtcatagtcgatgactggcccttcttcacatctcacctcccacgtagataatgacaaagagggaagacttggtggtagcccctgcaggcatcacactgaaggaggcaaatgaaattctgcagcgcagcaagaagggtaagtcctagagctgggaaagggcctggaactaatgcctagggtcctgattcatgtcctgccctgaccacaggaaagttgcccattgtaaatgaagatgatgagcttgtggccatcattgcccggacagacctgaagaagaatcgggactacccactagcctccaaagatgccaagaaacagctgctgtgtggggcagccattggcactcatgaggatgacaagtataggctggacttgctcgcccaggctggtgtggatgtagtggttt

SEQ ID NO: 94904 - DNA, 2003 bp, Homo sapiens
cttgctctcccacacaaccactgcctgctccacacaaccacagcctgctctcctacacaaccactgcccttatcttgcctgagctgcccaccattcagggagaaagggctgggcctgacctcagtgcctctggggactaactgcacggtgactcctgccccatctgataccagctggacgggggctttcccggctgctaagactgcatgtgcctgaggctgccctgggcactgcacacatgcacgtgcacatgtgggggtgagtagaggtmcgcacagctgtttgtactatttaaggcagatgtgcagcagccatcccagacacgtctgttcctcagccaagctgcagtcctgatgcagatgtagccaaaagctcctgggtcctaaatatggccacagggtccactgcccgtccccattaaccctatccacccatgtgttcctccatctcaacagtgctggcctgtgggcggccccaagcaacagcagtgtacaaggtgtcagagtatgcacggcgctttggtgttccggtcattgctgatggaggaatccaaaatgtgggtcatattgcgaaagccttggcccttggggcctccacaggtgaggcagtacccgtgaaggccagtgggaccccctccctagtgctgcttaggctctaacccaagcactccatctgtccgcagtcatgatgggctctctcctggctgccaccactgaggcccctggtgaatacttcttttccgatgggatccggctaaagaaatatcgcggtatgggttctctcgatgccatggacaagcacctcagcagccagaacagatatttcaggtgggacaggcaagccagttaccccaccctaatcctgcactgacagtctcatctctgctgtgaccttgcccgtgctctctgcctctccctgcagtgaagctgacaaaatcaaagtggcccagggagtgtctggtgctgtgcaggacaaagggtcaatccacaaatttgtcccttacctgattgctggcatccaacactcatgccaggacattggtgccaagagcttgacccaagtccggtgagcttggggagctgggacatgggtagaggggctggtccagggccagctacccacatttgacctctgcccttcttcagagccatgatgtactctggggagcttaagtttgagaagagaacgtcctcagcccaggtggaaggtggcgtccatagcctccattcgtaagtcaccctgtccttggtggggcctctgcatacctcatgcctcctttctcctgccctcacctcacaggtggtccttctgcctgcaggtatgagaagcggcttttctgaaaagggatccagcacacctcctcggtttttttttcaataaaagtttagaaagaaaaaagtgatgcctgatcttcaacagacaggtggggctctgtagctgccactaccacagatgcacacaaaaacagcaccctcatttccagggggagcctcagcgcccgagataaatgtgctccatggacctggaagcgggtagttccaggtccaaaaagttcctcctgaggctgctcacaaaacagctgactatagctatagctatggctcttggggtttcagtctcacactgagcatctgactctggctcccaagggtcaaagaacaagccctgggactggcatacacagggcatcctgctagcccatagcttggccatataggaccaggtcaacacacatatatatccctaacttgaatctctctcggccaggcacattggctcacgtctgtatcccagcacttgggaggcaggtggatcacttaggtcaggagttcgagaccatcctggccaacatggtgaaccctttctctactaaaaatacaaaaattagctgggcgtggtgatgcatacctctagtcccagctactcaggaggctgaggcaggagaatcactgaaacccaggaggcggaggttgcagtgagctgagactgcgccactgcactcc

SEQ ID NO: 94905 - DNA, 2003 bp, Homo sapiens
cttgctctcccacacaaccactgcctgctccacacaaccacagcctgctctcctacacaaccactgcccttatcttgcctgagctgcccaccattcagggagaaagggctgggcctgacctcagtgcctctggggactaactgcacggtgactcctgccccatctgataccagctggacgggggctttcccggctgctaagactgcatgtgcctgaggctgccctgggcactgcacacatgcacgtgcacatgtgggggtgagtagaggtamgcacagctgtttgtactatttaaggcagatgtgcagcagccatcccagacacgtctgttcctcagccaagctgcagtcctgatgcagatgtagccaaaagctcctgggtcctaaatatggccacagggtccactgcccgtccccattaaccctatccacccatgtgttcctccatctcaacagtgctggcctgtgggcggccccaagcaacagcagtgtacaaggtgtcagagtatgcacggcgctttggtgttccggtcattgctgatggaggaatccaaaatgtgggtcatattgcgaaagccttggcccttggggcctccacaggtgaggcagtacccgtgaaggccagtgggaccccctccctagtgctgcttaggctctaacccaagcactccatctgtccgcagtcatgatgggctctctcctggctgccaccactgaggcccctggtgaatacttcttttccgatgggatccggctaaagaaatatcgcggtatgggttctctcgatgccatggacaagcacctcagcagccagaacagatatttcaggtgggacaggcaagccagttaccccaccctaatcctgcactgacagtctcatctctgctgtgaccttgcccgtgctctctgcctctccctgcagtgaagctgacaaaatcaaagtggcccagggagtgtctggtgctgtgcaggacaaagggtcaatccacaaatttgtcccttacctgattgctggcatccaacactcatgccaggacattggtgccaagagcttgacccaagtccggtgagcttggggagctgggacatgggtagaggggctggtccagggccagctacccacatttgacctctgcccttcttcagagccatgatgtactctggggagcttaagtttgagaagagaacgtcctcagcccaggtggaaggtggcgtccatagcctccattcgtaagtcaccctgtccttggtggggcctctgcatacctcatgcctcctttctcctgccctcacctcacaggtggtccttctgcctgcaggtatgagaagcggcttttctgaaaagggatccagcacacctcctcggtttttttttcaataaaagtttagaaagaaaaaagtgatgcctgatcttcaacagacaggtggggctctgtagctgccactaccacagatgcacacaaaaacagcaccctcatttccagggggagcctcagcgcccgagataaatgtgctccatggacctggaagcgggtagttccaggtccaaaaagttcctcctgaggctgctcacaaaacagctgactatagctatagctatggctcttggggtttcagtctcacactgagcatctgactctggctcccaagggtcaaagaacaagccctgggactggcatacacagggcatcctgctagcccatagcttggccatataggaccaggtcaacacacatatatatccctaacttgaatctctctcggccaggcacattggctcacgtctgtatcccagcacttgggaggcaggtggatcacttaggtcaggagttcgagaccatcctggccaacatggtgaaccctttctctactaaaaatacaaaaattagctgggcgtggtgatgcatacctctagtcccagctactcaggaggctgaggcaggagaatcactgaaacccaggaggcggaggttgcagtgagctgagactgcgccactgcactcc

SEQ ID NO: 94906 - DNA, 1082 bp, Homo sapiens
tataatatactatattaaacagaatctatcagtctgatagaacattaaaagatatttcttttaaaggtggatataaaggtgcaactaaatgccaatttagggatggtacttttcagagttggggctctgtgctttaacatgttatactttgaaccaatggacattgtaagatattgggtcctagaatatacaggtttgtaaaccaagggcagagggtgagagtggctcctctcactaaaactcccttggagaatttgagcttcctggacctacagcattaagctctgctggagtagggagaatgcttcttctgggtacatagtaagcattccaataaraataaagttttagtagctccctgtcattttggcttccttgtgtatgtaggttggcagacaaagaaataagttattatactggcagttgtaattgaccttcattatcatgaggaaatagaaatattgctatacctttatcaaccatagatgatgacaattgtaaattggaaattgcagcaattacagcctgacagggccatggtaatcatgggtctttggaagtgaactagactagcagaagcactggataaacatgaggggaatatagaacaggttgtagaagaggaagatgaagaatgtcatcctgggaacaagtgtaatgacaggacccattaactcttgttcctttaacactcttgtgtttgaagaattaatgatggagtgaactcacatagagcataaactcctccacgcatggaaagatgtggactgtttctagtgctgttggtgtcttgcacgtacccctctccacttaatattcccaagagtttggattgttctataagctcctgagaatctctggctgaggacttttctttgaatatagaaaaagctaaactcacaaggtggggaaacctagaattgctgtagagaaaatgccctagagcagctctagaccagtaaagaaatgcacagcttctttgtttcttaagtgggacaactacaagtcatagaatttatacagtctcttgatggccacagcaagaatgtgcccttgatgtccactgtagtaaatacaaatca

SEQ ID NO: 94907 - DNA, 618 bp, Homo sapiens
aaagcaaataatggctgaaatgataggaaagctcctccaaacatttggagtggaacacaaggcatttttgtgtccgaaattgcagcgcctaatatttgttgttcaaataaatctcaacctgcatacggaagtgcacattacacataataagatgaggctttgagaagacagatgttaattattttgaggtaaatcagagcacctctgacccaaacaccgagctgtaatttgttgctcagcttcttggtcctgaaattaatgtaaatctttacattcgtaattttacttgccaatgscaaaccacccacacagtctgtaaatgactgctctgagtcagagactattcatttacgattgtgttagatattttaaaatgttctctgaaaggattaaatcacctaatcctggtcctttcactggttctgctttctgcaaaaatgatggagctggaggacgtctaaactagaagggactttagagtttgtctcttccccaaatttctccattcaaggataagaaactaagaccctgatgttagaagtgacttgtctccaggtcactcagcaaccaaaactaaccccccaacccccgcaaaaaaaaaaaaaaaaaaaaaaaaaa

SEQ ID NO: 94908 - DNA, 745 bp, Homo sapiens
ccttgctatttagtttctttcccagattcttgagactgtttcttagtggcaaggataagcctgactagaggaaaggggtttttgtgctccatcactgtttccctactgccttatatcctcccagtgcactacaagtttgaaagagctgtaggatagagcatttaaaaaaatctagaaggctgtcttggtgtaggtatgggaaggtggacaatggtgtgctccactgatgggcacagaaatgcactttttataaagcagttatctcagaactttgaaaaatttgttccttttggctgggtatggtgcctcacatctgtaatcccagcactttgggaggctgaggcaggaggattgcttgagcccaggaattggagaccagcttgggcaacatagggagatcccgtatctacaaaaaattaaaaaattggcytggcacagtggctcatgcctataatcctagcactttgggaggccaaggtgggcggatcacctgagctccggagttcgagaccagcctggacaatatggcgaaaccccatccctactaaaaatatgaaaattagctggtgtggtggatatgcctgtaatcccagctacctgggaggctgaggcaggaaaattgcttgaacctgtgaggcggagatggcagtgagccgagatcatgccattgcactccagcctgggcaacaaagtgagactctgtctcaaaaaaaaaaaaagttaagttaaaaaatggtttaaaaat

SEQ ID NO: 94909 - DNA, 658 bp, Homo sapiens
gagggaggaggtcctggagggcggcagaggtcctgaggatgccccaccaccagcaaacatgggtggtgggttaaaccacaggctggatcagaagccaggctgagaaggggaagcaggtttgggggactcctggggaaggacatttatacatggcatgaaggactggattttccaaaggccaaggaagagtagggcaagggcctggaggtggagctggacttggcagtgggcatgcaagcccattgggcaacatatgttatggagtacaaagtcccttctgctgacaccagaaggaaaggccttgggaatggaagatgagttagtcctgagtgccgtttaaatcacgaaatcgaggatgaagggggtgcagtgacccggttcaaaccttttgcactgtgggtcctcgggcctcactgctcaccggcatggaccatcatctgggaatgggatgctaactggggcctctcggyaattttggtgactcttgcaaggtcatacctgggtgacgcatccaaactgagttcctccatcacagaaggtgtgacccccacccccgccccaggatcaggaggctgggtctcctccttccacctgctcactcctggtagccccgggggtcgtccaaggttcaaataggactaggacctgtagtctgggg

SEQ ID NO: 94910 - DNA, 658 bp, Homo sapiens
gagggaggaggtcctggagggcggcagaggtcctgaggatgccccaccaccagcaaacatgggtggtgggttaaaccacaggctggatcagaagccaggctgagaaggggaagcaggtttgggggactcctggggaaggacatttatacatggcatgaaggactggattttccaaaggccaaggaagagtagggcaagggcctggaggtggagctggacttggcagtgggcatgcaagcccattgggcaacatatgttatggagtacaaagtcccttctgctgacaccagaaggaaaggccttgggaatggaagatgagttagtcctgagtgccgtttaaatcacgaaatcgaggatgaagggggtgcagtgacccggttcaaaccttttgcactgtgggtcctcgggcctcactgctcaccggcatggaccatcatctgggaatgggatgctaactggggcctctcggcaattttggtgactcttgcaaggtcatacctgggtgacgcatccaaactgagttcctccatcacagaaggtgtgacccccacccccgccccasgatcaggaggctgggtctcctccttccacctgctcactcctggtagccccgggggtcgtccaaggttcaaataggactaggacctgtagtctgggg

SEQ ID NO: 94911 - DNA, 625 bp, Homo sapiens
tgtgtctctgaaggtggtggctcgagggtccttcgaattccctgtgggagatgcggtgtccaaggttctgcagattgaggtgaatggagcacccctgaatataagtccccgggcccccagctttgtcctccaccctcagcactctctctgctggccaggccaggggcccaacacccaaaccaatgccttggtctgttccccatcttctacaattctgatccaactctgtccctggagttgaaactcaaagttctgggggagtctgygctagcagggcaggctgtagtcctgtgtgacctcacaaccatgttttccctgagacagaaggaaggggccatccatagagaggagctggtctatgaactcaaccccttgggtgagtgaccctctacctccagccattggtttcctaagtgggtacaggtggtgggggatgtggacagcaggacaggctgccaacttcccccatttccccagaccaccgaggccggaccttggaaatacctggcaactctgatcccaatatgatccctgatggggactttaacagctacgtcagggttacaggtgggagtgccctttagtcccttcccagtggccaccttcggattcatgtgggacctgt

SEQ ID NO: 94912 - DNA, 1028 bp, Homo sapiens
tagctagcaaatgatataactaggttaagttacttgcccaaggtcatactgccaagacagtggctctagtgtccctgcttctgaccatatgttatgctgcctatcctagagcttttctcttctaaaatagtaaaataatatattctttgtttgtttcatacatttttttttttttttttttttgagagggagtttcgctctttcgcccaggctggagtgaggtggcgcaatctcagctgactgtaacctctgcccccaccaggttcgagtgattcccctgcctcagcctccgaagtacctgggataataggtgcccaccaccatgcctggctaatttttgtgttttcagtagagacagggcttcaccatgttgaccaggctggtctcgaattcctcagctctggcagtccgcccgccttggcctcccacagtgctgggattacatgcatgagccactacacctggcccatacataaatattttaagcgaagtacacatgcatgatcatcatacttttaataatttcatttaactgtttccaaagaatgttagtatgaggttttctttttttctttttataatttcaacttttattttagattcagcgggtacatgttccctggatatagtgcatgatgatgaggtttgctatatgaatgatcccaccacccaggtagcgagcatggtaaccactagttcttcaacccttgcctgttcccttcctccctccttcctctgtagtccccagtgtctattgttcctgtctttatgtccatgtgcactcaatgtttagctcccacttttaagcgagaacatgcagtactcgttgtctgttcctgcgttaacgtgcttaggatagtggcctccaattgcatccatgttgttgcacaggccatgattttgttagtttttatggctgtgtagtattccatggtgtatacgcgccacattctttatcctgtccaccattaatgggcacctaggttgattgcatgtctttgccattgtgaatagkgctgtgatgttat

SEQ ID NO: 94913 - DNA, 568 bp, Homo sapiens
aacatacaaatccccaagtctcacccaaatgtgtcttcagatgaaaggaaaaaacaaatgacttgagctcccccgcaaagaacacgggtggtatattgagcagccaaggagtgaccagagtggcaggcccatgttgagggacaaaagaggacaattagaatatgattaatacaaatttacagtgggatgagttgttagcctgaggagcttgaatgtgaacctctgtgcaaaaaggagtcattaaatacttttgaaaaaggtgggatgggaagaaaatgacattctcaagacaattagatcgaacagtattaagcatgctgacttattaagttatgcaccttgagagggtggaatgagggaaaagggtctttatctggagtaagacaggaagaagctaagctgtaattcttactggactgtaaattatgtgcagatatattatctgtcatgttcgtgggcgcattctcagtacatagcacwtgaaacaggtactcgataaattgtcaaatggatgcatggagtgatttccatgtaaaatctaatattgtatagtattagaagggggaaa

SEQ ID NO: 94914 - DNA, 568 bp, Homo sapiens
aacatacaaatccccaagtctcacccaaatgtgtcttcagatgaaaggaaaaaacaaatgacttgagctcccccgcaaagaacacgggtggtatattgagcagccaaggagtgaccagagtggcaggcccatgttgagggacaaaagaggacaattagaatatgattaatacaaatttacagtgggatgagttgttagcctgaggagcttgaatgtgaacctctgtgcaaaaaggagtcattaaatacttttgaaaaaggtgggatgggaagaaaatgacattctcaagacaattagatcgaacagtattaagcatgctgacttattaagttatgcaccttgagagggtggaatgagggaaaagggtctttatctggagtaagacaggaagaagctaagctgtaattcttactggactgtaaattatgtgcagatatattatctgtcatgttcgtgggcgcattctcagtacatagcacttgaaacaggtactcgataaattgtcaaatggatgcatggagtgatttccatgyaaaatctaatattgtatagtattagaagggggaaa

SEQ ID NO: 94915 - DNA, 583 bp, Homo sapiens
ctccgaccggtccctcttagaggctcacccctcacttccgtctccttccaatgcatctcctctcatttacctccaaatagggcagcccctccctccccatagcagggccctcccaggcaggctcctagtggccggcgccrgtggatgggggaggggccaggtcgcctgaggcgggggctaagtttaggcacgctggggggagggggcctccccgcagctgttctggcccgtctggcccctgagtgacagcgctgcctggggccgaggctgggggagggggtcctccctgctcctgggccccaaagtgctggctcgaaggagaagggaccccatgctccctctgggtcctccctatactgcccctcggccccctagccccagcctgcagcgctgcggaagcagatcagtaataaaaatgctccggatgtgcaggagataagggcgagtttggaccccgttccgccgacctcagcccccgtccagcccgttccgcaagcccacctttactccccatatcggctccgagtgagaggctggggacaccgctgcttctcggggattttgcccacttcagtagaacccg

SEQ ID NO: 94916 - DNA, 589 bp, Homo sapiens
agccacagcgctgcagaatcacccctttcctgtgcagaaaccctggtgtttctccttctccttctacctcccagcagtcctgggcaaagtctttcctgttcctccctccccatgagaaaaagtggttttgggttgtgacaaagacagaaaatgaggtttcaacataggaaaccttatgttgatttgaggattatgaaatgggttttgaggattccttaaaaaattgtctctgctcaaaacacataggagtaagataaaccttggctactgacactggagatttccctgccctcctgcatttgccatcccatgagaatggtgggrgctcttgagaagggctgcattttctgaactgtgaggccctcttcattctctcctaactctaagctgcaaacagaaatttccctcacacgttttctagattgtaaaagaaagttcttctttactatgattgtggacattcctttataatgccaatttcaactttacattacttcaggatttttcactactcctaaagagtgtctcaaatgtggctagagcaagcaggttagtacactagatgtaagctacctggcctggaatctaa

SEQ ID NO: 94917 - DNA, 589 bp, Homo sapiens
agccacagcgctgcagaatcacccctttcctgtgcagaaaccctggtgtttctccttctccttctacctcccagcagtcctgggcaaagtctttcctgttcctccctccccatgagaaaaagtggttttgggttgtgacaaagacagaaaatgaggtttcaacataggaaaccttatgttgatttgaggattatgaaatgggttttgaggattccttaaaaaattgtctctgctcaaaacacataggagtaagataaaccttggctactgacactggagatttccctgccctcctgcatttgccatcccatgagaatggtgggggctcytgagaagggctgcattttctgaactgtgaggccctcttcattctctcctaactctaagctgcaaacagaaatttccctcacacgttttctagattgtaaaagaaagttcttctttactatgattgtggacattcctttataatgccaatttcaactttacattacttcaggatttttcactactcctaaagagtgtctcaaatgtggctagagcaagcaggttagtacactagatgtaagctacctggcctggaatctaa

SEQ ID NO: 94918 - DNA, 589 bp, Homo sapiens
agccacagcgctgcagaatcacccctttcctgtgcagaaaccctggtgtttctccttctccttctacctcccagcagtcctgggcaaagtctttcctgttcctccctccccatgagaaaaagtggttttgggttgtgacaaagacagaaaatgaggtttcaacataggaaaccttatgttgatttgaggattatgaaatgggttttgaggattccttaaaaaattgtctctgctcaaaacacataggagtaagataaaccttggctactgacactggagatttccctgccctcctgcatttgccatcccatgagaatggtgggggctctygagaagggctgcattttctgaactgtgaggccctcttcattctctcctaactctaagctgcaaacagaaatttccctcacacgttttctagattgtaaaagaaagttcttctttactatgattgtggacattcctttataatgccaatttcaactttacattacttcaggatttttcactactcctaaagagtgtctcaaatgtggctagagcaagcaggttagtacactagatgtaagctacctggcctggaatctaa

SEQ ID NO: 94919 - DNA, 589 bp, Homo sapiens
agccacagcgctgcagaatcacccctttcctgtgcagaaaccctggtgtttctccttctccttctacctcccagcagtcctgggcaaagtctttcctgttcctccctccccatgagaaaaagtggttttgggttgtgacaaagacagaaaatgaggtttcaacataggaaaccttatgttgatttgaggattatgaaatgggttttgaggattccttaaaaaattgtctctgctcaaaacacataggagtaagataaaccttggctactgacactggagatttccctgccctcctgcatttgccatcccatgagaatggtgggggctcttgagaarggctgcattttctgaactgtgaggccctcttcattctctcctaactctaagctgcaaacagaaatttccctcacacgttttctagattgtaaaagaaagttcttctttactatgattgtggacattcctttataatgccaatttcaactttacattacttcaggatttttcactactcctaaagagtgtctcaaatgtggctagagcaagcaggttagtacactagatgtaagctacctggcctggaatctaa

SEQ ID NO: 94920 - DNA, 1073 bp, Homo sapiens
atttctatatgctagaatctaaatttcttaactttctgtagtatgggccattttcaaatcagctaaagtcctaaaaccagactatgggaaacacacacttctaagctcaatattaaatatctaaagtgactaactaacgtagggttggagaggcagggtccccctggacttttcaaactcctaccctcacaaaaaatctagaacttcttctcagtaacaaaaataagatgacgtataatcatttttcattgttaataaataatctctatccatcatggcattgcattgaatttgtgttaattgttgctaaaaaatgactgtgggttaaacatttgtgattcatataataatagaaataataaatgtaaatgttttaagtgaacaagtgagattttaatagctcaacaggcaaatagcatgaactgatgctctgcaaaggtgagggacacctggcctgagacaggatgtcttatctgattttggtctgaatttcatttggaaaactggcagctgctggtcaacctgcagggatatgatcccatgagctgatatgcaatgttgacttttgtatttttgtcagcatgaaataatttttttttttttaaatcagggtcagagtctcgagtaactagcagccagctgatagaatggaagtgaaaccatggccctcgtccccttagcaaacctggaaacccagtgttgagcatgtgtgaagagagaaacagaatcaggtgaaatgaaatcttcctaagaccctgctcaggaaactaaatttgacgtaattggacacaagaagttgttcatccattctattccgccagaggagacaggacagatttcccgtgcgttcttgggaagctggaagagggagacagctctgccaggtggagtgatattctcatgagaagtgaaaaagaagaggcagagatggagagtttggttctagaagggtggaaggttttgcttataaacatatcaacacactgcttttcccgccaagatgcaaactttggggaatgtgctsaaatataagatggggtaaaaatattggacagccaaaaatatgacccatg

SEQ ID NO: 94921 - DNA, 704 bp, Homo sapiens
gagcaggaggagctgcagccctgccacacccccgaggttgggtggttgatggctggcagaggagaggagtaccatgggcaagaataaatgggactgtggtcctcaacattagataattcacaaattgcgaatgcattttctgtcgtcacattgccatcaggtgggtagggcccaaggatgccgccaagcatcctccctacacaggacagctccccacaacartcaatcacctgatccaacatggcagtagtgctgaaattgagaaaccccgcaataagcttcggttgtaaactttgtaccaagaaggagaattctctgcagacaactcaaggggcaataccgtcaactacttttgttttctctgactgccgtgttgttgaccttcatcgccattctttcccagcacatggtgtctgcatattttccagcagcctcctgtttcctcataaatctgccccttggacagataagaacatcacagggagcagggctgcagttcactcccaataataacgcctcagcagggtttgctctgcagtagcatcacagtcatgtggagtaggtggctatggctggtattcaggtgaaatctcaggccaatctctcctgaatcaaggggaccactgatcattaatgagaccttcaagtgagcaaagattcaagagagcaaattaatgtcctgcgctattgtgaagggacgcaaa

SEQ ID NO: 94922 - DNA, 704 bp, Homo sapiens
gagcaggaggagctgcagccctgccacacccccgaggttgggtggttgatggctggcagaggagaggagtaccatgggcaagaataaatgggactgtggtcctcaacattagataattcacaaattgcgaatgcattttctgtcgtcacattgccatcaggtgggtagggcccaaggatgccgccaagcatcctccctacacaggacagctccccacaacagwcaatcacctgatccaacatggcagtagtgctgaaattgagaaaccccgcaataagcttcggttgtaaactttgtaccaagaaggagaattctctgcagacaactcaaggggcaataccgtcaactacttttgttttctctgactgccgtgttgttgaccttcatcgccattctttcccagcacatggtgtctgcatattttccagcagcctcctgtttcctcataaatctgccccttggacagataagaacatcacagggagcagggctgcagttcactcccaataataacgcctcagcagggtttgctctgcagtagcatcacagtcatgtggagtaggtggctatggctggtattcaggtgaaatctcaggccaatctctcctgaatcaaggggaccactgatcattaatgagaccttcaagtgagcaaagattcaagagagcaaattaatgtcctgcgctattgtgaagggacgcaaa

SEQ ID NO: 94923 - DNA, 1673 bp, Homo sapiens
tgggttcgggccggtgtgacgcgtgcgccggccggccgccgaggggctgccgttctgcctccgaccggtcgtgtgtgggttgacttcggaggcgctctgcctcggaaggaaggaggtgggtggacgggggggcctggtggggttgcgcgcacgcgcgcaccggccgggcccccgccctgaacgcgaacgctcgaggtggccgcgcgcaggtgtttcctcgtaccgcagggccccctcccttccccaggcgtccctcggcgcctctgcgggcccgaggaggagcggctggcgggtggggggagtgtgacccaccctcggtgagaaaagccttctctagcgatctgagaggcgtgccttgggggtaccggatcccccgggccgccgcctctgtctctgcctccgttatggtagcgctgccgtagcgacccgctcgcagaggaccctcctccgcttccccctcgacggggttgggggggagaagcgagggttccgccggccaccgcggtggtggccgagtgcggctcgtcgcctactgtggcccgcgcctcccccttccgagtcgggggaggatcccgccgggccgggcccggcgctcccacccagcgggttgggacgcggcggccggcgggcggtgggtgtgcgcgcccggcgctctgtccggcgcgtgaccccctccgtccgcgagtcggctctccgcccgctcccgtgccgagtcgtgaccggtgccgacgaccgcgtttgcgtggcacggggtcgggcccgcctggccctgggaaagcgtcccacggtgggggcgcgccggtctcccggagcgggaccgggtcggaggatggacgagaatcacgagcgacggtggtggtggcgtgtcgggttcgtggctgcggtcgctccggggcccccggtggcggggccccggggctcgcgaggcggttctcggtgggggccgagggccgtccggcgtcccaggcggggcgccgcgggaccgccctcgtgtctgtggcggtgggatcccgcggccgtgttttcctggtggcccggccgtgcctgaggtttctccccgagccgccgcctctgcgggctcccgggtgcccttgccctcgcggtccccggccctcgcccgtctgtgccctcttccccgcccgccgcccgccgatcctcttcttccccccgagcggctcaccggcttcacgtccgttggtggccccgcctgggaccgaacccggcaccgcctcgtggggcgccgccgccggccactgatcggcccggcgtccgcgtcccccggcgcgcgccttggggaccgggtcggtggcgcgccgcgtggggcccggtgggcttcccggagggttccgggggtcggcctgcggcgcgtgcgggggaggagacggttccgggggaccggccgcgrctgcggcggcggcggtggtggggggagccgcggggatcgccgagggccggtcggccgccccgggtgccccgcggtgccgccggcggcggtgaggccccgcgcgtgtgtcccggctgcggtcggccgcgctcgaggggtccccgtggcgtccccttccccgccggccgcctttctcgcgccttccccgtcgccccggcctcgcccgtggtctctcgtcttctcccggcccgctcttccgaaccgggtcggcgcgtcccccgggtgcgcc

SEQ ID NO: 94924 - DNA, 560 bp, Homo sapiens
ttctttctttcttttctttttctttctttcttgctttcttttctttcatcatcatctttctttctttcctttctttctttctttctttctatctttctttctttctttctttctttctttctttctttctttctgtttcgtccttttgagacagagtttcactcttgtttccacggctagagtgcaatggcgcgatcttggctcaccgcaccttccgcctcccgggttcgagcgcttctcctgcctccagcctcccgattagcggggattgacagggaggcacccccacgcctggcttggctgatgtttgtgtttttagtaggcacgccgtgtctctccatgttgctcaggctggtctccaactcccgacctcctgtgatgcgcccacctcggcctctcgaagtgctgggatgacgggcgtgacsaccgtgcccggcctgttgactcatttcgcttttttatttctttcgtttccacgcgtttacttatatgtattaatgtaaacgtttctgtacgcttatatgcaaacaacgacaacgtgtatctctgcattgaatact

SEQ ID NO: 94925 - DNA, 1503 bp, Homo sapiens
cttgcggggcgccgggcccgtcctcgcgaggccccccggccggccgtccggccgsgtcgggggctcgccgcgctctaccttacctacctggttgatcctgccagtagcatatgcttgtctcaaagattaagccatgcatgtctaagtacgcacggccggtacagtgaaactgcgaatggctcattaaatcagttatggttcctttggtcgctcgctcctctcctacttggataactgtggtaattctagagctaatacatgccgacgggcgctgacccccttcgcgggggggatgcgtgcatttatcagatcaaaaccaacccggtcagcccctctccggccccggccggggggcgggcgccggcggctttggtgactctagataacctcgggccgatcgcacgccccccgtggcggcgacgacccattcgaacgtctgccctatcaactttcgatggtagtcgccgtgcctaccatggtgaccacgggtgacggggaatcagggttcgattccggagagggagcctgagaaacggctaccacatccaaggaaggcagcaggcgcgcaaattacccactcccgacccggggaggtagtgacgaaaaataacaatacaggactctttcgaggccctgtaattggaatgagtccactttaaatcctttaacgaggatccattggagggcaagtctggtgccagcagccgcggtaattccagctccaatagcgtatattaaagttgctgcagttaaaaagctcgtagttggatcttgggagcgggcgggcggtccgccgcgaggcgagccaccgcccgtccccgccccttgcctctcggcgccccctcgatgctcttagctgagtgtcccgcggggcccgaagcgtttactttgaaaaaattagagtgttcaaagcaggcccgagccgcctggataccgcagctaggaataatggaataggaccgcggttctattttgttggttttcggaactgaggccatgattaagagggacggccgggggcattcgtattgcgccgctagaggtgaaattcttggaccggcgcaagacggaccagagcgaaagcatttgccaagaatgttttcattaatcaagaacgaaagtcggaggttcgaagacgatcagataccgtcgtagttccgaccataaacgatgccgaccggcgatgcggcggcgttattcccatgacccgccgggcagcttccgggaaaccaaagtctttgggttccggggggagtatggttgcaaagctgaaacttaaaggaattgacggaagggcaccaccaggagtggagcctgcggcttaatttgactcaacacgggaaacctcacccggcccggacacggacaggattgacagattgatagctctttctcgattccgtgggtggtggtgcatggccgttcttagttggtggagcgatttgtctggttaattccgataacgaacgagactctggcatgctaactagttacgcgaccccc

SEQ ID NO: 94926 - DNA, 1503 bp, Homo sapiens
cttgcggggcgccgggcccgtcctcgcgaggccccccggccggccgtccggccgcgtcggggsctcgccgcgctctaccttacctacctggttgatcctgccagtagcatatgcttgtctcaaagattaagccatgcatgtctaagtacgcacggccggtacagtgaaactgcgaatggctcattaaatcagttatggttcctttggtcgctcgctcctctcctacttggataactgtggtaattctagagctaatacatgccgacgggcgctgacccccttcgcgggggggatgcgtgcatttatcagatcaaaaccaacccggtcagcccctctccggccccggccggggggcgggcgccggcggctttggtgactctagataacctcgggccgatcgcacgccccccgtggcggcgacgacccattcgaacgtctgccctatcaactttcgatggtagtcgccgtgcctaccatggtgaccacgggtgacggggaatcagggttcgattccggagagggagcctgagaaacggctaccacatccaaggaaggcagcaggcgcgcaaattacccactcccgacccggggaggtagtgacgaaaaataacaatacaggactctttcgaggccctgtaattggaatgagtccactttaaatcctttaacgaggatccattggagggcaagtctggtgccagcagccgcggtaattccagctccaatagcgtatattaaagttgctgcagttaaaaagctcgtagttggatcttgggagcgggcgggcggtccgccgcgaggcgagccaccgcccgtccccgccccttgcctctcggcgccccctcgatgctcttagctgagtgtcccgcggggcccgaagcgtttactttgaaaaaattagagtgttcaaagcaggcccgagccgcctggataccgcagctaggaataatggaataggaccgcggttctattttgttggttttcggaactgaggccatgattaagagggacggccgggggcattcgtattgcgccgctagaggtgaaattcttggaccggcgcaagacggaccagagcgaaagcatttgccaagaatgttttcattaatcaagaacgaaagtcggaggttcgaagacgatcagataccgtcgtagttccgaccataaacgatgccgaccggcgatgcggcggcgttattcccatgacccgccgggcagcttccgggaaaccaaagtctttgggttccggggggagtatggttgcaaagctgaaacttaaaggaattgacggaagggcaccaccaggagtggagcctgcggcttaatttgactcaacacgggaaacctcacccggcccggacacggacaggattgacagattgatagctctttctcgattccgtgggtggtggtgcatggccgttcttagttggtggagcgatttgtctggttaattccgataacgaacgagactctggcatgctaactagttacgcgaccccc

SEQ ID NO: 94927 - DNA, 493 bp, Homo sapiens
ggtcatgaagggcctcaggcgctctgctattgggttccaaggctatcctgagaacaggggtgaggggggatttccgtggggggttaaagccttgtcatgttcgctttcgggagataaaaacaacaggtggcctttatggagacgctgcccagagccaggtctttgccaggctcctgttgggggtcgtcatgcggaatcctgactctgaccatccgaggcatagggaccgtggagatttgcatttcacagatgaggaaacaggtttggagaggtgacacgacctgtcccaggcattcacagccgggatgtgcatagcaggggtttggaactatgaggtgcccaggacccagggttggattgaaaagggcgsaggggactaagataagcagacagttgtccccagcgctggggagagtcttgggaccagtctgatgccttgtatttcccaggctccaggctcctcgccgggacagtgtctccttgggtgcgtgct

SEQ ID NO: 94928 - DNA, 680 bp, Homo sapiens
ggatcctagattcatgaagaaacgggatgaacagggagcacatcaggtctgcttatccattttggagagaacttggggatgcaatccccagatagcctcttgagatgaacatggataattgctccgatgttattctctagaggtgagggtcttgggaaatgagtcttgtttacaagaaataaaccagctccttattgtgcagtaatcctaaaatataccctaggaaggctgggtgtggtggctcacacctgaaatcccagcatttgggaggccgaggcaggcagatcacctgaggtcaggagttcatgaccatcttggccaacatggtgaaacccccatctctactaaaaatacaaaaattagttgggcgtgctggcacttacctgttgtcccagatgcttgggagrctgaggcaggaggatcgcttcaacctgggaggtggaggttgcagtgagccgagatggcaccactgcactccagcctgggcaacagagtgagactccatctgaaaaaaaaaaaaataaaagataaaatacatataacagtaagccaaagtaacagtaagccaaaaataaagcggactctacatgtattgcctgttggctttgagtagggagaggtctggcaaatttaaggtactaaacttcaactagaatgattccagatgtctgtgacccaaa

SEQ ID NO: 94929 - DNA, 646 bp, Homo sapiens
tccctctctctgtggctcctctcttcacctgactgttccccagacccccagaccccctgcccaggtggcccctgagaactgctaagctcaaccgtgacatggatggggccyggctgacccttgggctctccctgggggacccccttttcctgtccctggccacaccctcaccttatccacacccttctcctccctgctgccccgccggctttccaatgtgggtggggggtgggggcagctcctgccttgccagggaaccagggagggcagtgggctcaggagtcaaactcccattcccagggaaggctcaggctgtgggcccagccctgttctgaattctctccacccctcctccccacagagtctcagaaatcgagaagctttcttcctctgggacctgtgcgccacatcctatctcctgtgacgctgcaggagcttccctggttttaagaggtgacatggtggagagaaagcacaggactgggggccacaggtcctggcttctcatccaggctccgctgctccctgactgctgcctttctctgtgggcctcgtttcctccctgatcccaccaggtgaattgtaattctccacacagggctggaacccgcgagtgatcccaggagcccctcctctccggggcccc

SEQ ID NO: 94930 - DNA, 646 bp, Homo sapiens
tccctctctctgtggctcctctcttcacctgactgttccccagacccccagaccccctgcccaggtggcccctgagaactgctaagctcaaccgtgacatggatggggcctrgctgacccttgggctctccctgggggacccccttttcctgtccctggccacaccctcaccttatccacacccttctcctccctgctgccccgccggctttccaatgtgggtggggggtgggggcagctcctgccttgccagggaaccagggagggcagtgggctcaggagtcaaactcccattcccagggaaggctcaggctgtgggcccagccctgttctgaattctctccacccctcctccccacagagtctcagaaatcgagaagctttcttcctctgggacctgtgcgccacatcctatctcctgtgacgctgcaggagcttccctggttttaagaggtgacatggtggagagaaagcacaggactgggggccacaggtcctggcttctcatccaggctccgctgctccctgactgctgcctttctctgtgggcctcgtttcctccctgatcccaccaggtgaattgtaattctccacacagggctggaacccgcgagtgatcccaggagcccctcctctccggggcccc

SEQ ID NO: 94931 - DNA, 746 bp, Homo sapiens
gaggtaagtttgcccctgcacgtgtcgaggaagtttgtcccttcctcgcctatctttctctcccctctgcacgtcctcacctgcctgtcttccgtgggccgcgagcagaggccttgtacttacgggaaggaggaggcagtctgtttctgacycacaggaactgccactccggtgatgcacttgaggacagctactctgaaatcagttcccaggagagaacatttgatttccgagtaggagaggaggcaggaggcaggataatgacgctgttataccatgtgaaactcgcaagggggcagccttggagcttggaacggaggctggcaggaaaagatgcttcagccggggagggaaaatgcaaggtcccgcagtgatgggcaaaggctacggagttgactcttgaacaacgtggggatggggtgccgaaccccacgcagtggaaaatctgtgcatgactttgactcccccaaagttcaactactaatagcctactgttgaccaaaagctttacccagtatataaacaattgagtaagacatatttgaagccaggcacagtggcttatgcctgtaatcccagcactttaggaggccgaggcgggaagactgctcgaagccaggagttcaagagcagcctgggcaagatagtgagacccccacctctacaaataataaaaataaaaataattagctgggcgtggtggtgcgtgcctgtagtcccagctactcaggggtctgaggtgggag

SEQ ID NO: 94932 - DNA, 695 bp, Homo sapiens
cccagagggcagtctcagttgcaatcagtgtktgcccagcctgggcagacaggaaattcctcggatacattattttttctttctttcatagctgtgtctcagaaaggacccatttgtggctctttttcacctcaaaataagatcgatggtatcttgtaaaatgagggtagtgccacttcttagtatttttgaaagctgttttagattttttttttttttccttttctagccatctaaattgactcttccaatataggtctcagaaatccaatatttggagtacaatttcttttaatccagattacacctgccttacaaagcaccccctccttgttcccctctgtttcctctactcagttgggggagaaactcacagctcctccgggatacatatgtgccctcagcagcagctcccaggtgaagttaccagacccctgggcttctccccagctttttctgagttgagtcagacatgtagagtttgggtcacacaggcaagaggaattttccctcggccttactgacaaggacaccaacctagggtgcaaacagatggactatggttcaaggacactggaattgaggagctgatcaaggctctcttcagccttgctctgtccctgcctcttatcagagcacaggtagacacacgggcatagccagcccactcctactgtcacaggcgccccaccatt

SEQ ID NO: 94933 - DNA, 736 bp, Homo sapiens
agttagcaaaccttgatgaagcacctgctggacactgagggacccaaagctcaatcagccataatccctgctttcagagtttatattgtacctgcctaatccacccggcgtgactcatttcaacactaagtactaggggtgttgtcaggagacaaatctgaagtcaggagaggaaaatgcaaaggagccctgccgtgtgatggatgtgcattctcacttgggtcttgaagttctcattcctacatctcaagctagccaggcagtctcctctctatcagaagaaagcactggtaattggctagactggctatgttgaaggtaacatgaactcttaagatcttgacccagggcgacttggttttgcttaaggtggcatcaccaatgttccaaatcctttrgggagatgagggcatccccacagaaaaagaggaataatagaccaatggattttctcctttcaccagtatgtttggaaccctctgatccaatgtcttttgatactgatctcttgtccaaatgagaatgtcgctttagctgaaattcaaatggctgtgacaatttaccgaaatgatgaagtaaccaccattcccacctttcaccgcctaggctccaagtctgaatacatttttgaaataggaactcccttttgcaaaaaagaaacctgggtgtcagggaggtgaagtgacttgccctaggagcagacagcatgccaagaatggaattaggctcaggatcc

SEQ ID NO: 94934 - DNA, 736 bp, Homo sapiens
agttagcaaaccttgatgaagcacctgctggacactgagggacccaaagctcaatcagccataatccctgctttcagagtttatattgtacctgcctaatccacccggcgtgactcatttcaacactaagtactaggggtgttgtcaggagacaaatctgaagtcaggagaggaaaatgcaaaggagccctgccgtgtgatggatgtgcattctcacttgggtcttgaagttctcattcctacatctcaagctagccaggcagtctcctctctatcagaagaaagcactggtaattggctagactggctatgttgaaggtaacatgaactcttaagatcttgacccagggcgacttggttttgcttaaggtggcatcaccaatgttccaaatcctttggggagatgagggyatccccacagaaaaagaggaataatagaccaatggattttctcctttcaccagtatgtttggaaccctctgatccaatgtcttttgatactgatctcttgtccaaatgagaatgtcgctttagctgaaattcaaatggctgtgacaatttaccgaaatgatgaagtaaccaccattcccacctttcaccgcctaggctccaagtctgaatacatttttgaaataggaactcccttttgcaaaaaagaaacctgggtgtcagggaggtgaagtgacttgccctaggagcagacagcatgccaagaatggaattaggctcaggatcc

SEQ ID NO: 94935 - DNA, 736 bp, Homo sapiens
agttagcaaaccttgatgaagcacctgctggacactgagggacccaaagctcaatcagccataatccctgctttcagagtttatattgtacctgcctaatccacccggcgtgactcatttcaacactaagtactaggggtgttgtcaggagacaaatctgaagtcaggagaggaaaatgcaaaggagccctgccgtgtgatggatgtgcattctcacttgggtcttgaagttctcattcctacatctcaagctagccaggcagtctcctctctatcagaagaaagcactggtaattggctagactggctatgttgaaggtaacatgaactcttaagatcttgacccagggcgacttggttttgcttaaggtggcatcaccaatgttccaaatcctttggggagatgagggcatccccacagaaaaagaggaataatagaccaatggattttctcctttcaccagtatgtttggaaccctctgatccaatgtcttttgatactgatctcttgtccaaatgagaatgtcgctttagctgaaattcaaatggctgtgacaatttaccgaaatgatgaagtaaccaccattcccacctttcacygcctaggctccaagtctgaatacatttttgaaataggaactcccttttgcaaaaaagaaacctgggtgtcagggaggtgaagtgacttgccctaggagcagacagcatgccaagaatggaattaggctcaggatcc

SEQ ID NO: 94936 - DNA, 815 bp, Homo sapiens
ttcttatgtatttccctatgaatgaaagcagtcctgagaagaaaacagcatttattagaattgctttwaaaagagattataataattagactcttgattatgtgaacatcattcaaggcgtacttttgatttttatttttggtgtactgaatactttaaaacaaaagtattggattttttataatataagcaacactatagtattaaaaagttagttttcactctttacaagttaaaatgaatttaaatggttttcttttctcctccaacctaatagtgtattcacagagacttggcagccagaaatatcctccttactcatggtcggatcacaaagatttgtgattttggtctagccagagacatcaagaatgattctaattatgtggttaaaggaaacgtgagtacccattctctgcttgacagtcctgcaaaggatttttagtttcaactttcgataaaaattgtttcctgtgactttcataatgtaaatcctgtctagggatatcacacattttagcagtcaaattaagtatacttcagcaaaatttgcatggtatgctgaacattactacaactaacattcaataatagaagtcctaattctaattgtgtaattttggggcatgtgaaggaaacagaaatagccttaattttcattatagcctgagaatagcaatgaacttgattttgctcaagtgtaacaaatgtaggtcattgaaggtcacagcaggagaaattttggggggattggcatgccgtgtgaaaaatattaaaatctaagatcatattcagagttagccatatagaatgtt

SEQ ID NO: 94937 - DNA, 815 bp, Homo sapiens
ttcttatgtatttccctatgaatgaaagcagtcctgagaagaaaacagcatttattagaattgcttttaaaagagattataataattagactcttgattatgtgaacatcattcaaggcgtacttttgatttttatttttggtgtactgaatactttaaaacaaaagtattggwttttttataatataagcaacactatagtattaaaaagttagttttcactctttacaagttaaaatgaatttaaatggttttcttttctcctccaacctaatagtgtattcacagagacttggcagccagaaatatcctccttactcatggtcggatcacaaagatttgtgattttggtctagccagagacatcaagaatgattctaattatgtggttaaaggaaacgtgagtacccattctctgcttgacagtcctgcaaaggatttttagtttcaactttcgataaaaattgtttcctgtgactttcataatgtaaatcctgtctagggatatcacacattttagcagtcaaattaagtatacttcagcaaaatttgcatggtatgctgaacattactacaactaacattcaataatagaagtcctaattctaattgtgtaattttggggcatgtgaaggaaacagaaatagccttaattttcattatagcctgagaatagcaatgaacttgattttgctcaagtgtaacaaatgtaggtcattgaaggtcacagcaggagaaattttggggggattggcatgccgtgtgaaaaatattaaaatctaagatcatattcagagttagccatatagaatgtt

SEQ ID NO: 94938 - DNA, 815 bp, Homo sapiens
ttcttatgtatttccctatgaatgaaagcagtcctgagaagaaaacagcatttattagaattgcttttaaaagagattataataattagactcttgattatgtgaacatcattcaaggcgtacttttgatttttatttttggtgtactgaatactttaaaacaaaagtattggattttttataatataagcaacactatagtattaaaaagttagttttcactctttacaagttaaaatgaatttaaatggttttcttttctcctccaacctaatagtgtattcacagagacttggcagccagaaatatcctccttactcatggtcggatcacaaagatttgtgattttggtctagccagagacatcaagaatgattctaattatgtggttaaaggaaacgtgagtacccattctctgcttgacagtcctgcaaaggatttttagtttcaactttcgataaaaattgtttcctgtgactttcataatgtaaatcctgtctagggatatcacacattttagcagtcaaattaagtatacttcagcaaaatttgcatggtatgctgaacattactacaactaacattcaataatagaagtcctaattctaattgtgtaattttggggcatgtgaaggaaacagaaatagccttaattttcattatagcctgagaatagcaatgaacttgattttgctcaagtgtaacaaatgtaggtcattgaaggtcacagcaggagaaattttggggggattggcatgccgtgtgaaaaatattaaaatstaagatcatattcagagttagccatatagaatgtt

SEQ ID NO: 94939 - DNA, 1811 bp, Homo sapiens
agtgcagaaattcagcctacttttactctgtgacactaatgcgtaattgcttaatagattcatctgcaagaaatgctattgaaaatccttgatttggcatggttaaatatttggcggttgaaaaatctatttgttttgaaaattccacatgtaaatttcagtatagtgaatgtggggaaggggcatgttttaattgcttatatggtagacttttaaaaaatattgtgctctgacaatttgtgttaagaaaacacgtatataacatgttaagcttgaaaatgttctaatactgtttctaacctctctaatcaagccatgatttacatgggcctattaaactgactcagtgacatttaaggtggtttataatggccaagagccattataacatggttgccatctttgagtagaacttctagtggaaactgataggaattttcattaaaaaacaaagcaaaaccaaaaattagtgattatatctgcattgaatttgcattactctaattaacttttggaattgcttatccaagatgtgtatggacatcaaattcttagatctgaaatgtttgatatccttcagcgaaaatggtgatttgtttttcttggaaatgaaaatcaggaaaaaagtagagttttgaaaccttacctcaaagtgctttcttaatagacattaacctttccaaaactcttggaaatattagaaaaaaatgacattgccaagatgctatgggtagcttatgctacttatttaggaactgatggcctctttggttatattaaatgtcacacaatgaggttttttttgccagatccaggacaaataaaaggccaaatatgcactttaatcctaatatatccatttggcttttttccccactccatctagtatttcttgaataaataacaaactttatagtggacttaaaggataatcagtaaagtaaatattttgtaggtttattttggcttcaattttaaatacccatgtgaatcctgaaataatttacataattgtagaaataaattatggttgatatgataaaccagttgtttttccaacctttgggataattttaagaagatcctgtaaccttaaagtggatagttcaaaacatgatctggtagcatttccagggcggtattatgcatttaaaatatgtggcaaatggtatttacggatcataaatagatcccgctcccattttgaaagcttatcctttaatgacgagcttcagccagtgcggtgggagtactgtgatcctcacgtggtggtgacggggaggcagacattgagaactgaagggctccctttgatcattagccttacataggatgcctttaatgttgagctagattggaagcccaagtgactgctgaagtgcaccaaattaactcagaagtcaccaatttcactccatttatggaagggtattaacagggggttgagaaacaatttaaggaaatgttaaataatgtattatttccaaatcactgcatcatataattaacatcctacctgttgttagcaattatttataggtcatacagtataccaaaatcagccaaagcaataaatcacccagaataaggcttctcgatgagaaagatcccctttgaccaagtatgcaaagtytgggctaccttttagtatttttggttcacagttaaatccagttatggatggtggaaccaattctagggagaagctcctgcagataaagcacatagccatctagcttttggccagccaaccagaaatgatcccaggtagactatcagtgcatttgtgttgctgttaaaaaaaaaaaaaa

SEQ ID NO: 94940 - DNA, 761 bp, Homo sapiens
tgcccggaagtgaaagtctagccaaacagtttaacaggaaaaccgttagctgtcctgtggaggttaattttgcagtttattttggaatggaacaaaagaaggtattgaagataggaatctcatttctatatgctagaatctaaatttcttaactttctgtagtatgggccattttcaaatcagctaaagtcctaaaaccagactatgggaaacacacacttctaagctcaatattaaatatctaaagtgactaactaacgtagggttggagaggcagggtccccctggacttttcaaactcctaccctcacaaaaaatctagaacttcttctcagtaacaaaaataagatgacgtataatcatttttcattgttaataaataatctctatccatcatggcattgcattgaatttgtgttaattgttgctaaaaaatgactgtgggttaaacatttgtgattcatataataatagaaataataaatgtaaatgttttaagtgaacaagygagattttaatagctcaacaggcaaatagcatgaactgatgctctgcaaaggtgagggacacctggcctgagacaggatgtcttatctgattttggtctgaatttcatttggaaaactggcagctgctggtcaacctgcagggatatgatcccatgagctgatatgcaatgttgacttttgtatttttgtcagcatgaaataatttttttttttttaaatcagggtcagagtctcgagtaactagcagccagc

SEQ ID NO: 94941 - DNA, 1913 bp, Homo sapiens
tgaagtcatcgaattcaagctcccaccgcctgtrggaatgtttaaagtactttcccagcggtattcatatgcactgtctgtctaatatgtatgtaatatgaatgcataccttttaactatagaagtgcattattctctgcaggttgacaaaaatgtagtccatttcttgaggcgactggaagaggaaacattaggtggcatggagtaaggctcagaaggggacagtgtgacctcaaggagagaatggctgctgaggggcttgtaggcatgtaactgcagctctgtaagggaagagaaatgcatgtctcatttcctatttatttcagtggcacctgtttttgacctgatgtcaagcacatagacggtgctcaatgaatatgttactgataactaaatgctgagaccagcaatagagagaaaaataaaggaggtagtgggtagggcttcctttcttcctcccccagtcctccccaaggtcccttccacacacacgaggtcctgtatttcaggatgactcactctgatgcctcctcccctagctcgtgggccacgtagataatgtcagggtaccccatgcagctggagatgttattttggggatagtagaagaggaagatgaggcacatctcattaatggtgctggggcctccctggaggaaacagacaaagatggagagacaaagatacaaaggcatgcagagacaggaggacaaagcaaacagaaaatagttgaagtggttatcttaccagtgatgccattctccttttcccttaaggtagagccagctcactgccctatttgctgctctattttcattggtggacaattattgatgttattccaaaaagcattccatatatctgccctgtcctcagcttcactgccactatcctgatttgggctagactatctgcctctcaactattgtcagtcactcatctgttctaattgcaatctgacctctgtagagctaccagacaagttgtttacaatttgtcttgcatcctgccatttgcctgttctgaaacctccagtggcttccagtcactggaatagtcagtcatcactaaaccaattatttgattctatctaataaattccaacccattcattcattccatttacttacctggcaaatatttatagagttagccctgctgtcctggagatataggtgggtcaggatcacccctgcttcaaggactgtttccaactttatctacctcatcctcattccattcctttagatatcttttgccaaccaaacttcttcatgtgcaccccacgctctccttatatatggctttctcagttttttccttctccagaattccccatctctatgtgtctaaagaaggactcattcacctacgtcacatgttcagttcactgtagtaggatctcatgattctttcctgtgaatttccctagtgggttattcccgttcttcttgtatggtatatatcacttactaacttgtgatataatcatttgtagggcggtattttttcctcagttgcctgcaacaccttttgaatcccacaagcactgaaccactcctgatgcacaaaacgggggattttcttgtgatcatagaaacaatagccaactttaattgagaatctactacaagtcaggcaatgatctaggtgttttgcatgtgttaaccaactcccacaacaatcttgtgaggtagaaagtagtattaatcttatgtgaattgggaaactgagatacaaaaaagtcaaataacttgtctaaagttagaaatgtactaaatgattgtgctgatattcaaacccaggcaatgaggccccagaatctctgctcttagtcgctatagcatactatatttccatggtcttggtgggttattggcagataatgtgagaaatccctgttcctatcttag

SEQ ID NO: 94942 - DNA, 795 bp, Homo sapiens
ccggtgcaaaagggagctggttgcttgcttggcaaaaaaatgaattcaccaattggccaatctgctgaaagtcaaaatgaaaggctaatrtatgagactgatgacagttcatggttcttggtataacttcaacagcgagtgaacatttttttctttgtctatagctttctttcagccatcgatcctcagttgtgtcttagcctcttatcagtccagctcactttgatactaaatttgattgttgtgtatctcagcaagaagcacgtctcacattctctgtattttatgtggtcatgagtgtgttcctgtcttattcttattttatgtggtgcatttttaaataggactgtacagaatacaagcatctatttgtatatgactctcatcttttatggggagaggtcagagtaggtgagcgtgcactttgattctctgctggaatctctttggattctatgtcccctgtcacatggtttattttcatatgcatatttctcatggttctcctgactcttttagcaatgctcattgcaggatattagaaattgtattacttctaatggcagaatgttagaaattgtgttgactcttaaggcaaaataaaatacccggactcacctttccattgctgtgtctattagtcgtggtcctggagatatcaaggagggacaaaaggagtatttgcaaaggtgtggcagggttaagggaacccagtaagagaagtagaagtagcctaagaacagcagaatctgtggctcttattcacattggcctgaaataagtaggagaggatgt

SEQ ID NO: 94943 - DNA, 1527 bp, Homo sapiens
cacacacaacaaagggatggaacccacaaggaaacagacacctcaggtcacacaagctcatctgtaaactatttgctccttaggatgggcaagtcccctggggcgcaggggactcagctgtatgcctctgtgccaacagcgaaaatgtggccttaaactgctccttcttctttgttagcaaataacctagttgaccaattcatagagcagaggttctctcagttctctatactctacaccccgagaggaagtcagttagtgagatgtaagattcttttataagaaaaagaccaggtgtaaagattaagaaatgctgagctttgctagaggtaagaataagatgtaaatcaactctggaacatttaatttccaaatctttgtgagaaagacaatcttgtttctgatttattgtgtggatagagaatgtgagagattctgtgctctgggctttgcaaactcaatagagttcaaggatcaataaactcggagagacccttcactgcaaagaagagctttgaaatctaatgagctttcgggacactgattcagctcctgtatctttaacaacgcggttgacatgcttgctcttcctgggtaactcagatgctaacttctaactcatttaaaggcatttgaagaactaggagcacagagtcwccagtgagaggaagaggagagtttgcagagaagctggcttgcaataaggcaatgagttcatctttaaatacttggagtttgaggtgcagatggatatagttggcaggctcctaggtaaggcatgttatggagaaggtgctatgaattgataatatcaaagcaaatctacagggatcctctgcaagtgtgcatctgtatctcagatcaattatagttgacttcagtcctgcctgattcatctcccaaaaatgtagtctgcctgattcatctcccaaaaatgtagcctccgcttaaaggagctttcaagttgggggtggtgggccattcagtgttgtcactaacagatgcatcttgtgggggtaaaatgtcccaaagtatcttttcttgcttatgttcataagggcgctggtctggaatgtgccacatctgttctcactctgccatggactcctggaccctctgtgtgtccctttgtatcctggtagcgagtgagtcctcatgtatttatcatcctcatgctgggcctctgtatagatgacttcctgtattttccttattctgtttcctaattttgcgttcttttatagcatgcacagatgctggcattatccagtcacccaagcatgaggtgacagaaatgggacaaacagtgactctgagatgtgagccaatttttggccacaatttccttttctggtacagagataccttcgtgcagggactggaattgctgagttacttccggagctgatctattatagataatgcaggtatgcccacagagcgattctcagctgagaggcctgatggatcattctctactctgaagatccagcctgcagagcagggggactcggccgtgtatgtctg

SEQ ID NO: 94944 - DNA, 1527 bp, Homo sapiens
cacacacaacaaagggatggaacccacaaggaaacagacacctcaggtcacacaagctcatctgtaaactatttgctccttaggatgggcaagtcccctggggcgcaggggactcagctgtatgcctctgtgccaacagcgaaaatgtggccttaaactgctccttcttctttgttagcaaataacctagttgaccaattcatagagcagaggttctctcagttctctatactctacaccccgagaggaagtcagttagtgagatgtaagattcttttataagaaaaagaccaggtgtaaagattaagaaatgctgagctttgctagaggtaagaataagatgtaaatcaactctggaacatttaatttccaaatctttgtgagaaagacaatcttgtttctgatttattgtgtggatagagaatgtgagagattctgtgctctgggctttgcaaactcaatagagttcaaggatcaataaactcggagagacccttcactgcaaagaagagctttgaaatctaatgagctttcgggacactgattcagctcctgtatctttaacaacgcggttgacatgcttgctcttcctgggtaactcagatgctaacttctaactcatttaaaggcatttgaagaactaggagcacagagtcaccagtgagaggaaraggagagtttgcagagaagctggcttgcaataaggcaatgagttcatctttaaatacttggagtttgaggtgcagatggatatagttggcaggctcctaggtaaggcatgttatggagaaggtgctatgaattgataatatcaaagcaaatctacagggatcctctgcaagtgtgcatctgtatctcagatcaattatagttgacttcagtcctgcctgattcatctcccaaaaatgtagtctgcctgattcatctcccaaaaatgtagcctccgcttaaaggagctttcaagttgggggtggtgggccattcagtgttgtcactaacagatgcatcttgtgggggtaaaatgtcccaaagtatcttttcttgcttatgttcataagggcgctggtctggaatgtgccacatctgttctcactctgccatggactcctggaccctctgtgtgtccctttgtatcctggtagcgagtgagtcctcatgtatttatcatcctcatgctgggcctctgtatagatgacttcctgtattttccttattctgtttcctaattttgcgttcttttatagcatgcacagatgctggcattatccagtcacccaagcatgaggtgacagaaatgggacaaacagtgactctgagatgtgagccaatttttggccacaatttccttttctggtacagagataccttcgtgcagggactggaattgctgagttacttccggagctgatctattatagataatgcaggtatgcccacagagcgattctcagctgagaggcctgatggatcattctctactctgaagatccagcctgcagagcagggggactcggccgtgtatgtctg

SEQ ID NO: 94945 - DNA, 1527 bp, Homo sapiens
cacacacaacaaagggatggaacccacaaggaaacagacacctcaggtcacacaagctcatctgtaaactatttgctccttaggatgggcaagtcccctggggcgcaggggactcagctgtatgcctctgtgccaacagcgaaaatgtggccttaaactgctccttcttctttgttagcaaataacctagttgaccaattcatagagcagaggttctctcagttctctatactctacaccccgagaggaagtcagttagtgagatgtaagattcttttataagaaaaagaccaggtgtaaagattaagaaatgctgagctttgctagaggtaagaataagatgtaaatcaactctggaacatttaatttccaaatctttgtgagaaagacaatcttgtttctgatttattgtgtggatagagaatgtgagagattctgtgctctgggctttgcaaactcaatagagttcaaggatcaataaactcggagagacccttcactgcaaagaagagctttgaaatctaatgagctttcgggacactgattcagctcctgtatctttaacaacgcggttgacatgcttgctcttcctgggtaactcagatgctaacttctaactcatttaaaggcatttgaagaactaggagcacagagtcaccagtgagaggaagaggagagtttgcagagaagctggcttgcaataaggcaatgagttcatctttaaatacttggagtttgaggtgcagatggatakagttggcaggctcctaggtaaggcatgttatggagaaggtgctatgaattgataatatcaaagcaaatctacagggatcctctgcaagtgtgcatctgtatctcagatcaattatagttgacttcagtcctgcctgattcatctcccaaaaatgtagtctgcctgattcatctcccaaaaatgtagcctccgcttaaaggagctttcaagttgggggtggtgggccattcagtgttgtcactaacagatgcatcttgtgggggtaaaatgtcccaaagtatcttttcttgcttatgttcataagggcgctggtctggaatgtgccacatctgttctcactctgccatggactcctggaccctctgtgtgtccctttgtatcctggtagcgagtgagtcctcatgtatttatcatcctcatgctgggcctctgtatagatgacttcctgtattttccttattctgtttcctaattttgcgttcttttatagcatgcacagatgctggcattatccagtcacccaagcatgaggtgacagaaatgggacaaacagtgactctgagatgtgagccaatttttggccacaatttccttttctggtacagagataccttcgtgcagggactggaattgctgagttacttccggagctgatctattatagataatgcaggtatgcccacagagcgattctcagctgagaggcctgatggatcattctctactctgaagatccagcctgcagagcagggggactcggccgtgtatgtctg

SEQ ID NO: 94946 - DNA, 1286 bp, Homo sapiens
ccataccccaaacctcagcataacacaatatacccacgtaacatacctacgcgtgtcccccccgcatctaaaataaaatttgaaattaaaaaaaaactctggcacaaatacagacatgattcattaagggtgctttgggcagtgagtcagagacaggaaactggggaaaatgtgagagaagactggcaaactgaggacgtgtcatttggatggggccagaaattaaagaaaaaaataatcatatagtgaatgaaatggctttagtatctagattttagaacaaagaaaatttctgtgaatggaccagaacaagctattggtcttagatgcacctaagctctctggttttggttttttgttgttgttgttttagagacagggtcttgctctgtcactcaggctggaattcaatggcacagtaatagctcattgcagccgtgacctcctcccctgtcagcctcccatgtagttaggagcttttttttttattactattttatgtagaggcaaaggtttctctgtgttaccaaggctggtcttaaattcctggtgtcaaacaatcctcccacctcagcctccaaaagtgctgggattatagacctgagtcaccccatgtgggttttgttttgttttgttttgttttgttttgttttgttttaggagaagagaaaacacattcaggcatccaggttcagggtccaaaaaccaactcacctctgcagactttatagatgccctagattcactgcgcccctcaagggaagaaacctcaaacctctttacgcctcccacagtgggtttctcctatggtgtggttctctgttcccatcttcactggcctcctctgcccatcttttcttttttaacataagatccctatgtcatattgacccttttctctctgttgctctttggtctctcatatgtcactcaaacccctaactttggggggccactcagaatccccttaactctgtctctgtttttagatgatttggacagtggctatgggatgctgcacatctccccaacatatgccagtgtgagagaagggctgagcacccatcacagctcttctccataggagagagccctcccaaaccccgcagctcccacccaccaatgtaggactcctgtttgttagtcactcctcaggmagcatctggatttcagatcaatgtctccaactgcctgctggaaataaccacctctacatccttaaaggatctcaatatagcaggccacctgtctcctcatgcaggaccatgctcttgataccttgcaca

SEQ ID NO: 94947 - DNA, 602 bp, Homo sapiens
ggatccagttcttccaattcccagtttaatgagtgctctttccccctattctgtaaagttttttggtaacttgtctgtaaatatcggtcatggtacattgtccactgggtggcactcaagagattgaaatttgagttccttctctttgagtagttgggtagtcttgaactagtccctttccctcctgggacagattttcccagtttgtaaaataaaggggctggatttagtgctctttatagacctttctctctcagatatttcctgagtttttcattctagaaatgctggaatcatatatttgtaactgaaactagtaatcttcttgttcttgagtcttcttcatctctaaagtggacataaaatacatacctctcgtggttgttgtgaagcccgtggcactwttcatggtagagcaggtgatcaaaagtcgcttgcatccttctgtccaattgggaacaaaagctttcatgtataattctcacacctctcccttggaatcagacaatcttatcagaaaacctaaaaatttttttcaatcaatttagaagtttattttgccaaggctaaggacatgcctgtgacactgcctaagaaggtcc

SEQ ID NO: 94948 - DNA, 611 bp, Homo sapiens
aaagaamaaaaaaaaaattagccgggcacggtggcacacacctgtagtcccagctattcgggaggccgaggcaggaaaatcgcttgaacctgggaggtggaggttgcagtgagctgagatcgcaccattgcccacccagccttgatgacagagtgagatccgtctcagcagcagcagcaacagcaaaacaaaaacaacaacaaaaagccatgtgccctgaagtcttcatctcagggtcgggttctagagggtacctcaaactaaggcatgagttagctaacccttggggacttttcacctctgatttctggtttttctccctcatcctctccccatagaaaagtccaacctgatcgtggtccagagaggtcacagcccacccacatcatccttggttcagccccaatcccaataccagctgagtcagatgacatttcacaagatccctgctgacagcctggagtgggtaagaggccctgggaaatgaggcgatacctcagtctggggtccagagactcagatgcgtggcctcaggcatatgctataattttaccttgcctcggttttcccatctgtaaaatggggccagcagctatgtctcgcttgggctg

SEQ ID NO: 94949 - DNA, 611 bp, Homo sapiens
aaagaacaaaaaaaaaattagccgggcacggtggcacacacctgtagtcccagctattcgggaggccgaggcaggaaaatcgcttgaacctgggaggtggaggttgcagtgagctgagatcgcaccaytgcccacccagccttgatgacagagtgagatccgtctcagcagcagcagcaacagcaaaacaaaaacaacaacaaaaagccatgtgccctgaagtcttcatctcagggtcgggttctagagggtacctcaaactaaggcatgagttagctaacccttggggacttttcacctctgatttctggtttttctccctcatcctctccccatagaaaagtccaacctgatcgtggtccagagaggtcacagcccacccacatcatccttggttcagccccaatcccaataccagctgagtcagatgacatttcacaagatccctgctgacagcctggagtgggtaagaggccctgggaaatgaggcgatacctcagtctggggtccagagactcagatgcgtggcctcaggcatatgctataattttaccttgcctcggttttcccatctgtaaaatggggccagcagctatgtctcgcttgggctg

SEQ ID NO: 94950 - DNA, 611 bp, Homo sapiens
aaagaacaaaaaaaaaattagccgggcacggtggcacacacctgtagtcccagctattcgggaggccgaggcaggaaaatcgcttgaacctgggaggtggaggttgcagtgagctgagatcgcaccattgcccacccagcctkgatgacagagtgagatccgtctcagcagcagcagcaacagcaaaacaaaaacaacaacaaaaagccatgtgccctgaagtcttcatctcagggtcgggttctagagggtacctcaaactaaggcatgagttagctaacccttggggacttttcacctctgatttctggtttttctccctcatcctctccccatagaaaagtccaacctgatcgtggtccagagaggtcacagcccacccacatcatccttggttcagccccaatcccaataccagctgagtcagatgacatttcacaagatccctgctgacagcctggagtgggtaagaggccctgggaaatgaggcgatacctcagtctggggtccagagactcagatgcgtggcctcaggcatatgctataattttaccttgcctcggttttcccatctgtaaaatggggccagcagctatgtctcgcttgggctg

SEQ ID NO: 94951 - DNA, 611 bp, Homo sapiens
aaagaacaaaaaaaaaattagccgggcacggtggcacacacctgtagtcccagctattcgggaggccgaggcaggaaaatcgcttgaacctgggaggtggaggttgcagtgagctgagatcgcaccattgcccacccagccttgatgacagagtgagatccgtctcarcagcagcagcaacagcaaaacaaaaacaacaacaaaaagccatgtgccctgaagtcttcatctcagggtcgggttctagagggtacctcaaactaaggcatgagttagctaacccttggggacttttcacctctgatttctggtttttctccctcatcctctccccatagaaaagtccaacctgatcgtggtccagagaggtcacagcccacccacatcatccttggttcagccccaatcccaataccagctgagtcagatgacatttcacaagatccctgctgacagcctggagtgggtaagaggccctgggaaatgaggcgatacctcagtctggggtccagagactcagatgcgtggcctcaggcatatgctataattttaccttgcctcggttttcccatctgtaaaatggggccagcagctatgtctcgcttgggctg

SEQ ID NO: 94952 - DNA, 611 bp, Homo sapiens
aaagaacaaaaaaaaaattagccgggcacggtggcacacacctgtagtcccagctattcgggaggccgaggcaggaaaatcgcttgaacctgggaggtggaggttgcagtgagctgagatcgcaccattgcccacccagccttgatgacagagtgagatccgtctcagcagcagcagcaacagcaaaacaaaaacaacaacaaaaagccatgtgccctgaagtcttcatctcagggtcggsttctagagggtacctcaaactaaggcatgagttagctaacccttggggacttttcacctctgatttctggtttttctccctcatcctctccccatagaaaagtccaacctgatcgtggtccagagaggtcacagcccacccacatcatccttggttcagccccaatcccaataccagctgagtcagatgacatttcacaagatccctgctgacagcctggagtgggtaagaggccctgggaaatgaggcgatacctcagtctggggtccagagactcagatgcgtggcctcaggcatatgctataattttaccttgcctcggttttcccatctgtaaaatggggccagcagctatgtctcgcttgggctg

SEQ ID NO: 94953 - DNA, 808 bp, Homo sapiens
ccatggtgacagtagttattttattttatttatttattttttgagacggagttttgctcttgttgcccaggttggggtgcaatggcatgatctcggctcactgcaacctccacctcccaggttcaagtgattctcctgcctcagcctcccgagtagctgggattacaggcatgtggcaccacacccggcttttttttttttttttttttttttttttttttgkatttttagtagagacagggtttctccatgttggtcaggctggtcttgaacttttgacctcaggtgatccgcctgccttggcctcccaaagtgctgggattacaggcgtgagccactgcacctggctggcagtatttctttgaaactgacgatggtgacggtatttagtgggaaattggcccacactacagatcagggctttgtttaccagtacagcactagctgtgaacaagtgcggtgtgatgacgaaagtgctcaccaggtatagggtggcacagcaggggctgggactgactttattgcgtggagctaaggaggcggggcttacacagtattgaaggatgagctgtgaagacagagtggtaaagggaggcccagacaagtgtgggatggcaagacgtatcctgtggttctgtgaaaggaaactgtggatgtgaaggcacttggcaacttaatacaaggtgtcaagcgaaaaggtgtagagtaagcaaatccaacataggatgtataaagtgaactaattagggctggggaagggtatccatgtcataacacattaacctttgctctttagctgataggatcc

SEQ ID NO: 94954 - DNA, 514 bp, Homo sapiens
cgtacattcacaatgctctacaagcatcacccccatccatttccagaatgtttttgtcatctcaaacagaaactgtacccattaaaacacaattactcgttccctgtatctagccactggtaacttttattttactttatgactctaggaatttgcctattctaggtacttaatataaatggaatcctataatatttatacttttgggtctgggttatttcacatatgttgtattacgtgtcagaatttcattccttaactggaataattttgctttatatatgaaacataagtttaaagtacactgaagagaaataataaatttgtgaatgacagttagtaaatatgagttgcacacagacaatkttcactttgaagattatagaaaagcaattataatgaatgatgggtaaaaaaagcaaaatatataacgtgtatatatcttcccaaaatatgcatgcacatggacaaggacttgaagggaataaataaacatgaaaattgttttgggtag

SEQ ID NO: 94955 - DNA, 514 bp, Homo sapiens
cgtacattcacaatgctctacaagcatcacccccatccatttccagaatgtttttgtcatctcaaacagaaactgtacccattaaaacacaattactcgttccctgtatctagccactggtaacttttattttactttatgactctaggaatttgcctattctaggtacttaatataaatggaatcctataatatttatacttttgggtctgggttatttcacatatgttgtattacgtgtcagaatttcattccttaactggaataattttgctttatatatgaaacataagtttaaagtacactgaagagaaataataaatttgtgaatgacagttagtaaatatgagttgcacacagacaatgktcactttgaagattatagaaaagcaattataatgaatgatgggtaaaaaaagcaaaatatataacgtgtatatatcttcccaaaatatgcatgcacatggacaaggacttgaagggaataaataaacatgaaaattgttttgggtag

SEQ ID NO: 94956 - DNA, 514 bp, Homo sapiens
cgtacattcacaatgctctacaagcatcacccccatccatttccagaatgtttttgtcatctcaaacagaaactgtacccattaaaacacaattactcgttccctgtatctagccactggtaacttttattttactttatgactctaggaatttgcctattctaggtacttaatataaatggaatcctataatatttatacttttgggtctgggttatttcacatatgttgtattacgtgtcagaatttcattccttaactggaataattttgctttatatatgaaacataagtttaaagtacactgaagagaaataataaatttgtgaatgacagttagtaaatatgagttgcacacagacaatgttcactktgaagattatagaaaagcaattataatgaatgatgggtaaaaaaagcaaaatatataacgtgtatatatcttcccaaaatatgcatgcacatggacaaggacttgaagggaataaataaacatgaaaattgttttgggtag

SEQ ID NO: 94957 - DNA, 1474 bp, Homo sapiens
atattagtgagatattttatatatattttttttgagacagggtctggctttgtcacccaggctggagtgcagttgctggatcctgtctagctgcagtgtcaacccccctggctatagcaatcttcccacctcagcttccccagtaccagggactacaggttcatcccaccatgctccgctaattttaatttttttggagagacgagttttcgcaatgttgcctaggcttttctcaaactcctttcctgtgtccacctctcaatgtgatgcgatgacacgcttgaacaacaatgttcatacattttaggaagaaagtcctaagcctacttaagttcttttagaaaggatggattggaatttactttctctaaactcaatagtttctagaactataaattagagtcaagtattaaaggccccaggaagacaattttagaagaaaagttttcaaagtgagccaggctagatgctttataattgagcattcactggatatgtcttggcatcctaatggccaacgctgaggttttttattttttttaataatgtggaagactgaactttgttacatgtacattgtgtagaatttccaaagttagaaacttttcttaaaacacttcactacattccttttatttacgtattttttaaaaaatttacactatgcatggatacatccttaatagaagattaggattctgcagtttcaaaggcaaaacctaatcctttcgattggctctatttaattgtataattgctttatcgattaaaattttaaaaaaacttctacaaatacattccaatgttagataactaaatcagttgtctgatgtcattatacaatgtcactcccagacgggagtgaagtggcaggatctcggctcactgcaacctccaccccaggggttcaagcaaatcttctgctgggattacaggtgcctgccaccatgcccagctaatttttgtatttttagtagagagggctggtctcgaactcctgacctcagataatccacccgccttggcctcccaaagtgctgggattacaggcatgagctgccacagcggcctgatgttacctttttaagtccacataaagtgactttataattatcttttaatgactccttattaaaacctaaaatatatgaagaactattttgttttctrcttttatctacaatactagattttccatgatttttaaagagtagaagactttatttatttatttatttatttatttatttattttgaaatgtagtctcactctgttgcccaggctgaatcgcagtggcactgtctaagttcactgcatcctctgcctccctggttcgggtgattctcctgccacagcctcctgagtagctgggactacaggtccgtgcaactatgccagcctaatttttgtatttttattagatatagggttttgccatgttgatcagacttgtcttgaactcctgacctcaag

SEQ ID NO: 94958 - DNA, 1474 bp, Homo sapiens
atattagtgagatattttatatatattttttttgagacagggtctggctttgtcacccaggctggagtgcagttgctggatcctgtctagctgcagtgtcaacccccctggctatagcaatcttcccacctcagcttccccagtaccagggactacaggttcatcccaccatgctccgctaattttaatttttttggagagacgagttttcgcaatgttgcctaggcttttctcaaactcctttcctgtgtccacctctcaatgtgatgcgatgacacgcttgaacaacaatgttcatacattttaggaagaaagtcctaagcctacttaagttcttttagaaaggatggattggaatttactttctctaaactcaatagtttctagaactataaattagagtcaagtattaaaggccccaggaagacaattttagaagaaaagttttcaaagtgagccaggctagatgctttataattgagcattcactggatatgtcttggcatcctaatggccaacgctgaggttttttattttttttaataatgtggaagactgaactttgttacatgtacattgtgtagaatttccaaagttagaaacttttcttaaaacacttcactacattccttttatttacgtattttttaaaaaatttacactatgcatggatacatccttaatagaagattaggattctgcagtttcaaaggcaaaacctaatcctttcgattggctctatttaattgtataattgctttatcgattaaaattttaaaaaaacttctacaaatacattccaatgttagataactaaatcagttgtctgatgtcattatacaatgtcactcccagacgggagtgaagtggcaggatctcggctcactgcaacctccaccccaggggttcaagcaaatcttctgctgggattacaggtgcctgccaccatgcccagctaatttttgtatttttagtagagagggctggtctcgaactcctgacctcagataatccacccgccttggcctcccaaagtgctgggattacaggcatgagctgccacagcggcctgatgttacctttttaagtccacataaagtgactttataattatcttttaatgactccttattaaaacctaaaatatatgaagaactattttgttttctgcttttatctacaatactagattttccatgatttttaaagagtagaagactttatttatttatttatttatttatttatttattttgaaatgtagtctcrctctgttgcccaggctgaatcgcagtggcactgtctaagttcactgcatcctctgcctccctggttcgggtgattctcctgccacagcctcctgagtagctgggactacaggtccgtgcaactatgccagcctaatttttgtatttttattagatatagggttttgccatgttgatcagacttgtcttgaactcctgacctcaag

SEQ ID NO: 94959 - DNA, 1474 bp, Homo sapiens
atattagtgagatattttatatatattttttttgagacagggtctggctttgtcacccaggctggagtgcagttgctggatcctgtctagctgcagtgtcaacccccctggctatagcaatcttcccacctcagcttccccagtaccagggactacaggttcatcccaccatgctccgctaattttaatttttttggagagacgagttttcgcaatgttgcctaggcttttctcaaactcctttcctgtgtccacctctcaatgtgatgcgatgacacgcttgaacaacaatgttcatacattttaggaagaaagtcctaagcctacttaagttcttttagaaaggatggattggaatttactttctctaaactcaatagtttctagaactataaattagagtcaagtattaaaggccccaggaagacaattttagaagaaaagttttcaaagtgagccaggctagatgctttataattgagcattcactggatatgtcttggcatcctaatggccaacgctgaggttttttattttttttaataatgtggaagactgaactttgttacatgtacattgtgtagaatttccaaagttagaaacttttcttaaaacacttcactacattccttttatttacgtattttttaaaaaatttacactatgcatggatacatccttaatagaagattaggattctgcagtttcaaaggcaaaacctaatcctttcgattggctctatttaattgtataattgctttatcgattaaaattttaaaaaaacttctacaaatacattccaatgttagataactaaatcagttgtctgatgtcattatacaatgtcactcccagacgggagtgaagtggcaggatctcggctcactgcaacctccaccccaggggttcaagcaaatcttctgctgggattacaggtgcctgccaccatgcccagctaatttttgtatttttagtagagagggctggtctcgaactcctgacctcagataatccacccgccttggcctcccaaagtgctgggattacaggcatgagctgccacagcggcctgatgttacctttttaagtccacataaagtgactttataattatcttttaatgactccttattaaaacctaaaatatatgaagaactattttgttttctgcttttatctacaatactagattttccatgatttttaaagagtagaagactttatttatttatttatttatttatttatttattttgaaatgtagtctcactctgttgcccaggctgaatcgcagtggcactgtctaagttcactgcatcctctgcctccctggttcgggtgattctccygccacagcctcctgagtagctgggactacaggtccgtgcaactatgccagcctaatttttgtatttttattagatatagggttttgccatgttgatcagacttgtcttgaactcctgacctcaag

SEQ ID NO: 94960 - DNA, 860 bp, Homo sapiens
gaaatgcactaaatctttcttctttttttttttttcaggcttttggagacatattacacaggtgagtgtgtacctagattttagcatatgttctttaagattccacgactatcaaagcaggctctattaaagtcatggcataaataattaagatattgataccacttttttttgcatctactttcgttcccacaccttaaaagacaaggccacgaagtaaataaatgaataaaagaagagtgaactaaaacaaacaatttgattcctgcttttgttttttttttgagacggtgtctggctctgtcgcccaggctggagtgcaatggcgccatctcggctcactgaaagctccgcctcccgggttcacaccattcccctgcctcagcctcccgagtacccgggactacaggcgcccgccaccacacccggctaattttttgtatttttagtagagactgggtttcaccatgttagccaggatggtctctatctcctgaccccgtgatccgcccgcctcggcctcccaaagtgctgggattacaggcgtgaaccaccgygcccggcccctgattttgttttattgcttgaaagcctgcacaggagaaagataagtttttttttgtgaatggtgagaaagtcaccagaggaagcaggagagaagaggaggaagtattttagcagtgaaaaagtgttgatgttttgttttttatacatatatacatatcagttaacagttctgaaaaatagattgaaaaaaactgtggagtgttagaactgtgtaagtctctagggaagttctttgctaaaaggggagagaacaagtttccattctttatcttgagaaggaagcagtggatgca

SEQ ID NO: 94961 - DNA, 860 bp, Homo sapiens
gaaatgcactaaatctttcttctttttttttttttcaggcttttggagacatattacacaggtgagtgtgtacctagattttagcatatgttctttaagattccacgactatcaaagcaggctctattaaagtcatggcataaataattaagatattgataccacttttttttgcatctactttcgttcccacaccttaaaagacaaggccacgaagtaaataaatgaataaaagaagagtgaactaaaacaaacaatttgattcctgcttttgttttttttttgagacggtgtctggctctgtcgcccaggctggagtgcaatggcgccatctcggctcactgaaagctccgcctcccgggttcacaccattcccctgcctcagcctcccgagtacccgggactacaggcgcccgccaccacacccggctaattttttgtatttttagtagagactgggtttcaccatgttagccaggatggtctctatctcctgaccccgtgatccgcccgcctcggcctcccaaagtgctgggattacaggcgtgaaccaccgcgcccggcccctgattttgttttattgcttgaaagcctgcacaggagaaagataagtttttttktgtgaatggtgagaaagtcaccagaggaagcaggagagaagaggaggaagtattttagcagtgaaaaagtgttgatgttttgttttttatacatatatacatatcagttaacagttctgaaaaatagattgaaaaaaactgtggagtgttagaactgtgtaagtctctagggaagttctttgctaaaaggggagagaacaagtttccattctttatcttgagaaggaagcagtggatgca

SEQ ID NO: 94962 - DNA, 860 bp, Homo sapiens
gaaatgcactaaatctttcttctttttttttttttcaggcttttggagacatattacacaggtgagtgtgtacctagattttagcatatgttctttaagattccacgactatcaaagcaggctctattaaagtcatggcataaataattaagatattgataccacttttttttgcatctactttcgttcccacaccttaaaagacaaggccacgaagtaaataaatgaataaaagaagagtgaactaaaacaaacaatttgattcctgcttttgttttttttttgagacggtgtctggctctgtcgcccaggctggagtgcaatggcgccatctcggctcactgaaagctccgcctcccgggttcacaccattcccctgcctcagcctcccgagtacccgggactacaggcgcccgccaccacacccggctaattttttgtatttttagtagagactgggtttcaccatgttagccaggatggtctctatctcctgaccccgtgatccgcccgcctcggcctcccaaagtgctgggattacaggcgtgaaccaccgcgcccggcccctgattttgttttattgcttgaaagcctgcacaggagaaagataagtttttttttgtgaatggtgagaaagtcaccagaggaagcaggagagaagaggaggaagtattttagcagygaaaaagtgttgatgttttgttttttatacatatatacatatcagttaacagttctgaaaaatagattgaaaaaaactgtggagtgttagaactgtgtaagtctctagggaagttctttgctaaaaggggagagaacaagtttccattctttatcttgagaaggaagcagtggatgca

SEQ ID NO: 94963 - DNA, 892 bp, Homo sapiens
aaacctggtggccacagagtccagaatgctcttgtcagcagagcaataaattctgtccccagagagaagctcacttcaggctacagacagactcagccactgaagcaaaccctcaggaagccagctgctcatccagtgtgcaacaaaccctcacaagagaggtgtgcgaacttcgtaggctcttcagccttccagaggaccttcctcatcccaggattgaccaggscagaccctgctagaaggattctagcaccaaatgcactctaccttcaagctctggctctcagtcctagggagacctgtactgtgcactggaggccctccctctcacggaggctttcttcctcttgttggcacgtagaccaagttgtggttgagtctctctgcagcctaaagtcagctggtatctagatttgatctgggatgcgttgactttctagtttagctctcttgtgtcccttgtttatcagtactactagttcagggggcacctgtctgcttcactctggccctgtgctagatcaccagtcactttctacactgtgttagcgtcacctgagcatgtatgtcaccctccccactaagtctagggttggcaagacagctcaggcaaagtcagaattgcaacccagctgtactgaacactggctgtgtaaccctgggcaatggatttcatctctccaagtctcagttgcctcatctataagccagaactcctgactgcagctggatcgggtcggtgtgaggatcagatcaggatagacacacgcagtgccccacaccatgcctggtgggtggtgagcactcagtgtgtgtgggctctcatcgtcgcagcggatgccctgcacagagcctgcgagtgggagctggtgcctcacagcagcaggtgcca

SEQ ID NO: 94964 - DNA, 892 bp, Homo sapiens
aaacctggtggccacagagtccagaatgctcttgtcagcagagcaataaattctgtccccagagagaagctcacttcaggctacagacagactcagccactgaagcaaaccctcaggaagccagctgctcatccagtgtgcaacaaaccctcacaagagaggtgtgcgaacttcgtaggctcttcagccttccagaggaccttcctcatcccaggattgaccagggcagaccctgctagaaggattctagcaccaaatgcactctaccttcaagctctgsctctcagtcctagggagacctgtactgtgcactggaggccctccctctcacggaggctttcttcctcttgttggcacgtagaccaagttgtggttgagtctctctgcagcctaaagtcagctggtatctagatttgatctgggatgcgttgactttctagtttagctctcttgtgtcccttgtttatcagtactactagttcagggggcacctgtctgcttcactctggccctgtgctagatcaccagtcactttctacactgtgttagcgtcacctgagcatgtatgtcaccctccccactaagtctagggttggcaagacagctcaggcaaagtcagaattgcaacccagctgtactgaacactggctgtgtaaccctgggcaatggatttcatctctccaagtctcagttgcctcatctataagccagaactcctgactgcagctggatcgggtcggtgtgaggatcagatcaggatagacacacgcagtgccccacaccatgcctggtgggtggtgagcactcagtgtgtgtgggctctcatcgtcgcagcggatgccctgcacagagcctgcgagtgggagctggtgcctcacagcagcaggtgcca

SEQ ID NO: 94965 - DNA, 998 bp, Homo sapiens
ttccattccttggaatccgtgaggccaagagccccaggtcagagaacaggaggcttgccaccatcttggaagtggcctgccaaaattatggaagtggcccgccaccatcttgggcgctctgggagcaaagaccaccccatggtaacagcaccttaactgtgtgtccccaaggacctacagattcacagggcaacaggggctgtgagggagttgtctggatttcccaaggtggaggaggcgaaagaggagatggatcccaagctcctgcaccagcaccagcgagagacaaaggccccgccaaacgccggaagccacgccctcctctcttctcaaactgtgcgcccgattgggtggttcccacaccagcgccactgattgaataaaacgccaggacccacccatccgcaccccaccccggcccctgccccactcaccctgagcgttagtgcatttttgtttgtttctttgttttactttaagttttgggatacatgtgcagaacgtgcaggtttgttacagaggtttacatgtgccatggtggttttctgcaccgtcaaccttgccrtttaggttttaagccccacgtgcattagatatttgtcctaatgctctccctccccttgaccccaaccccctaacaggccccagcgtgtgatgtttccttccggtgtacatctgttctcattgttcaactcccacatatgagtgagaacatatggtgtttggtttcctgttccctgtgttagtttgctgaggataatggtttccagcttcactcacgtccctgcaaaggacatgaacttattcttttttatggctgcatagtattccatggtgtatatgtgccacattttctttttccagtctatcattgatgggcatttgggttggttccaagtctttgctattgtaaacagtgctgcaataaacgtaaatgtgcatgtgtctttatagtagaatgatttatattcctttggatatatacccagtaatgggat

SEQ ID NO: 94966 - DNA, 998 bp, Homo sapiens
ttccattccttggaatccgtgaggccaagagccccaggtcagagaacaggaggcttgccaccatcttggaagtggcctgccaaaattatggaagtggcccgccaccatcttgggcgctctgggagcaaagaccaccccatggtaacagcaccttaactgtgtgtccccaaggacctacagattcacagggcaacaggggctgtgagggagttgtctggatttcccaaggtggaggaggcgaaagaggagatggatcccaagctcctgcaccagcaccagcgagagacaaaggccccgccaaacgccggaagccacgccctcctctcttctcaaactgtgcgcccgattgggtggttcccacaccagcgccactgattgaataaaacgccaggacccacccatccgcaccccaccccggcccctgccccactcaccctgagcgttagtgcatttttgtttgtttctttgttttactttaagttttgggatacatgtgcagaacgtgcaggtttgttacagaggtttacatgtgccatggtggttttctgcaccgtcaaccttgccatttaggttttaagccccacrtgcattagatatttgtcctaatgctctccctccccttgaccccaaccccctaacaggccccagcgtgtgatgtttccttccggtgtacatctgttctcattgttcaactcccacatatgagtgagaacatatggtgtttggtttcctgttccctgtgttagtttgctgaggataatggtttccagcttcactcacgtccctgcaaaggacatgaacttattcttttttatggctgcatagtattccatggtgtatatgtgccacattttctttttccagtctatcattgatgggcatttgggttggttccaagtctttgctattgtaaacagtgctgcaataaacgtaaatgtgcatgtgtctttatagtagaatgatttatattcctttggatatatacccagtaatgggat

SEQ ID NO: 94967 - DNA, 998 bp, Homo sapiens
ttccattccttggaatccgtgaggccaagagccccaggtcagagaacaggaggcttgccaccatcttggaagtggcctgccaaaattatggaagtggcccgccaccatcttgggcgctctgggagcaaagaccaccccatggtaacagcaccttaactgtgtgtccccaaggacctacagattcacagggcaacaggggctgtgagggagttgtctggatttcccaaggtggaggaggcgaaagaggagatggatcccaagctcctgcaccagcaccagcgagagacaaaggccccgccaaacgccggaagccacgccctcctctcttctcaaactgtgcgcccgattgggtggttcccacaccagcgccactgattgaataaaacgccaggacccacccatccgcaccccaccccggcccctgccccactcaccctgagcgttagtgcatttttgtttgtttctttgttttactttaagttttgggatacatgtgcagaacgtgcaggtttgttacagaggtttacatgtgccatggtggttttctgcaccgtcaaccttgccatttaggttttaagccccacgtgcattagatatttgtcctaatgctctccctccccttgaccccaaccccctaacaggccccagcrtgtgatgtttccttccggtgtacatctgttctcattgttcaactcccacatatgagtgagaacatatggtgtttggtttcctgttccctgtgttagtttgctgaggataatggtttccagcttcactcacgtccctgcaaaggacatgaacttattcttttttatggctgcatagtattccatggtgtatatgtgccacattttctttttccagtctatcattgatgggcatttgggttggttccaagtctttgctattgtaaacagtgctgcaataaacgtaaatgtgcatgtgtctttatagtagaatgatttatattcctttggatatatacccagtaatgggat

SEQ ID NO: 94968 - DNA, 998 bp, Homo sapiens
ttccattccttggaatccgtgaggccaagagccccaggtcagagaacaggaggcttgccaccatcttggaagtggcctgccaaaattatggaagtggcccgccaccatcttgggcgctctgggagcaaagaccaccccatggtaacagcaccttaactgtgtgtccccaaggacctacagattcacagggcaacaggggctgtgagggagttgtctggatttcccaaggtggaggaggcgaaagaggagatggatcccaagctcctgcaccagcaccagcgagagacaaaggccccgccaaacgccggaagccacgccctcctctcttctcaaactgtgcgcccgattgggtggttcccacaccagcgccactgattgaataaaacgccaggacccacccatccgcaccccaccccggcccctgccccactcaccctgagcgttagtgcatttttgtttgtttctttgttttactttaagttttgggatacatgtgcagaacgtgcaggtttgttacagaggtttacatgtgccatggtggttttctgcaccgtcaaccttgccatttaggttttaagccccacgtgcattagatatttgtcctaatgctctccctccccttgaccccaaccccctaacaggccccagcgtgtgatgtttccttccggtgtacatctgttctcattgttcaactcccacatatgagtgagaacatatggygtttggtttcctgttccctgtgttagtttgctgaggataatggtttccagcttcactcacgtccctgcaaaggacatgaacttattcttttttatggctgcatagtattccatggtgtatatgtgccacattttctttttccagtctatcattgatgggcatttgggttggttccaagtctttgctattgtaaacagtgctgcaataaacgtaaatgtgcatgtgtctttatagtagaatgatttatattcctttggatatatacccagtaatgggat

SEQ ID NO: 94969 - DNA, 977 bp, Homo sapiens
aggccactcccacacacactgcttacttcataggctgtggccctcagatgcacctgggggactgctttcctcccatttcattagctctccaagacagtccatctcactctaaaacctacactaggatggtgagttgtagactctcctccattctcccagtgcagtgtgacttccagagagtgctcccccatcctcttacctcaactgatgtgaaaagggccagtgcctgggcagttagatgttcagtgacctcacaggtccagcatcgcccagggcctggccccacagcctggcacctctcccctacctggccttcatgccagccttttctcttctgtcaccaatgtcaagtgacattcacctgtgtcacactcttatgagtgtggtaagtgatgggtgggtaaaccccagctgagtgcctgtgactctaccctcttacctttcactcaagtgacattataagcataattttacatttgatttaatttatggcataatcttttcttataacatttctgacaatagccctcacaaccaaaggagactgggttacagaacacatgggcaaggctggagtagcaggtttcacttactttattccaatgtgaaatgaagatgtgatggtttaaaaccaagacaaagttgtttatcagctgtggggttgctacacttgctagctcatgctcacttcctttgaaacaaggaatctggagagactatattcataagtagctctttgcaaacccccaggcagaagccccagtcagacgcagctccctcaggctcccagggcggcaacctcctcctccatgttgggctctgccagcaggtcaagggaagagctccctcaggctcccagggctgcaacctcctcctccatgttgggctctgccagcaggccaagggaagagctccctcaggctcccagggctgcaacctcctcctccatgttgggctctgccagcagscaagggaag

SEQ ID NO: 94970 - DNA, 640 bp, Homo sapiens
ttttttkttttttttttttgagacagagtctcgctctgtcacccaggctggagtgcagtggtgcgacctcagctcactgaaacctctgcctcccgggttcaagcgattctcctgcatcagcctcccgagtagctaggattacaggcgcccgccactacgcccagctaatttgtggtatttttagtagagacagggtttcaccatgttggccaggctggtctcgaactcctgacctcatgatccgcccgccttgacctcccaaagtgctgggattacaggcatgagccaccgcacccagcctgcattcctgtttttttaatggttttggagggtagcagtagagatggggtctcactatgttgcccagtctagtcttgaactcctgggctacagttaccctcctacctcggcttcccaaagtgctcggattacaggtgtgagccactgtgcctagcctataatgatcattttaatgtttcccatgcactcatttagtttgaaccttcacagcaacccaatgaggtaatactcccatttcacatataatactgagagatgagttgcacaagattatacactgttaagtagcagagccagaatggacttcagaatcccaactacaatacaaatgtttatttaa

SEQ ID NO: 94971 - DNA, 1104 bp, Homo sapiens
aactggccttattcttttcaatatctacaaatgttcacagtatggttgtataataattttacttacctcacctatatcatctctacatatataaatatatatgacatatgtgtatgtgtgtgtgtatgtgtgtgtgtgtacatattccttatagattccgaagtggaattactggatcaaaagatatgcctattttatatttttatagatattgaaaagttgcattccaaaatggctttaacagtctaacccaagatcaggaacatggcaaaaatgtctactctcaccgtttctattcaacattatcctagagaatctaaccaatgcaatragacaaaaagaaaaaggaaaccaggctttacctattacagatttgtgaatttttcttttttggaggatggagaatgagggttggtgtgctatttgaatttttcccacagatctaatctggcatttgcctttactttggatacttctgttcaatttgttttcaaaaaattggaagcttttttggaataatttcaagagtcgttccacataacttctcctaataatgttatgagtaaatagtaattaatatattcacccaacaaattaaatctttaatctgtgccaaatcctatgctgtacaatgaatgacatgggctttgggaactgccttcaaacatgggaagaacaagataccacggaaaacaaaaggaatataataattgagaaaacaacacagaaataattataaaagctccgaagtgactgaaaataattctgtctttcttagggaattgtggtagcaagctctttgctaagccttgttcctagagggaggtagcacatccaaaataatctatctttagacctgaaacacaaaaccctgaaagatcgctaacttgactttatggtaaaggaaaccatatttaactttttaaaacgtaactatcattttgcaaacaatagaattgtctgtgtagcaaatcctatagacaaaaaaactactgtaaccaataaatgagttagataaaattgcaagatacaagctcaatatacaaaataatgctgcttccatacagtaacactaaacaagcagaattgaaatttatatagata

SEQ ID NO: 94972 - DNA, 1104 bp, Homo sapiens
aactggccttattcttttcaatatctacaaatgttcacagtatggttgtataataattttacttacctcacctatatcatctctacatatataaatatatatgacatatgtgtatgtgtgtgtgtatgtgtgtgtgtgtacatattccttatagattccgaagtggaattactggatcaaaagatatgcctattttatatttttatagatattgaaaagttgcattccaaaatggctttaacagtctaacccaagatcaggaacatggcaaaaatgtctactctcaccgtttctattcaacattatcctagagaatctaaccaatgcaatgaracaaaaagaaaaaggaaaccaggctttacctattacagatttgtgaatttttcttttttggaggatggagaatgagggttggtgtgctatttgaatttttcccacagatctaatctggcatttgcctttactttggatacttctgttcaatttgttttcaaaaaattggaagcttttttggaataatttcaagagtcgttccacataacttctcctaataatgttatgagtaaatagtaattaatatattcacccaacaaattaaatctttaatctgtgccaaatcctatgctgtacaatgaatgacatgggctttgggaactgccttcaaacatgggaagaacaagataccacggaaaacaaaaggaatataataattgagaaaacaacacagaaataattataaaagctccgaagtgactgaaaataattctgtctttcttagggaattgtggtagcaagctctttgctaagccttgttcctagagggaggtagcacatccaaaataatctatctttagacctgaaacacaaaaccctgaaagatcgctaacttgactttatggtaaaggaaaccatatttaactttttaaaacgtaactatcattttgcaaacaatagaattgtctgtgtagcaaatcctatagacaaaaaaactactgtaaccaataaatgagttagataaaattgcaagatacaagctcaatatacaaaataatgctgcttccatacagtaacactaaacaagcagaattgaaatttatatagata

SEQ ID NO: 94973 - DNA, 1104 bp, Homo sapiens
aactggccttattcttttcaatatctacaaatgttcacagtatggttgtataataattttacttacctcacctatatcatctctacatatataaatatatatgacatatgtgtatgtgtgtgtgtatgtgtgtgtgtgtacatattccttatagattccgaagtggaattactggatcaaaagatatgcctattttatatttttatagatattgaaaagttgcattccaaaatggctttaacagtctaacccaagatcaggaacatggcaaaaatgtctactctcaccgtttctattcaacattatcctagagaatctaaccaatgcaatgagacaaaaagaaaaaggaaaccaggctttacctattacagatttgtgaatttttcttttttggaggatggagaatgagggttggtgtgctatttgaatttttcccacagatctaatctggcatttgcctttactttggatacttctgttcaatttgttttcaaaaaattggaagcttttttggaataatttcaagagtcgttccacataacttctcctaataatgttatgagtaaatagtaattaatatattcacccaacaaattaaatctttaatctgtgccaaatcctatgctgtacaatgaatgacatgggctttgggaactgccttcaaacatgggaagaacaagataccacggaaaacaaaaggaatataataattgagaaaacaacacagaaataattataaaagctccgaagtgactgaaaataattctgtctttcttagggaattgtggtagcaagctctttgctaagccttgttcctagagggaggtagcacatccaaaataatctatctttagacctgaaacacaaaaccctgaaagatcgctaacttgactttatggtaaaggaaaccatatttaamtttttaaaacgtaactatcattttgcaaacaatagaattgtctgtgtagcaaatcctatagacaaaaaaactactgtaaccaataaatgagttagataaaattgcaagatacaagctcaatatacaaaataatgctgcttccatacagtaacactaaacaagcagaattgaaatttatatagata

SEQ ID NO: 94974 - DNA, 795 bp, Homo sapiens
ccaggagctcatttaacagagctctgcattggaaaggagagaaagtaacctttctaggtttgggggagaaatcctttttagttattcaatttataacttgtacatacatggtagatgcccaggaagtattacagaagaaaaaaggaaagagaaaaatctaagggacaaatgctagatgcagctgactgagaatcagcacctggttctgccagggtccttttccatgctacctcttcagagatcaggaggagctgtgtgatctgtgcaccggggagtaaatcttgtttctggctggttggggagactttcagcttcctgcaacaaagaactatgaatataaactcagagaaaccagagatttggcttgatagtgtttgagggctcccagaccccagccagagacctcactgagtctaagtgataaaaacggagaagcccttgggagtttcattcttgatttcctcctggcagctgtgctgtgagttgctgggctctggaaatatcataaaaaagagcagattgtagtttcttctttataagtctggaagttatagaagggtggttagggtctcagtgctcacctgtgggggctgtgaaaagagmgtatatcttccaaatgaatgaatttccgtgaatgaatgtcctctgtctgtggttctctgtttaaacaggggtgaatagactacatacactggagcagagtccttcattcctgaatattcaggagggaatgcatgccgttcttaattgtacttatcaggagagaacactcttcaatttccactggttccggca

SEQ ID NO: 94975 - DNA, 682 bp, Homo sapiens
ttacattattaatacatcaaccctatgaagtaggtgctattaaaaccctatttcactcagaaattgaggcacagagatctgcccaagattgcaaggaataagcggcaggaccagatctcttcatcacatttcacattccaaatcactcagctataaactccctaacatgacaggttgccatttagaggtaccaaatggttgtctgccctgctccttccttgatgccaaccagcctgattagcattgatcaaagaccaagccagagaggtagtcctctcccttttcaatttcatttcatttctttctttttctgaaacagggtattgctctgttgcccagcctggagtgcagtggcacaaatggctcactgcagccacaacctcctgggctcaagcaatcttcctacctcagcctctcattkttccatatctatatctcttatgcccaaaataaactttcccctgccccttgtctgcactaaactgtaagtttccaaaatgaacccttcccgtactctatttggtacacatcttgtctcctgaatagagtgtattttttattttattttattttggagacggagtctcgctctgtcacctaggctggagcgcagtggcacaatctcagttcaccgcaacctccgcctcccgggttcaagcaattctcctgcctcaacctcctg

SEQ ID NO: 94976 - DNA, 682 bp, Homo sapiens
ttacattattaatacatcaaccctatgaagtaggtgctattaaaaccctatttcactcagaaattgaggcacagagatctgcccaagattgcaaggaataagcggcaggaccagatctcttcatcacatttcacattccaaatcactcagctataaactccctaacatgacaggttgccatttagaggtaccaaatggttgtctgccctgctccttccttgatgccaaccagcctgattagcattgatcaaagaccaagccagagaggtagtcctctcccttttcaatttcatttcatttctttctttttctgaaacagggtattgctctgttgcccagcctggagtgcagtggcacaaatggctcactgcagccacaacctcctgggctcaagcaatcttcctacctcagcctctcatttttccatatctatatctcttatgcccaaaataaactttcccctgccccttgtctgcactaaactrtaagtttccaaaatgaacccttcccgtactctatttggtacacatcttgtctcctgaatagagtgtattttttattttattttattttggagacggagtctcgctctgtcacctaggctggagcgcagtggcacaatctcagttcaccgcaacctccgcctcccgggttcaagcaattctcctgcctcaacctcctg

SEQ ID NO: 94977 - DNA, 631 bp, Homo sapiens
gaagggcccctggaggaagtgctagctccatgagtctgcggtgccatgcaggtcaaggtagtgacctgtgtggccctacgtgccaggtgatggactaggggaattgcttgcacaagccctggaatagagtagatggtaaataagtgttaaattatgtgtaggaatgtgacagcagaaaagaggtgccagataatgtttccatattggttgcaattcaaattagcttaagaaaaaaaaaagcaaaagacagctgtattggctggtatagctggcaaattaaagataggactagttttaggcaggagtggatccaggggcatcattgagactgtgagagctctgtctctttttaactcctggtttgcttctctgtaggtgatggcctygtcctcaccttccagggacaacttttctccacattgaggggaagatggttgtcctcagtcactgactaacagtcttgcatctttctgacatgaaaagtaaatcctttttccttccagcacctaatcaggaattgcaggggaaattgtctgattaacctagcttgggtaggacagaaacccctggaacaggtattatgaatcagagaaattgggttctatgactggccagccttggagtgcacatc

SEQ ID NO: 94978 - DNA, 621 bp, Homo sapiens
cctgcctcagcctcccgagtagctgggactacaggtgcacaacaccacgcctggctaatttttgtatttttagtagagacagggtttcaccacgttggccaggctggtctcgaactctgacctcaggtgatctgcctgccttggcctcccaaagtgtgggactataggcgtaagccaccacgcccagcctgaactgagctttaactctgggctgtttctgctcatgataggctttatggtttttctttttgttttgtttcatttttgcacacctccaccgggtgggaaaatcttttcctactgagcatagcttgagagaagctcacatgtgccaagaaatgctactcaccccaaatactttgtgcccagtaaaagggatagttagggactgaggtccgagagggggacagcattctggagaacacttctaatagatctctgcaaatatgttgaagaaggacctagggtgttctaaacattggggaggggtgctcaggactctgcaactgtctttcctggtgtcactrttcacggcatgcacactcacaacatacacacctgccagcacatacctacatgaccttcgtgcccttcccgtacttctggtgcatcacccctgca

SEQ ID NO: 94979 - DNA, 683 bp, Homo sapiens
tccagacggcgccacagcaacctctaggcagtgcccacaccagcctacaggtggcgcccctcgcactgcacctgccgcggccgccccgggtgtgaactgcgctgtcagcagggccgcgctgacmcgggtggcccaggcccgcagcagccgaggagcccaggggcactgcccggggtgacgagaaggagaagacggtgccccagaaaaaggcaagagctcagagctcgggtccccgtgccaggaatggccaggagcagaagatggagaggtggagatggagaaggagaagcagcaggtgggaaggagcggcgctccaccggtggggtcaacatgcgctggctgagcttagagtatgaagaggatgaagcaagtcagaaagagcggaaacgagaaggtgcaatgacacagcagagcacaatgcagaatccagccctaggactccaataaaggctgggtttaattccaactcacaccctcccacccctaatcagagaggatcacaggagagagaggacccaaggaacactggaacctgaaggacaggaatctgaggccaagactgattgctggaaattgtgggaatcaggaaaggagaaactgaggcagaatggggggatggagggtggtggtggggggcagtgagctgggttaggaaggattagaaatcagaaccctaggaagga

SEQ ID NO: 94980 - DNA, 657 bp, Homo sapiens
tgttgatctgtgaccttaccccaaccctgtgctctctgaaacatgtgctgtgtccactcagggttaaacggattaagggtggtgcaagatgtgctttgttaaacagatgcttgaaggcagcatgctcgttaagagtcatcaccactccctaatctcaagtacccagggacacaaacactgcggaaggccgcagggtcctctgcctaggaaaaccagagacctttgttcacttgtttatctgctgaccttccctccgctattgtcctatgaccctgccaaatccacctctgcgagaaacacccaagaatgatcaataaaaaaamaaaaaaaaaacatggtttctccatgttggtcaggctggtctggaactcctgacttcaggtgatctgcccaccttggcctcccaaagtgctgggattacaggcatgagccactgtgcctggccccaaatgtgttttacattttcttcctatttgattcatctttgtcctgcaacataaatatgctacttttccaccgataaaaagacaaaatggaatttaaatctggcctggacttctcaaaaaagtcagtgtgatgaaaacatgttctagataaaacagaaatgagactgggcatggtggctcatgcctgaaatcccagcgccttcggaggcca

SEQ ID NO: 94981 - DNA, 1149 bp, Homo sapiens
gtaggcacatccgtgatgcccagtgcccaacacagggaactggacaaacgtttcatgcacgactcttttttcccttcttggctaccttgaggaccttgattataatagttatcctttttttctttttctttttttgagactcttgctctgtcgtccaggttggaatgcagtggcaaaatcttggctcactgcaatcttcacctctcaggttcaagtgactctccttcctcagcctccctagtagctgggattaccggtgtgcaccactaggctcagctaatttttgtatttttactacagatggggtttcaccatgttggccaggctgatcttgaactgctgacctcaggtgatctgcccacctgggcctcccaaagtcttgggattacaggtgtgagccactgagcccagccrgattataatagccttttcatgcaccaggggctttatactcattatctcatttcattcatatgagttgaaatcagcttatcccccatttcacagatgaggaaaccaaggcccagagaggttaggaattcatccaaggtcacacagctaggaagtaggattcaaacccagacagccaggctgtaacacctaggctcttctcaggctcatgcccttcccaggggtctgggaagccctgacctgcagcctgtcaccttcgtttaccccccagcctccaggatattatgtgtgcaccggcgtgggatcctggaactggcaggaattgtgggttgtgttggtccctagactcccatcgcctatacgaaatatggttccttttgtggcttgggaggccatggccagccctgcgatgccattgactggtgagtgcatgcctgggaccaggctacaaaatccctcacactctggggtagtcaaggcttatgaggaagtacccaaaactgaagctgggatttggtccagggagatcccagtgtgcagtactactttgcaggcaggcagaggcctcttggataacatggccagtgaagccagatcttggtaccagctgccccttaccctggccatgggctgaaaacgttgccttaaaaaattggccaggagcggtggctaactcctgtaatcccagcactttgggaggccgaggcgggcagatcacttgaggtcaggagttcaaga

SEQ ID NO: 94982 - DNA, 1149 bp, Homo sapiens
gtaggcacatccgtgatgcccagtgcccaacacagggaactggacaaacgtttcatgcacgactcttttttcccttcttggctaccttgaggaccttgattataatagttatcctttttttctttttctttttttgagactcttgctctgtcgtccaggttggaatgcagtggcaaaatcttggctcactgcaatcttcacctctcaggttcaagtgactctccttcctcagcctccctagtagctgggattaccggtgtgcaccactaggctcagctaatttttgtatttttactacagatggggtttcaccatgttggccaggctgatcttgaactgctgacctcaggtgatctgcccacctgggcctcccaaagtcttgggattacaggtgtgagccactgagcccagccggattataatagccttttcatgcaccaggggctttatactcattatctcatttcattcatatgagttgaartcagcttatcccccatttcacagatgaggaaaccaaggcccagagaggttaggaattcatccaaggtcacacagctaggaagtaggattcaaacccagacagccaggctgtaacacctaggctcttctcaggctcatgcccttcccaggggtctgggaagccctgacctgcagcctgtcaccttcgtttaccccccagcctccaggatattatgtgtgcaccggcgtgggatcctggaactggcaggaattgtgggttgtgttggtccctagactcccatcgcctatacgaaatatggttccttttgtggcttgggaggccatggccagccctgcgatgccattgactggtgagtgcatgcctgggaccaggctacaaaatccctcacactctggggtagtcaaggcttatgaggaagtacccaaaactgaagctgggatttggtccagggagatcccagtgtgcagtactactttgcaggcaggcagaggcctcttggataacatggccagtgaagccagatcttggtaccagctgccccttaccctggccatgggctgaaaacgttgccttaaaaaattggccaggagcggtggctaactcctgtaatcccagcactttgggaggccgaggcgggcagatcacttgaggtcaggagttcaaga

SEQ ID NO: 94983 - DNA, 1149 bp, Homo sapiens
gtaggcacatccgtgatgcccagtgcccaacacagggaactggacaaacgtttcatgcacgactcttttttcccttcttggctaccttgaggaccttgattataatagttatcctttttttctttttctttttttgagactcttgctctgtcgtccaggttggaatgcagtggcaaaatcttggctcactgcaatcttcacctctcaggttcaagtgactctccttcctcagcctccctagtagctgggattaccggtgtgcaccactaggctcagctaatttttgtatttttactacagatggggtttcaccatgttggccaggctgatcttgaactgctgacctcaggtgatctgcccacctgggcctcccaaagtcttgggattacaggtgtgagccactgagcccagccggattataatagccttttcatgcaccaggggctttatactcattatctcatttcattcatatgagttgaaatcagcttaycccccatttcacagatgaggaaaccaaggcccagagaggttaggaattcatccaaggtcacacagctaggaagtaggattcaaacccagacagccaggctgtaacacctaggctcttctcaggctcatgcccttcccaggggtctgggaagccctgacctgcagcctgtcaccttcgtttaccccccagcctccaggatattatgtgtgcaccggcgtgggatcctggaactggcaggaattgtgggttgtgttggtccctagactcccatcgcctatacgaaatatggttccttttgtggcttgggaggccatggccagccctgcgatgccattgactggtgagtgcatgcctgggaccaggctacaaaatccctcacactctggggtagtcaaggcttatgaggaagtacccaaaactgaagctgggatttggtccagggagatcccagtgtgcagtactactttgcaggcaggcagaggcctcttggataacatggccagtgaagccagatcttggtaccagctgccccttaccctggccatgggctgaaaacgttgccttaaaaaattggccaggagcggtggctaactcctgtaatcccagcactttgggaggccgaggcgggcagatcacttgaggtcaggagttcaaga

SEQ ID NO: 94984 - DNA, 1149 bp, Homo sapiens
gtaggcacatccgtgatgcccagtgcccaacacagggaactggacaaacgtttcatgcacgactcttttttcccttcttggctaccttgaggaccttgattataatagttatcctttttttctttttctttttttgagactcttgctctgtcgtccaggttggaatgcagtggcaaaatcttggctcactgcaatcttcacctctcaggttcaagtgactctccttcctcagcctccctagtagctgggattaccggtgtgcaccactaggctcagctaatttttgtatttttactacagatggggtttcaccatgttggccaggctgatcttgaactgctgacctcaggtgatctgcccacctgggcctcccaaagtcttgggattacaggtgtgagccactgagcccagccggattataatagccttttcatgcaccaggggctttatactcattatctcatttcattcatatgagttgaaatcagcttatcccccatttcacagatgaggaaaccaaggcccagagaggttaggaattcrtccaaggtcacacagctaggaagtaggattcaaacccagacagccaggctgtaacacctaggctcttctcaggctcatgcccttcccaggggtctgggaagccctgacctgcagcctgtcaccttcgtttaccccccagcctccaggatattatgtgtgcaccggcgtgggatcctggaactggcaggaattgtgggttgtgttggtccctagactcccatcgcctatacgaaatatggttccttttgtggcttgggaggccatggccagccctgcgatgccattgactggtgagtgcatgcctgggaccaggctacaaaatccctcacactctggggtagtcaaggcttatgaggaagtacccaaaactgaagctgggatttggtccagggagatcccagtgtgcagtactactttgcaggcaggcagaggcctcttggataacatggccagtgaagccagatcttggtaccagctgccccttaccctggccatgggctgaaaacgttgccttaaaaaattggccaggagcggtggctaactcctgtaatcccagcactttgggaggccgaggcgggcagatcacttgaggtcaggagttcaaga

SEQ ID NO: 94985 - DNA, 710 bp, Homo sapiens
tgttgatctgtgaccttaccccaaccctgtgctctctgaaacatgtgctgtgtccactcagggttaaayggattaagggtggtgcaagatgtgctttgttaaacagatgcttgaaggcagcatgctcgttaagagtcatcaccactccctaatctcaagtacccagggacacaaacactgcggaaggccgcagggtcctctgcctaggaaaaccagagacctttgttcacttgtttatctgctgaccttccctccgctattgtcctatgaccctgccaaatccacctctgcgagaaacacccaagaatgatcaataaaaaaaaaaaaaaaaaaaaaaaaaaaaaaaaaaaacatggtttctccatgttggtcaggctggtctggaactcctgacttcaggtgatctgcccaccttggcctcccaaagtgctgggattacaggcatgagccactgtgcctggccccaaatgtgttttacattttcttcctatttgattcatctttgtcctgcaacataaatatgctacttttccaccgataaaaagacaaaatggaatttaaatctggcctggacttctcaaaaaagtcagtgtgatgaaaacatgttctagataaaacagaaatgagactgggcatggtggctcatgcctgaaatcccagcgccttcggaggccaaggcaggagaatcacttgaggccaggagtttgtga

SEQ ID NO: 94986 - DNA, 710 bp, Homo sapiens
tgttgatctgtgaccttaccccaaccctgtgctctctgaaacatgtgctgtgtccactcagggttaaacggattaagggtggtgcaagatgtgctttgttaaacagatgcttgaaggcagcatgctcgttaagagtcatcaccactccctaatctcaagtacccagggacacaaacactgcrgaaggccgcagggtcctctgcctaggaaaaccagagacctttgttcacttgtttatctgctgaccttccctccgctattgtcctatgaccctgccaaatccacctctgcgagaaacacccaagaatgatcaataaaaaaaaaaaaaaaaaaaaaaaaaaaaaaaaaaaacatggtttctccatgttggtcaggctggtctggaactcctgacttcaggtgatctgcccaccttggcctcccaaagtgctgggattacaggcatgagccactgtgcctggccccaaatgtgttttacattttcttcctatttgattcatctttgtcctgcaacataaatatgctacttttccaccgataaaaagacaaaatggaatttaaatctggcctggacttctcaaaaaagtcagtgtgatgaaaacatgttctagataaaacagaaatgagactgggcatggtggctcatgcctgaaatcccagcgccttcggaggccaaggcaggagaatcacttgaggccaggagtttgtga

SEQ ID NO: 94987 - DNA, 710 bp, Homo sapiens
tgttgatctgtgaccttaccccaaccctgtgctctctgaaacatgtgctgtgtccactcagggttaaacggattaagggtggtgcaagatgtgctttgttaaacagatgcttgaaggcagcatgctcgttaagagtcatcaccactccctaatctcaagtacccagggacacaaacactgcggaaggccgcagggtcctctgcctaggaaaaccagagacctttgttcacttgtttatctgctgaccttccctccgctattgtcctatgaccctgccaaatccacctctgcgagaaacacccaagaatgatcaataaaaaaaaaaaaaaaaaaaaaaaaaaaaaaaaaaaacwtggtttctccatgttggtcaggctggtctggaactcctgacttcaggtgatctgcccaccttggcctcccaaagtgctgggattacaggcatgagccactgtgcctggccccaaatgtgttttacattttcttcctatttgattcatctttgtcctgcaacataaatatgctacttttccaccgataaaaagacaaaatggaatttaaatctggcctggacttctcaaaaaagtcagtgtgatgaaaacatgttctagataaaacagaaatgagactgggcatggtggctcatgcctgaaatcccagcgccttcggaggccaaggcaggagaatcacttgaggccaggagtttgtga

SEQ ID NO: 94988 - DNA, 666 bp, Homo sapiens
aacgtttcatgcacgactcttttttcccttcttggctaccttgaggaccttgattataatagttatcctttttttctttttctttttttgagactcttgctctgtcgtccaggttggaatgcagtggcaaaatcttggctcactgcaatcttcacctctcaggttcaagtgactctccttcctcagcctccctagtagctgggattaccggtgtgcaccactaggctcagctaatttttgtatttttactacagatggggtttcaccatgttggccaggctgatcttgaactgctgacctcaggtgatctgcccacctgggcctcccaaagtcttgggattacaggtgtgagccactgagcccagccggattataatagccttttcatgcaccaggggctttatactcattatctcatttcattcatatgagttgaartcagcttatcccccatttcacagatgaggaaaccaaggcccagagaggttaggaattcatccaaggtcacacagctaggaagtaggattcaaacccagacagccaggctgtaacacctaggctcttctcaggctcatgcccttcccaggggtctgggaagccctgacctgcagcctgtcaccttcgtttaccccccagcctccaggatattatgtgtgcaccggcgtg

SEQ ID NO: 94989 - DNA, 666 bp, Homo sapiens
aacgtttcatgcacgactcttttttcccttcttggctaccttgaggaccttgattataatagttatcctttttttctttttctttttttgagactcttgctctgtcgtccaggttggaatgcagtggcaaaatcttggctcactgcaatcttcacctctcaggttcaagtgactctccttcctcagcctccctagtagctgggattaccggtgtgcaccactaggctcagctaatttttgtatttttactacagatggggtttcaccatgttggccaggctgatcttgaactgctgacctcaggtgatctgcccacctgggcctcccaaagtcttgggattacaggtgtgagccactgagcccagccggattataatagccttttcatgcaccaggggctttatactcattatctcatttcattcatatgagttgaaatcagcttaycccccatttcacagatgaggaaaccaaggcccagagaggttaggaattcatccaaggtcacacagctaggaagtaggattcaaacccagacagccaggctgtaacacctaggctcttctcaggctcatgcccttcccaggggtctgggaagccctgacctgcagcctgtcaccttcgtttaccccccagcctccaggatattatgtgtgcaccggcgtg

SEQ ID NO: 94990 - DNA, 666 bp, Homo sapiens
aacgtttcatgcacgactcttttttcccttcttggctaccttgaggaccttgattataatagttatcctttttttctttttctttttttgagactcttgctctgtcgtccaggttggaatgcagtggcaaaatcttggctcactgcaatcttcacctctcaggttcaagtgactctccttcctcagcctccctagtagctgggattaccggtgtgcaccactaggctcagctaatttttgtatttttactacagatggggtttcaccatgttggccaggctgatcttgaactgctgacctcaggtgatctgcccacctgggcctcccaaagtcttgggattacaggtgtgagccactgagcccagccggattataatagccttttcatgcaccaggggctttatactcattatctcatttcattcatatgagttgaaatcagcttatcccccatttcacagatgaggaaaccaaggcccagagaggttaggaattcrtccaaggtcacacagctaggaagtaggattcaaacccagacagccaggctgtaacacctaggctcttctcaggctcatgcccttcccaggggtctgggaagccctgacctgcagcctgtcaccttcgtttaccccccagcctccaggatattatgtgtgcaccggcgtg

SEQ ID NO: 94991 - DNA, 1044 bp, Homo sapiens
ttggggtacattctgcccttgtgttagcctacagaggacgtattgtgattctcgccaccattgaatttaattttgtcaagattcacagtcaatacttataacatatttcaaggagcagttcagactgttttcagttgagttcacacaagtagctctaaattacttgtttaagactgtgtttctcaaccagagcctctggagaaaactgttgaactgtgggcgctgcctgggggtgctgctttaagttattactctgttgattagccaacaagataaataactcscctttgacatagtgaagcagcagaaattggctttccatttcacttcttctgcaggaaagatagagcaagaaaagcctttttattaatacagcaagtaaaccttgtacaaatatcagtattcaaaatgctttctagagaaagaatagtgcagcactgtgcgtaatgggttatgtaagtggagtcacagaagtcctcctggggacacaaaccaattatgaacataagtgcttattgaaattgcatcagttgtctagatgaggagcttattgactccctggttcacttgggtgggcaggcggctgtgggggagggacggggggggtgtgggggtggggaacttaaggtgcaaacctagcctaggtgactgttaaattaaggcttaacatttgtttcttttgagtgtttttggttgcgtaattttaaaagttgggaatgctatagaaatatttaaattctattagaatgtccaaggcaaaatgttcaggttaagtagaaatagcttggaccctctgttaattttaaagaaaactgtgggtttgctgctttagatattaaaatgatatgggtttatagagttatgttgtgtatcattgttgctggtaaataaaaaatgtttaattcatttattttaacagtgcttaaatttttctcttaaagtactccctcagaagtctaggaatgcagcccaaagtgtgcctgctataaattgaagtttttgatgcctgtagggttttatattttaaaatttatataaatgttg

SEQ ID NO: 94992 - DNA, 734 bp, Homo sapiens
caaactttacagtattgggattatctggagaatgattaaacatattgaggcctgctcctaaccccagacacactgatttaatgggtaattgttaggtagttagacattagcagttgggaggggatgacagaagagagcggaaaggctgtcactaagacagccactggcccacctaaattcaggcccaagactaccctaatgccaccctaagggatggagtttatgataaagtctgtggccaaaatatcctggagaaagagaaaggagggtacaggtggaaattccctaaggtggcacatgcccaacaacacaaaagcctgtcttcaagttcaccccaagttcatcatgccatcattataatagaatttacatacagttttgcccccccatccctgggaggcttttcttaacaaattataggtaagaccatgcacagtttaattttagattgtatagctatamacttcaatcaaataacatcatcctgtcactcagatacagcccaaacctcaactcctccccacaaaccccataaaagcaccttgagctctgtaaagaagtgctgagttcacttcgcagaaataagcccgctgtccctcagagtgtattattgtgcttcaataaactttgctttaagcttgcattttggtgttagtttgtagttctttgctcactatcacaagaactgagattgctggttcagagctccggctataataatctcctcggttaaa

SEQ ID NO: 94993 - DNA, 749 bp, Homo sapiens
gactttttttttttctctttttcaactagtgtttcaacaggtttatttagattcagaatgtaaatttacaaatgatatagatcaccctgttattgctgtttttcagggacagtagaaagtgttttgttttttgagtgaaacaacttattaataaaaatccttaaatcacttttgtaatccaggacaagaaaatgtggcattagagtagaaatatctttggaaatgtgaaagaccccatagtgaaatatttgggatcagaagccagaggkgtaaaagtggtcaattcttggtttacttcatttaatctttcttttcataaagatacatacctggatttgtttatgttattcaagaatgtgtgagaaattaaaccatagttagttaatcctcttgtttatggctcttactttaaatattttaattgagcatctgttctttgggagtcttcctgcttgtactgggaatgtttagtcaaagaagaccaagcttgtgctcatgcaattgtagattctaggagaagctgtcatcatggaaggtgagacacttcataaaaaataaaagataggaaaaagaagtgatgaaagcaatagttttcattgctaagcagcattttggctgaatggggtttttcagtcttagaatgttgcgtattctcagccgggtgcagttgctcacatctgtaactcccagcactttgggaggctgaggtgggtggatcacctgaggtcgggagttcgagaccagcctga

SEQ ID NO: 94994 - DNA, 748 bp, Homo sapiens
tctgaaggacatattgcttgcttcccagtttgggcaattatgaataaagctactataaacatttgtgtgcaggttttttttgtggacataccgttttcaactcatctggctaaataacaaggagcgcacttgctagatcatatgatgaaagtatgcatagctttgtaagaaacttacaaactgtcttcaagagtggctgtatcatttttcatgtccaccagcaatgacagtgtgctcctgttgctccacatcctcatcagtatttggggttatcagggtttttgattttgaccattcttataggtatgtagtggtatcacattattgttttaatttgcaagtctctaatgatatgtgatgttgaccatcatktcatgtacgtatttgccttccatatatattatttgttgaggtgcctgtttagatcttttgtccatttttaatagggttggtcagttcttattgttcagttttaagacatttttgtatgttttggttaacagtcccttatcagatatgtcttttgaaaataattttttcccaacctgggagttatcttattctctttgtggtatctttagcagagcagaagttttaatttagcgaagtccagattatcaattattttctttcatagatgcccatcacattttataccagaactagaaaagatgaaattcttggtctgaagttgcagttatcagtcagcagaagagacagtccacaaccctgcttggagtccagatga

SEQ ID NO: 94995 - DNA, 1875 bp, Homo sapiens
taatgcacacataagcaaacatgtaggtagtctctagtaatctctgaatagcataaaagagattcaactctacatctgtctctaagtcaggtcataggaggcattaacttataaaccaaacagcatagaattttttcaatttgcaaattaaaacaatttttggccactgttgccaacaaaagtaaaattgctcagttctgcttgaaagatgaggatgtaagtagagagatggtaggtttttcagaagctagcagtgaactatcatctaggattgatctgctacttgatagcagaaggggctttgtatgctgggtaatggagccatagctccttttggacagctgcataaatctttttagggagctggaaaaatgagccacccaggcagacctggcattctgcttaattctcatttccacctttcattccttccccttaygccctccgctcattccctcctcctgcagtgggaaatcgcagtagaaggcacaagttagggttctatatgggcattcttcaaactggaacaaccaataaaaaatgtgtttgctctctggggcatttccctcagcagtactgttggtggcaggcaggtcatgcatttcacattgttttggagacttttgcagatgcccccaatgcactgattttggaaataattgaacatcactgttttttgtttgtggtggattaggcttcactgctaagttccaggtgactgacgggggtgccagtaatgccagcacccgagcagggcaagacatagctgcatcttttccagattctcaaggcaagtggtaaaatgaaggcgtcttggggatcctcccttagtctgtgcttaggccacatagctctgcactggtcagcaccaaagacaggtccaccgcagctgtcatttgcctgatggtttcccactctgggtgtgatctgaatcactgggggttaagcatattcacaggatcagaccacaccccagacccggtgaattagaatctctacagtgaaaccccacaatctgcattcatttacttctttatttatttagagatgggatctcactctgtcgcccaggctggagttcggtggcacaatcacggctcacttgcagccttgacctccctgtgctcaggtgattctcccaactcaacctcctgagtacctggggccacagttacgcacaaccatgcctggctaatttttgtatttttttgtagagacagggctttgctatgttgcccaggctggtctcaaactcctgggctcaagggatccacctgcctcagtctcacaaagtgctaggattacaggtatgagccatggtgcccagcctgcatttattttattttaattttaaattttttacagataggatcttgcactgtcacccaggtaggagtacagtggcgtgatcatagcacactgcagcctcaaactcctgggcttaagggatcctcctacctcagcctcctgagcagctggggctacaggcacatgccaccacacctagctaattttttttctgttaatttatgcagcgacaaggtctggctgtgttgcacaggctggtcttgaacttctggactcaagcaaacctcgtgcctcagtctcccaaagtgctaggattataggcatgagccacttctcctggccctgcatttgtgaaaggtccttagataatgctgatggagcttgcctgcagaccaataactgaggaccacccagaaggcggaaataactggccccaggtacacagtgaggtacataggtactcagaaagccagggctgggacttctgacaggagtccgcctctctgtaacctccacgggctccttttgctgtcaaccccatgccgttatgtggatgagcaaagaaca

SEQ ID NO: 94996 - DNA, 1430 bp, Homo sapiens
cctctttctccttcaagtttttctatttaaaattcccctcctcagagaaccttctctggccaccatcccccaatctaaattaggttctccctcctaaggttctttctcaaatccatttcctttccttctgagcacttaagcgagcgataattacacactaacttgtgtaatttgtttaataggatctttgggacagagactttatctgactcgcttgatgctgcagctgctagaacccagaccgtaatgtagtgggagctcagtgcagacttttgaaggagtaagtgagtaaaagaacaacaagcccctcttggtgcccaccaagtgccaagctgagactgggccctggagctggagtcaagatgtggacctggccttggtgtgctgggccctaacagatgagtaggagtttgccgagcactgaaggtggggttgacatgaccaacttctgagaggcactctttgcctctggatggccccttcccagtcaccccaaaaggaagcccttgccctttcaaaagtggtgaatgtggtggttcagatcggtaggtgttcctatgaataggtgaggggccaggcttcaggtcagttgaacctgggtttgaatcctgattttgctcttggtactagggcaggtcactgagacgctctgagcctctctgcctcctgctccaggatgaggatcccttcatccatgctcactcaaagtcctgcccaccaggatggaggcagacaggctgcaatgccctcccctctcagtgggggaaaaataccaggtcaggcagccagcagccgagaatgccaggcagagcaaaggtgtcctaagggatggacagaataagggcttgagagcctagccaagggtgaggctaggagaggcttcccggaggacgaggcaagtcagagctctttgcctcttactcccatgactgtgggtgcctttctcctcctcctctcattctctctcctttccagctcctgctytgctcatttcttcacctcagtctctctgccccgacaggagccctgagggacacaaccccgtcccgaggaatgtatctgcccacttccagcaggttcctggaggccctctaaattccccttccccccaaagtcatctcccaacactgctgctcccagggtgggacgcctgctgctgcacctccacacacgtgcacacacccagccaggtgcagacagcgtgggcagtgcagaggggagggctggggattaaggagttcgtgttcttgagcagcctggaaagcagcagggcttccacaggagccgcccctgccctcacccctgcccagtagggttaaggggctggcttagatgtcaccccaagccaaggctgtccttctcagaggctccttcccagctcccctgagtgggtcagtcccttcccctctctgagcccctctttcctcttc

SEQ ID NO: 94997 - DNA, 562 bp, Homo sapiens
attccygtgtgggccaactagctccaaatcagaatcataggatttacagcttgaaggaatttcagaggtaatctcatgcaaaaacaaaattttacaaatgagaaacatgagacacaggggatgacttctccaaggtcaccaagcagtcaagcagtctagtgacagagttgttttcaaaatatactaaacaccaggtcatttgactctgaagaacactacacaactatactcttgcataaatacaagttgctgttcttattctgatgagccaactgacagatattttatgtttatggtttgcaaatatggaaaatcagactaaggaaaaagaggagggtttttactggaaatacactaggtgggtcacagattcaaaggaaggtagaagcaatcaaccccaggcaagtactgtaaccagggcatcataagagatctcagtagtagaggccccagaattgggtccctagaaattaccattggcttttccatttttaagcttagactaaaaataaaatttccaggagatagtgttccttctattatagaatggtctagtttgtat

SEQ ID NO: 94998 - DNA, 549 bp, Homo sapiens
agaaactgtgaaataataaaggttcaatatttcaaactaagtttggggatactttgatacataaaaatagaaaactaatacaggcagtcagtcttcaaaaacaaataccaaaaaattaggattgtccaccagtctgtaargaggcctaacatcatgcctaacgtgtggcaggcattcaataactattgtgaacaaataaatgattgattgataaatgattaccttccacttttgaacaatggaagtttccattctctagcactccacaaagtagtagaagtctatgtctattttgcaataatcaccaagaattttgtctacataaagcctaaaatttgaaggaattaagcctctaatcagcagaaatatgtctctattactagaaacaactaatattatgttctgtttggactcactagaaaataccttcttgtcatttttgcccatttgggaaatcttcactgctctgaatgttgttttcttagctttttattctgcaaattgatatggctttccttgcctccaaaaattctgaatccagcatcaaac

SEQ ID NO: 94999 - DNA, 549 bp, Homo sapiens
agaaactgtgaaataataaaggttcaatatttcaaactaagtttggggatactttgatacataaaaatagaaaactaatacaggcagtcagtcttcaaaaacaaataccaaaaaattaggattgtccaccagtctgtaaagaggcctaacatcatgcctaacgtgtggcaggcattcaataactattgtgaacaaataaatgattgattgataaatgattaccttccacttttgaacaatggaagtttccattctctagcactccacaaagtagtagaagtctatgtctattttgcaataatcaccaagaattttgtctacataaagcctaaaatttgaaggaattaagcctctaatcagcagaaatatgtctctattactagaaacaactwatattatgttctgtttggactcactagaaaataccttcttgtcatttttgcccatttgggaaatcttcactgctctgaatgttgttttcttagctttttattctgcaaattgatatggctttccttgcctccaaaaattctgaatccagcatcaaac

SEQ ID NO: 95000 - DNA, 611 bp, Homo sapiens
tttatcctcccaatgtatgcttggaagattccaaggtacttaccatttctccaatacagcacgttgtttcaggattatgttattctaaacacacagtttcacttatctgaaatgtacttcacctccaattttaagccactttattgaggtattattgatatacacaaaggtatatgtatgtaatgaatacatattgatgactatagaagtaagtatataccccttaaaccatcaccacaatctgtgccagaaacatacacatcacttccaaaagtttccttccacacattttgtcattgtgtgtgtttgtgtgcgtgtgtgtgtatgtgtgtgtgtgtgagagagagagagagaaacagacagacagagagaacacttaacatatgatctacctacttagcaaattatgaagtatacaacacagtatttactacaagcaatatgctgtttggtagatctctagagcatattcatcctgcataaytgaaactttacaccctttgactaatatctccccgtcttcccacccccaccccaaaccagcccttggcaaccaccattctactctcagcttctacaaattgcattattttcaattcctcctataagtg

SEQ ID NO: 95001 - DNA, 611 bp, Homo sapiens
tttatcctcccaatgtatgcttggaagattccaaggtacttaccatttctccaatacagcacgttgtttcaggattatgttattctaaacacacagtttcacttatctgaaatgtacttcacctccaattttaagccactttattgaggtattattgatatacacaaaggtatatgtatgtaatgaatacatattgatgactatagaagtaagtatataccccttaaaccatcaccacaatctgtgccagaaacatacacatcacttccaaaagtttccttccacacattttgtcattgtgtgtgtttgtgtgcgtgtgtgtgtatgtgtgtgtgtgtgagagagagagagagaaacagacagacagagagaacacttaacatatgatctacctacttagcaaattatgaagtatacaacacagtatttactacaagcaatatgctgtttggtagatctctagagcatattcatcctgcataactgaaactttacaccctttgactaatatctcccygtcttcccacccccaccccaaaccagcccttggcaaccaccattctactctcagcttctacaaattgcattattttcaattcctcctataagtg

SEQ ID NO: 95002 - DNA, 668 bp, Homo sapiens
agaatctacagaagggctggaagattacagatttgaaggctacacaaccaggcacaaggtggaaaattcatccttggagtaaatccagtgaagacatcatagcttgcacgcccgacactaccaacagtggacacccatgttgctactacaatctagagctgcaactagcttgaggaagtgactgcttctgtttgtcagaattgactttgcatggttctccttcttcgcaaggttttgattgaaagacttgaccagggccatttgactggcagcaccctttgatgagtcatttaatgggcctgtgccctagctgcaaaggatgctgagaaagcagttgtccatccttttcagcttatatgcaaggaggcagaccatccttatattctatgcttcgtcatttggaagattccttcaaacataaaaacttcagatgccgagcggacaacaataacaaaaaaaaaaactggaaataaatatctactacacctacaaaatttggtcagagaacagagaacatttatctaacttggaaaagatcttaaacacagaacatctaggaagttcaatgcccacactttactaatgaggaaattggggccctgaaaagtgaaaggaattgcctaatgtaacatargaagtaaatgacaagaggcaagacttttcctctt

SEQ ID NO: 95003 - DNA, 846 bp, Homo sapiens
aaaaagtactttgggatttttcaaaacctggaccatgracagaaatctgattttttaatgtcaaggggctgacttagggcatatcgttttactctcttggagacaagagttgctgcttttgaatgagtcccaaaggaggctggtttcatcagtcattttccatgaaaatggaataaattcatatcataatatttttaaaattctagttatttattctttaattaaaaagacatttatacaacaatgactaaaaggaattatgtcaaattgttaactggggttatcttttagtcataatttttacagtcctttttacatttttgttctttaagtatttgtgcaataagcagttatttactgttataaactttctataaacatcaggggtttttttgttttaaattccagttctttgaactttctgtatcagatttatttattcaacatatatttttgaagcacctactatgtgctgtatccaagttagcaaacaacagtctaaaagctatgactgctttgtataaataaagttttattggaacacagccatatcactttatgtattatctgtgactggttttgcactaccaagggcagagttgagtagctgcaacagagaccaaatggcccataaaaccagaaatatttactctttggccatttctggaaaaacatttggtggcccctgtgctatgtgaaaggctttaacttaggtaatagaaatcaactgtgaacaaaaacaaaaaagatatctctctagggtcatggagcttatagtttttgcctaaacattggggtttccagtatccttaaaaacagctgttctgagggcaaggtgtggtggct

SEQ ID NO: 95004 - DNA, 708 bp, Homo sapiens
tgggaggatcacttgaggacaagagttcgagaccagactgatcaacatggtgaaaccctgtctttattaaaaatacaaaaaaaattagccagcctggtggtgcatgcctgtagtcccagctactcgggaggctgaggcaggagagttgcttgaacccaggaggcggaggttgcagtgagccaagatcacacccacagcactccagcctgggtgacagagccragactgcatctcaaaaaaagaaagaaagaaagaaagaaagaaagaaagaaagaaagaaagaaagaaagaaagaaagaaagaaagaaagaaagaaagaaaagaaaaagaaaaaagaaaataaataaagagaaaagaaatgaatttcccgtcccagttcagtaaacaagattccctgttcccagatgacacacaccaaacacctttgacttccactgaactccatttccttggaaacaatataataggattaacaaaagcctggaagattcttagaagagctgctgttctctccgcaacaggaatgtgcttaagtatcctattaaagaagtgcacattgggttggctgcaatgttaacctgctaaggatgtagaaacacatcagaaacaggtgagagagaagccaggctcagagcctccccggcaaagggaactctgtgggtaaatgctctaattaggagcttggattctgttcagtattcaacagga

SEQ ID NO: 95005 - DNA, 708 bp, Homo sapiens
tgggaggatcacttgaggacaagagttcgagaccagactgatcaacatggtgaaaccctgtctttattaaaaatacaaaaaaaattagccagcctggtggtgcatgcctgtagtcccagctactcgggaggctgaggcaggagagttgcttgaacccaggaggcggaggttgcagtgagccaagatcacacccacagcactccagcctgggtgacagagccgagactgcatctcaaaaaaagaaagaaagaaagaaagaaagaaagaaagaaagaaagaaagaaagaaagaaagaaagaaagaaagaaagaaagaaagaaaagaaaaagaaaaaagaaaataaataaagagaaaagaaatgaatttcccgtcccagttcagtaaacaagattccctgttcccagatgacacacaccaaacacctttgacttccactgaactccatttccttggaaacawtataataggattaacaaaagcctggaagattcttagaagagctgctgttctctccgcaacaggaatgtgcttaagtatcctattaaagaagtgcacattgggttggctgcaatgttaacctgctaaggatgtagaaacacatcagaaacaggtgagagagaagccaggctcagagcctccccggcaaagggaactctgtgggtaaatgctctaattaggagcttggattctgttcagtattcaacagga

SEQ ID NO: 95006 - DNA, 708 bp, Homo sapiens
tgggaggatcacttgaggacaagagttcgagaccagactgatcaacatggtgaaaccctgtctttattaaaaatacaaaaaaaattagccagcctggtggtgcatgcctgtagtcccagctactcgggaggctgaggcaggagagttgcttgaacccaggaggcggaggttgcagtgagccaagatcacacccacagcactccagcctgggtgacagagccgagactgcatctcaaaaaaagaaagaaagaaagaaagaaagaaagaaagaaagaaagaaagaaagaaagaaagaaagaaagaaagaaagaaagaaagaaaagaaaaagaaaaaagaaaataaataaagagaaaagaaatgaatttcccgtcccagttcagtaaacaagattccctgttcccagatgacacacaccaaacacctttgacttccactgaactccatttccttggaaacaayataataggattaacaaaagcctggaagattcttagaagagctgctgttctctccgcaacaggaatgtgcttaagtatcctattaaagaagtgcacattgggttggctgcaatgttaacctgctaaggatgtagaaacacatcagaaacaggtgagagagaagccaggctcagagcctccccggcaaagggaactctgtgggtaaatgctctaattaggagcttggattctgttcagtattcaacagga

SEQ ID NO: 95007 - DNA, 708 bp, Homo sapiens
tgggaggatcacttgaggacaagagttcgagaccagactgatcaacatggtgaaaccctgtctttattaaaaatacaaaaaaaattagccagcctggtggtgcatgcctgtagtcccagctactcgggaggctgaggcaggagagttgcttgaacccaggaggcggaggttgcagtgagccaagatcacacccacagcactccagcctgggtgacagagccgagactgcatctcaaaaaaagaaagaaagaaagaaagaaagaaagaaagaaagaaagaaagaaagaaagaaagaaagaaagaaagaaagaaagaaagaaaagaaaaagaaaaaagaaaataaataaagagaaaagaaatgaatttcccgtcccagttcagtaaacaagattccctgttcccagatgacacacaccaaacacctttgacttccactgaactccatttccttggaaacaatataataggattaacaaaagcctggaagattcttagaagagctgctgttctctccgcaacaggaatgtgcttaagtatcctattaaagaagtgcacattgggttggctgcaatgttaacctgctaaggatgtagaaayacatcagaaacaggtgagagagaagccaggctcagagcctccccggcaaagggaactctgtgggtaaatgctctaattaggagcttggattctgttcagtattcaacagga

SEQ ID NO: 95008 - DNA, 837 bp, Homo sapiens
ggatccaccagacatccaaaggacggcaatgtttctaacatctctatagttcatcactcaattttcagaccatttatgacagatccctgtaacatcttcccttggaattacacaaggcataggaattgctcagatttcctgatttgtattctgagcactgccctatatgagrttagaaaaaaacattcacaaagtgaacctgtatcttctccctttacatggaaataaatgaaaatctctgtgctagaaagatttttctctctcctcttcctggggaatttgactgtatctgcagcactcatttcattacatactttgcaagtgtctcatagtgataatcactcagggcacctcaggttaacacactactggtttttctctttttccaagtcttccagctacctgtgctaggaggattctacccttgtcatgaactctttggctgcaacctaatttttccatcttataatggacgaagaactatcctctatgaatgctcctgcctaaaatgtgtaataaaaacacatgtcatatgtgtcaattgcatacaagagaagaatttgcacttgtttttagtagaagtttcagtggaagggaaaatgaagcacagagcaaagaagccaccatataagcagaatggtaaccaccacagatgtaaaatctcaaggtcatttgtcagatcttgaaaacacaacagtctctacccactcccatttctggtgtctgaagttccaccactaaaaatcctatttgtttaatttagaagaataaaaatgaatactaattgaatttctactgcatgccagatgtttttctaatcctcaaaacaattcagcg

SEQ ID NO: 95009 - DNA, 2381 bp, Homo sapiens
aaaacccaccccattcctccccacactcatcgcccttaccacgctactcctacctatctccccttttatactaataatcttatagaaatttaggttaaatacagaccaagagccttcaaagccctcagtaagttgcaatacttaatttctgtaacagctaaggactgcaaaaccccactctgcatcaactgaacgcaaatcagccactttaattaagctaagcccttactagaccaatgggacttaaacccacaaacacttagttaacagctaagcaccctaatcaactggcttcaatctacttctcccgccgccgggaaaaaaggcgggagaagccccggcaggtttgaagctgcttcttcgaatttgcaattcaatatgaaaatcacctcggagctggtaaaaagaggcctaacccctgtctttagatttacagtccaatgcttcactcagccattttacctcacccccactgatgttcgccgaccgttgactattctctacaaaccacaaagacattggaacactatacctattattcggcgcatgagctggagtcctaggcacagctctaagcctccttattcgagccgagctgggccagccaggcaaccttctaggtaacgaccacatctacaacgttatcgtcacagcccatgcatttgtaataatcttcttcatagtaatacccatcataatcggaggctttggcaactgactagttcccctaataatcggtgcccccgatatggcgtttccccgcataaacaacataagcttctgactcttacctccctctctcctactcctgctcgcatctgctatagtggaggccggagcaggaacaggttgaacagtctaccctcccttagcagggaactactcccaccctggagcctccgtagacctaaccatcttctccttacacctagcaggtgtctcctctatcttaggggccatcaatttcatcacaacaattatcaatataaaaccccctgccataacccaataccaaacgcccctcttcgtctgatccgtcctaatcacagcagtcctacttctcctatctctcccagtcctagctgctggcatcactatactactaacagaccgcaacctcaacaccaccttcttcgaccccgccggaggaggagaccccattctataccaacacctattctgatttttcggtcaccctgaagtttatattcttatcctaccaggcttcggaataatctcccayattgtaacttactactccggaaaaaaagaaccatttggatacataggtatggtctgagctatgatatcaattggcttcctagggtttatcgtgtgagcacaccatatatttacagtaggaatagacgtagacacacgagcatatttcacctccgctaccataatcatcgctatccccaccggcgtcaaagtatttagctgactcgccacactccacggaagcaatatgaaatgatctgctgcagtgctctgagccctaggattcatctttcttttcaccgtaggtggcctgactggcattgtattagcaaactcatcactagacatcgtactacacgacacgtactacgttgtagcccacttccactatgtcctatcaataggagctgtatttgccatcataggaggcttcattcactgatttcccctattctcaggctacaccctagaccaaacctacgccaaaatccatttcactatcatattcatcggcgtaaatctaactttcttcccacaacactttctcggcctatccggaatgccccgacgttactcggactaccccgatgcatacaccacatgaaacatcctatcatctgtaggctcattcatttctctaacagcagtaatattaataattttcatgatttgagaagccttcgcttcgaagcgaaaagtcctaatagtagaagaaccctccataaacctggagtgactatatggatgccccccaccctaccacacattcgaagaacccgtatacataaaatctagacaaaaaaggaaggaatcgaaccccccaaagctggtttcaagccaaccccatggcctccatgactttttcaaaaaggtattagaaaaaccatttcataactttgtcaaagttaaattataggctaaatcctatatatcttaatggcacatgcagcgcaagtaggtctacaagacgctacttcccctatcatagaagagcttatcacctttcatgatcacgccctcataatcattttccttatctgcttcctagtcctgtatgcccttttcctaacactcacaacaaaactaactaatactaacatctcagacgctcaggaaatagaaaccgtctgaactatcctgcccgccatcatcctagtcct

SEQ ID NO: 95010 - DNA, 2381 bp, Homo sapiens
aaaacccaccccattcctccccacactcatcgcccttaccacgctactcctacctatctccccttttatactaataatcttatagaaatttaggttaaatacagaccaagagccttcaaagccctcagtaagttgcaatacttaatttctgtaacagctaaggactgcaaaaccccactctgcatcaactgaacgcaaatcagccactttaattaagctaagcccttactagaccaatgggacttaaacccacaaacacttagttaacagctaagcaccctaatcaactggcttcaatctacttctcccgccgccgggaaaaaaggcgggagaagccccggcaggtttgaagctgcttcttcgaatttgcaattcaatatgaaaatcacctcggagctggtaaaaagaggcctaacccctgtctttagatttacagtccaatgcttcactcagccattttacctcacccccactgatgttcgccgaccgttgactattctctacaaaccacaaagacattggaacactatacctattattcggcgcatgagctggagtcctaggcacagctctaagcctccttattcgagccgagctgggccagccaggcaaccttctaggtaacgaccacatctacaacgttatcgtcacagcccatgcatttgtaataatcttcttcatagtaatacccatcataatcggaggctttggcaactgactagttcccctaataatcggtgcccccgatatggcgtttccccgcataaacaacataagcttctgactcttacctccctctctcctactcctgctcgcatctgctatagtggaggccggagcaggaacaggttgaacagtctaccctcccttagcagggaactactcccaccctggagcctccgtagacctaaccatcttctccttacacctagcaggtgtctcctctatcttaggggccatcaatttcatcacaacaattatcaatataaaaccccctgccataacccaataccaaacgcccctcttcgtctgatccgtcctaatcacagcagtcctacttctcctatctctcccagtcctagctgctggcatcactatactactaacagaccgcaacctcaacaccaccttcttcgaccccgccggaggaggagaccccattctataccaacacctattctgatttttcggtcaccctgaagtttatattcttatcctaccaggcttcggaataatctcccatattgtaacttactactccggaaaaaaagaaccatttggatacataggtatggtctgagctatgatatcaattggcttcctagggtttatcgtgtgagcacaccatatatttacagtaggaatagacgtagacacacgagcatatttcacctccgctaccataatcatcgctatccccaccggcgtcaaagtatttagctgactcgccacactccacggaagcaatatgaaatgatctgctgcagtgctctgagccctaggattcatctttcttttcaccgtaggtggcctgactggcattgtattagcaaactcatcactagacatcgtactacacgacacgtactacgttgtagcccacttccactatgtcctatcaataggagctgtatttgccatcataggaggcttcattcactgatttcccctattctcaggctacaccctagaccaaacctacgccaaaatccatttcactatcatattcaycggcgtaaatctaactttcttcccacaacactttctcggcctatccggaatgccccgacgttactcggactaccccgatgcatacaccacatgaaacatcctatcatctgtaggctcattcatttctctaacagcagtaatattaataattttcatgatttgagaagccttcgcttcgaagcgaaaagtcctaatagtagaagaaccctccataaacctggagtgactatatggatgccccccaccctaccacacattcgaagaacccgtatacataaaatctagacaaaaaaggaaggaatcgaaccccccaaagctggtttcaagccaaccccatggcctccatgactttttcaaaaaggtattagaaaaaccatttcataactttgtcaaagttaaattataggctaaatcctatatatcttaatggcacatgcagcgcaagtaggtctacaagacgctacttcccctatcatagaagagcttatcacctttcatgatcacgccctcataatcattttccttatctgcttcctagtcctgtatgcccttttcctaacactcacaacaaaactaactaatactaacatctcagacgctcaggaaatagaaaccgtctgaactatcctgcccgccatcatcctagtcct

SEQ ID NO: 95011 - DNA, 541 bp, Homo sapiens
tttgatcacgtggctgttccayggagggttcccaaagggtcaaagactgaaagagctggacccctgtggagtgagggtttcctagcaggagtctcctgaaatcctcacgacccactgtgagtcctcacgtggcagatccttgatcaccaggctcttttgggaaccagagactctttctagtcctgaatgtgtggttgggggcaggaggtgttctctttttccttctctgggtcttgtctttgaaaggcagaggcaaacaggtagttgggggttcagggtttctcagcatcagcctccacccttcccttactcatcccctggggtgcagggccgggtgtgctccttggggtgggggccctgacagctggacccatgcagcatccctcttcgtgcccccccttcacggccaggggtgcgcatgctggatggcgaggtgacagatgcagtggaggcacgctcgctgggcctgaaccccaaccacatccacatctacagtgccagctggggccccgaggatgacggcaagacagtggatgggcca

SEQ ID NO: 95012 - DNA, 541 bp, Homo sapiens
tttgatcacgtggctgttccacggagggttcccaaagggtcaaagactgaaagagctggacccctgtggagtgagggtttcctagcaggagtctcctgaaatcctcacgacccactgtgagtcctcacgtggcagatccttgatcaccaggctcttttgggaaccagagactctttctagtcctgaatgtgtggttgggggcaggaggtgttctctttttccttctctgggtcttgtctttgaaaggcagaggcaaacaggtagttgggggttcagggtttctcagcatcagcctccacccttcccttactcatcccctggggtgcagggcygggtgtgctccttggggtgggggccctgacagctggacccatgcagcatccctcttcgtgcccccccttcacggccaggggtgcgcatgctggatggcgaggtgacagatgcagtggaggcacgctcgctgggcctgaaccccaaccacatccacatctacagtgccagctggggccccgaggatgacggcaagacagtggatgggcca

SEQ ID NO: 95013 - DNA, 626 bp, Homo sapiens
caggggaggggtctctctccccatcccaagtcatccagcccttctccctgcactcatgaaaccccaataaatatcctcattgacaaccagaaatcttgttttatctcattttttttctcacataaattgctagcctccccggggttctcagtgtggggtacagggaattctgcacccagtgtgaaaatcacccaagggaggaggctcacagcctccctgagtcatctccccagagggtccttcctctcccagtcaccccttctscaactctccactgtacccctgagctaccagtctggcatcagttcagaccagtcccacaccctcctaaattttacttctcaataaatacctgatcatgtaaaacccagcatttctaatgtgcagtctctgtctggtcatgtgtctgggctgaagggtcactgctcagggacagggggcagttccaggtgagatcccatgtctccgtcatcccacaccccacccaacctgccagggaaccgggtgagctccctgtgccagtgggaactgcaatccaaggcacaaaattgtcctgcagtccttgcccacctgggaagggacaggggcccagtgagaggtttgctggcgccctgtggggagattca

SEQ ID NO: 95014 - DNA, 724 bp, Homo sapiens
ctcattyctgagtacacggggtggccaccgctgtcaccctggtttcaccctggagcattaaacctgaccccagtcaatgcaggagggacacaacctcagcttccatgcagcccagaagcccaggctgctcgaaccatccccggggccttgtggatgcagcaggtgtatcctgtaccggggtgctgggacgctgggcacgggctcggggcaggaggggcccccgctccctgaggaggggacaagtctggaaaactccagggcggcctccagccacaccttgaaaagggggtaggtcccacccagcactggatgtttggcttaacaagttcccaacattttaaagtcgagacaattcacgtaagaattagggtttctacatctcttggaaggctgagagctcaaccctgctgggtgtccggccccccctgtccccactgcccaggacaggcagaccccaggtgcgaacgctcacagcctgcttcctccacacaggcaacagctccatcagaggcctcagggctccccttcgatctggagttggaattgagggatgctgcccaggaagatgccagggacacctgcgtgggcagagagggcccaggaaggcccaagcgtggggtcagggcaccgaggggacagagtggagggggtcccccagcccagaaccacccaggcaccaagactcccagcagtcaggacagaaacagctccgacacccacacac

SEQ ID NO: 95015 - DNA, 724 bp, Homo sapiens
ctcattcctgagtacacggggtggccaccgctgtcaccctggtttcaccctggagcattaaacctgaccccagtcaatgcaggagggacacaacctcagcttccatgcagcccagaagcccaggctgctcgaaccatccccggggccttgtggatgcagcaggtgtatcctgtaccggggtgctgggacgctgggcacgggctcggggcaggaggggcccccgctccctgaggaggggacaagtctggaaaactccagggcggcctccagccacaccttgaaaagggggtaggtcccacccagcactggatgtttggcttaacaagttcccaacattttaaagtcgagacaattcacgtaagaattagggtttctacatctcttgraaggctgagagctcaaccctgctgggtgtccggccccccctgtccccactgcccaggacaggcagaccccaggtgcgaacgctcacagcctgcttcctccacacaggcaacagctccatcagaggcctcagggctccccttcgatctggagttggaattgagggatgctgcccaggaagatgccagggacacctgcgtgggcagagagggcccaggaaggcccaagcgtggggtcagggcaccgaggggacagagtggagggggtcccccagcccagaaccacccaggcaccaagactcccagcagtcaggacagaaacagctccgacacccacacac

SEQ ID NO: 95016 - DNA, 724 bp, Homo sapiens
ctcattcctgagtacacggggtggccaccgctgtcaccctggtttcaccctggagcattaaacctgaccccagtcaatgcaggagggacacaacctcagcttccatgcagcccagaagcccaggctgctcgaaccatccccggggccttgtggatgcagcaggtgtatcctgtaccggggtgctgggacgctgggcacgggctcggggcaggaggggcccccgctccctgaggaggggacaagtctggaaaactccagggcggcctccagccacaccttgaaaagggggtaggtcccacccagcactggatgtttggcttaacaagttcccaacattttaaagtcgagacaattcacgtaagaattagggtttctacatctcttggaaggctgagagctcaacmctgctgggtgtccggccccccctgtccccactgcccaggacaggcagaccccaggtgcgaacgctcacagcctgcttcctccacacaggcaacagctccatcagaggcctcagggctccccttcgatctggagttggaattgagggatgctgcccaggaagatgccagggacacctgcgtgggcagagagggcccaggaaggcccaagcgtggggtcagggcaccgaggggacagagtggagggggtcccccagcccagaaccacccaggcaccaagactcccagcagtcaggacagaaacagctccgacacccacacac

SEQ ID NO: 95017 - DNA, 724 bp, Homo sapiens
ctcattcctgagtacacggggtggccaccgctgtcaccctggtttcaccctggagcattaaacctgaccccagtcaatgcaggagggacacaacctcagcttccatgcagcccagaagcccaggctgctcgaaccatccccggggccttgtggatgcagcaggtgtatcctgtaccggggtgctgggacgctgggcacgggctcggggcaggaggggcccccgctccctgaggaggggacaagtctggaaaactccagggcggcctccagccacaccttgaaaagggggtaggtcccacccagcactggatgtttggcttaacaagttcccaacattttaaagtcgagacaattcacgtaagaattagggtttctacatctcttggaaggctgagagctcaaccctgctgggtgtccggccccccctgtccccactgcccaggacaggcagaccccaggtgcgaasgctcacagcctgcttcctccacacaggcaacagctccatcagaggcctcagggctccccttcgatctggagttggaattgagggatgctgcccaggaagatgccagggacacctgcgtgggcagagagggcccaggaaggcccaagcgtggggtcagggcaccgaggggacagagtggagggggtcccccagcccagaaccacccaggcaccaagactcccagcagtcaggacagaaacagctccgacacccacacac

SEQ ID NO: 95018 - DNA, 564 bp, Homo sapiens
tcctccacggcaaggaggagatcaaggtcattccgtaagtgcaggattttaccagaagcgtccccgggggagggaccgcccctcagaccccggctcagcgccccagsgcgtcctcccagggcttcctcggtgcagtcagcagcaccggcctggctggcccacctgtgtctctgtgtgccgtgggcatagtggagttgggggtgagacagaagccgactcactgttctgggagatggtgaggaggacgtgggctgctgaggagcccgagtcactgtgacatccagagtgacatacaggggaccaggcaagctgtccaggcggcctcgtcagcaacaattgagcatgaaggccccaggatttgaccctggcaccaccagccccacccaagacagtggagcctccagccaggaggccgagtcttggcccgtggggctggaagaggaggggaactccagtccggaggtcagggcaggactccagccaagggaggggcagctggtgcccagtggccctgtgatcccataagcctattggaccccatccccaggccccaagcaggaacca

SEQ ID NO: 95019 - DNA, 979 bp, Homo sapiens
tttgcaaagagaagcctgggggtgaaaaggagttcagtaatttgttgactctcataaagcacattagtggtagaactgcaactcaccatcatttccttctaagaactttgctcttctcaccaaaacttaaggctcytcagagtgtctaatagaagtgaacatttctgtgacaattttctgttccctgaaatatgatcctcacttaatttgccctactaaaactcccaagtataagaacaataggttgtaagatgtctactcttgaatcacatttgtcttttgcttcttaaaacccctaagccattcaatcttcagctattcagaaatcttcacctcaaatgttcatctagtgcaatttgaagaagaaacagtgccaggcattggagtgagaatcttcacagaaaaatgtctgcccagaggcagatgaggtccttcagctccagtgctgattggttcctttcctagggactccccaatcctaccacacatggaaacatccagaggtttttattctttccggcaggtacataagatccattaggtttgagctgtgttgactaccactgctttttccttggtctcacttatgtcttggaagatggctctgcagatccctggaggcttttgggcagcagctgtgaccgtgatgctggtgatgctgagcaccccagtggctgaggccagagactttcccagtaagtgcagggcagctgctctcgagagccaccactgtgggaacaggctctccttgggttggagtatgggggatggtgatctccatgatctcagaacacagtcttttatcaccatttattctttttgggaaatagagctatgttgcatttttatttccaccttataatgggtgaggtgaggataatccaaccccaatcccacaggtttaagcctgaaggaggagagaggaaagaggagacaaagtgtgcattcactacctgtgacaggacaaaatgaccatggc

SEQ ID NO: 95020 - DNA, 979 bp, Homo sapiens
tttgcaaagagaagcctgggggtgaaaaggagttcagtaatttgttgactctcataaagcacattagtggtagaactgcaactcaccatcatttccttctaagaactttgctcttctcaccaaaacttaaggctcctcagagtgtctaatagaagtgaacatttctgtgacaattttctgttccctgaaatatgatcctcacttaatttgccctactaaaamtcccaagtataagaacaataggttgtaagatgtctactcttgaatcacatttgtcttttgcttcttaaaacccctaagccattcaatcttcagctattcagaaatcttcacctcaaatgttcatctagtgcaatttgaagaagaaacagtgccaggcattggagtgagaatcttcacagaaaaatgtctgcccagaggcagatgaggtccttcagctccagtgctgattggttcctttcctagggactccccaatcctaccacacatggaaacatccagaggtttttattctttccggcaggtacataagatccattaggtttgagctgtgttgactaccactgctttttccttggtctcacttatgtcttggaagatggctctgcagatccctggaggcttttgggcagcagctgtgaccgtgatgctggtgatgctgagcaccccagtggctgaggccagagactttcccagtaagtgcagggcagctgctctcgagagccaccactgtgggaacaggctctccttgggttggagtatgggggatggtgatctccatgatctcagaacacagtcttttatcaccatttattctttttgggaaatagagctatgttgcatttttatttccaccttataatgggtgaggtgaggataatccaaccccaatcccacaggtttaagcctgaaggaggagagaggaaagaggagacaaagtgtgcattcactacctgtgacaggacaaaatgaccatggc

SEQ ID NO: 95021 - DNA, 979 bp, Homo sapiens
tttgcaaagagaagcctgggggtgaaaaggagttcagtaatttgttgactctcataaagcacattagtggtagaactgcaactcaccatcatttccttctaagaactttgctcttctcaccaaaacttaaggctcctcagagtgtctaatagaagtgaacatttctgtgacaattttctgttccctgaaatatgatcctcacttaatttgccctactaaaactcccaagtrtaagaacaataggttgtaagatgtctactcttgaatcacatttgtcttttgcttcttaaaacccctaagccattcaatcttcagctattcagaaatcttcacctcaaatgttcatctagtgcaatttgaagaagaaacagtgccaggcattggagtgagaatcttcacagaaaaatgtctgcccagaggcagatgaggtccttcagctccagtgctgattggttcctttcctagggactccccaatcctaccacacatggaaacatccagaggtttttattctttccggcaggtacataagatccattaggtttgagctgtgttgactaccactgctttttccttggtctcacttatgtcttggaagatggctctgcagatccctggaggcttttgggcagcagctgtgaccgtgatgctggtgatgctgagcaccccagtggctgaggccagagactttcccagtaagtgcagggcagctgctctcgagagccaccactgtgggaacaggctctccttgggttggagtatgggggatggtgatctccatgatctcagaacacagtcttttatcaccatttattctttttgggaaatagagctatgttgcatttttatttccaccttataatgggtgaggtgaggataatccaaccccaatcccacaggtttaagcctgaaggaggagagaggaaagaggagacaaagtgtgcattcactacctgtgacaggacaaaatgaccatggc

SEQ ID NO: 95022 - DNA, 979 bp, Homo sapiens
tttgcaaagagaagcctgggggtgaaaaggagttcagtaatttgttgactctcataaagcacattagtggtagaactgcaactcaccatcatttccttctaagaactttgctcttctcaccaaaacttaaggctcctcagagtgtctaatagaagtgaacatttctgtgacaattttctgttccctgaaatatgatcctcacttaatttgccctactaaaactcccaagtataagaacaataggttgtaagatgtctactcttgaatcacatttgtcttttgcttcttaaaacccctaagccattcaatcttcagctattcagaaatcttcacctcaaatgttcatctagtgcaatttgaagaagaaacagtgccaggcattggagtgagaatcttcacagaaaaaygtctgcccagaggcagatgaggtccttcagctccagtgctgattggttcctttcctagggactccccaatcctaccacacatggaaacatccagaggtttttattctttccggcaggtacataagatccattaggtttgagctgtgttgactaccactgctttttccttggtctcacttatgtcttggaagatggctctgcagatccctggaggcttttgggcagcagctgtgaccgtgatgctggtgatgctgagcaccccagtggctgaggccagagactttcccagtaagtgcagggcagctgctctcgagagccaccactgtgggaacaggctctccttgggttggagtatgggggatggtgatctccatgatctcagaacacagtcttttatcaccatttattctttttgggaaatagagctatgttgcatttttatttccaccttataatgggtgaggtgaggataatccaaccccaatcccacaggtttaagcctgaaggaggagagaggaaagaggagacaaagtgtgcattcactacctgtgacaggacaaaatgaccatggc

SEQ ID NO: 95023 - DNA, 979 bp, Homo sapiens
tttgcaaagagaagcctgggggtgaaaaggagttcagtaatttgttgactctcataaagcacattagtggtagaactgcaactcaccatcatttccttctaagaactttgctcttctcaccaaaacttaaggctcctcagagtgtctaatagaagtgaacatttctgtgacaattttctgttccctgaaatatgatcctcacttaatttgccctactaaaactcccaagtataagaacaataggttgtaagatgtctactcttgaatcacatttgtcttttgcttcttaaaacccctaagccattcaatcttcagctattcagaaatcttcacctcaaatgttcatctagtgcaatttgaagaagaaacagtgccaggcattggagtgagaatcttcacagaaaaatgtctgcccagaggcagatgaggtccttcagctccagtgctgattggttcctttcctagggactccccaatcctaccacacatggaaacatccagaggtttttattctttccggcaggtacataagatccattaggtttgagctgtgttgactaccactgctttttccttggtctcacttaygtcttggaagatggctctgcagatccctggaggcttttgggcagcagctgtgaccgtgatgctggtgatgctgagcaccccagtggctgaggccagagactttcccagtaagtgcagggcagctgctctcgagagccaccactgtgggaacaggctctccttgggttggagtatgggggatggtgatctccatgatctcagaacacagtcttttatcaccatttattctttttgggaaatagagctatgttgcatttttatttccaccttataatgggtgaggtgaggataatccaaccccaatcccacaggtttaagcctgaaggaggagagaggaaagaggagacaaagtgtgcattcactacctgtgacaggacaaaatgaccatggc

SEQ ID NO: 95024 - DNA, 612 bp, Homo sapiens
tgactgtattcctgaaaagcttgaattatattttaaaaactcagccataagctttgtgggagacagactgtacctgtcaagttccctcttgtatctctggcacctcgcatagcatcaggctcatagtgaatattcaagaatgtcctctcgatggttgcaatatatttgaaaatctcagcattgaaaggaattctgtgacaaaccacttaaaaaagttaaaaygaatgaacattcagtaaattctgattttgatgaaacacagttgttcataagtggacaaaactatcctttaagtaaacccatggggacatttgagttgaataatttatagagacttataatctgaaagagagcgcagacatagtctcatattcttttaccacacagataaggaaaagctggagctcacagaaacttgaaagagcttgcccaaggccacatcactatttaggagcagttattttaatatgtaacaaattacgtgtgattaatctttttcagaaggggttactgcaggttttcttaaagtaacagtattagataatattttataaaacttaaaaactctataacataatgcttcataatgtttaagaattcataaacatttag

SEQ ID NO: 95025 - DNA, 612 bp, Homo sapiens
tgactgtattcctgaaaagcttgaattatattttaaaaactcagccataagctttgtgggagacagactgtacctgtcaagttccctcttgtatctctggcacctcgcatagcatcaggctcatagtgaatattcaagaatgtcctctcgatggttgcaatatatttgaaaatctcagcattgaaaggaattctgtgacaaaccacttaaaaaagttaaaatgaatgaacattcagtaaattctgattttgatgaaacacagttgttcataagtggacaaaactatcctttaagtaaacccwtggggacatttgagttgaataatttatagagacttataatctgaaagagagcgcagacatagtctcatattcttttaccacacagataaggaaaagctggagctcacagaaacttgaaagagcttgcccaaggccacatcactatttaggagcagttattttaatatgtaacaaattacgtgtgattaatctttttcagaaggggttactgcaggttttcttaaagtaacagtattagataatattttataaaacttaaaaactctataacataatgcttcataatgtttaagaattcataaacatttag

SEQ ID NO: 95026 - DNA, 633 bp, Homo sapiens
aatccagaaggcttagttctgtgtgtgttctgtccctatataaactggtaaagaaaaaaaaaagttatgcagaatgttagatatttacatttgatacggtgtgccactattcaaggaaaaattaaatagcattttttaaaaaatagaatgaacttcaaaattaaagttgatttttaacttccatattagcaaatactcttcactactgaaagacagtactattttgcatattctgcataactttaagaaagtctttagtgaaatctttattggaagaaagtcatttgacaacaggcaaaaatttaatgattcggtatgaagtaaaatcaatcttctgatttggaaaatacwctattataaaggtttcacttctttttggatgttttaaaatagacatagacacttgaaagtactatcatcacgtctcaaatcacctagaattcctagtatttttaaattgcaaatacaatttcaagtttatttaaatactccagaagttataatcctactaattgtgctagactttgctagtagagggggcccctctttctggatgagaagtctctcttgcagccatagaagagaccatggctttccccataggtttttcaacagactgtgaagcagtctgtc

SEQ ID NO: 95027 - DNA, 633 bp, Homo sapiens
aatccagaaggcttagttctgtgtgtgttctgtccctatataaactggtaaagaaaaaaaaaagttatgcagaatgttagatatttacatttgatacggtgtgccactattcaaggaaaaattaaatagcattttttaaaaaatagaatgaacttcaaaattaaagttgatttttaacttccatattagcaaatactcttcactactgaaagacagtactattttgcatattctgcataactttaagaaagtctttagtgaaatctttattggaagaaagtcatttgacaacaggcaaaaatttaatgattcggtatgaagtaaaatcaatcttctgatttggaaaatactmtattataaaggtttcacttctttttggatgttttaaaatagacatagacacttgaaagtactatcatcacgtctcaaatcacctagaattcctagtatttttaaattgcaaatacaatttcaagtttatttaaatactccagaagttataatcctactaattgtgctagactttgctagtagagggggcccctctttctggatgagaagtctctcttgcagccatagaagagaccatggctttccccataggtttttcaacagactgtgaagcagtctgtc

SEQ ID NO: 95028 - DNA, 653 bp, Homo sapiens
aggcacttacatgattcttgcttggacccctttctgggttctggtgggtggatagactggactttctatgctattacaatcaatgaggatgttaataatcagcctttgtccacacagataattatgtgcatttaaaatccagagaaacagaagatctgcaggctgcattgttcccgctaagaaaacaatgtgaaggggctggaatggagaggtttgacatctggatcacagtggtcttccacaatgttaatgctaatccctggcccagcctcagggaaacatgatccctcgtggtctgtttattattcttggaactcaggggagagaaacaggctgaaacctgagaaatttcagaaacaattaaggacatacttcttcatagagagggttggttgtcacaagtgccagggaagakgagggcttcttcatcatcagccagatcttctagaaaacatccccccgccccttttatcaccaatataccagtctatcagtgaaaacctaatgtcctgtttgggttatcatgcctcttctttaacctcccagtgggtcccaggggctagttcaaggcaggaagcaaacatctactgaataccatcaggaaccaggctcagagcatgaaggagagactggagtcctcaggcagtgcaggc

SEQ ID NO: 95029 - DNA, 2693 bp, Homo sapiens
gtttcaacttggctaggctatggtccccagttacttaatcaaacactgtccaggtgctctggtagttattttgtagatgtggttaatatctacaatcagttgactttaagtaaaagagtctatcctcaattgtattgatgggcctcatctaatcagctgaaggccttaagaggaaaaactgagttttcctggaagagaaattctgcctctgcctcaggaccacagcttcattttctgcccaagagtccagcctgccagtgtaacctacccacaactttggacttagccctacgatcacataagctaattccttaaaatcaaggtatatgtgtgtgtgtgtgtgtgtgtgtgtgtttatacaactacaccatcctattgggtcatttctctggagaaccctgactgatactaacatatgcataatgtaatttcatacaggctatttgatactcacaacaggtcacctatgtaagtatgatcgccttttgttcaagtgaagaaactgcagctccctgcctgcagcgaaacaacatgtgcaaggaacacacagacattaaacgacaaggccataatttagactcatatcttcaactcaacatggtatgctgctttccgcaagacacactgccctccaaaagtcaccataattcctaataagaatagcccagtaaaggaggagatttaatgatctgccactgaatatatctagaaaaacagtccaaggaagatgcaagcccacagcccagccaaactggttcttctcactttttgttggggcggcacagtctggcagcctagcacgttcagtttctcccaggacagtagtgagaccaaaggagaactgaagaagggcagaagctagaacttcctccggtcctcatcacctcgtctaagccagagacctcacagtctgcacccttatcattgttgtccagctgttcaacgtgaatggcaaaatcattgctcttcattaattcactggaagccttcatgcaaacctcattaagaggcacagtaattgttctgtgaatattgcccattttccaattatgttcctttcctcatgcggggagaatgtgccatcagagaaaaagcactgggttgccttcatctgttttaaaataagtggttgagggactggcttttgatggtggcttctacaaccagaaaggactcttcagccaagaaccattcttagtaatctgatrgtgtgcaaagtgcaaacatctgtctatcaacccagcccagggactcacacacctgggcttgccacttcagggaagagactgcctggccatgagttctcagcagagaattgtagcaaggatctgaactctgtctttctgtgaaccacaccggaaggcatgtatgtattcacatccatgcagacggctcagcagagccctgtgagtgtgcagtctcatgcatctgcagagaaccagaaagggtttgtggggagagtaaaatcacgaggagaggtgccgtggaagtaagagattcagctgctgaaccatttgcagatcatcataagtactacttatgagactatcaactgttcatcacctccaaaaacacaggcaaccctcctgagtccaattatctccaaacttttcctctttcgcattcaatgttgtcattaaataagcaaacaaagacatggcctggtgttctgatgcccacactgtttttacaaataaaaaaggtctaagagtgatgggaactccaggcctgactcagcgagcaacctctgtgggctgcgggcgaagaaatgaagagcaaaaattcatccatgaacagggcaggacagcatctggattttcatgcttggtttcatcctccataagcagtctggcttccaggtaggtaggcagactcttaatttgttcaagttgttaaaacaaaatgccaccgactaggtagcttataaacaacaggcatttatttcttatagttctagaggctgggaagtccaaggtcaagacaacagcagattcagtgtctggtgagagtctgctttctgttcacagatggccgtcttcttgctacgtcctcacatggtgaaaggctcccttgtgtctatttttaagggcactaatcccactcatgtaggctccaccctcaagacctcactgctcaaaggcccagctcctaataccctcacacagcaggttagatttcagcatacaaattctgagggggtgtaaacattcagaccatagcaggcaggcaggcgggagggcgggtggacatacagacagacggatgcacggatggatggatagatagatagatagacagacagacagacagacagacagacagacagacagacagacagatacagaaagacagatacagacagacaatgtttttggggccaagattcaaattcaggcatatctggccaccaaaattaatatccttttcacaacgcagtgttcattctcaatcatttcaaattccaggatgctctccaggaaaagtgagtctaacgcactgccaacctcctctaagtgcctctctcactcaagtcattctcctcaacctgacctcacccaccacaatctgcccctacagctaagaccctgggaagtcggggtggaggggtgcatgtatatacaaacacacacatatacatttatatgtgtatatatgtgtttctatacatacacacatgtgtatacgtatataga

SEQ ID NO: 95030 - DNA, 535 bp, Homo sapiens
ctaatttatgaagatatttggcatttttaataaaacctaaaattacacctctaggtgaggcatgcaagacaaacagatatcagactcacttcacaaccggaaatcaacttggagtttacttaaggaacacatgttaacacctgagtgcctagcatggccaggcactgtccttagcgctgaattcaatgcctccagtaagttccctgtgaacctggtagtgccctgcccatgccccatcgacaggcgtggaaccagcatagaggggctcaaataactggaccgsggcatgcaggggtgggctctgcaggatgtgtcctcacagctcctacgagaggtgaggcctatggaagaactgctgagctagaggcagaaaggcttgtcagtgacctaagggcaggctctgcaaactgttctcacttcccactacaaaaaaggtttgggggtttgaaagaaggaagagaagatgtttagaatgtagttcctacaatagactgaaataacgggacatttgagatctttctgtctttgtcgatga

SEQ ID NO: 95031 - DNA, 526 bp, Homo sapiens
taagcttaaggaataaacccaaaaggaggtacctggaaggagctggatttggggactgaggagctgggagctgatggaagccgtgaaaggggatgtgctcctggggaggcgctggggcgggtgggccgtggaggggacagggcccrttggttggaaactgaggcgaggctacggagttgggcactaacaggtcatccgtgcccctgcgaagcgtggggacacagggacagcagagatggcctgtctggacactctgtcgacggggggcctgtggttggtgaagcccaaggcaaggctgtgaactcagggcaagggagacgtgagcaggcgctgccgtgggctgatgtgggcactgcatgtgcaccctggcggccaaaggacctacagctcatggggggcaagggggaggagggaagccaacagcaggatgtgcgcagtcagtctgccccccctacactggaggaggagccccccggcacaaatctcgcccgtttgggcccacggacatggctggcctcgcaaggag

SEQ ID NO: 95032 - DNA, 828 bp, Homo sapiens
tcttttcaaatgtcggggtgggttttttttttttccacaaaacttcaagcatctactaaagtagagggaggagtgtaatgaactccggtacccatcactcagcttccacggtttcatctcatttcatctgtgacccctccactaccctttcttcctgattcttggaagcaaatccaagacatcacacccttccctctgtaaatctttactatgttcctctaggagaaaagggctcttctcaatacataaccacaagtcatcatcacaccgacaagtgtaacagtatttcctgaatagcttcaaatatcctagtagtgttcaaaaaatgtcatacgtattttcagtctgcttgaatcagggctcaaataaggtccacacattcagattgactgatatgccttttgactacctttgaatctagaggttccctttctatctccctgcaatttatttgtggaagcaagcaagtcgttcatgacgtagcctaacaggcccctctgacgttgttcattatgatttttctgtaaattggtagttgatctgaggatctggccagaggyaggttggatttgttggtgtgttttggcaaggagagtgtctcttttctggggtgttggcagctactgaaactcaatgcccagaccaattaaaccactggggatggaaaatgacggcattcggacaccttaccctgccttcacctattggtgaccaaaaccttaacatcttcacaggtcttcttaccctgagggtatatgccactaggttgtgtagtaaaccggtgtgtttccagtcccttagaatagtccctctctaagtgatatgcca

SEQ ID NO: 95033 - DNA, 597 bp, Homo sapiens
cccgcaacccggccttcgggccacctctgccgcgctcggkctctgcccaggagtccaggctgtgtttggccggaaggggccctgggcattttgagaacggcgttactaccgaagggtgggtggcggaactgaggagggagcagggctgcgacctcacccccacagcctctcgtcacctcgagagcctcagctgcgccgtctgggaaaccgaggctcagggctgcaccgagcagaggtgtaagggggacccaggtaggccacagggcaggaaggtagcgcgggcggaggtcgctcctgccgcggcccggcgccccgggaaaggcccgaggcacaggagagcaccgttcttgggaccggaaccgatgggtagggccacagggccaagcgtctgagaccgcgtcccaaaacccagcgcaagcccccgaccgccggggctcggctgcagtaggtcactccgggggacccggtgctccgaggcgagaagaaagcgggacgggcaacagcggcggcccacggtgcccgggaagggggcagtggtgggaaacgagagcgcgccgggccccgcgtggtttccccgcgtgcttttttccctaaact

SEQ ID NO: 95034 - DNA, 597 bp, Homo sapiens
cccgcaacccggccttcgggccacctctgccgcgctcgggctctgcccaggagtccaggctgtgtttggccggaaggggccctgggcattttgagaacggcgttactaccgaagggtgggtggcggaactgaggagggagcagggctgckacctcacccccacagcctctcgtcacctcgagagcctcagctgcgccgtctgggaaaccgaggctcagggctgcaccgagcagaggtgtaagggggacccaggtaggccacagggcaggaaggtagcgcgggcggaggtcgctcctgccgcggcccggcgccccgggaaaggcccgaggcacaggagagcaccgttcttgggaccggaaccgatgggtagggccacagggccaagcgtctgagaccgcgtcccaaaacccagcgcaagcccccgaccgccggggctcggctgcagtaggtcactccgggggacccggtgctccgaggcgagaagaaagcgggacgggcaacagcggcggcccacggtgcccgggaagggggcagtggtgggaaacgagagcgcgccgggccccgcgtggtttccccgcgtgcttttttccctaaact

SEQ ID NO: 95035 - DNA, 597 bp, Homo sapiens
cccgcaacccggccttcgggccacctctgccgcgctcgggctctgcccaggagtccaggctgtgtttggccggaaggggccctgggcattttgagaacggcgttactaccgaagggtgggtggcggaactgaggagggagcagggctgcgacctcacccccacagcctctcgtcacctcgagagcctcagctgcgccgtctgggaaaccgaggctcagggctgcaccgagcagaggtgtaagggggacccaggtaggccacagggcaggaaggtagcgcgggcggaggtcgctcctgccgcggcccggcgccccgggaaaggcccgaggcacaggagagcaccgttcttgggaccggaaccgatgggtagggccacagggccaagcgtctgagaccgcgtsccaaaacccagcgcaagcccccgaccgccggggctcggctgcagtaggtcactccgggggacccggtgctccgaggcgagaagaaagcgggacgggcaacagcggcggcccacggtgcccgggaagggggcagtggtgggaaacgagagcgcgccgggccccgcgtggtttccccgcgtgcttttttccctaaact

SEQ ID NO: 95036 - DNA, 1171 bp, Homo sapiens
tgcatacacaaggcactgcagattttgggcctgatcacctcagaaactgttctttcatcccgcatatgtaaagaaactgaatttagccaaagtgctttacctcggaattctccttggaaatgccctgaaaaaagatgtttttggtgagtacctaggtctgaaaaaaatctttttgtcctagacacaagcagagcagagagggcctggagtcaccacagggatgctaggatactggtgctaaacgatgggacccccttcagtgtgcctcgtgtgtacatggaattattactcttcattcacctctttctagaggaagtaatcattttaatgtgtaaagtacagttgacccttgaacaatgcgggttgagacgccaggagccacttatgtatgtattttcttccgcctctgccacccctgagacagcargaccaacccctcctcttcctccttctcctcagcctcctcaacgtgcagatgacgaggatgaagacctttatgatgatccatttccactttatgaataggaattatattttctcttccttatgattttcttagtaacactttattttttctagcatactttattgtaagagtatagcatataatacatatacaaaatatgtgttcatctgctgtttatgttatcagtaaggcttctggtcaacagtaggctaatggtagttaagcttttgggggagtcaaaagttacacacagattttcaactgcgcagaaggttgggtggtgtcagcgtccctaatgcccatgttgttcaagggtcaactacactctaggaacttgtcttatgcagagaaacctcctgaaagctgtctgttttggggttagtcatagataatatatgcagggctcagcatgaaccacttacctagtacattcctcaaaggcttttttggaagggttctcctccttcagtcccaatctacattctgtcacaacatctggaggtatttctggtaaaggggctgccaacttaatacagtacaaaccaaatacataaccattagtgatttcataacttactagtgaacagaacctaatgcttattgtaaaaaaatgaaacacaaagtgtataaaatgaaagtcaaagtgccacctggaccctccaccccgtcccactctccagagttctgctgttgtctgccttttca

SEQ ID NO: 95037 - DNA, 1171 bp, Homo sapiens
tgcatacacaaggcactgcagattttgggcctgatcacctcagaaactgttctttcatcccgcatatgtaaagaaactgaatttagccaaagtgctttacctcggaattctccttggaaatgccctgaaaaaagatgtttttggtgagtacctaggtctgaaaaaaatctttttgtcctagacacaagcagagcagagagggcctggagtcaccacagggatgctaggatactggtgctaaacgatgggacccccttcagtgtgcctcgtgtgtacatggaattattactcttcattcacctctttctagaggaagtaatcattttaatgtgtaaagtacagttgacccttgaacaatgcgggttgagacgccaggagccacttatgtatgtattttcttccgcctctgccacccctgagacagcaggaccarcccctcctcttcctccttctcctcagcctcctcaacgtgcagatgacgaggatgaagacctttatgatgatccatttccactttatgaataggaattatattttctcttccttatgattttcttagtaacactttattttttctagcatactttattgtaagagtatagcatataatacatatacaaaatatgtgttcatctgctgtttatgttatcagtaaggcttctggtcaacagtaggctaatggtagttaagcttttgggggagtcaaaagttacacacagattttcaactgcgcagaaggttgggtggtgtcagcgtccctaatgcccatgttgttcaagggtcaactacactctaggaacttgtcttatgcagagaaacctcctgaaagctgtctgttttggggttagtcatagataatatatgcagggctcagcatgaaccacttacctagtacattcctcaaaggcttttttggaagggttctcctccttcagtcccaatctacattctgtcacaacatctggaggtatttctggtaaaggggctgccaacttaatacagtacaaaccaaatacataaccattagtgatttcataacttactagtgaacagaacctaatgcttattgtaaaaaaatgaaacacaaagtgtataaaatgaaagtcaaagtgccacctggaccctccaccccgtcccactctccagagttctgctgttgtctgccttttca

SEQ ID NO: 95038 - DNA, 571 bp, Homo sapiens
aattgttttaggccaggtgcggtggctcacgcctataatcccagcgctttgggaggccgaggcaggtggaccacgaggtcaggagatcaagaccatcctggctaacacrgtgaaaccttgtctctaccaaaaatacaaaaaaaattagctgggcatggtggcggacgcccgtagtcccagctactcgggaggctgaggcaggagaatggcatgaactcgggaggtggagcttgcagtgagccgagatcgtgccactgcactccagcctgggtgacaaagcgagactctgtctcaaaaaataaaataaaataaaataaataattgttttaaagttaataacttctaatagaaaagatttttgtgtcttgggataaagtttccagcaataggatcataaacagatttgaagtaatttacacacataaaagctacagaactagatagagtggaaaggctattactaggtgactccaaaagtggcttcagtgatgacaaaacacggacacagaacatgcgtacttagtaaaattatgttttgatggaaaagagtaaaaaatgaatataaattaca

SEQ ID NO: 95039 - DNA, 722 bp, Homo sapiens
ccggtaggagataattgaattgggggcaggtctcgctcatgctgttctcctgayagtgaataagtctcacgagatctgatggctttataaggtggagttttcccgcgcaagctctctttgcctcctccgttttgcctgcttctctatggctgctgccatgattatgaggcttccccagccacatggaactgtaagtccaattaaacttctttcttttataaattgcccagtctcgggtatgtctgtatcagcagcgtgaaaatagactaataccgttgctttgtgaatgcttggagtactggaatttctgagttgaatgctaatttagaagttaagctgggcgcggtggctcctgcctgtaatctcaacactttgggaggcggaggttgggagactgcttgagcccaggagttcaaaaccagcctgggaaacatggtgaaacccatctctaccaaaaatacaaaaaaattagccccggagtggtggtgtgcacctatagtcccagttactcaggagggtgaggtaggatcgcttgagcccaggaggccaaggagccaagactgtgccactgcactccagcctgggtgacagagtgagaccctgtctcaaaaataaataaaataaagtaaaagtccctaggaagcaaaagtttgactcaacttttttctttatttttaaaaattgttttattcccctctacagtttttgagttcttcttgaaa

SEQ ID NO: 95040 - DNA, 603 bp, Homo sapiens
aaagaccaggagatggattctttactggagcctacagaaggaaccagccttgccaacaccttgactttagcccagtgagaatgattttgagcttctgacctctggaactgtaagataataaatgtatggtttttttttaagccactaagtttgtggtggtttgttacagcagccacaggaaactcatacaagttgcatgttgggactcacggcaaccacatttcttgattcctggtccaggcctcttgccatgacctcttaaaggagatgcagccaatggatgcagcaggattatttgttccaccctagcaggatagccaatattattttaagaccaaaggctacgtataagaaaagtagaggtcaggtcaggtgcagtggctcatacctgtaatcccagtactttgggaggccaaggtgggcgggtcacctgaggtcaggagttcaagaccagcctggccaacatggtgaaaccctatctttactaaaaawacaaaaaaaataactgggcatgggggtgggcacctgtaatcccagctactcaggaggctgagacaggagaattgcttgaacctgggaggcggaggttgcaatgagctgaga

SEQ ID NO: 95041 - DNA, 603 bp, Homo sapiens
aaagaccaggagatggattctttactggagcctacagaaggaaccagccttgccaacaccttgactttagcccagtgagaatgattttgagcttctgacctctggaactgtaagataataaatgtatggtttttttttaagccactaagtttgtggtggtttgttacagcagccacaggaaactcatacaagttgcatgttgggactcacggcaaccacatttcttgattcctggtccaggcctcttgccatgacctcttaaaggagatgcagccaatggatgcagcaggattatttgttccaccctagcaggatagccaatattattttaagaccaaaggctacgtataagaaaagtagaggtcaggtcaggtgcagtggctcatacctgtaatcccagtactttgggaggccaaggtgggcgggtcacctgaggtcaggagttcaagaccagcctggccaacatggtgaaaccctatctttactaaaaaaacaaaaaaaatarctgggcatgggggtgggcacctgtaatcccagctactcaggaggctgagacaggagaattgcttgaacctgggaggcggaggttgcaatgagctgaga

SEQ ID NO: 95042 - DNA, 1845 bp, Homo sapiens
gatcatgcttataatcccagcactttgaaagtctgaggcaggaggattgcttgagccctggtgtttgagataagcctgggcaacatagtgagaccccatctacaaaatttttttaaagaactagccaggcatggagatgtgtgcctgtagtcccatttacttgggagactgaggcaagaaggtcatttgagcctgcaggagtygaggctgttgtaaatgaaaagagaaaaaaaggaaaagaaaggaaagagaaaggaaaagaaagagataaagaaagagaaagaaagagagaaagagaaaaagaagaaagaaggaaagagaaagacaaagaaagaaggaagaaagaagaaagagagagaaagaaagaaagaaagaaagagagaaagaaaagaaaagaaaaaagtaaagaaaagaaaacaaagaggaagggagggaaggagggagggacttgcccaggtcacccaatagtaagtagcaaaatcctgattacacttcatgttctttggacttggcaacccttgtgagaaagggcagcagtgatttctgccggcttcagagggatcctggaattgtgaaagtcttacttaaatgcaaagagggcaaaggagattgaggagtagaaagtggtatgttagcacatataccttgctaaggaagcagatctgaaagaatagatacaaatgtaactgactcccaggctgaggaaaaaaggaaggggcagcataaaaagaaccaaaaacccatagacacttttgttgcaagtagtgacagcaagtgcctgaatttcagctgtgattgtatatatttccagagaacaaagctttataatagtatccttgtcctaactagactgacaaattaacacttgttgatgatggtccacacctctccaccacatggggatggcagctatggctggcaagcatactgatggagagtagctatagattttttaacccagaaaatccattttatatcttctatgtgcagcccttaaaatgataaagttatatataaatatatatatagaaaatatatttatattagaaaaggcatatacatacttgctgattgattcacccaaagttcatagcaaaatactaggtctgtgaacaaagcacgtacttgtcagagaaaaagaaatgtttattctatataaatgtataacatataccacatatgtatattttatataattatatatgctctcattatgttcatattcaagagacaagagttgataatatatgtatacagacctataactctgttgtatatggcatatggacatgtctccatagcttgctctatatacatatctgtgtgtgtatatatgtatgtatgaatctatccacagaatgttactagaaagaacacaaactttagagtcagatacatttagatttaaaattcaaatctctgactcaatgaacacagaactatgggcaatttacttcacggttttaagtctaggttttaagtctaggtttccttctttgcaaacacaggataatgagagtacctatgttagggttcactggtacgccaaggaaatgagagtttatgtgaagcccttagcaaaggatttggcacatagggcatagtcaaaaaatgttaactgtgatcaagatattctcatgcattcaattcaacatacatttacccagcatgtattatgttatagaatatatatcacatatgcttataaaatatttacagatacttgcacacaaacatgtatagaattattaagtataatttgcctacctatttgaacttattatatgcatatgtttgtagtagtatacatatgtagatctaactctactaaattcaggaaacatt

SEQ ID NO: 95043 - DNA, 1845 bp, Homo sapiens
gatcatgcttataatcccagcactttgaaagtctgaggcaggaggattgcttgagccctggtgtttgagataagcctgggcaacatagtgagaccccatctacaaaatttttttaaagaactagccaggcatggagatgtgtgcctgtagtcccatttacttgggagactgaggcaagaaggtcatttgagcctgcaggagttgaggctgttgtaaatgaaaagagaaaaaaaggaaaagaaaggaaagagaaaggaaaagaaagagataaagaaagagaaagaaagagagaaagagaaaaagaagaaagaaggaaagagaaagacaaagaaagaaggaagaaagaagaaagagagagaaagaaagaaagaaagaaagagagaaagaaaagaaaagaaaaaagtaaagaaaagaaaacaaagaggaagggagggaaggagggagggacttgcccaggtcacccaatagtaagtagcaaaatcctgattacacttcatgttctttggacttggcaacccttgtgrgaaagggcagcagtgatttctgccggcttcagagggatcctggaattgtgaaagtcttacttaaatgcaaagagggcaaaggagattgaggagtagaaagtggtatgttagcacatataccttgctaaggaagcagatctgaaagaatagatacaaatgtaactgactcccaggctgaggaaaaaaggaaggggcagcataaaaagaaccaaaaacccatagacacttttgttgcaagtagtgacagcaagtgcctgaatttcagctgtgattgtatatatttccagagaacaaagctttataatagtatccttgtcctaactagactgacaaattaacacttgttgatgatggtccacacctctccaccacatggggatggcagctatggctggcaagcatactgatggagagtagctatagattttttaacccagaaaatccattttatatcttctatgtgcagcccttaaaatgataaagttatatataaatatatatatagaaaatatatttatattagaaaaggcatatacatacttgctgattgattcacccaaagttcatagcaaaatactaggtctgtgaacaaagcacgtacttgtcagagaaaaagaaatgtttattctatataaatgtataacatataccacatatgtatattttatataattatatatgctctcattatgttcatattcaagagacaagagttgataatatatgtatacagacctataactctgttgtatatggcatatggacatgtctccatagcttgctctatatacatatctgtgtgtgtatatatgtatgtatgaatctatccacagaatgttactagaaagaacacaaactttagagtcagatacatttagatttaaaattcaaatctctgactcaatgaacacagaactatgggcaatttacttcacggttttaagtctaggttttaagtctaggtttccttctttgcaaacacaggataatgagagtacctatgttagggttcactggtacgccaaggaaatgagagtttatgtgaagcccttagcaaaggatttggcacatagggcatagtcaaaaaatgttaactgtgatcaagatattctcatgcattcaattcaacatacatttacccagcatgtattatgttatagaatatatatcacatatgcttataaaatatttacagatacttgcacacaaacatgtatagaattattaagtataatttgcctacctatttgaacttattatatgcatatgtttgtagtagtatacatatgtagatctaactctactaaattcaggaaacatt

SEQ ID NO: 95044 - DNA, 610 bp, Homo sapiens
aggtgggagttgaacaatgagaacacatggacacagggaggggaacatcacacactggggcctgtagggggtcgggggctaggggagggataacattaggacaaatacctaatgtagatgacgggttgatgggtgcagcaaaccaccatggcacatgtatacctatgtaacataactgcacrttctgcacatgtatcccagaacttaaagtataattaaaaaaaataaaaatgactagccccaagggagctcaccttataaatgcaaacctgtatcatgataataatgttgtattactgtacttcctaatttcagaacgacatctcatcatagtcatttttaaaatatggaaacaaacgcacgagctttgggaaaaggtagaaatgacactaggaaaacaacgggcacccaacagatacaaacaaaaagccttcaccttacattgtggcctctggcggtataaacttggtccccaccaggcttctggaagaagtgttgtctgagtagggactcagaaaataaaagggagttttcaacaggcccaaagcagtttcaggcttaacaaaggccacattgtataaaattcttctcaactcctaaagctggagga

SEQ ID NO: 95045 - DNA, 1896 bp, Homo sapiens
taagatccaaatgcctgggataaacatggcctttgcacacatgccctctgccttctgttctggactctgctctgactcatcctgtgggctgggrctgttcactcagcagagggaccaaacagcctttcactggccctggacaaatgaaaccccctaagagggaggtgtcccactgcccagaaaacccctccccagccctcggactcacctgccggcctgagcaacgtgccttctagcgctggttctattattcacgacaaggggctttcccaggaggcagcaagtggcactatgctgcctgcgtttctatttccaaaatctgaaagctctgtttcataggtttgcagctccctgacagctaaatgtcatgggatggagccacgttgaatcactggatctacttcgcaccagcaggctgggcctcagaaagttatttcaagtcctctagtcccgatcgctccttttttgtttagtaagtaaaaatagtgcatgcttcacaacgttgttagtaggattacatgagagaacttaaataaagtgcccaagtctttggtaggacctagctcatgtcctacctagaacaccaagatggctagacaagaagaggagatgcagctcaagtaccagttcggtcactatctatcggggccacctggtctacctgcggcttgcccaattccctcctcattcaagaggagagggccaaaccggatccaagcagcctaccctgtaatctcttgcagcacactacccgctccattttcccacaaccacggtacatttcatcctgctgaaaagaatacaaagcatatgaaaattcagtgcaagaattcataccagcaacctcgtccatctgcataagacttcgttccaaatggtgacaacaggccctgtgctcattacaggtctcacatgtgcatgggtgtgtgggaacagcaccctgtaatccatgggactgagaggcaactaccacagccggcctcgtcggaagcagaaacacctgagaaacgccaggtttggaatgctagttctatgtggcttttatacatgtactaaaattaagagccaagttttagtgtaaaaatgcctgtcttgaataccacacttcgagacgagatgatgtctaagggtcttcctgtatctgatctacaaggattcctgctaggagttcacctggtggggaggacagggctgaaatgaggttaggtgatgctccccacgtggcctaaaaccattactgtccctcacttccctcaccatcccagccagcatctgccacaccatgacctcctcttgcccatggccctccctaacatgtccttaattgtattacaggcaatttccactcccctaaccaggcagattcctcccatcaaaaacatttctgtgcctcttattaaaaactccttcatttgatgcccctttctagtgattgcccacgccctggtctggtcaaccagaaatcacctatcatgtcaaatcccaactcatcatgcatttactgtatgtctaccccatggcaggcacagcacacagacttgacaatgaccatggctgaccttgaggggctcaaaactaaatggaaagggggttgcaaggtacacggattcacggcaaaactaaatgggcagccactagtacttcaacagaattctaagatgccaggcactcagggcaggactggctgattccaaacgtggggttgtggaaagaagggccatgaacgaggctccaaaaatgagcagaatgtagacagggagagcaaaagggggaaagaagggagaccctttcatttgaaatccaactttctgaagggagaccctttcatttgaaatccaactttctgatcaatgctcatcattctggccctctcttacccttggagccagctccttt

SEQ ID NO: 95046 - DNA, 2627 bp, Homo sapiens
actggtctttgtgagccacgtaaatattattccctcatgttctgagggtagggtcccccctttcacctcaaaaacaaaacaatagaacaaatattactgagagctatgaatacattttgttattgcctactatctaaagtagcaggaaaaattggttgctatttacccaaagagataaaggaaaagaagctgtagacgtcaaattgcttactctgaaaagggtggtgggaaacattaagagaactatcatatgctaaggttaattcaccataactaggcaaaggctaacataatttcagataaaaacagagacaggaccggacgcagtggctcacacctgtaatcccagcactttgtgaggccaaggtgggcggatcatgaggtcaggagttcaagaccagtctagccaacatggtctctaataaaaatacaaaaattagctgggcatgatagcgggtgcctgtaatcccagctactcaggtggctgaggcaggagaatcgcttgagcctcggaggcagaagttgtagtgaactgagaccagaccaccacactccagcctaggcaacagagcaagactccgtatcaaaaacaaaaacaaaaacaaaaaaaggcagggcccagtggctcacacctgtaatcccwgcactttgggaggccgaggcgggaggatccatgaggtcagaggttcaagaccagccttcccaatacagtgaagccccatctctactaaaaacataaaaattagctgggcgtggtagcatgcacctgtagttccagctactcaggagactgaggcagaagaatcgcttgaacctgggaggaagaggttgcagtgagccgagatggcaccactgcactccagcctgggcaacagagcaagattccatctcaaaaaaaaaaaaaaaaaatagggcatcacttttccgactgtcagccagtgaccagtagtaagaaacactaacattaaaccatgagtcagcttgctaatgtcagcatcatgataaacataaataagtttgttttgcaatgatgacaaggttagatagcatgatcttttaccaaaaactaaattttaggtggagatgagaaggcagatgacaggaaaacactaaggggtgataacctaagtcaccgctcctaaaacagacaggagacagtaggtcagctgtaataaactgctccacaatggattacacagacactggagaagattgtgatcttctctagaaatcttaaatatttttttcaaaaacatgcatacttgggagtaggtaagatagggaagaacctccaagtctcctggtgcccagtctcccaagaagctggagaaagcacaagcagcatcactgatgaaggctgactcccagatatcactccataattttggaattcaaaaactgcctcttggccaggcgtggtagctcacgcctgtaatcccagcactttgggaggccaaggcgggtggatcacttgaggtcaggagttcgagaccagcttgaccaacatggagaaaccccatctctactaaaaatacaaaattagccacgagtggtggtgcatgcctgtaatcccagctacttcggaggctgaggcaggagaactgcttgaacctgggaagcagaggttgcagtgaactgagatcgcgccattgcactccagcctgggcaacaagagcgagactccctctcaaaaaaatacataaactgcttcttgttggtcacccagatattctctagtcaacatttcagtatgttcaaatcaaagaatcaggaaaacaaatgatccggcatttgactgcttctatgcacctgtacactggactttctggaaaggtgaagagctggctggagctcatcaggatccaagtattaaggagctgacaagggtcactgtgccttctcttctgtgcttacctcagacaacagcccctaacagaccagtctgagatgctccaggttcacccacacagtggccctgtactgtctgctcaagctgagcaatcaatcaccaacctgagacagattcagggattcactcgaggggtcaaatgggaaataggcagctgacaactctcccaatacctaaacccatcaaagcaattacctgcaccttaagcagaatccaaattggctatggactcagatgtctgataacctaaaaactaaatggtggccgggcgtggtggctcacgcctgtaatcccagcactttgggaggctgaggtgggcggatcacggggtcaggagatcgagaccaccctggctaacacagtgaaaccccgtctctactaaaaatacaaaaaattagccgggcgtggtggcgggcgcctatagtcccaggtacccgggaggctgaggcaggacaatggcatgaacccgggaggtagagcttgcagtgagcagagactgtgtgccactgcactccagcctgggtgacagggcaacactccgtctcaaaaaaaaaaaaagaacactaaatggtaggcccagcacggtggctcacgcctgtaatcccaacactttgggagtctgagaccagcctggccagtatggtgaaaccccatctctactaaaaatacaaaaaattagccaggcgtggtggcgggcaccactggttgctatttaccc

SEQ ID NO: 95047 - DNA, 2627 bp, Homo sapiens
actggtctttgtgagccacgtaaatattattccctcatgttctgagggtagggtcccccctttcacctcaaaaacaaaacaatagaacaaatattactgagagctatgaatacattttgttattgcctactatctaaagtagcaggaaaaattggttgctatttacccaaagagataaaggaaaagaagctgtagacgtcaaattgcttactctgaaaagggtggtgggaaacattaagagaactatcatatgctaaggttaattcaccataactaggcaaaggctaacataatttcagataaaaacagagacaggaccggacgcagtggctcacacctgtaatcccagcactttgtgaggccaaggtgggcggatcatgaggtcaggagttcaagaccagtctagccaacatggtctctaataaaaatacaaaaattagctgggcatgatagcgggtgcctgtaatcccagctactcaggtggctgaggcaggagaatcgcttgagcctcggaggcagaagttgtagtgaactgagaccagaccaccacactccagcctaggcaacagagcaagactccgtatcaaaaacaaaaacaaaaacaaaaaaaggcagggcccagtggctcacacctgtaatccctgcactttgggaggccgaggcgggaggatccatgaggtcagaggttcaagaccagccttcccaatacagtgaagccccatctctactaaaaacataaaaattagckgggcgtggtagcatgcacctgtagttccagctactcaggagactgaggcagaagaatcgcttgaacctgggaggaagaggttgcagtgagccgagatggcaccactgcactccagcctgggcaacagagcaagattccatctcaaaaaaaaaaaaaaaaaatagggcatcacttttccgactgtcagccagtgaccagtagtaagaaacactaacattaaaccatgagtcagcttgctaatgtcagcatcatgataaacataaataagtttgttttgcaatgatgacaaggttagatagcatgatcttttaccaaaaactaaattttaggtggagatgagaaggcagatgacaggaaaacactaaggggtgataacctaagtcaccgctcctaaaacagacaggagacagtaggtcagctgtaataaactgctccacaatggattacacagacactggagaagattgtgatcttctctagaaatcttaaatatttttttcaaaaacatgcatacttgggagtaggtaagatagggaagaacctccaagtctcctggtgcccagtctcccaagaagctggagaaagcacaagcagcatcactgatgaaggctgactcccagatatcactccataattttggaattcaaaaactgcctcttggccaggcgtggtagctcacgcctgtaatcccagcactttgggaggccaaggcgggtggatcacttgaggtcaggagttcgagaccagcttgaccaacatggagaaaccccatctctactaaaaatacaaaattagccacgagtggtggtgcatgcctgtaatcccagctacttcggaggctgaggcaggagaactgcttgaacctgggaagcagaggttgcagtgaactgagatcgcgccattgcactccagcctgggcaacaagagcgagactccctctcaaaaaaatacataaactgcttcttgttggtcacccagatattctctagtcaacatttcagtatgttcaaatcaaagaatcaggaaaacaaatgatccggcatttgactgcttctatgcacctgtacactggactttctggaaaggtgaagagctggctggagctcatcaggatccaagtattaaggagctgacaagggtcactgtgccttctcttctgtgcttacctcagacaacagcccctaacagaccagtctgagatgctccaggttcacccacacagtggccctgtactgtctgctcaagctgagcaatcaatcaccaacctgagacagattcagggattcactcgaggggtcaaatgggaaataggcagctgacaactctcccaatacctaaacccatcaaagcaattacctgcaccttaagcagaatccaaattggctatggactcagatgtctgataacctaaaaactaaatggtggccgggcgtggtggctcacgcctgtaatcccagcactttgggaggctgaggtgggcggatcacggggtcaggagatcgagaccaccctggctaacacagtgaaaccccgtctctactaaaaatacaaaaaattagccgggcgtggtggcgggcgcctatagtcccaggtacccgggaggctgaggcaggacaatggcatgaacccgggaggtagagcttgcagtgagcagagactgtgtgccactgcactccagcctgggtgacagggcaacactccgtctcaaaaaaaaaaaaagaacactaaatggtaggcccagcacggtggctcacgcctgtaatcccaacactttgggagtctgagaccagcctggccagtatggtgaaaccccatctctactaaaaatacaaaaaattagccaggcgtggtggcgggcaccactggttgctatttaccc

SEQ ID NO: 95048 - DNA, 1434 bp, Homo sapiens
ctgccacgtatatcctgagagctaccctttggtcagacaggtctgaaaatagccagtgatcaggttcatccttgtcgctgggtctaggctcctccaaactgagtctggacaatacacacagtccataaatttatacccacataatctttgggcaggagagttataaccttgaagacattatcctgctatgtcatgcaagctaatgttggagaaagctttatgttcaagcatgtacatcgcagcrttatttatagaagcaagagaacgaggaaaccatctaaatatgcagcaagtagagtactgctaaataaatgtgagcagatagtattctgtcataaaaaatcatatttccaagtaatatttaatggcccggaaaatagctcaaaatatattattaagtgaaaagattagaatggtaaactaaacacttttcattgaattctgtcactaatttttaatgtaccaataggaaaaaaaaaactgaagaaatacaccataatgttcacagccattattttaaagaatgtattgtcttaatttttaatatattaatatatttttcaattttgtgcaaattgtgggaaccacttctattatcaagaaaaacagccatttaaaaagatcctgttaaaatctacattttaaaaggacttattttagcttggcaatagaatacattttgggtcttatactctaactcagtagaatccagggggtttgagcatttctttttcaggtttttacaatttaaaatctgctcagtgtgtctggcgtgttttgtgcttggtttcagtcagtagttcatggcattagatggctacatatctaaagcatccagattgcttctgattactgagcatgctgttaggatattttatgtgccattctttaccagctttttttttttttaagaagatgggagcagtgcaatcattcaaaaaaaaatgaacttcataaatacatagctcatgccaggtactggtttagatattgatgatacagaaatgaatatgtttctttttttaaagaactaataaattatattatatattgtcattacattacgtattagaattatgggtactcagagtggaagaactagctgtagggtttccaataaatactgcgtggagaaagggatttctgaaccaggttttgaagggtaaatagcagttactgaggctgagaaaaattgagagatggtcattctaggaaaaggtagtactctagacagaagggcaaggttgtggagatacaggatgtctcaggaaaatttgggaaactgatgaaatatatgcagggagagtaaggtgggccagattaggaggactggaatgttgtgttaaggaattcatgatttggtttttgaataaaatgggaagtgttggataatttcagtggcagtacagacaataaactggttagatgattcag

SEQ ID NO: 95049 - DNA, 1434 bp, Homo sapiens
ctgccacgtatatcctgagagctaccctttggtcagacaggtctgaaaatagccagtgatcaggttcatccttgtcgctgggtctaggctcctccaaactgagtctggacaatacacacagtccataaatttatacccacataatctttgggcaggagagttataaccttgaagacattatcctgctatgtcatgcaagctaatgttggagaaagctttatgttcaagcatgtacatcgcagcgttatttatagaagcaagagaacgaggaaaccatctaaatatgcagcaagtagagtactgctaaataaatgtgagcagatagtattctgtcataaaaaatcatatttccaagtaatatttaatggcccggaaaatagctcaaaatatattattaagtgaaaagattagaatggtaaactaaacacttttcattgaattctgtcactaatttttaatgtaccaataggaaaaaaaaaactgaagaaatacaccataatgttcacagccattattttaaagaaygtattgtcttaatttttaatatattaatatatttttcaattttgtgcaaattgtgggaaccacttctattatcaagaaaaacagccatttaaaaagatcctgttaaaatctacattttaaaaggacttattttagcttggcaatagaatacattttgggtcttatactctaactcagtagaatccagggggtttgagcatttctttttcaggtttttacaatttaaaatctgctcagtgtgtctggcgtgttttgtgcttggtttcagtcagtagttcatggcattagatggctacatatctaaagcatccagattgcttctgattactgagcatgctgttaggatattttatgtgccattctttaccagctttttttttttttaagaagatgggagcagtgcaatcattcaaaaaaaaatgaacttcataaatacatagctcatgccaggtactggtttagatattgatgatacagaaatgaatatgtttctttttttaaagaactaataaattatattatatattgtcattacattacgtattagaattatgggtactcagagtggaagaactagctgtagggtttccaataaatactgcgtggagaaagggatttctgaaccaggttttgaagggtaaatagcagttactgaggctgagaaaaattgagagatggtcattctaggaaaaggtagtactctagacagaagggcaaggttgtggagatacaggatgtctcaggaaaatttgggaaactgatgaaatatatgcagggagagtaaggtgggccagattaggaggactggaatgttgtgttaaggaattcatgatttggtttttgaataaaatgggaagtgttggataatttcagtggcagtacagacaataaactggttagatgattcag

SEQ ID NO: 95050 - DNA, 1283 bp, Homo sapiens
agggggcagaggcaaggaatgccactcaacatcctcagacaggacagcccccgcaacaaaaaactatctggcccagaacatcatgagtgctaaggttgaggcaccttgctcagaagtaccagctgaaactcagaaaaaaatggatgtggatgaaaagtctttgtcctggtacakgagagtacacattttgtctaagttttgacctaatggaaaacattgcattatctggaagtaggaaagaccttgaaagaggaaaaaaaaaaagatgagtttgaagtcctcagaatccttaaagaaagaaaagtgacaactctttaaccactacatataagagaattgaatgagacttatacatgaaagaatataaagtttagataagcaagattgtccagtgactgattcagggacatctctcttggctgaaggcaatgaactagccattggctgccattctctcaacaagagggattacgcctttccactgtacctaggcaccctggtcacccagcaggtacgcctcatccaaaacccaacttcacactgaaccaagggctccaagctccaggtgctggacagctgatgttactcagcattcccctgaatacttccaccaaagttcagactcttggcatctgagcccaaatgttaacttcattaggtcaagagcatcctcatgcttgtcttgtacaaaaagaagaggagagtgaattccttctgctagatagtagctccaaggtgtacctggctgtgctttcaaccaggaacacctctttgcaggatgcttaaagaatgggcatttgtgccccctgcggatactgtactatgttattattcaggggaaacaaaccacattaagtatgagcacatgtctaccttggacagttccagtcacatatattataccctgtctagatgacaaataggactcttgctcttcctgctaaagctcaatccttcctcagttttctccatcttcctaccaccatgcacccaccagcttgttccagaattctaggagctagacatgatccatctcccccacatcccagatctacctttctgtcacagccaccatgtcaaaccctccctgtcaagtcagctgtaaaaatgaatctgcctctcaatgcagtcacctccacaggatgaaggcagtgcatggaggtagtttttcaccaaaacaccttctttttgagaaccatcacagggcaaaatattaagtctggagaaaataaatcaattttatctcttgattttctactcatctaccaagattcctgccctca

SEQ ID NO: 95051 - DNA, 1283 bp, Homo sapiens
agggggcagaggcaaggaatgccactcaacatcctcagacaggacagcccccgcaacaaaaaactatctggcccagaacatcatgagtgctaaggttgaggcaccttgctcagaagtaccagctgaaactcagaaaaaaatggatgtggatgaaaagtctttgtcctggtacaggagagtacacattttgtctaagttttgacctaatggaaaacattgcattatctggaagtaggaaagaccttgaaagaggaaaaaaaaaaagatgagtttgaagtcctcagaatccttaaagaaagaaaagtgacaactctttaaccmctacatataagagaattgaatgagacttatacatgaaagaatataaagtttagataagcaagattgtccagtgactgattcagggacatctctcttggctgaaggcaatgaactagccattggctgccattctctcaacaagagggattacgcctttccactgtacctaggcaccctggtcacccagcaggtacgcctcatccaaaacccaacttcacactgaaccaagggctccaagctccaggtgctggacagctgatgttactcagcattcccctgaatacttccaccaaagttcagactcttggcatctgagcccaaatgttaacttcattaggtcaagagcatcctcatgcttgtcttgtacaaaaagaagaggagagtgaattccttctgctagatagtagctccaaggtgtacctggctgtgctttcaaccaggaacacctctttgcaggatgcttaaagaatgggcatttgtgccccctgcggatactgtactatgttattattcaggggaaacaaaccacattaagtatgagcacatgtctaccttggacagttccagtcacatatattataccctgtctagatgacaaataggactcttgctcttcctgctaaagctcaatccttcctcagttttctccatcttcctaccaccatgcacccaccagcttgttccagaattctaggagctagacatgatccatctcccccacatcccagatctacctttctgtcacagccaccatgtcaaaccctccctgtcaagtcagctgtaaaaatgaatctgcctctcaatgcagtcacctccacaggatgaaggcagtgcatggaggtagtttttcaccaaaacaccttctttttgagaaccatcacagggcaaaatattaagtctggagaaaataaatcaattttatctcttgattttctactcatctaccaagattcctgccctca

SEQ ID NO: 95052 - DNA, 1787 bp, Homo sapiens
ggatcataaaaaattaatagaattatgtgtcctgcaaacagcaaggacagggacattcatatctaacagttgcagggaagtttttccaaaggataagctgctcttgctggctgggttatgaaggagaattgaaatttgacagatggaggtttggaaagccctgaagagagagagagagaaggaggtggcgtgagcagtgtgggcgggcggtgagagaggagggcagatttgggcctgtgtaagagccacactcaggctcaagcccaccccatcccatgtgacctccagggagtaaaagtgggatgcaggtcacgtgtgccaggatgctcagtgacagatcgagagatctgcaagcgggccgctccttcccccgacaggrgttcctgagcacctgcagggaaccagcgctgggcctgacgcgaggctccttttctagtgagtcacctcaagtgaggacagcacaggcaacgctggacacaggaggacacccagagcgtctgggaaggcacctgagctgggagctcaaggcaggagaggaaataggcagcaagggagaagggtgtctttctgggacaaaagagtcgcacctgcagaggcacagaggtgtgagagagaaaggaccacgagcggccaagggcaggcggtacacagagctccggcaggagatggaggagagggtggcaaagccacagttcctgcagtgtggcccgggctgtgcagtggcaggtgcccctgacaccacgggagctgctgagagggcagctgcgtgggcagatgtttatcccagagagggcagcaatacaagggttggagggaggtggggagatccgcttcaggctgtgatgttggcttaggctggaggggaaagagcccggagctggggcagaactcgggttgtccaggaggcgacactgaattagtgtctggggtcagatccatagagggcaggagtcagtgcctgcgtggctggctcggtgaggaagagaggggtgggagtgatgcatgaactctctgaggctcccaccgcagcagctccactcccaagtatggggctggcaggagtctcaggaccaagggaggatggtgagttggttagttaagtttgagccggttgagttgagatgtctgcgtagagtcaggttccaccatcacgaggcatttggcagatgggctgtgaggtgaggggatccaaggcttggaaacaaagttttgggagcagtcactgcctggctgagaaactcaccccaaaacagcatgtcccatccaccccagtccacccaaaacaagaaggaagatgtagttaaagagatagaaaagatccatgtcattatcagataagcatcaaatgaaaattgcatgagcagacatatgcttaaggatttcttggaaaaatacagctgatggggtaggattcccagagaaacttaatcagagaaaagcagagtccccaaaacatgtaaacaaaacaaaacaaaaaaaggctgttttatttcccctaaagaaagttacagagaaactacaaggggagagacagccaagaaaggatcaagggggaaggagtgggaaagggtttggtggagggggagagcactgtgcaaatgtcaaggtataaaagaacatgtggacctagggctccctcctcccagcctggtcccattgcttctgcaaagctgcagagatagttgcacccaggtagaagccccaggaagttctttccaaacaaagtaaacttcccacctggagagaaactccagggtaaagataaggttgcgggggagggcgggaag

SEQ ID NO: 95053 - DNA, 1909 bp, Homo sapiens
ctcctctcagcctggccaactccaattcagccaggaggtctcctgtttctcaccactgcctgctgaagtcttcctgtctgtcgaggccccagagggctggtggaagccattctccgcgccgagaccatggtgtactcacttctgcacagtggctctctgtgctataatgtacccatctgtctctgctgttttgggtgcagcgcagcctctatcctgctcgcaaagtactctgatgccatccacgtttctggggaggtgcgtccctcagtgagtgtcccctgagtgtggggatgtttgaatgagtgagtgaatgactgcattgccagcctgcagctcgggggtgacgtacactgggtgcataataagcgtcccttccatgagtgtttgagggactcagctgtgactccagcccttggctatgcttctttagcaaagggagcccttctgtgtctgcctcggcagtggctatgaccgtgtgaccaagggcccctctagcccccacagagggctgaacaagggtcccgaaaggggacctacatcaggtctgaattcctggcccctgtaaatgccaccttatgtggcaaaaaggactctgaagatgtgatgacatcgagaagcttgagctggggagatcttcctggattatctagatgcatcctaaggatgacatcacaggcatccttacaagaggggggccgaaggagaggtcctacagaagaagagagggcagtatggcggctgaagcgaggtgccatgctggggcttgaagaaggaggaagcggctgtgggccaaggaacttcaatccagaagctggagaagcaagaaacaaattatctcctaaagcctccaataggagtcagtcctgccgatgcctcgatttcagctcattgacgtggatttcagatttctgacctccaaacctaggggagcgagtgtgcgtggctttaaggcagccagcttggggtaatttgtcatggcagcataggtgggtgtcacacactcctgcctggccccttctcctcatgtgggaagaagtggccgggacacctgtgcctcctctgggccatggacaggcacctggagctgctctcctgctgggtggggcctcccagctttccaagccctgctcgtccttcgtaagtccatgggccaagtcctcggcattgtaaattaaactctaaggacagcattggcttcttccctgactcggaggctgtgactctcacaaagcccagggtagggggaggtggcccctgtccccagaccgcatggcctcggtggatgccaccctgtctctaccatcactacccaacagcaaaagctatgtgttcctttgacaacgatgtcacagtragcttgcttctgtgtcttagtcattaaccttaggactgtcttctccttctggccattaaactttctatttaccagattattctcaatcgatgtcatgacgagcaaaaatcgacgtagttagacatgtgcgcagatgtgtccaggcacttatttcttttgaatttgttgcatgagtaaaaggaccacacagagccaggcttatatttctcgaggttaccatcatatgtatatttgctacctgcagaaggaaaggtcttaaaaagccacagtcatcttcatttctattggaagtaacctgactgttagtgaaaagctgggttatctgtccacctatctgagcagtctgaccctgccaggaacactggcttggcccttccaaggctgcagcatggtgggaagggaggccctggtgcctgagtgatgagggtcatggcaaatttcacaaacaactgtcccctagaatcacactgaaatatctgggttccttccaccgggtcctttacttctcctcctagctgccaacgcgatctgtccactattaacagctcagcagat

SEQ ID NO: 95054 - DNA, 544 bp, Homo sapiens
gggactttgctgaagttgcttatcagcttcaggagattttgggctgagatgatggggttttctaattacacaatcatgtcatctgcaaacagagacaatttgacatcctcttttcctatttaaataccctttatttctttctcttacctgattgacctggccagaacttccagtactatgttgaataggaatggtgagagactgcatccttgtcttctgctggttttcaaagggaatgcttccaatttttgcccattcagtaagaaagtaagggatatttgagggctttggggtaataattattttcttcctacaggagttgaattattagaaccttttcattatcaaattttgtccttaaactaaaagttaaaatctgttattctcattgggattgattttctgtttcttgctttacctcaacaacccctttggcgaaggtctattgaataattcaagaattctttctaargtataaaacaagtcaagatggctagccccagctccttggtcccattcagtatgattggctgtgggtttgtca

SEQ ID NO: 95055 - DNA, 1608 bp, Homo sapiens
ggatccctgtaaggagagaccacagggagcttagtgcccatgtcccctctctcctcatcatggaaggaggcagagagaaggtggcatctgccaaccaggaagaggaccctccccaggagctggactgaccggcaccctgatcctggacttatcagcctctagaattgtgagaaaatgcgtttttgttctttaagccgccctgcctatcgtgtcgtgctatggcagccaggcctgaccactgtggacagtgttcatggtgattcagagaggagtggctgggggcgcacccaactggaaatggactttaacccccatcagacagaactgcactggcctgtggaatgaggagaaatcagcctgtttcggtcaagctccagagatgtggggattattgttttggcagcgagaggcatttccctgactcatggagaaattggtacttaccttgggtgtttccattaaataaggagggaggtgagatcagcttcaaggtcaggctgccgtctggtaggaacccgatgtaggagtccattttcacactgctgataaagacgtgcctgagactgggtaatttataaagagaaagaggttcaatggactcacagttccacatggctggagaarcctcacaatcatggtggaaggtgaaaggcacatcttacataggggcaggtgagagagaatgagagctaagggaaaggggaaaccccttataaagccatcagatctcgtgagacttattcactaccacgagaacagtatgggggtaacagcctgcatgattcaattatctcccaccaggtcccctccacaacgcatagggattatgggagctacaattcaagatgagatttgggtggggacacagccaaaccctatcacctgattatcagaaactaaaaatatgttaatgtgaaccaagcagaggacacacatcttggaactgtaaccttctctccacattcagtcagtccacgtgcccactgagtccgtatttccagagaaggaggttggaaaatcatgtgaatggtgagtgctggcaatttggcagcatgtggcaagaggttgcaagaaagaggtggcctcaggaaagcaatcaatgagaagagagagatccctgaagttctggcatttgcagagtttgaaagctgtactgcctgcatctagaggtagaattttcaaaacctgagctacaaatatcaagccaaagttattttttttcctccaaagtaattaagtcagtcagggagaggtgagagtaagtggcatccacaaacaagtatacgagtgagataaaatgactcaggctgaagataagatgaaggtcgcggctttctcccttgtcatcccaaatacaccatgagattcaccatggagcggagatggacggagtttggaagacccaggagctgtctggaggacagccaaggagtctccatgctcccagcgggcgaatctccttactcctcaggagagaaagaaactgttactgttgctaagctgctgggatttgggaattgtttgttaaagcaacgagcaagtgttactctggaaaagatggaagcagaggagggtgagaggcagaaacaggggccaggagtaggcgca

SEQ ID NO: 95056 - DNA, 1608 bp, Homo sapiens
ggatccctgtaaggagagaccacagggagcttagtgcccatgtcccctctctcctcatcatggaaggaggcagagagaaggtggcatctgccaaccaggaagaggaccctccccaggagctggactgaccggcaccctgatcctggacttatcagcctctagaattgtgagaaaatgcgtttttgttctttaagccgccctgcctatcgtgtcgtgctatggcagccaggcctgaccactgtggacagtgttcatggtgattcagagaggagtggctgggggcgcacccaactggaaatggactttaacccccatcagacagaactgcactggcctgtggaatgaggagaaatcagcctgtttcggtcaagctccagagatgtggggattattgttttggcagcgagaggcatttccctgactcatggagaaattggtacttaccttgggtgtttccattaaataaggagggaggtgagatcagcttcaaggtcaggctgccgtctggtaggaacccgatgtaggagtccattttcacactgctgataaagacgtgcctgagactgggtaatttataaagagaaagaggttcaatggactcacagttccacatggctggagaagcctcacaatcatggtggaaggtgaaaggcacatcttacataggggcaggtgagagagaatgagagctaagggaaaggggaaaccccttataaagccatcagatctcgtgagacttattcactaccacgagaacagtatgggggtaacagcctgcatgattcaattatctcccaccaggtcccctccacaacgcatagggattatgggagctacaattcaagatgagatttgggtggggacacagccaaaccctatcacctgattatcagaaactaaaaatatgttaatgtgaaccaagcagaggacacacatcttggaactgtaaccttctctccacattcagtcagtccacgtgcccactgagtccgtatttccagagaaggaggttggaaaatcatgtgaatggtgagtgctggcaatttggcagcatgtggcaagaggttgcaagaaagaggtggcctcaggaaagcaatcaatgagaagagagagatccctgaagttctggcatttgcagagtttgaaagctgtactgcctgcrtctagaggtagaattttcaaaacctgagctacaaatatcaagccaaagttattttttttcctccaaagtaattaagtcagtcagggagaggtgagagtaagtggcatccacaaacaagtatacgagtgagataaaatgactcaggctgaagataagatgaaggtcgcggctttctcccttgtcatcccaaatacaccatgagattcaccatggagcggagatggacggagtttggaagacccaggagctgtctggaggacagccaaggagtctccatgctcccagcgggcgaatctccttactcctcaggagagaaagaaactgttactgttgctaagctgctgggatttgggaattgtttgttaaagcaacgagcaagtgttactctggaaaagatggaagcagaggagggtgagaggcagaaacaggggccaggagtaggcgca

SEQ ID NO: 95057 - DNA, 1608 bp, Homo sapiens
ggatccctgtaaggagagaccacagggagcttagtgcccatgtcccctctctcctcatcatggaaggaggcagagagaaggtggcatctgccaaccaggaagaggaccctccccaggagctggactgaccggcaccctgatcctggacttatcagcctctagaattgtgagaaaatgcgtttttgttctttaagccgccctgcctatcgtgtcgtgctatggcagccaggcctgaccactgtggacagtgttcatggtgattcagagaggagtggctgggggcgcacccaactggaaatggactttaacccccatcagacagaactgcactggcctgtggaatgaggagaaatcagcctgtttcggtcaagctccagagatgtggggattattgttttggcagcgagaggcatttccctgactcatggagaaattggtacttaccttgggtgtttccattaaataaggagggaggtgagatcagcttcaaggtcaggctgccgtctggtaggaacccgatgtaggagtccattttcacactgctgataaagacgtgcctgagactgggtaatttataaagagaaagaggttcaatggactcacagttccacatggctggagaagcctcacaatcatggtggaaggtgaaaggcacatcttacataggggcaggtgagagagaatgagagctaagggaaaggggaaaccccttataaagccatcagatctcgtgagacttattcactaccacgagaacagtatgggggtaacagcctgcatgattcaattatctcccaccaggtcccctccacaacgcatagggattatgggagctacaattcaagatgagatttgggtggggacacagccaaaccctatcacctgattatcagaaactaaaaatatgttaatgtgaaccaagcagaggacacacatcttggaactgtaaccttctctccacattcagtcagtccacgtgcccactgagtccgtatttccagagaaggaggttggaaaatcatgtgaatggtgagtgctggcaatttggcagcatgtggcaagaggttgcaagaaagaggtggcctcaggaaagcaatcaatgagaagagagagatccctgaagttctggcatttgcagagtttgaaagctgtactgcctgcatctagaggtagaattttcaaaacctgagctacaaatatcaagccaaagttattttttttcctccaaagtaattaagtcagtcagggagaggtgagagtaagtggcatccasaaacaagtatacgagtgagataaaatgactcaggctgaagataagatgaaggtcgcggctttctcccttgtcatcccaaatacaccatgagattcaccatggagcggagatggacggagtttggaagacccaggagctgtctggaggacagccaaggagtctccatgctcccagcgggcgaatctccttactcctcaggagagaaagaaactgttactgttgctaagctgctgggatttgggaattgtttgttaaagcaacgagcaagtgttactctggaaaagatggaagcagaggagggtgagaggcagaaacaggggccaggagtaggcgca

SEQ ID NO: 95058 - DNA, 1608 bp, Homo sapiens
ggatccctgtaaggagagaccacagggagcttagtgcccatgtcccctctctcctcatcatggaaggaggcagagagaaggtggcatctgccaaccaggaagaggaccctccccaggagctggactgaccggcaccctgatcctggacttatcagcctctagaattgtgagaaaatgcgtttttgttctttaagccgccctgcctatcgtgtcgtgctatggcagccaggcctgaccactgtggacagtgttcatggtgattcagagaggagtggctgggggcgcacccaactggaaatggactttaacccccatcagacagaactgcactggcctgtggaatgaggagaaatcagcctgtttcggtcaagctccagagatgtggggattattgttttggcagcgagaggcatttccctgactcatggagaaattggtacttaccttgggtgtttccattaaataaggagggaggtgagatcagcttcaaggtcaggctgccgtctggtaggaacccgatgtaggagtccattttcacactgctgataaagacgtgcctgagactgggtaatttataaagagaaagaggttcaatggactcacagttccacatggctggagaagcctcacaatcatggtggaaggtgaaaggcacatcttacataggggcaggtgagagagaatgagagctaagggaaaggggaaaccccttataaagccatcagatctcgtgagacttattcactaccacgagaacagtatgggggtaacagcctgcatgattcaattatctcccaccaggtcccctccacaacgcatagggattatgggagctacaattcaagatgagatttgggtggggacacagccaaaccctatcacctgattatcagaaactaaaaatatgttaatgtgaaccaagcagaggacacacatcttggaactgtaaccttctctccacattcagtcagtccacgtgcccactgagtccgtatttccagagaaggaggttggaaaatcatgtgaatggtgagtgctggcaatttggcagcatgtggcaagaggttgcaagaaagaggtggcctcaggaaagcaatcaatgagaagagagagatccctgaagttctggcatttgcagagtttgaaagctgtactgcctgcatctagaggtagaattttcaaaacctgagctacaaatatcaagccaaagttattttttttcctccaaagtaattaagtcagtcagggagaggtgagagtaagtggcatccacaaacaagtatacgagtgagataaaatgactcaggctgaagataagatgaaggtcgcggctttctcccttgtcrtcccaaatacaccatgagattcaccatggagcggagatggacggagtttggaagacccaggagctgtctggaggacagccaaggagtctccatgctcccagcgggcgaatctccttactcctcaggagagaaagaaactgttactgttgctaagctgctgggatttgggaattgtttgttaaagcaacgagcaagtgttactctggaaaagatggaagcagaggagggtgagaggcagaaacaggggccaggagtaggcgca

SEQ ID NO: 95059 - DNA, 720 bp, Homo sapiens
cggcaaccacacacgggcgatccctgtcccccagcagtccccacacggtgcgcacagcctggacttcggccacctcaggcaccttgggcaccacccacatcacagagccttccacggggacttcccacaccccagcagcaaccaccggtaccacccagcactcgactccagccctttccagccctcaccctagcagcagaaccaccgagtcacccccttctccagggacgaccaccccgggccacaccacggccacctccaggaccacagccacggccacacccagcaagacccgcacctcgaccctgctgcccagcagccccacatcggcccccataaccacggtggtgaccatgggctgtgagccccagtgtgcctggtcagagtggctggactacagctaccccatgccggggycctctggcggggactttgacacctactccaacatccgtgcggccggaggggccgtctgtgagcagcccctgggcctcgagtgccgtgcccaggcccagcctggtgtccccctgcgggagttgggccaggtcgtggaatgcagcctggactttggcctggtctgcaggaaccgtgagcaggtggggaagttcaagatgtgcttcaactatgaaatccgtgtgttctgctgcaactacggccactgccccagcaccccggccaccagctctacggccacgccctcctccactccagggacgacct

SEQ ID NO: 95060 - DNA, 2994 bp, Homo sapiens
tagtctaatagttcttctattctcgactttgacaacatcacctaaaaatgccttctcaaaagccactctcaccatgagtcctttcttaagacgtttcgtaccttctctaccacgtacgagagttcacaatcttgtcctggccttctcaccaccctcacaaaactacaaagcttctttcaaacaggattcacgtctgaatcatgttagcaacccaccacatcagtcatttgttgcataataatgctacctaatgagccatcccaaaaccagtgtcttgaggcaacgatcacttatttctagtcatgcacctgcaggtcagctgggacttggctgatctagactgggcttggtttctcactgagggcccatgaattggctgcgtggctctgctcccctctcctactcttcttctgaccagcagctggcagggcacactctttgtggcaaaggcagggacacaaaaaagcagaaatgctcaagatcttttaaggcataggcttaaaactggcataccatcccctccacctcatacttcaggccaaagctagtcacatggtgaaacttaaagtcaaaagtcaaaggagttgggtaggaaatcagaaacgtgtgaagatttgaggccacaaatgcaatcagcctatcacatccaccactcaggtgcttcatgcatacaaaatgatcatctggctctgaataaatgaacaaatgaatgaatgaaagaagactgactacatttcacagccttgtcaagacacatgccagtttcactagcagccactgtgaattctaaaggtggtacaacagtggcaccctcgttaaatattagtttgctacaggtccctacactccactgtacttcagcggaagaggcagcatttcaaaaatgtgtatgttcacagtgttattttttcatggatctctgattgtgaaataaatcaatattcccattcacacacaagagcccgtgtgcaggcacacatcatgccctatttctcaaaaaagaaaaatgcaacactgctttgcaaacgtggagtgagggaaggggattaaaaagggagaaggtgaataggtgactttgaatccaacctacagtggttaattttcatttaactatctrgctgagactaggggttcagcagaagcacattaaattctgtgaacttatgaaacgatgcattattgaagccacagcaggaggaaaggactcggtttagaacacataaaagactaaaactggcagaagtgtcattttccattacaaagtaaccgctaaagaaaatacattttaattgagaaagaaaacaccagctccaaaagggtaggtaaaacaaaatgtatccacagcactgtcccccttcctcttcccaccaccccagtaaatcctgcagttcctcctggaactcaaccaaggaataaatcttaaactattccatgtcctttctggatccactaacactagtagaggccaccatttactccattcactcaacaaatatttattgagagttctctatgcctaagacacaaaaagacagaaaccctgccgtcatcagctcacattcagataaacgcacagcatattaacaaacggtgatgctataggaaaaaacagagcagggtaaagaaggcaagtgtggagttatcggagagccacaattttaaatacagtgataatcaccaagtttttcacctcccgaagtgaccttaagacttctgtgcttcaactttcaaaagctgttgaaatcaatcattaacttaagtggtacaggtaagccatcatatcactcattctagcagacacaaatattgggttccccactcacaaggtgtttgcaatctaatccctctcatcaagcggtattcaggtatcatgggaacaccacaaaccccacgtttaaccatgaactctaagcaaagacaaaaggcagtccatgcaggcctattattaaggcccgctgaacgtcacaagtctcacagggcacctccgcccctttcactacatgttgagtagaagtgcattgaaggcactgaagatgcaggaaatctatcgattccacaggaaaagcatgagcaggcctcactgggtccccaaactgggctcccggccctgcagacctggatgctctaagtctaagggtcaactcccctccccatctagaggctgaccctatgagcactcagggtcaccctctagatggggagagaggttgtgctgttggtccaggccctgcccttatcctaaggctgtgtcttctctacttcctgttcaacctgtaccatatggaggcctccttcccagtgttctaaatcttggctgcctatgcagatcacctgtggagtttttgatcctggtccccaagatgcatcacaaaccattaaaatcactatttctaggggtggatcccagacatcagcatcagttaaagctttccagaggattctagtacacatcctaggtgagaaacactgtggacccctactctactcactagggtggctaccccagttgcaaccttattcctgacccccttgtctcctcttcttatttcaatttgaggctttagctgtgtcccctacccgacactgtcccactgctgtccatcagaatgaattatcagaaacctcgaagtagcctctgtgtgcagcaactcttatttttcaaacaaaactgggacatgggagctggcagaaaaactactgtgctcttccaaggcagtggccccaggcaagttaggacagggctttggagttctcatccttgtctggacccatatctggtccaaggtcacacacatgtgtgtgacctcatacaaggaaatgaacctcatttggtctcagtgtgctcctctgtaagtcaggcaccatgacagccacctcatcaggctgttgggaaaacacaatgagaatcatgaatcaagcatttgacattcaggaggtgctcaaaaaatggcagtggcacttctcaatttgtcacatgggagccagtcccggaag

SEQ ID NO: 95061 - DNA, 2994 bp, Homo sapiens
tagtctaatagttcttctattctcgactttgacaacatcacctaaaaatgccttctcaaaagccactctcaccatgagtcctttcttaagacgtttcgtaccttctctaccacgtacgagagttcacaatcttgtcctggccttctcaccaccctcacaaaactacaaagcttctttcaaacaggattcacgtctgaatcatgttagcaacccaccacatcagtcatttgttgcataataatgctacctaatgagccatcccaaaaccagtgtcttgaggcaacgatcacttatttctagtcatgcacctgcaggtcagctgggacttggctgatctagactgggcttggtttctcactgagggcccatgaattggctgcgtggctctgctcccctctcctactcttcttctgaccagcagctggcagggcacactctttgtggcaaaggcagggacacaaaaaagcagaaatgctcaagatcttttaaggcataggcttaaaactggcataccatcccctccacctcatacttcaggccaaagctagtcacatggtgaaacttaaagtcaaaagtcaaaggagttgggtaggaaatcagaaacgtgtgaagatttgaggccacaaatgcaatcagcctatcacatccaccactcaggtgcttcatgcatacaaaatgatcatctggctctgaataaatgaacaaatgaatgaatgaaagaagactgactacatttcacagccttgtcaagacacatgccagtttcactagcagccactgtgaattctaaaggtggtacaacagtggcaccctcgttaaatattagtttgctacaggtccctacactccactgtacttcagcggaagaggcagcatttcaaaaatgtgtatgttcacagtgttattttttcatggatctctgattgtgaaataaatcaatattcccattcacacacaagagcccgtgtgcaggcacacatcatgccctatttctcaaaaaagaaaaatgcaacactgctttgcaaacgtggagtgagggaaggggattaaaaagggagaaggtgaataggtgactttgaatccaacctacagtggttaattttcatttaactatctggctgagactaggggttcagcagaagcacattaaattctgtgaacttatgaaacgatgcattattgaagccacagcaggaggaaagractcggtttagaacacataaaagactaaaactggcagaagtgtcattttccattacaaagtaaccgctaaagaaaatacattttaattgagaaagaaaacaccagctccaaaagggtaggtaaaacaaaatgtatccacagcactgtcccccttcctcttcccaccaccccagtaaatcctgcagttcctcctggaactcaaccaaggaataaatcttaaactattccatgtcctttctggatccactaacactagtagaggccaccatttactccattcactcaacaaatatttattgagagttctctatgcctaagacacaaaaagacagaaaccctgccgtcatcagctcacattcagataaacgcacagcatattaacaaacggtgatgctataggaaaaaacagagcagggtaaagaaggcaagtgtggagttatcggagagccacaattttaaatacagtgataatcaccaagtttttcacctcccgaagtgaccttaagacttctgtgcttcaactttcaaaagctgttgaaatcaatcattaacttaagtggtacaggtaagccatcatatcactcattctagcagacacaaatattgggttccccactcacaaggtgtttgcaatctaatccctctcatcaagcggtattcaggtatcatgggaacaccacaaaccccacgtttaaccatgaactctaagcaaagacaaaaggcagtccatgcaggcctattattaaggcccgctgaacgtcacaagtctcacagggcacctccgcccctttcactacatgttgagtagaagtgcattgaaggcactgaagatgcaggaaatctatcgattccacaggaaaagcatgagcaggcctcactgggtccccaaactgggctcccggccctgcagacctggatgctctaagtctaagggtcaactcccctccccatctagaggctgaccctatgagcactcagggtcaccctctagatggggagagaggttgtgctgttggtccaggccctgcccttatcctaaggctgtgtcttctctacttcctgttcaacctgtaccatatggaggcctccttcccagtgttctaaatcttggctgcctatgcagatcacctgtggagtttttgatcctggtccccaagatgcatcacaaaccattaaaatcactatttctaggggtggatcccagacatcagcatcagttaaagctttccagaggattctagtacacatcctaggtgagaaacactgtggacccctactctactcactagggtggctaccccagttgcaaccttattcctgacccccttgtctcctcttcttatttcaatttgaggctttagctgtgtcccctacccgacactgtcccactgctgtccatcagaatgaattatcagaaacctcgaagtagcctctgtgtgcagcaactcttatttttcaaacaaaactgggacatgggagctggcagaaaaactactgtgctcttccaaggcagtggccccaggcaagttaggacagggctttggagttctcatccttgtctggacccatatctggtccaaggtcacacacatgtgtgtgacctcatacaaggaaatgaacctcatttggtctcagtgtgctcctctgtaagtcaggcaccatgacagccacctcatcaggctgttgggaaaacacaatgagaatcatgaatcaagcatttgacattcaggaggtgctcaaaaaatggcagtggcacttctcaatttgtcacatgggagccagtcccggaag

SEQ ID NO: 95062 - DNA, 1653 bp, Homo sapiens
acaatagcacagacttggaaccaacccaaatgcccatcaatgatagactggacaaagaaaagtggcacatatacaccatggaatactatgcagccataaaaaaagaatgagttcatgtcctctgcagggacatggatgaagctggaagccatcattctccacaaactaacacaggaagagaaaaccaaacactgtatgttctcactcataagtgggagtcgaacaatgagaacacatggacacagggagggcaacatcacatgctggggcctgtcagggctgggggacaaggggagggagagcatcaggacaaatacctaatgcatgcggggcttaaaacctagatgaygggttgagaggtgcagcaaatcaccatggcacatgtgtacctatgtaacaaacctgcacgtacagcacgtgtatcccagatcttaaagtaaaataaaaagaaaagaaaagaaacaaacatagtaaccccgggaagaaaagatgaaagcattttaaacaccagtttagagatagtggaatagagatttagtgaatcacaaggtagataaaaataattatacatgatactgcatacagggaacgaagaaagaaaagattaaagagaggcaaggagactaaaggtgtggtcaaagaaggtaggatgaacatcatatgggcattacagaaatggaaataagagtgaattttgcgaaaataatattcagagagaaatggctggtaattttccagaataaaggaaacacatgatttgcgattcaggaaacacacttgtacacaccatactaaagctacagaaaagtgaaaacatagagatcataatagctgagaaaaaacgcattgccttccggggaataatgaagagtttgtcagcagacctctgtctgtcaatgaacggaagccaaaagcaaagtctgagagaaaatactgtcaacctagagttgcattcctagctaaagtatcatgaaataataaggaggctgtgatagacatgcaggagaaccacccagaatccctgtcaaggacggatttgatgtttgtgaggctgggagtgcaggcaggtgccagtcaacagccacttgtccctgaggacactatctgagctgccttgctctagctcatgcccttcccgaggtggaccacatgcaaggacaaatccaggaaggggtataaagatctagctaactattcccaaagctgaataactatgatgggccgttttaccttcagagcttctttaggtatcacaagaggcttttgtttggcctgaagtaagcatgaacttcttcctctgcccactcctgcctccttcctgccccttcctcagctgccgatccaggataagtgtcctgcacactaaactccatcacggtgtcagcttcctgcagaacctaacccagaaacaatgatacgggagagaaattgaaaactcttagtgttgacaccaacagaaaccttgttaaagaaatttctgaagaatgtcatgtaaagagatgtaaactgaccaaaagagcacaattggaggtgccaacagggaatagtaatgcaatacactgacaaataagggtgaatgaaaaacaatgacttacgaaacggatgcggtgaagactacgaagacattgaacaatcaatgaaacaagaaagaac

SEQ ID NO: 95063 - DNA, 1031 bp, Homo sapiens
atgctatgcccacatctatgcccatcagtatagaattgtatttccttatagtagaaataccaaaataatctattaccattaagatagagtcaagcactgtctatcatgagtttggttatggttgtgcaagttcaaaagaaaaaataaaatcgaaaaaatttcataaaagtatattccttctgacatttctaatggaaaaatataatattggctattctatattctctgatagcatagtaaaaatagatcagaaatctaggaaaatctatgtgctttaaaccaagggcaatcaccaaattacaattacctaaaaatattgaagcttaaatagtaattatttctaagattgcctcattgcaaaggtactacaatcaggattcttggaattagcagagttcttttttagccaaaagaaaaaaacaaaaaacaaaaagcccagaaagaaaagttgtctaagttaaaattctaagattatgaaattaaatttcatagaaaaaaatcacaaaatatatgtgcatttgatatttctcaatgtcaatatggtcattttctccatttttctattttgaatgctaaaaacatatagatttctcatagaaagtgctacctaaggccaggcgctttggctcacacctgtaatcccagcacttcgggaggccgaggcgggtggatcacgaggtcaggagttcaagaccagcctggccaagatggtgaaaccctgtctctactaaaaacacaaaaaaattaaccggtcatggtggcggtgcccgtaatcccagctactcaggaggctgaggcagagaattgcttgaacccgggaagcagaggttgcaggtagctgagatcgcaccactgcactccagcctgggcgacagagcgagactccatctcgaaaaaaaaaagtaatasctacgtaatagatctcatcctaccaaggaaaagtcgagtcccatttctgaagagctatccctgtttttcacttaagttgcatttctgcagtgtttgataaagctatgatattagagaaaata

SEQ ID NO: 95064 - DNA, 1116 bp, Homo sapiens
gaggggtgactttgagtagaatgggaggcaggtttgccctaagcagtctcagcttgatattttcctttagcttagtaatttgggggccccaagatattttcctttcacacatatcacaatcatatgtgcagtatgtttaatttggaacacttctgactcagctatggttaaaaaaaatcaatacgccttatctgttattggtgagtttttagttgataatttttgttattgtttagaagtagcaattttttaaacaataacaaaaattatcaactaaaaactcacaattttcgaagcctccagaaatctaaatagttttacccacatatattttatggccaatttttaacctactgctatatacaaattatacacttgtgacttaattcattctattacctaagacttagatcctcctcctagatactatcatctgcttacttaaattgtagtatttattatataccatatatagatttgattattgtgatggctgttttatatactattgagtgatcatgagataaaatgaactagcaattatgcttatgctaatagatgtctcacaaaaagaggtgagatttctagtaaattactggcaaaaatagtgaaaagaaatggttaggaagagagtgcatgtttgagtaggtggagtaattactgaaaataacagagatcagcagcataattaagaaaatgcaaacgattgtaaatgatagcccttagacttgtgtaagaaccccagcaaaagagacataaaactgaaagcataagctctgggttggggagtagtttgatgagtacatttaattgagtctaaaggcacacaggtcacacaaaagcaaaagaaattataaaaatgtcaattgtgaataattagaaaatcatattaaktattattaaattttctatcaaacagtcaagaaaagaaaccttctttcagacattccattaaacctacattgaaaactacctcctgcttccctacaactgaattttgccaccattaattaactatccttactcttgagtatctgtaaatgagagaagaattttctatgtaattggataagtgctcatgaataaaatagagttattaataatgtatgagtctat

SEQ ID NO: 95065 - DNA, 1311 bp, Homo sapiens
ctctcctccctctgcctggtgaaggactatactgtcttcaagtctccactgaggcctcacctcctccaggaarccttccttggtaccccacaaatcacgctggctgcctcctctgcccatactcccaggaatgaacctctattgtagcatttatcccatgcctctctgctagattgtaagctccttggaggcagggactgtgccttgtttattgtgtactcagaatcgaccaaagtgctggcacaagatggctgtttagaaagggttgatgaattaatgagacattattaatctcatttagatcaaattctccttgagagatgactttaagctcctaggccagcggtttttaaactgtgttcttcagagaactaggggttccactaagaagctgcaggagtaccactggggtggagtaggggctaagcagacaggactccagccccagctcctcacagtcttcataaatctattcatatttggccgggtgcggtggctcacgcctgtaatcccagcactttgggtggccgaggtgggcgggtcacaaggtcaggagatcgagaccatcctggctgacatggtgaaaccccatctctactaaaaatacaaaaaaattagccgggcgtggtggcgggcgcctgtagtcccagctactccggaagctgaggtgagagaatggcgtgaacctgggaggcagagattgcagtgagcggagatcgtgtcactgcactccagcctgggcgacagagcaagactctgtctcggaaaaaaaaaaatctattcatatttgtcagatcacttggattcatctttgatttagaaacagagtcacaggggtattataaataagcatcgggcttcaagtcagaaggctctggtttgctacgtagcttaagctgggtgtgcctgggcattcgcccaggtctctgcctctgcagcaaaacgggggtgaccaaaccagccccacagattgattatgaagagtaaatgtggtcccatggcatcatcatatatgagaaacacctcaatacattgagcacgaacgtcaacaatggtgattaaattacaggcagtcaggcagggctggcctctttctgacttgtgatctgaaccgtggagctcacgtgttcagaatgaacatcacctcactggagttcaaggctctgcaactcgtacgtgcttcagaatccctgggaagctaaacgttaagatgtgagttctggggccgggcgcggtggttcatgcctgtaatcccagcactttgggaggctgaggcaggcggatcatgaggtcaggagatcgagaccattc

SEQ ID NO: 95066 - DNA, 1333 bp, Homo sapiens
ttcttgcccaaaacatttaacctgaatttaatcaagcctctctctaggcctaacttccactttacaagaaatgcaaaggctagaagatgttaaatgacaccatgaggaaaacaatcagataaatccagaaaaataggatggtctataagacaactgtcctgaactcttaacaaagacaacatcgtaawgagcggattaataaaaaaaggtggaggactgttcacatcacaagtgaccaagaggaggtcatatgggaactctctgtactctgctcaagttttttataaacctaaaactgtcctaaaaatatagtctaaaaaaatagagaaatgctgagtcagtcactgagagagagaaacgtcaatactaagaagattccactttctggttcttacttatttggtactgcagaatcagtggctgaaagtgcaacacttcctttttgctgtgctggttatttttcttcatatataatgccactggtaagcatgaagaacagtttcttttttttcccctcacactcaagggaagtctaaacagctgaccaaggaaggcacgttcatcacctgctggcactgatcaaagcaaaggtatccaaaacacctgaaaagctcctccctagagtaacagatatgccacctggcctagagctcggcctcaaatatggcctattcaaagttttgtattctgaagatgaagaaatcaagctccagaaaggtcacacccgtgagatgaagctagctgagcctaggtgaggaacccatctcctgactcctagtctgccactcttagccagcactttcaatgagagtgaaaatagcctggcagacatccctcctgctagaactgccttttagacagtaaagcaattcccaaatatgtagagcactatcaaatacaatagccattattaatatgtacctactaagcacttgaaatgtggctagtctgaattgggatgtgttgtaagtctaaactggatttcaaagggtatgatttttaaaaagtaaaataacttattaataatttttaaaatattggtcagacgcggtggctcacgcctgtaatcccagcactttgggaggctgaggtgggcagatcacctgaggtcaggagttcgagaccagcctggccaacatagtgaaaccccatctctactaaaaatacaaaaaattagctgggcaaggtagtgggcacctgtaatcctagctactcagaaggctgaggcaggagaatcacttgaacccaagaggcagagattgcagtgagccaagatcgcaccactgcactccagcctgggcaacagaaggagactccgtctcaaaaaaaaaaa

SEQ ID NO: 95067 - DNA, 712 bp, Homo sapiens
agtagctgggattacaagcatgtgccaccatgcctggctaatttttgcatttttagtacagacagggtttcaccatgttggtcaggctggtgttgaactcctgacctcttgatccacctgcctcggcctcccaaagtgctgggattacaggcatgagccaccgtgcctggccataacaaaaactttttgaagcagcatttgtattgcaactttttaaaacattatttacccaatctcaaaattatatcaactattatccatgttttcactttagtatatttttatttgcctcaatctagtgcaayaggtaacctaaaaagcaagtaagcctaagcaagcaattcatttagaaaaaaccatatgtgactctagacagctttaataaactcatttccatgaagcatatatgatcctctagtgaaagtcggaaatagttggaggcttaaggttatggaacaatctgtgatcctccaaagtataatcaaactttaaatttttaagaacttaagtcgttaaatgaaattattaaacactaaataaaaaactctcagttcaggtcaatgataatcaagctttgttttgaaaacgatactgccttaaattgacaagtacagcaagattaacaagtactcagaactctcattaccaatgactcatgaaagaaattgggagtgtgctatgatagggaaaatgcagcaagataatgatttgg

SEQ ID NO: 95068 - DNA, 712 bp, Homo sapiens
agtagctgggattacaagcatgtgccaccatgcctggctaatttttgcatttttagtacagacagggtttcaccatgttggtcaggctggtgttgaactcctgacctcttgatccacctgcctcggcctcccaaagtgctgggattacaggcatgagccaccgtgcctggccataacaaaaactttttgaagcagcatttgtattgcaactttttaaaacattatttacccaatctcaaaattatatcaactattatccatgttttcactttagtatatttttatttgcctcaatctagtgcaacaggtaacctaaaaagcaagtaagcctaagcaagcaattcatttagaaaaaaccatatgtgactctagacagctttaataaactcatttccatgaagcatatatgatcctctagtgaaagtcggaaatagttggaggcttaaggttatggaacaatctgtgatcctccaaagtataatcaaactttaaatttttaagaacttaagtcgttaaatgaaattattaaacactaaataaaaaactctcagttcaggtcaatgataatcaagctttgttttgaaaacgatactgccttaaattgacaagtacagcaagattaacaagtactcagaactctcattaccaatgactcatgaaagaaattgggagtgtgctatgatagggaaaatgcagcargataatgatttgg

SEQ ID NO: 95069 - DNA, 650 bp, Homo sapiens
aagcagaggtaaacactagtcacaagaaagataaatgcagattaaagaccttttattataacaattatgaggccactgtcatttgtttcatttcgcttaatcaaactagctgattggattatttagatgatggaatgatccaaacttgtcactgatgtaaatatatccattggagcactgccagtgtaaggctgctatcatctaatctattcctgaatatcaggaggtttacatgggagttccctggattttctattctcactccctctattgcgttaagatgatctcatctttgacatggtcgacccagccaacattgtaatgctccctttacttgtctgttcaaagggttagaygcaaatgaccagggtctatctctactcccacttcaatgataaaattatgtttcttggaagcattcctccttaagttagtaaggcctctgaactagcagaacccagaaacccaagaaaagaagtcaagttataaggacttttgctgttacagtgagaggaaccatgtttgtttttactgttcagtatctgaatccaagcagtctgggtaggagggagataaatcacagtagtcattggttcagaacacataccacaccctctatgacagtactccaccttctcaaagcagtgaat

SEQ ID NO: 95070 - DNA, 1220 bp, Homo sapiens
aagctaagtcgaggctgtggttcccaaactcacagcagaattgaagatgtagatatagtagattgaaatggaggataggagggttggaaggggagactgaggccttayagccttaccctctggtggggctgctgactcactccatggctctatagtcaccagtgagctcatcctgggaacaagaatctcacctagggactgccagtccccagagctagggctccaatgggaacttgtcccaagccaggaaccagaatcaggcaggccagacacgaccagcaaccaggctgccctgaggctgagcacctggggaagggccttacagactgagggtgggggcaggccagaggctcagggcctgagactgaggtggtgctgggaagcaaggaaaccactttgaagtatatttgctatttaaattaatcttttatttttcaccactcattttaggcttatattatcacttttacaccaccaatttgatcagagcaatattaacgacccaagcaaggatccagttctagcctaattaggggcagcaggtgaattagtagatggaagcccagagagataacaccgtgtgtccaggtcacacagcaaaactgggatctgaatttggaagaggaaactcctcatcataaccctctactccaacctcccatccccctcctgcagtcctcaggcagttccccttaaaccatgtgtgcaattgcatctttccagataaaccaagtctgagaaggttacacaagggtcttgcctcccttctccacatttgtggtctggcccctcctgcaatattaacctggctcttataaatgtttcatccattttctattccacatcacccctgctaccatcttctcacatttgagcttgggatcatgaaaagtaaatgtgcttacttcacccacccttatgctttcgcccagatttgggacttaacaggaaatgatcttgttcaaatgttcttccaatcatctaattctctagtccttcagccctgcctgctcagctgggctcagtaagggatactgttataaatacaccttgcttctgggtccagctttcaccttttcaaagcatgcttctataatattgtctatgtattcctgggcagtcaggaggagccatgtttgaacacttgggttcagagatgctaacctacttgcccaaggccacaaagggaattgtcaatagttgtgaaggtgcaggattca

SEQ ID NO: 95071 - DNA, 1158 bp, Homo sapiens
gaggctgaggtaggattgcttgagcccggaggtcaaggttgcagtgggccatgatcacgacactgcactccagcctgggtgacaaagggagaccttgtctcaaaaacaaaataaaaaaattaaaaagtgccagactctcagttaattctctctaggatcagaggaaatacctggaaagggaaagggattctctacagaatgtagatttcccttgccaagaggcagcttagcacggctatttcaaaatatgtcaaagaaatatatttgctgtaaaattctttgatttctttcagggcctgctatctgccatgtgatacagtatcttcctttttcagtaataaatcaatatcagaattaacccttctgtgcccatctatccactttccatacgcacttttcaggtaaatcagtttggtatttcgagcacagctcagtggctgaaagaatttgaagagtcatttcggaagataagagcaatgagagggacttgaaagtgtatgttacggaaaactccagactttaatttcactaccacacttccaaattggtttttacatcattcatcacctcagcagaaggaaaatttagcaatctcaaaagagatcccaaccaactgcttcaatcttagaaacaatttgcacaaagattagaccacgcttgtccaacccaggctgcatgcagctcaggatggctttgaatgtggcccaacaaaaagttgtaaacattcttaaaatattataagttttttttgtgattttttattttagctcatcagctattgttagtgttagtgtattttatgtgtggcccaagacagttctgtcttccaatgtgacccagggaagccaaaagattggaaactcctggattaggcaaaataatacaaagcagaccattaaataggccttatctctaaaaggtgaataatgaatattattttttaataggtaagacaatacgataatagtcatctaattaaccatcggtctggagtttttctcttttcagagctcctatagctactaaagataataaggtctggaactwaaaatttccagcacagcattgatgttatttagagtaataacacctttttagttttatatcctgcttttcagtccacaaagcactttcatatacgtttatcacataaatgca

SEQ ID NO: 95072 - DNA, 1290 bp, Homo sapiens
tgcatcagtgttgtttggagggggaagcttgctaatgaggatgatccccagtttcagaagggaccggacggtcacagctgcataaagtcctctggatgattaaagctcctcacgggacaggcaaggctgttagaatcttcctggagttgacaggcaaaagcacagccagacctttgctcctagctgctgtggagagctgtgcctctgggaggtcctgaatgacaccagcctgggctccctgtacctttgctcttgtttccttcctggaatgctctccttgctcctctacctaattcctactcattcctcaaaaccctaaaactcagttcctcctccagctcctaggaatttctctttcctcctctggacttccacagggctttgtatttagtctacaaatatttattgagggtactgtgctaggcattgggaatacagtcataaataagacaggtatattctagtcagggaaatggaaaacaaataagcagatagtgtcttgggtccattggggttgctctaacaaaataccataaactgggtggcttataaaggacagaaacgtatttcttactgttctggaggctgggaagtccaaggtcaaggtggattcagtgtctggtgaggccctgatttattcctgtaacctcacaggatggaagggacaaacaagctcccagggcctattttagaaagacactaatcccattcctcagggatctgccctcatgacctcccgaaggctccacctcctaattccatcaccttggggggtaggactttagcatataacatattttaacatatctgtagcagacagataggtggatacctagcwagctaggttggtaacaaattggtagaaaatagctagtttgcaaagactttgaaagacacaaccggagagtgtcctaggggatgtattactttgtattgcctgaatactgaggggcctcctgaagctaatcaatcaggctgggtttgtagaattccatttgatgggtgtttaggctgcactatgacacacattcttcccatgcaagtcacaaagttgttagaggaatcagaagaaattttgcaggcagcacaatgcaagtatatagatgacggggtcaggatggtctagattcacatcctagcttagggacttacaaatgccatgatttggaatgagttcttaagtctttctggggttcaatttcctcatgtgtaaaatggagatgataatatttatactcaccctcagagagttgggaggattagaaattctatctacctaattctttcttt

SEQ ID NO: 95073 - DNA, 654 bp, Homo sapiens
atgatgaggtggggactgttcggctggccacactgccattgtagatagcctgtgactctgtggctggcgcctggctggcctcagtgaagcccttcagtcccagctctgaccatgtctctgtggagagacaagcaggtgatagtgttgggtgggcaaggctgtgctggtggcctgcttagcaacagcaggaaaaggaaggagataaccaycccaacctttcttgctggaaggagcccttcctgttgtcggcgctgtgtgtaaccaatgaggcgaatgccgggaagcgcttggtttgtgtcaatgaggggagaggattgtgcagaagtgcaggaagggaccatgggaggaaattgagtgaaggtctctgttaggggtttgtgttcccctaaaaggtatgtccaggtcctagtctccagcccttgggactgtcaccttatttggaaatagggtctttgcagatgtgcttaagacgaggcctgtctgaagtagggtgggcccctaattcaatgtgactggggcctttatggggagaggaggcaggacacagacagacacgggacacagaggctggacagagattggagagatgctgccacaagccaagatgcaccgaggactgatggccaccaccagaaactgggaagaggccaggac

SEQ ID NO: 95074 - DNA, 739 bp, Homo sapiens
caggacgtaagctaccattctgcctgctctgtgactcaaagacacaatgtccaggtgagcccagccaaggttttgatttgtatgtggcttgtccttaccatgggctgaccctctactctcccctcccagccctgctgcatggagcagatgaggaccttcatgttagcccacaggggtgttctgctctgacctccttctgaagctggagccacggtgagttgggaggcagaaaatacacaaagggccactcaccgtggccatattcctgcaggccatcccacatggtycccccgcagccctgtctgtgggaagcctatacacccaggactcacggccatgccaatactctccccacatgaagttcaccaaactctcaggacacccaaagccagactaagacccagagccagctccattttcccccatgctgtttccatggtagtgaataaatttcatgagatctgatggctttataaggggaaacttctttcacttggttcccattctctcttgtcggccaccgtgtaagacgtgcctttcaccttccaccatgatgtgaggcctccccagctacatggaactgtgagtctattaaacctctttttctttataaattacccagtctcaggtatgtttttatcagcagtatgaaaacagactatattatatttaatgatgtaatgttagaatcaagaaggagataaggatgcctgtttttcctgcttatagacaccattgt

SEQ ID NO: 95075 - DNA, 739 bp, Homo sapiens
caggacgtaagctaccattctgcctgctctgtgactcaaagacacaatgtccaggtgagcccagccaaggttttgatttgtatgtggcttgtccttaccatgggctgaccctctactctcccctcccagccctgctgcatggagcagatgaggaccttcatgttagcccacaggggtgttctgctctgacctccttctgaagctggagccacggtgagttgggaggcagaaaatacacaaagggccactcaccgtggccatattcctgcaggccatcccacatggttcccccgcagccctgtctgtgggaagcctatacacccaggactcacggccatgccaatactctccccacatgaagttcacyaaactctcaggacacccaaagccagactaagacccagagccagctccattttcccccatgctgtttccatggtagtgaataaatttcatgagatctgatggctttataaggggaaacttctttcacttggttcccattctctcttgtcggccaccgtgtaagacgtgcctttcaccttccaccatgatgtgaggcctccccagctacatggaactgtgagtctattaaacctctttttctttataaattacccagtctcaggtatgtttttatcagcagtatgaaaacagactatattatatttaatgatgtaatgttagaatcaagaaggagataaggatgcctgtttttcctgcttatagacaccattgt

SEQ ID NO: 95076 - DNA, 614 bp, Homo sapiens
aaagaccttccagcaggcttcacgacccagcctgtttcctctgatgtcttctgcctcactcctgtgcagccataccagcctcaccaacctcaaacagcaagtataaaggctaaccctgggtgggtggaaacagagagggacagatggatgggcacactgacagcactgtgtggcagggtgaagccctgattcatagtgtttgccaatttccagagtgtaaatactactagcatggccaattttaagacagcatttatgtgccagtcagttcagagagacaattgcctcttgtgagctggtgcaatttgctatgagctccagcacacccttggcacagttctacttcccaggtgggatgatgggacatggacatttttaaaaatagattattttacatttatgtagacattatcatacaaagttgtatggaatagctatttggtgaccgatagttgttaaagagagaactggaaggcaggatctggaaggcccrgaacagagaacaagcagaactgtattctcgctttcctccctgacaccatcccttctccaagctcagagaaaactccagaaaggcttccagtgggcacctggttcctcaggtgacagggatc

SEQ ID NO: 95077 - DNA, 614 bp, Homo sapiens
aaagaccttccagcaggcttcacgacccagcctgtttcctctgatgtcttctgcctcactcctgtgcagccataccagcctcaccaacctcaaacagcaagtataaaggctaaccctgggtgggtggaaacagagagggacagatggatgggcacactgacagcactgtgtggcagggtgaagccctgattcatagtgtttgccaatttccagagtgtaaatactactagcatggccaattttaagacagcatttatgtgccagtcagttcagagagacaattgcctcttgtgagctggtgcaatttgctatgagctccagcacacccttggcacagttctacttcccaggtgggatgatgggacatggacatttttaaaaatagattattttacatttatgtagacattatcatacaaagttgtatggaatagctatttggtgaccgatagttgttaaagagagaactggaaggcaggatctggaaggcccggaacagagaacaagcagaactgtattctcgctttcctcccygacaccatcccttctccaagctcagagaaaactccagaaaggcttccagtgggcacctggttcctcaggtgacagggatc

SEQ ID NO: 95078 - DNA, 614 bp, Homo sapiens
aaagaccttccagcaggcttcacgacccagcctgtttcctctgatgtcttctgcctcactcctgtgcagccataccagcctcaccaacctcaaacagcaagtataaaggctaaccctgggtgggtggaaacagagagggacagatggatgggcacactgacagcactgtgtggcagggtgaagccctgattcatagtgtttgccaatttccagagtgtaaatactactagcatggccaattttaagacagcatttatgtgccagtcagttcagagagacaattgcctcttgtgagctggtgcaatttgctatgagctccagcacacccttggcacagttctacttcccaggtgggatgatgggacatggacatttttaaaaatagattattttacatttatgtagacattatcatacaaagttgtatggaatagctatttggtgaccgatagttgttaaagagagaactggaaggcaggatctggaaggcccggaacagagaacaagcagaactgtattctcgctttcctccctgacaccatcccttctccaagctcagagaaaactccagaaaggcttccagtgggcayctggttcctcaggtgacagggatc

SEQ ID NO: 95079 - DNA, 1267 bp, Homo sapiens
ccattctctcaggatcttattcctgtgctcccagtgcactgctgccctgtgtctgtcccttactgagtgcttgccgtgcgtcagaccacgcattcagagattcttgtggacaggcgtgtggcaggcaactcagggaacaggctgttcttgcccagtgtctggctcgtaggagcagtgctggttgtaaggggaggctgctcttggcaggctcttgggaggggactagagctgggacaggaagaactgggaagggacaggtaagggagttgaggggccaaaggctacaggggtggagtaagaggactctggcagctagagtagggggcaagcgttggttctttttccgggaacaagtgctcactgtgcatttgccatgctccatgccctgtgttggtgagcactgatgccatccagctccccaggcagtcatgctgcaccatggctctgggccttctgtaagaggagagatctgggagcacagtgcacaatgcgagtcacccatccctgagtcagcatgtgctgctcacacatctgccctcagccaggccctctgcaggtgctggggttacaagaacctctgggacaatggtgggtactgggaactcagcagggaaggggtctccccaatcaaggatgcctctttatcattccctgaatcccaaggtttaaacctggcttcccattcaactctcctgggagcttttcccgatcctggtgtccgggcccacgaagcaaattggaatctctagggtggactcaggcatcagggtgttgactgactctagcatgctgtgaaccatgcagtccacagagtgcctaccctgcggctaggcagggaatgggaggcgagggtgtgggaggttcaggcctgccytcttcacctgtgggtttccattctggtcacatgtcattatcacctttggagctcaggaaatactgttacgtcggttcttgggggttctcacgtgtgcccagggctgaagacggctgctctaagacactcaggctccagtggggcaaggtggggcatacatgagccaactgggaagcaggtcattgaaagttatgcgctatgcccgccactgcaggcagcacacacctgggctgaggtaccagggcaggagagctggcctggggcgttggagggcctgcgttggaggagagaggctgagtgagactcgctgagagccatgagcgtgttgtctgggagggttcgggtgagcagggtaagatgggagggatttatcccagtctgtgagtccttcca

SEQ ID NO: 95080 - DNA, 1070 bp, Homo sapiens
ttgcctacgctagactgcaagctccacgtgagaagagactgcttgacttgttctcagaaagtatttatgggatttatagatgcagttgtacagaatagaaagctgctcacaatcctcttcttcacctttcctcctagaaaactcctacacagccttcaagacccaaacacatatgggcagagttggttgctcctcctttgagctcgctactcttgcaccttatataaacctcttttatagccccaatacactgtgtttccctcattttactgcgggtcagagctttcccctgggttgagaacccgcaaggggatctgacctgtctgagctatttatggatccccagagctcctgggacagatgctcggctgacgttgtcaggattgaaatgacctgttactgctttaatgctccctctcaagtaggtggtttgcatttctgggacctttggcacctcagttgaggctctctggttgtgagcaagaaaactcaactattaactaaaggtaaagtaaaaaaaaaaaaaaaaaaagtgatgttggggatggaggcaaggggctagagccccaaccaaacctgcaggaaggaaaagccagggtagccccagcyccttggcgcccgctgtgcttgggatccctggctgcacctcctaatgcactcggctccatcagctcctggctgcggtcctgcttcccaaatctgcagagcaggactcaagctggccctgctagggttggggcctcccttggagccgtcaaccatccaatagggcccagaatgaggtagagagatgagcccaagggtggggtaaggggctgaggttttgggggtgggcagtggcgaggggtccctggagaagaggggaacttgtgagcctggggccacacccaaagtgcctccttcactgggcccagcccccacccaagccgcatttctaatgaaggctttgttttgtaagaatttttaaatgctttaactagaaattggcaaactgcaacatctgccaatttctagcagtatatatcctgccaccatgacccatttcaagctagcatcgtgatgtctctgaa

SEQ ID NO: 95081 - DNA, 1070 bp, Homo sapiens
ttgcctacgctagactgcaagctccacgtgagaagagactgcttgacttgttctcagaaagtatttatgggatttatagatgcagttgtacagaatagaaagctgctcacaatcctcttcttcacctttcctcctagaaaactcctacacagccttcaagacccaaacacatatgggcagagttggttgctcctcctttgagctcgctactcttgcaccttatataaacctcttttatagccccaatacactgtgtttccctcattttactgcgggtcagagctttcccctgggttgagaacccgcaaggggatctgacctgtctgagctatttatggatccccagagctcctgggacagatgctcggctgacgttgtcaggattgaaatgacctgttactgctttaatgctccctctcaagtaggtggtttgcatttctgggacctttggcacctcagttgaggctctctggttgtgagcaagaaaactcaactattaactaaaggtaaagtaaaaaaaaaaaaaaaaaaagtgatgttggggatggaggcaaggggctagagccccaaccaaacctgcaggaaggaaaagccagggtagccccagctccttggcgcccgctgtgcttgggatccctggctgcacctcctaatgcactcggctccatcagctcctggctgcggtcctgcttcccaaatctgcagagcaggactcaagctggccctgctagggttggggcctcccttggagccgtcaaccatccaatagggcccagaatgaggtagagagatgagcccaagggtggggtaaggggctgaggttttgggggtgggcagtggcgaggggtccctggagaagaggggaacttgtgagcctggggccacacccaaagtgcctccttcactgggcccagcccccacccaagcygcatttctaatgaaggctttgttttgtaagaatttttaaatgctttaactagaaattggcaaactgcaacatctgccaatttctagcagtatatatcctgccaccatgacccatttcaagctagcatcgtgatgtctctgaa

SEQ ID NO: 95082 - DNA, 565 bp, Homo sapiens
ctcacaggatagctaagaggttcccacagagatgtaggaaagtgtcaggcaccacacaggagtacagggcttccggaagggggctctgtccagtctgtcttgttcactgtggtgcctgtggcacratgtcttgcacgtcatagcatgctgtcagtaaggaaaagaacaaacagtggatgaatcactaattgtggccaaacatgactgttcttcttctattccttagtatccggaggaaaaggaagctgtgtgtacttcatttgctcgagcaagtgcaccagcttttactactgttgtcaattctgagaaaccgttttattttcttcccagctgtgtttgctttatagtaattatgccgcagtcttttcttattgtctcactgtattgacgaagcagtccttggcaaaatcatctaagagacttaacttttatacccctgccctgagagcagaaagttctctggggctgctcacctggctggcctctgtcaggagtcactccatttcccttatgtcataaattctgtgctggtgtaatctgtgtctcatctactgcagcctgttca

SEQ ID NO: 95083 - DNA, 1073 bp, Homo sapiens
ctactatctgtatcctttgtaatatcctttataataaacaagtacataattgtttccctgagttctgcaagcaactccagcaaattaatcgaacccaaagagggagtcgtgggaaccccaacttgaagcttgttggtcagaagtttggaggcctggacttgtgactggtgtctgaagcaggaggagggtaggggagaagtcctgtgggactgagccctcaccctgtgggatctgacgctgcttccaggtagacagaagaggtcagataagagatctgaaaatgaagagatcgcatctgctctgacaaaagggcatatgagatggttttgcctgggccctaaatccaaaaagcattttaaccaatcaacccttagatacagggtgtccttagaggacacccagctggtgtctgctgcagaattgattgcttatttgttggtggrgagaaacccttcacattcggacacagaagtcttttgtctgtattgattgtggtgttgagtaacagaatagacaaacacactttgagtttatggggttttttcacccacagaggctcataaattcttacttaccttccctcccaggccttccctcccatcaaagttccagactcatcacagcctccccagagcctaagccagagatcctgaaagtcaggtcctgccttcctctggcctaagctggagatcctgaaagtcatggtcctgccatgaccatgataaaaggtcatggcctttttatctcaccaagtgtggtgcctgctccttcacatgcttggagaaggctatgaccaggactgctctctgacctcttgtcctcttgctatcctcaacttctcttcagcaacccacatccagcttgccttttaatactgcaataaggtcgatctcgtaaaatcatgggcttctagaaactttgctagcataatgaaacttagagatgatctagtctaccctcttagtttatcagagaaattatgaggcttcctgaaaacgccagcccacactgatccctaaccctccacactctcttttgtgtggattttattgttgttgttgttgataccatgc

SEQ ID NO: 95084 - DNA, 1073 bp, Homo sapiens
ctactatctgtatcctttgtaatatcctttataataaacaagtacataattgtttccctgagttctgcaagcaactccagcaaattaatcgaacccaaagagggagtcgtgggaaccccaacttgaagcttgttggtcagaagtttggaggcctggacttgtgactggtgtctgaagcaggaggagggtaggggagaagtcctgtgggactgagccctcaccctgtgggatctgacgctgcttccaggtagacagaagaggtcagataagagatctgaaaatgaagagatcgcatctgctctgacaaaagggcatatgagatggttttgcctgggccctaaatccaaaaagcattttaaccaatcaacccttagatacagggtgtccttagaggacacccagctggtgtctgctgcagaattgattgcttatttgttggtggggagaaacccttcacattcggacacagaagtcttttgtctgtattgattgtggtgttgagtaacagaatagacaaacacastttgagtttatggggttttttcacccacagaggctcataaattcttacttaccttccctcccaggccttccctcccatcaaagttccagactcatcacagcctccccagagcctaagccagagatcctgaaagtcaggtcctgccttcctctggcctaagctggagatcctgaaagtcatggtcctgccatgaccatgataaaaggtcatggcctttttatctcaccaagtgtggtgcctgctccttcacatgcttggagaaggctatgaccaggactgctctctgacctcttgtcctcttgctatcctcaacttctcttcagcaacccacatccagcttgccttttaatactgcaataaggtcgatctcgtaaaatcatgggcttctagaaactttgctagcataatgaaacttagagatgatctagtctaccctcttagtttatcagagaaattatgaggcttcctgaaaacgccagcccacactgatccctaaccctccacactctcttttgtgtggattttattgttgttgttgttgataccatgc

SEQ ID NO: 95085 - DNA, 622 bp, Homo sapiens
gatgtccagcacatctctctacctctcagggccttggtcaccttctctggataataaaggtgggatatgccagataatctctaaggcctcagacagcttaggacttaaggaattcatggagcattgcttgctctgagtctagcaccatgcatgagatacagggaagaaggaggcagggctgccttccctcaggaagctctgccaactggtcattgccatttgcagagtcatctgacctgcggaggtgtgagtagaggggacagaatgagacttaggagtcagccagatyttggttcaccaccctgccctgcctcttcaagctatacaggattgggcagatcgcataacctctgaaaacctcagttctgtcaactacaaagaaggatcaccacggcccctctccaaggttgcattgaggaccacatgagccaacacatgccgagtggttcctatcagcgctgcatgtaccatgaatgtcacttcctttccttttgccttatccaccaactaacagagagaacacctgctgtctgccagaaaactcctgtcattggtcttgattcacagcaggtcccccacctactccactctccagccctgatctatgctttcaagccctgct

SEQ ID NO: 95086 - DNA, 1043 bp, Homo sapiens
tgatttttatatacaactaaagaacaaaaccctccccaattaaactacacccttctgttttcatcatacttagatttttttaaactttatatttataaaagttatttaggttctttaaatagagagctgtatcacctatctcacttgtgaatacataaaagaaaaaatatgcaaaataattgggttcagatactccttaagcatcttcctattcagcaactaaatcttctgaatcactttttgattcaaaatcacgtttgtccttgtttgacacacaatgctgtcctcagtgcctctgtgtaatgcaacattccttaaaagaacgctttgctattgtcttgggattttctttccagctgcttgtacctgttctggaaattctgattataatgcacatgatgtgacaactaccttatgactgctgccaggccagtggtgattttaacaaatatcccaatttcagaggtgttaaaatgtggaggggaaatgacattaataatacactttttcaaaattagaaccattgtcatctggctcccaaataacaaagaacaaaacagataaaagttctgtcctcgaggagctgcaaggctaatgatttaggaagataataaacaaacaaataagggttgtatcagtgggtgatgagtgggcgatgagtgcattaaagtaaaataagcagagtgggagaaagaggaagaagaggaagaggaggacgggaaggaggagaggagaatgatgaagaggacagaggaggagggagagttggggaagaaagtggagaagggggaggggtaggaagagaagagaatgaagaggggaggaaaggaggagaaagagaaagagaagagaatgatgggaaggtgctattgaggtggggtattgtcaaccaaaaacaaatcagagaaaaaatatctctagatatgttgcaattattagggwattagaaaagagaattctaaccgccccctcgtcgcccactacacacacacacacacacacacacacacacacacacacacacacagctataaccagccaca

SEQ ID NO: 95087 - DNA, 634 bp, Homo sapiens
ggcaggtggtgaggggagcatataacatgaagggggaatttaactggatttctctttctggtcagcctcctagaacaagctgttctacacctggatgcttgcttaaacttaaggatgagcaaagtttaggagcctgtaggaaggagaagcctgactaaagtttggctgagccaagttcatcggtactagcatcayttgcccacccgcttctgagttgcacgaccttgggttacttacttttccactccaagattcaattttcctttttttccaaaatgtggacaataactggtccctgcctcacagcatggtaaggaatagatgaaaccctttgcaaagaaccatcgacctctatttcctcaggcctagaagagcacccaaggacatagcaagtccctgtctactgtagctgccatccttgtatacctgcataaaatggggctgggtgaggctgcttgtgcttatgtttggaaagttctctgagtctgcagcatgaaagcaaggctgtccccactctctctgagcttgagacccccgctcactcccctgcaatgacaacctctcaaatgcaagcttggtaaatttgttctcagccacaaaggaaatggattacaaagcttaattaaagaggaca

SEQ ID NO: 95088 - DNA, 634 bp, Homo sapiens
ggcaggtggtgaggggagcatataacatgaagggggaatttaactggatttctctttctggtcagcctcctagaacaagctgttctacacctggatgcttgcttaaacttaaggatgagcaaagtttaggagcctgtaggaaggagaagcctgactaaagtttggctgagccaagttcatcggtactagcatcatttgcccacccgcttctgagttgcacgaccttgggttacttacttttccactccragattcaattttcctttttttccaaaatgtggacaataactggtccctgcctcacagcatggtaaggaatagatgaaaccctttgcaaagaaccatcgacctctatttcctcaggcctagaagagcacccaaggacatagcaagtccctgtctactgtagctgccatccttgtatacctgcataaaatggggctgggtgaggctgcttgtgcttatgtttggaaagttctctgagtctgcagcatgaaagcaaggctgtccccactctctctgagcttgagacccccgctcactcccctgcaatgacaacctctcaaatgcaagcttggtaaatttgttctcagccacaaaggaaatggattacaaagcttaattaaagaggaca

SEQ ID NO: 95089 - DNA, 634 bp, Homo sapiens
ggcaggtggtgaggggagcatataacatgaagggggaatttaactggatttctctttctggtcagcctcctagaacaagctgttctacacctggatgcttgcttaaacttaaggatgagcaaagtttaggagcctgtaggaaggagaagcctgactaaagtttggctgagccaagttcatcggtactagcatcatttgcccacccgcttctgagttgcacgaccttgggttacttacttttccactccaagattcaattttcctttttttccaaaatgtggacaataactggtccctgcctcacagcatggtaaggaatagatgaaaccctttgcaaagaaccatcgacctctatttcctcaggcctagaagagcacccaaggacatagcaagtccctgtctactgtagctgccatccttgtatacctgcataaaatggggctgggtgaggcygcttgtgcttatgtttggaaagttctctgagtctgcagcatgaaagcaaggctgtccccactctctctgagcttgagacccccgctcactcccctgcaatgacaacctctcaaatgcaagcttggtaaatttgttctcagccacaaaggaaatggattacaaagcttaattaaagaggaca

SEQ ID NO: 95090 - DNA, 634 bp, Homo sapiens
ggcaggtggtgaggggagcatataacatgaagggggaatttaactggatttctctttctggtcagcctcctagaacaagctgttctacacctggatgcttgcttaaacttaaggatgagcaaagtttaggagcctgtaggaaggagaagcctgactaaagtttggctgagccaagttcatcggtactagcatcatttgcccacccgcttctgagttgcacgaccttgggttacttacttttccactccaagattcaattttcctttttttccaaaatgtggacaataactggtccctgcctcacagcatggtaaggaatagatgaaaccctttgcaaagaaccatcgacctctatttcctcaggcctagaagagcacccaaggacatagcaagtccctgtctactgtagctgccatccttgtatacctgcataaaatggggctgggtgaggctgcttgtgcttatgtttggaaagttctctgagtctgcagcatgaaagcaaggctgtccccactctctctgagcttgagacccccgctcactcccctgcaatgacaacctctcaaaygcaagcttggtaaatttgttctcagccacaaaggaaatggattacaaagcttaattaaagaggaca

SEQ ID NO: 95091 - DNA, 865 bp, Homo sapiens
cggctctttgggaggccaaggcaggcggctgggaggtggttgtagcgagccgagatcacgccactgcactccagcctgggcaccattgagcactgagtgaacgaggctccgtctgcaatcccggcacctcgggaggccgaggctggcggatcactcacggttaggagctggagaccagcccggccaacacagcgaaaccccgtctccaccaaaaaaatatgaaaaccagtcaggcgtggcgatgcrcgcctgcaatcgcaggcactcggcaggctgaggcaggagaatcaggcaggggcgttgcagtgagccgagatggcagcagtacagtccagcttcggctaggcatcagagggagaccgtggaaagagggagagggagagggagagggagaggtgaattcttttttataattacattttaaaaagtcacagtgtcaacttgatttttgattggttttaatctcacagtaccttttctggagtagggttataccccacagtagctgcaaattctgcagagccccaattctactgatcaggatgaaaagaaagaaggctgctgcctccacagaagcccagtaactatgactcgactcttgaatatatctcctatcatttattgtttttctacattaggcaataaaatttgtagtaacactgagtttctaaggctttttgatgaagggcacaagctttggagttggatccttctagatgcaaatccagctctgataaaactagccatgtgaaccaattgaaaaaaatttcctcaaacctcagtttctttatctgtaaaatgatgacagtagtgcctgcctcagagggttattgtgaagacagaataggtactatatagaaagcac

SEQ ID NO: 95092 - DNA, 2402 bp, Homo sapiens
cagggagacatatcatgaggtccctacctctgggagttcacagtctaccggaggaggcaggtacaaaacactgagaatactaataacagtataaataaaaagatgcaggccgggcacggtggctcatgcctgtaatcccagcactgggaggtcgaggcgggtggatcacctgaggtcaggagttcgagtccagtctgataaacatagtgaaamcccatctctactaaaaaaaaaaaaaaaaaaaaaaaaaaaaaaaaaaaaaaaaataccaaaaaaatagccgggcatggtggcaggcacctgtaatcccaactactcaggaggctgaagcaggagaatcacttgagcctgggaggtggaggttgcagtgagttgagatcacaccattgcactccagcctgggcaacaagagcaaaactccttctccaaaaaaaaaaaaaaaaaaaaaaaaagatgcagtggtaggcagggtggaagggaaagctaaacgagcagaatcgcttgcacaggtggcagggaggcatgagcctagacctgttatgcaggacaacttggccacactctgcagattcagtgttagcagccacatgagccctaatttcagaaggagaccatatccagccaatcaatgaagcaggccaggtagcaaggccagccagtggctgaacacctgagagctgtcagttctagtctcatttcagaacacctgtctctgcaggcagcaagctccaggagcagcccaaagactggcagtgggagctcccaggttccaaccaactgggctgggattttgctaggaatgaggaggaagtaagggaaggcagtttgccagacttagcatgaggcaagaaaaccataccattcagaacctgcctctacttcctgtgggactttggcaataacttacacccacttcagttttctcatctgggaaactggatacttttattgcctctgccataagattattgtttgttttaaatgaaacggtgtatgaagagcattttctacagtgtcggacacaaagtgagcacatttcattcatttaactgcaatctgttgagtacctgctgtacaccaagtactggactaaatgctgcaaaatgcacaagtttgcacaccagtttgttttctggacaaatggaaataacagttgttcttcttatggaggagtattattagcagtgggtgtagcgtgactcatctttattataaatgattaagaaggtctccatgccctttgttccctccactcagcctccaaaagtgcctactttccattgcatgttactgtcttccttcatctggcagttgggaagggctcttttattcattgctattcatttttactcactctaccatcccactgagcctgacccaagtgtatgctttggcctgaattagatcaagcttggacagagacccatacccttgaacagagtgactctggtgggagatcagagagtagagtagggggctgcaggagtggctggaggagaggctgctgccttccaagcgcccagagttcacctctgcactgctggatcccaacccgagtggagcacatggaggctccaggggtagcaggagaccccaacagtcatactgagctccagcccaaatctgagaacagtgctgcaccctgagtccctgcagacccgaggaagagaagtgactaccacacatttgctgggatttgtcagtagtaggtcggctgcaggttactgtggaaggcatttgtggccacaatagaggatgggatggatccatgctttataggatatgacacatatacaatttggaccctatttaagaaagaaaatacaaaattaggtttaaaatgatattttaaaatgtgaaaaaagttgaataaaacacaccacaatatcagaaaactaacaccatatttttattaatgaaacacttctacaatacattttttgtcttaaacttttggcagcataatctttgataagttctccacatgacaagaattttgcactattatcctatagaaagaacagaaagataattaaaagaatagaaagaataattagataataacagcctccctgctgtcaaaagagaaggagatgaccaggtttaattaaacaagataattaagtaattaattatcttgtttctctctaattgatcaaaacaattttattaatggtttatagagagagaagacatttcttttagcttcacaatcaacattggtaatgccatataaatgtttaggattatagtcaaaatttgttaaatcttctttcacatgcacttcacgaatgagctgtgacagatgcccttactgtttgtggtaatagctacaagtttgtgccttaaaagcgggaattacgataaactctctttcccacaattcgcttctcaaaagacac

SEQ ID NO: 95093 - DNA, 2402 bp, Homo sapiens
cagggagacatatcatgaggtccctacctctgggagttcacagtctaccggaggaggcaggtacaaaacactgagaatactaataacagtataaataaaaagatgcaggccgggcacggtggctcatgcctgtaatcccagcactgggaggtcgaggcgggtggatcacctgaggtcaggagttcgagtccagtctgataaacatagtgaaaacccatctctactaaaaaaaaaaaaaaaaaaaaaaaaaaaaaaaaaaaaaaaaataccaaaaaaatagccgggcatggtggcaggcacctgtaatcccaactactcaggaggctgaagcaggagaatcacttgagcctgggaggtggaggttgcagtgagttgagatcacaccattgcactccagcctgggcaacaagagcaaaactccttctccaaaaaaaaaaaaaaaaaaaaaaaaagatgcagtggtaggcagggtggaagggaaagctaaacgagcagaatcgcttgcacaggtggcagggaggcatgagcctagacctgttatgcaggacaacttggccacactctgcagattcagtgttagcagccacatgagccctaatttcagaaggagaccatatccagccaatcaatgaagcaggccaggtagcaaggccagccagtggctgaacacctgagagctgtcagttctagtctcatttcagaacacctgtctctgcaggcagcaagctccaggagcagcccaaagactggcagtgggagctcccaggttccaaccaactgggctgggattttgctaggaatgaggaggaagtaagggaaggcagtttgccagacttagcatgaggcaagaaaaccataccattcagaacctgcctctacttcctgtgggactttggcaataacttacacccacttcagttttctcatctgggaaactggatacttttattgcctctgccataagattattgtttgttttaaatgaaacggtgtatgaagagcattttctacagtgtcggacacaaagtgagcacatttcattcatttaactgcaatctgttgagtacctgctgtacaccaagtactggactaaatgctgcaaaatgcacaagtttgcacaccagtttgttttctggacaaatggaaataacagttgttcttcttatggaggagtattattagcagtgggtgtagcgtgactcatctttattataaatgattaagaaggtctccatgccctttgttccctccactcagcctccaaaagtgcctactttccattgcatgttactgtcttccttcatctggcagttgggaagggctcttttattcattgctattcatttttactcactctaccatcccactgagcctgacccaagtgtatgctttggcctgaattagatcaagcttggacagagacccatacccttgaacagagtgactctggtgggagatcagagagtagagtagggggctgcaggagtggctggaggagaggctgctgccttccaagcgcccagarttcacctctgcactgctggatcccaacccgagtggagcacatggaggctccaggggtagcaggagaccccaacagtcatactgagctccagcccaaatctgagaacagtgctgcaccctgagtccctgcagacccgaggaagagaagtgactaccacacatttgctgggatttgtcagtagtaggtcggctgcaggttactgtggaaggcatttgtggccacaatagaggatgggatggatccatgctttataggatatgacacatatacaatttggaccctatttaagaaagaaaatacaaaattaggtttaaaatgatattttaaaatgtgaaaaaagttgaataaaacacaccacaatatcagaaaactaacaccatatttttattaatgaaacacttctacaatacattttttgtcttaaacttttggcagcataatctttgataagttctccacatgacaagaattttgcactattatcctatagaaagaacagaaagataattaaaagaatagaaagaataattagataataacagcctccctgctgtcaaaagagaaggagatgaccaggtttaattaaacaagataattaagtaattaattatcttgtttctctctaattgatcaaaacaattttattaatggtttatagagagagaagacatttcttttagcttcacaatcaacattggtaatgccatataaatgtttaggattatagtcaaaatttgttaaatcttctttcacatgcacttcacgaatgagctgtgacagatgcccttactgtttgtggtaatagctacaagtttgtgccttaaaagcgggaattacgataaactctctttcccacaattcgcttctcaaaagacac

SEQ ID NO: 95094 - DNA, 2694 bp, Homo sapiens
aaaatccacagtctcaaaataaaaatacagtagtcccacaaagttttgacttttctccatgatagtgacttagatgcatttgttgaaatattgaagtatgaaattatttggaaaaacaatttttttattgctccccctgctttgtggcttccctatgtggagtttaccccacatgttggatgctgtatctccagcaacaaagcacccgccaggaatcttggagctcactcaaatctatgcctttatctcacaaaggagaataaggcccagagagagataatgacttggccaagatcacaccataatctggcagctggaacagtacaaatagtcagatctccaagttcctgatccagggttctaactgcaattttgtttttccatctggcttgccagaaagttagccagagttcttttgaaagaccgggcctccctcacaagcttctagaagagacttctggtcttctgaccagcagacagcccttcagccttctgctgtgagccttaatgtcttgcccaccccaaagacacctggtttacatatttgctccctgagacttggcttccggctctggcaaaactaagaagtacacgtttacctgctcaaagcccaaattgcctgtctgtatcattaaactttcggtaggagccctgggccaatgaccattgcccagaaatggttgggacttggggagagtagtagcgggctgggatccaggacagctacacagtgagggggagtcttctgggagaggctgggaagcaggtaaatgctgggcatccttcccgatgccacctgggtgccattgtccttggaaagcatctccagcccaacctctcttgactcatacattcagccaagagacaaattgcctatttgttgcttttctctccactctcaatggttcagtgacagccattagaccctctgctggggtcatttcatggccaaatcctccccatcattcagatatccttcaaatattattcagatatgcttcaagcatcactgtaacaggatacttctgaaagagtggcaccagccctgccctacttggtcactctctaccccattgccttagtttcatttcttcatgtcacttctcactctctgaaatttcttgaccctatgtgtgaagaggcgatgcagttctgttgttaagatcttagtatctggggtcagtgagtcaggctcactcctcactggttaccaactcgtctgaatccagtgagataaaacacccacacaagttacatgaatcagatgtatttcttacagataagaagcaagggacaacagaaagctacaattcaaggtgagccaatcctcaagacccaaaaaatatgcccagggtggatggagttttaactgtatgtggcccagttacactgtgcagctgagggaccccaaaaggcagcccacccttgattatatatcccagggtcacacgactcactgagatgaatgcattgaagtacattctgtttctaggagaggactggaacagagcctgagttgttccagccagtccctccctatttctggatattgcattcccagcatattctatagttattctttagtacaagagaaaagaggaagaaattggatcagtccaagaccaccagagaactgtcctgcccaggctatctaggtttaaatcctgcttccactacttgttaactaggtaatctcaagaaagttatctgacctcaatctctatctcagcttcccatctacaaacggggcgaaaataacaacacctacctcccaagctgggcctgaagattaagttaactcatcagaagcctttagaacagtgtctggcacattgttaagagctcagtaaatgttagacattgtcattgcttggtttttgtattctaagttgtctctttccaccctcatgtaatttccctggagacakaggatcctgcctgccttgcgcacctctgtctccagcatccacaaaaggacctgacatgttgttagcactccactgatgtttatcaaataaatgaaggaatagtccttctaagtcttccctctgcctccatattcctcctctgcattctattcaagaatgaacccctaccttctccctaggtataattactcgccccttcctctggtccttaagactttaaccataattttttattctcttctattttgttttttgtatacacactatgagctccttgtgggcagggaccatgtgttatttacctctctatcccccatgttgactggcacatgaaaatttcctatgtagggggaaggagaaatatcccaaatgtaggtctgatcatagtacacttccatgagatcaaccatggctcctcatcacatgcatgatgaagattcatattcccaagagtgtcctgtgcatccatggagtggcctcaaataccattgtcactcttcttaccttctgtgctcctctcccactgcatgtacataaacatcaggtaggctgtgcttctctcctttctttaagcattctcagtacttcccagctgtgttctttttgtcttgttttatctggcctaggatgtcttttacccacctcttcccttagaatcaatgctgcccttcaaatcactaatctgatcctaccttcttgattacctccatgtttagaattaatcttccctattgtctatatttcaagtcattcttgacttatagtt

SEQ ID NO: 95095 - DNA, 1755 bp, Homo sapiens
tcaaagtcacatgaagttgtgaatacatactattaaatgcatattttgcattcgatgaacagtgcatattttggccactgttagagcaaggggcaagggtatggtttggaggagcagtttctatggcttaatacccataagaccctattagttgcctactaagtatccattcacccattctatgtttcaatttattcctaacaggtaaggttcctgttgcattttacagattaataattcgagattcaaagaagtaatcctacttattcccaaccagattgctagttaaaagcctgagacaggattctaatcccaggtttcccaagaatccgagttcttaaccatagtgtttttgattagttaattgtcatctactcatttctccaagctctgcccttggcttttgcttttcatttccagctaagccttggagtacagcaacctacaagaagcaaccttactctggctggcatttactctgtttgttcattctctcccctagagcagtagcctcaggagataatgtcagaaaaaacaaattgttggcaccaggatctgcataccccaattaacaaaatgatgctttccacccaccctcctgcaaatatttgaagcaggaaactgcccctctcacaacctgggtcagcctcctaccagccattcttaagacaaaagtctttttccttttagtgggtgaactttctccaggagttctttctggcacgcctagctgtggggtctaaggcttggacccgtctctgatcaccctatcaaggccttaagtaaacagtacaatattgcctcttcagatatttacccctggtacaaccagctgccagcaacaagattaatatttaaccacaaggtagattcacccattcttactggctctggatctcagcgtggataggattatagactataattcctaggccattttttagattttccttccagcatgtctgttctaggagtagctgtatatataaggccaaagtaaagaggccatgmtacctcctaccctgacttctatttgaagatgtattccttgtgctgaaccacaggttaggagttatcacaaaccattttcagtaccagaagtcaaatgcagatcaaaaagtctagaattggaggcaatttccaatgagaaaaatgtgcaggaagaaactaagattaagtgctacatattcaaaacggtctaataaacataaagcatgaaatgctaattaatgttagttactgtttaacatgcatgccatctcttttaatcctcataacaaccttataaggaaaatatctactatatatttcatacaaagcaaactatttacataacattccaagttttttcccattacccttattttgttctttctgcctggaattcttatgttcctgatctttgatgaactcatccatttcctaaggtctagttcaaatgtctcctttaatatctacatcaaatatacaagtgtataagaagaagactgttttacaagaagatattagaatttaattctgagttggagtagtggagcagcattgaacatagtaaagcagaagaactataattcaacagtaaataatccctgggtcttttcctgtaaaccagcacttggcctacagtgcaaggccaaatagcacactgatgattgtcaaagataagaataaaattgcttgacccaccactggactataaatgcctaggaagcaacccagagcatgtgagcaatgactccatttccagaatatttt

SEQ ID NO: 95096 - DNA, 1472 bp, Homo sapiens
ccttttttccccttcaaatgtactgttctgcctatgtcttctcaggcctattgagactccagaccctaggtgagacagttgcattcccagagaaatgtatggctcctgctgaccaactttctgagtccagtggattcgttcaagggagcacgaaggtagctggatcctctttgggagagggctgtgtctgggcaggagcgggaactcacaggttctgatcagatccagcagtgatagacagggagatatttagttgtagagtaatgtggttggtggagtagattcttttaaaagaattaatgtaaccccgcttggcaaagtgagaaaagctgtatttattgagggccaggcaaaaggcttctgagaagtcactgcagctcctcaggagtgattcagaaaggaggacagaaggagagcccttggatgaggtctgttattgagagctgtaaaggaagctgaaccccwtgtccagcataacctacctaaagcaagtataatgattcgtggtcatggtgaagcctgggcaataatttcatgcagcaaagcagtggtttgacacttttgatgaatgcttcagcatttgtcttctctcctgatgtgctggcaaaaactcatcacaagtaatttttcagtatggaataggaaataccaaataaatcagccagtgaataaggatcctaggaaaactagcaggagctcctccacccaaggctgaactggaagccaagagtctgaaagacagttgcaaatgctagggtaataatatagactttaaagagaacacggagatgtgggtaataatgaagtaactctgttgccaggtcaacagacatggagcttctctgttcagattccctttcaacctcaggctcaaatcatccatcactgtgaacttagactgagtgaaagaggagacgacaacccggagaatttgtggctgtgggaagcctcctcttacaacgcttaaaaatgatgaagaccctgctgttggtagagtgaagagagggccttctttgcgtgaaaaacctatccatcacaatggttggttggtcagatgtgattctctattaccgtttaatgttgcagctaatcttctctcttctgctcctcatcacattagtgtcacgcatggtcttccaaatttggaaacaacgttggacaacttaacctcaggagatgaaagattttcaaacttagtggacatctgcaactttcagaagaagagaacaaataatggactaaaagggaaaaggacatgtacttcattattgcctcttggcatttaatagctggctctggtttcattcacagaaccaatgatctccacaccatcaggcataaaagcagacaacataaagatacagcagatttccttgcctctgcctctgcatatttttgtcattgtctacctaaaacttctcattttgtatagttttggtaaataacctttactgtacatactctttataatg

SEQ ID NO: 95097 - DNA, 1014 bp, Homo sapiens
ggatcctagtctgtcatgtwttgcttcaggaactcgactgtatttgaagttcaaatgtattaacaccatttcagtggcagcagtgtacacaattcattcttccatctatcatccaccttaagacttatacaactttataacgtagcaaaagacagaacttgatttccattccttgtaattttatttgtatttcatgcagtaaaattggaccagtgattgtgtttgacctggcctatttattgtgttgaaactgaattattactaccttgaataaaccacttattaccaccctgaataaataatcttcccattacgagagactctgagacctagaagtattcttttcagcttattcataactcagaattctattttgatattaccaagaaaatacatgtgcatgtgtatacacacacacacacacacacacacacacacacaaagggaagaaaagtttttattcagttcacattaatagattttttttaagattgctttgaaaatactctagtttctcgagttatcaaaaacataataataattgggttattaagaaatatcttcacaatattttattatataatacaaagtaccaaaaggcacaagtgagaaaataaaaatcaccttagttataccggagataaccactattatatttatgtatgatttttttccctcgtatatgtgtattagggtaatactgtatacatggttttatattctgccttttgtgtctcattttatatccttaaaatcagtttaaaataaaatttactaagcttttggaggcccttaaaaagggatgtcattatcttgtcttttatattattgagacttaaaaatatgcctttaaaatatgatcctaagtcagttgtaattttaagttatggcattaccaaatatattatgcaaggaaatagtgcattcattcattattatacattagcctatggaaaatttttttttcagactttctacataagctttgaaactacaaaatggaaatatagtttt

SEQ ID NO: 95098 - DNA, 1673 bp, Homo sapiens
gaaaagatcagtaaaactagagtttgttttctgaaatgatcaacatatttgacaaatgctaagttatctatttacctgacataaaaacagcatacttctaggaaaaagacataagccacctttttcagaaggagatccagtccccttctattttgtaaagtgactactgccaaggactccattttattttgtatgatgacagtactttgggtaatgtcttccaagctgtctgaaagattctcggacaagcgttggtaataggatagggaagttgcaaggatgcgagctcctgttcctagtccgttattcctagtcctaccaaaaggggtatgagttgatggctcatttgtgttgggtgtttgcagttaaagaaataatgagggattgatttttgggagctatattaatcttgggggctaaataaacaagtatactggttccagttcaattggctggtaagcataagtaggaactagttgcacacaggaaaaaggctccttgtttttcaagacagaaattgttctgtatggtgaacatatgggtcagctctttgttttcgccttcccaagtggttcagatccctgctaaagtggccaagagaaaatatgaacacaactaatgggcttgccttgacagtacttagactatatatcctttaaagttttgatatctaaggatggtttccattaaaactgtacaggttttctaaatgatgcagtttgggtaaatgcatagcttacatgattgtgtgaggggttaatttccagggcatagttgcattgatgacttttcaagtctgatcaaaatgttgacttttcttaaaacaaagtggtgactagaattttagttcagtgtttgttgatattgggcccaaaatgggtttccgtgaggatgcaaccccagaaaggttgctctgagaggaatggagaaggtttactgctcatcttgccattgtaggttatttttttcaagggcttaagatcaggctgggattgggatggtaatgtgtttgaataataatggagacaaacaatgccaacagtcctttaccagagctgggctggtggtatttaacagtctttgcattaaatttaaagttcttaataaatacccagaatccattaattgccagagggataaagtgaggccccactgtaaaattaagctaattcccaatatgcatggtcccagtatacacaggctgtgagtgaccattaagaaacaacaacaaaaaatacttgttttatgtgttttttttkttgttgttgttgttctataaaatgggaacttcagggggtggatacctatgctgtaaggaatgcttgttataaaaatgaattaaaacactttgcttaattgttacaaaagaagggattccacctatttggaagaatgcaactgaattgtaaaaatataaaaattgctactattatccagcttacagtaactatgcaacaaagacaccaaggaaagttagtaggcatttacctatcttttggctgtcttttaaacaggtacttcaggtcttcttcaggttcacagatgtagtggctgatgggagcttcagattccaatggtctgcaagacagagaaaattctaaggaggccttagtactagaccttaaaacctctacctggggcatccactttggataggttgaggtctggagctg

SEQ ID NO: 95099 - DNA, 766 bp, Homo sapiens
ttggagatttaactgtcattttctctaggtgaagaaaccctaaaatgtttttggttttataagggctattccttctaactccttagttagtggggaggtggtaaccattaccactggactgataatccccaaggccctctaatggatacattcttcagtgtgttgtcagggggccatacttggtttctgttgtttttgtcttctggacttatcctgaacttccacatcaayagggcagaaatagatgaaatcctcagaaacatcttgagcatgtttgtattgaaagtttggagtcacagaaacaatctgaaagaaaatttaagttcagagatactgttcatcacattacatcaacacacttaattcccttgccttctgtttgacacattctatcttagatctgtaggtctaggatagcactataatagacactatagacatattcagattcctccaaatcattgataaatgtaaagaatccccaaaagaattactttctttcttcaagggacagaatattctagtctagtgtttctcaaagtgtatttcctaggatcttagtctcatgaaaggctccacccgctcctcacacacatgattccatggccaataattgagaaaataacatataattattacttagagcttcatagtataggatactattaaaggctctgagaagtcttatttattgctatataattaactatattattagctattattaactatacaattaactatattaaccatgtcttttattttc

SEQ ID NO: 95100 - DNA, 719 bp, Homo sapiens
cttccttgcttcttccagtttctgatagccccgagcattccttgacttgtggctgcacaactccactctctgactccatcttcacatggccgcctcctctgtgtgtctgtgtgtgtcttcacatggcattctcctttatctgtgtctgtgtccaaatttacctgttgtaaggacacaagtcatatcagrctagggctgacccttatgatcttatcttaactggattacatctgcaaaaaccctatttccaaatatggtcaaattcacaggtactggaggttaggacttcaacattacatttgtaggaacgtggttcatttcataatgggaccttatctgaaatccaacccacttgagaacacaaagtggagtgctattctctgtaacacgtagcccagcacagcataactctctttgtttctcctgctcactctggttttggttggcttgacaacatgtgaggaaggaaaatgagacaggcagaacatgttcagcccccttgaaatagacttaggacataattttcaagtgatcacaagctattcatgtaaccattacatagaggacaataatagagagcaagcacagtctgcagagctctcgcccctgcattccctcatataattctaataattactttatgatataaatatatctgtcgccatttggcagatggggagcatgagacccagagagatgaagtgattcccgcaggtcac

SEQ ID NO: 95101 - DNA, 2318 bp, Homo sapiens
aactgaggggcaaaaacatttagacaacttgcccaagatcacacagctagtaagtggtagaactgggatttgaccctacgctcctctaactcaaaataagagaatactgtgagatgacttatcgtcaagtgctaggttgcatgggccaaagaagatgcaatggaataaatgtaggaaggccaagatggggcctctgggagctagggtgtgtcaggaatggggcagcctgcagcagatgctcccatcccaaatccctttatgacctgtgcccgttacaaccacctgttcccatcgaagggctcaggctttgttcatctcctcttctggtgtagttagggaggctgggagggaaagctggttcagatttctacattcaactcaaactgctaccctctctgaggctagctttcaagtgcctgatgtcctgggccaatttctctgtgtgtctcaaccccaaaaacacagctcctcctgagctgagagaagcccctctgctttgtgtggtggcctggtgcttctcatttcagaaccacaagaccccacactctcctggccttcccctccttccttcctacccttatgcttctattcacatcraagggatgaaaggaatttagcatgtttctgcttttattccgtggcagtaagaagagctggcttagctggctatagaagctttccagtctgctcaagccattactagtggaatagctccatcagaaatatcggatccatagataaaataaaagaagggcacatatgttctctgacttttttttttctcccagtggagaaattaagatggaaaagtttgtttctaagtctgtagtcctagttctcaagagtcaaagagctatggtatatggggtaggggtgggatgggactctcttgaaagaaaaattggataaatgaaggattttgtagggcccttaaaacaaatgcaggattgcccaggcatggtggctcatgcttgtaatcccagcactttgggaggctgaggtggatggatcacctgaggtgaggagtttgagaccagcgtgaccaacatagtaaaaccccatctctactaaaaatacaaaattagatgggcgtggtggcacatgcctgtaatcccagctacttgggaggctgaggtgggagaatcacttaaacccgggagatggaggttgcagtgagccgagatggcaccattggactccagcctgggcaataagagtgaaactccatctaaaaaagaaagaaatgcaggattgtgcttgaaggtttaactctttagattcacaggaagttgcccttcagctagtatcccccaatgattacatctcacataattatagtacaatataaaggccagaaaatttgacataggtacaatgtgtgttggggggttctatgccatttttgtttggttggtttttgttttgcactaactgttccttctatatgccattttattacatgtatgtattcgtggcaccaccattgcactcaagatgcaaaacacttccatcaccacaaagatctctcccatgtactcctttatagtcacacgcctgccccccaccatccctaacctctgataaccattgatttgttctctatctctatgattttgtactttaaaaggtacagtttctttaagaaaatagattggcacctctagttttcacataatctcaggcttgaagaagtggcttctccagcccagacttgtgtcccatacccaaattccctccacaatatccctgccaagtgtccatccagaccctaccacgtgcaaaccagaacctcctctgggattttaggagtaatgaagaatttgatataaacatttagagcaaggacattgtttccttccataaacccattccataattagcgaaattcttacctttagattaactactacaaaatggtttctcacgtgctgatttccccattacacactgttctgtcccaaacaagcatctactttttctgttccttttacctaatgagagggatgaggttcaagaagtctggaaggctcacagaaaattccagaaatcccctcctaattacagactaaatagcctggcctctagcagtaggcacccttcaaataaatgtggttcatgtgtggagtttcattcccaggctgattatgaatgtgttatctaaatgatatctatacttattgatccatgagatcatttgaactggaccccaattccccagcactcttttgtggttaggagagctatactggacactctattgcccatcgcaacaacatcagaaagtactgtcaacaaatataaagccaatccctcaagat

SEQ ID NO: 95102 - DNA, 2099 bp, Homo sapiens
ttattgaaatttaattgaaaatttgtcaggcatggtcactataggtctgaacatttattgaaacatttaaaataacttgataaaatataaataatttatatacagaaaataagaggctaaatcttctcatattaatatatagtaaacccctgcagatacaacctgcaccatgtaaagcctcacaaatttttaattgaacagtggggtttggaagamaccctatttgatttttaccttacaaatagttgacaaagatcatttgttttcttaaggataataaaaatgttaaaatgctatatttacttttgtaatgaactatttaatagaacataatcattttttcctctgaaataagtacttactaatgcctaaaagtttgctagctagcaatttgtatagccttgcaccctgcaaggttaatagtctactaagctgattcaacttttcttaaaataattgaataggatcattatggaccatttaatttaggcaataggcacgtggaagaggtagagaaaggattgaattcctcaatatgtaaccagaatattatttcatttcccctagtatggcttgtgcataggaaaaaggaacagatgtactatttaaaagttcacctgataaaaatgtgagttgattatttaatacacaaagtaaagtcgaaacccagcaatcccattactgggtatatacccaaaggattataaatcatgctgctataaagacacatgcacaagtatgtttattgcggcactattcacaatagcaaagacttggaaccaacccaaatgtccaacaatgatagactggattaaggaaatgtggcacatatacaccatggaatactatgcagccagaaaaaatgatgagttcatgtcctttgtagggacatggatgaagctggaaaccatcattctccgcaactatctcaaggacaaaaaaacaaacaccgcatgttctcactcataggtggaaattgaacaatgagagcacatggacacaggaaggggaacatcatacactggggactgttgtggggtgggggcaggggggagggatagcattaggagatatacctaatgttaaataacgagttgatgggtgcagcacaccaacatcgcacatgtatacatatgtaactaacctgcacattgtgtatatgtaccctaaaacttaaagcataataaaaaaagaaataatgtaaataaaacatacttaacttctgaattttctataccgtgaatgtttatatgtcatgaataaactcttagctgaagaatgttttaacaataattggctgaaaaacataaacttttttgagcgcgggggcaaagcatgcattaacaacattaatctgggatgatgtttctagagttttgcttaaaatattaaatgggtagtaaatccaagaaagcaaatcaaacaatgcttatttgtaataaaacaaaattcctttctatgggtcaagttgaattaaataaaaatccacatcttccataagagaaatctttaaaacaaataaaaattaagctgacacagatttaaaataaaaaaaatctttttttttttaacaaacctattcttagcatctggttatcacaatttttcgcattagtatggagctgttgctaacttttaaagcacttttctaattattattttcataattctgaagcatatagaaatttatagttttaaaagcaattttacatagattatctcacttgatccttttgaaatattttgtaaggttgttggggatgattctattatccctaatttacaaataaagaaaccatttaaatgaagttaaaggggttgtataaggtcatagctcaaaaatgacagagatgagacaagctcagattttctgattctatcactaacttttttttgtgactttgagagaagtctctctgtatctatttcctcaaccataaaataaggtgttagccaagataatccttatggtactgtacagttcaaacctcatgattctgtgattttttttgagttttaaactagtcttttcactatgatatatatattcaattaaaatttttttgtgagacaactgttgattttcacatccatttgta

SEQ ID NO: 95103 - DNA, 532 bp, Homo sapiens
gagttcagcccacctggaggaacgacacctgcccaccgagactgatggagacccctgggggagccagcagtgggcctggagaggaggagcccacagagacccccatcccctggccaatgccagttcctgttctgaggtgtggcttcagcggccttgcccactgtccccaagtccccgcactgtcccttcctctggggcggtgccctccacactccccgtcccgcctggagccgggggcctcccgcttgcattgggcattggatgcagcagggccgggtgcaatgaggcctcaggggtgcccttggaattgggcaactagaaggtcaggggtcactgtgaaaagagaggtccctgaggaaaggagcatcaagggagagcagacgagcagatgggaaggcaggagaggaactggagaaggggaaaggaggccagggtggatggaggagttgaggtccctgtggtctgaggtcaaggcactgaaggagaggggtgcmgtgaaggtgacccaggagaagggtcccctgcaggggtc

SEQ ID NO: 95104 - DNA, 592 bp, Homo sapiens
gatcatcaagcccaaagcaaaacaaatacaaagaaaatcacaagtatgatagtcatttcaaagtgctaactaccaaagataaagcaaatatctttaaactaatctgataaaactcacttaagtggaaacaacttgaatacagctgacttctcctcagaaggaatgaaggacagaagacagtgaggcaatatcctgatggtgctaggggaaaacaaaaacaacaacaataaacattttacctagcattttctatcaagggaaaataaccttaaaatagcagcaaaataaatatatttttggattaaaaatctaagaattttcaccaaagaccgatctgcattatcacaaattctaaaagccttgaccctcacaaagraatgaaagagcattgaaaatggctagtatcttggtaaaattaaggacaatttgtcctcccagtctacttttttggctgatttaaagcaaaacttataatcctttggggattatatgttcttataatgtatatgacaaccgtagtgtaaagggtaggggaattaaatgaactacaaaattgcaggatttctacattacagatgaagtgcctgaattc

SEQ ID NO: 95105 - DNA, 789 bp, Homo sapiens
gccatgctggaggtgaccccagagttgccttttattacaaggacctttacaaacgactcaagtctttcattcttcactttctccagatgtggttttgaagtgtacagtgacagctgatgcgtttttgtgacactgctttgatttgtgctaaggaaccagcagttttacctaccattgcttttgtgtcattaaggcaaatatcaacactgtggaaaaggcaaataacatgctagtattactatgaaagttgttttgatcttgtagaccccctggaagtgtcccagggacctccagggatctgcagaccacatttgagaagcaccattccatggcatcatctgagggattccaagagtgagacctgggccccagagttcagaggggaaaaacatgtagaacacactaggcaaacttttaaatgaatggattcaaacttaaacacataagagtgccagttatatttttaaaagactttcttctgcaygagttttgagctaaaaatgctagtaaatgaattgaaggagagtagcagtcactgtggagacttgcaattacagcctagaagttgaactggagctaatatttaaaaacacagagcaggctgggcatggtggctcatgtctgtaatcccagcactttgggaggctgaggtgggaggatcacaaggtcaggagattgaggccatcctggctaacatggtgaaaccctgtctctactaaaaatacaaaaacaaaattagccaggtgtggtgggatgtgcctgtggtcccagctactgggggggctgagg

SEQ ID NO: 95106 - DNA, 1570 bp, Homo sapiens
ggctcattgcagccttgacctcttgggctcaaactaacctcctgcctcattttttgattatttttagagatgggggtctcgctatgttgtctcaattcctgagctcaagcgatactcctgcctcgacctcccgaagtgctggggttacaggactgagccaccactgtgcctggccaggcaattctagtaatctggaatgaaatactaagctactttagaaaaacctagaagttaggggtggaggaagaataaagtgaaatgaagcaaagcacttacaagatttcattctgatctggataaaggtagagtggagaagaatagagaagtgaaaatattctaaaagactcatcttattgggatagatgaacttggtgayggaaataagttacatattgtttagttaaattataaaacaggaatatgtgctttcttatgagtttctagagagaggggacatttatagaataggaaattatagtagaataacaatattatcaaaaggaaaatgataataacaagaagcttttgaaaactagttaaaaaaacaaaaggaaggagaagagacaacaaagtaaaccaaagtgaacataaagtaaacataaaattagacagaataaaataagcacatatatgatgaagtcatcaaaaacaaacagagtacgagaaactgtcagagccaagaaaagcccaagagacatgatgattaaatgttatgtgatatccccgatgggatcctgaaaaagaaaagaagcattagacaaagactaaagaaatctattgtttttagctttaacaaaaagtggagttataaggctacatcaggtttgacaaaaccgtggaatgggatgtaattgggcttctgatttaagctttcagtggagattgatatagtcttgtgagccaggaaattttgttttcttccatgtttcaactcagctttttcttgcatgtctgtttcagcagtcgtcaggctgactttccaaccacgtggtggaaaattaccagtgacagtttccaaatttatatttcctctgattaacagaccatttgttcattcattcattcagtcattcatgtaagaaacatttttgcttgcctactatgtgccaggtacactaccatgttctactatgttttgaggttaagataaacctgacattattccgtccttggagtttactaggtaataggagagaaagacattactctattacttagacaaataactgtattattacaaatgagaaaagtgccacgaaaaaagagttctgtgcatgatgacactgttccccaacctagtctagggtattaaggaggatttcctgaaggaagtggcatgaaactgagacctaagcataaataggagttacccagccaatagggacaggagttacccagtcaatggagacagatgtggtgaatgccattatacaagagtttggtgatgggccaagggagacagggagaaagttgacctatttatcctgagcccatcctgaatatctagtacaaagtggattcaatatgtttctatttatttaatacaatgtatgcatttgtgactactaaa

SEQ ID NO: 95107 - DNA, 970 bp, Homo sapiens
tattttaccacaataaaaagaaggggaggggcagacagccacgtggcacaccgtgcagacatctcccatgtacccagcaatcccatctgcaggtacatacgctcctaggttctcacgggagggagaaccatcatgggcagctctgggcatcccacgccttctccatcaggggtccggggggcaacctagccctgygctcagtgcctgccaaagaccatatcctggagacgatctccacgatctggagacagactctggcagctgcctgtcccagggccaaggtcggctacactacgagtgagcccccatgcaaaatgaaaacaaagcacccttgttcaaaacgtattaatagtttcaagacagacagcagaacattaaaccaagccccctgcccttctgagtgcacaccctgtgcaacagtccaggtcacacagccttgaagggggctctgaaggtgacagttcccaaccatgtgctgggagggaagatggcagagggagagagagggagattgagagagaatatctttaaaatttttatttaagtataacgtataaaaaggtgcacagatcacaggcagacagctcaatgaattttcacgaagggaataaacctgtgtaaccaccacccagatgaagaaagagaacattcctggcaccccagaacccaccttgttgccctcacgactcccagattagattagttttgcctatttttgagcatcatcggtctgcatgttttcttttatgcctggcttttctcaccgcatgtctgcgggactcagccatactgctgtgctgtcattctcagacggacaatcccaagtgtcagagcccatgtggggcaaacagaattctcatacgctgctggtgggagtggaaaatggtgcaactacttggaaaaatcggctggcaatatctatcaaagctgaacaaacacctgccctgtgacccagcaattccacccccag

SEQ ID NO: 95108 - DNA, 555 bp, Homo sapiens
tctgtaacttgggtgattggaaacacatcccttggacattatggtgaaagacaaaagaagtcatggatgcattcctggcccagtgcttggcaaatattagtcacaaaataagtctttgaagaatgaatgttgaatgaatggatgaatacgtgaaaagaaaattaccttgaaatagaaaagcatagataaagcagcactttccaaagtcaagaatgtcccagagaacaaattaaactttattaaaacaaacaggctgggcgtggtggctcacgcctgtaatcccagcactttgggaggccgaggcaggcagatcacgaggttaggagatcaagaccatcctggccaacacggtgaaaccctgtctctactaaaaatacaaaaattagctgggcgtggtggtgcgtgcctgtagtcgtagctactcgggaggctgargcaggagaattgtgtgaacccgggaggcggcggttgcagtaaaccaatattgcaccactgcactccagcctggcaacacagcaagactccgtctcaaaaaacaaaaacaaaaacatagat

SEQ ID NO: 95109 - DNA, 2076 bp, Homo sapiens
tgcaatatccgctacagccaaatccatagggaccaaaagcggattagtggctgccggggccagagttactgttaatgagtaccgaggtggcgtttgggatgatgaaaaagttctgacctagatagtggtgatggctgcataacactaagtgttcttaatatcaccaaattttatacctgaaaaatggctacaatggtaatttatgtctattttatcaccttttttaaaacaaaaaagatataaggggtacagcagagtgagtgctgcatatgcatttactattattcttgggttacatcccaggtactcaataaatgttcactgccctgaagaaacacctgctacgagtcaggcacctcacagttgttatccgtttaattctcacaatctgagaagaaactgtcaccctcattttatataataaatgagaaaacagactcgggcaagtgtcacaatagaatcaagaggcagaataaactgacttccaatgccaaatccatgccgaaattcagtgctataataatgtacatggccgggcgcggtggttcacgcctgtaatcccagaactttgggaggctgaggcgggaggatcacctgaggtcgggagtttgagatcagcctaacacggtgaaaccctgtctctactaaaaatacaaaattggcatggtggcatgcacctgtgatcccagttactcgggaggctgaggcaggagaatcgtttgaacccgggaggcggaggttgcagtgagccggaatggcgccactgcactcaccgcacccggccaatttttgtgtttttagtagagactaaataccatatagtgaacacctaagacggggggccttggatccagggcgattcagagggccccggtcggagctgtcggagattgagcgcgcgcggtcccgggatctccgacgaggccctggacccccgggcggcgaagctgcggcgcggcgccccctggaggccgcgggacccctggccggtccgcgcaggcgcagcggggtcgcagggcgcggcgggttccagcgcggggatggcgctgtccgcggaggaccgggcgctggtgcgcgccctgtggaagaagctgggcagcaacgtcggcgtctacacgacagaggccctggaaaggtgcggcaggctgggcgcccccgcccccaggggccctccctccccaagccccccggacgcgcctcacccacgttcctctcgcaggaccttcctggctttccccgccacgaagacctacttctcccacctggacctgagccccggctcctcacaagtcagagcccacggccagaaggtggcggacgcgctgagcctcgccgtggagcgcctggacgacctaccccacgcgctgtccgcgctgagccacctgcacgcgtgccagctgcgagtggacccggccagcttccaggtgagcggctgccgtgctgggcccctgtccccgggagggccccggcggggtgggtgcggggggcgtgcggggcgggtgcaggcgagtgagccttgagcgctcgccgcagctcctgggccactgcctgctggtaaccctcgcccggcactaccccggagacttcagccccgcgctgcaggcgtcgctggacaagttcctgagccacgttatctcggcgctggtttccgagtaccgctgaactgtgggtgggtggccgcgggatccccaggcgaccttccccgtgtttgagtaaagcctytcccaggagcagccttcttgccgtgctctctcgaggtcaggacgcgagaggaaggcgccgcccctccccaaggaaaggcgagggcctggggcacacccccagtgcccagatccaggcgcgcctctttccacctccagcaggtttggggcctcggccatgggggcaccgaactgcgtgcagcctgaccctcccgaatggggtggtaggtgagggccgcgggacgccccgggcggcgggctgcgaggacggccgactctgcccatcccgagggcggctggcttcgccctccccactctgcgccgagcacgcggcccggacccaccgcgagaactccgcacctgcagcgtgaacgca

SEQ ID NO: 95110 - DNA, 1705 bp, Homo sapiens
ccaacttataattgatgtgtctcgtcaatgtttttgttttatattattcaaattactctctcttactaatggagtcaaataatttgcctatacatactttatttgagaaaagtacataagtttaaacatactaagtatcagaaaggtaaggtgtatttttttaatccttctttggtgagattcttaatttgtattgaatggatcaggcttgttcattattagactatttggagtttattgagacccaagttagtttttatagtcagcatcttcaaactcaaattataaccgctgttgtggccttcttattcagtgttcaacatatttacatttactgaaaaagaatagtctttgttttctttcttcacaaaattaaaatccttgcaaactaataatatgtatagctccatttttgcatttgagcatgtttagtgattgtgcttaaaggttgagtgtaaatgatttttaagaagcacggtattcttgaaaaacaaaggaaagaaaaactttatttcactattatttctgacaaaaaacaagacaaaaggatattaaaagtgtgatgtccagttaaatttgaattaccaaggcmtaaaatttcctacagggaaaatagataaacatctatgtgtttgttgcctaacttttaaatggctgagtggatttaattcagcctttttattgcttttcacaaaagcaagtttacctcatattaaaatgtggttgatttcagcccaaaagagaaaactgtagaggcttaatgacccatgggaccactggaacatgagattcatatatttgaattgcttccattctgaggattttagaatggaggctgcttattttgagaataaaatgaaccaaggtttgcccccattccgcccaccatttttttgggatccctggaaagctcctgctttgccaagagactaaaataggagatggcctattgcagacagaaaaatggccctgtacctactgtcactgccagctcagaagggtctacaagtcttttgagacttcaaaatctattaataaactaaaaatttattaaggatttcttgacttttttcctatttcatttgaatctctaaatattttcttgcatagccacaatgttatgagcacacctaagaaaactaatagtttttctttaatatcatctaatactcaagtcatattcaaatttcccaagctatcctaaacatgtcttctaacctttggtttgtacaaagatccaaacaaggtctacatattagttattatgtctctttagtcacttttaatctatcactgacccccacccacatactttttcttttcctgcgaggaaaccaggttcagttgttctgtgacacagctcacgtcctaaagtgtactcaccgcttcagagtagtttatcttttacttggtgcgctatacctgtatttctgtataagcccgaaatttgacctaaagactcgattagattcagactaagtgtttttggtaaaagtactcaaaggtgctatgtacttctaattgtatcacaataggacgcatatgttattattgttgtgattattgctccacttttagtgatgctcagaatcaccagtgactttaggaagtgatacatcgatctctccattataaaactgccgtctctctatgagttacaagtaatctttggaatgttagtttctgactcagtaaaagtatttcc

SEQ ID NO: 95111 - DNA, 1705 bp, Homo sapiens
ccaacttataattgatgtgtctcgtcaatgtttttgttttatattattcaaattactctctcttactaatggagtcaaataatttgcctatacatactttatttgagaaaagtacataagtttaaacatactaagtatcagaaaggtaaggtgtatttttttaatccttctttggtgagattcttaatttgtattgaatggatcaggcttgttcattattagactatttggagtttattgagacccaagttagtttttatagtcagcatcttcaaactcaaattataaccgctgttgtggccttcttattcagtgttcaacatatttacatttactgaaaaagaatagtctttgttttctttcttcacaaaattaaaatccttgcaaactaataatatgtatagctccatttttgcatttgagcatgtttagtgattgtgcttaaaggttgagtgtaaatgatttttaagaagcacggtattcttgaaaaacaaaggaaagaaaaactttatttcactattatttctgacaaaaaacaagacaaaaggatattaaaagtgtgatgtccagttaaatttgaattaccaaggcataaaatttcctacagggaaaatagataaacatctatgtgtttgttgcctaacttttaaatggctgagtggatttaattcagcctttttattgcttttcacaaaagcaagtttacctcatattaaaatgtggttgatttcagcccmaaagagaaaactgtagaggcttaatgacccatgggaccactggaacatgagattcatatatttgaattgcttccattctgaggattttagaatggaggctgcttattttgagaataaaatgaaccaaggtttgcccccattccgcccaccatttttttgggatccctggaaagctcctgctttgccaagagactaaaataggagatggcctattgcagacagaaaaatggccctgtacctactgtcactgccagctcagaagggtctacaagtcttttgagacttcaaaatctattaataaactaaaaatttattaaggatttcttgacttttttcctatttcatttgaatctctaaatattttcttgcatagccacaatgttatgagcacacctaagaaaactaatagtttttctttaatatcatctaatactcaagtcatattcaaatttcccaagctatcctaaacatgtcttctaacctttggtttgtacaaagatccaaacaaggtctacatattagttattatgtctctttagtcacttttaatctatcactgacccccacccacatactttttcttttcctgcgaggaaaccaggttcagttgttctgtgacacagctcacgtcctaaagtgtactcaccgcttcagagtagtttatcttttacttggtgcgctatacctgtatttctgtataagcccgaaatttgacctaaagactcgattagattcagactaagtgtttttggtaaaagtactcaaaggtgctatgtacttctaattgtatcacaataggacgcatatgttattattgttgtgattattgctccacttttagtgatgctcagaatcaccagtgactttaggaagtgatacatcgatctctccattataaaactgccgtctctctatgagttacaagtaatctttggaatgttagtttctgactcagtaaaagtatttcc

SEQ ID NO: 95112 - DNA, 444 bp, Homo sapiens
aaaataacaggtctaattgtggtttgtgttccatatttatttttatttttttattacctaattttcctccctaaagcctcctcccacccctaccccttctctttctgaaaggatgcaacacacagccttttccccagccctcagctaatagcaacaccttcattttatcaaatgctgggctcagggaggagccatggagcctgccccaaatgatgaatagccaagagccgcaccctctcggggaggtcctgactaatttctcttcatggcacagaaagctaagtgggtgacctttctgcctgagccacggacaacacacaacatgamtaaatcgaaagtggatcactctcaggcaggcaggccagaggaaaggacacttagcactgaggaattaattgtgccttctcagaccttcctggccccgtgaggaagatagctttttcc

SEQ ID NO: 95113 - DNA, 444 bp, Homo sapiens
aaaataacaggtctaattgtggtttgtgttccatatttatttttatttttttattacctaattttcctccctaaagcctcctcccacccctaccccttctctttctgaaaggatgcaacacacagccttttccccagccctcagctaatagcaacaccttcattttatcaaatgctgggctcagggaggagccatggagcctgccccaaatgatgaatagccaagagccgcaccctctcggggaggtcctgactaatttctcttcatggcacagaaagctaagtgggtgacctttctgcctgagccacggacaacacacaacatgaataaatcgaaagtggatcactctcaggcaggcaggccagaggaaaggacacttagcactgaggaattaattgtgccttctcagaccttcctggccccgtgasgaagatagctttttcc

SEQ ID NO: 95114 - DNA, 444 bp, Homo sapiens
aaaataacaggtctaattgtggtttgtgttccatatttatttttatttttttattacctaattttcctccctaaagcctcctcccacccctaccccttctctttctgaaaggatgcaacacacagccttttccccagccctcagctaatagcaacaccttcattttatcaaatgctgggctcagggaggagccatggagcctgccccaaatgatgaatagccaagagccgcaccctctcggggaggtcctgactaatttctcttcatggcacagaaagctaagtgggtgacctttctgcctgagccacggacaacacacaacatgaataaatcgaaagtggatcactctcaggcaggcaggccagaggaaaggacacttagcactgaggaattaattgtgccttctcagaccttcctggccccgtgaggaagatagcttyttcc

SEQ ID NO: 95115 - DNA, 1003 bp, Homo sapiens
gaggaaggtgagggagcattcagaaataacgaagccacttttatttgattcatcctcttcatttcacattctctcccttttcttccaatgtaatcactgactgggtccaagcctcatagtttatagatgaagagcctgagggccagagtggagatgggagttgctctggatccaatttaggacccagatctctgtgctttcttgcctgtgttccttctactacattttgacccctaagatacatcccgagagaaatatattatcatagacggtatttcattattattcctcctaccaagaggcaaatcttgttagaagccagcacactcaggccaggcgcagtggctcacgcctataatcccagcactttgggaagccaaggtgggcggatcacgaggtcaggagatcgagaccatcctggctaacacggtgaaaccccgtctctactaaaaatacaaaaaattagctgagtgtggtggcgggcacctgtagtcccagctactcgggaggctgaggcaggagaatggtgtgaacctgggaggcggagcttgcagtgagtggagatcgcgccactgcactccagcctgggtgacagagtgagactccgtctcagaagaaaaggaaaaaaaaaaggaaattggggaagccagcacactccgtggttctatagcatcakcctgccctgggagctactctgactgctttttttccaatctaaactcatatttcagggccgccctggaaatattggtaaagccagcactgctaatacaggcaaacgatggcaatcctaaagggtagtgttgcactgaaataaattatttgcataggtgggatttctcttttaattttactatgttaaggttacaaattgttttctggcctttacgtataattaaatatagatgctcttggagcttaatgtcagtttaaattttagtctttggaaagtaatttgtttgcacgttcaatgaacaaaccatttcttattggtttcaaagac

SEQ ID NO: 95116 - DNA, 686 bp, Homo sapiens
tggcatgttggataaaagtggaatttggaagaagggctaatcctagagcagaaccagggcagggcattggagaccccttgaacatgtgaactacatttactcgtagacatgttttacatttaccaaagatgactgccaaattccaggacactgagcttaagactataaagggagacaaaccaccaaatgcacacccttgtcatagatggagctttttttttttttttttttgagacaaagtttcactcttgttgcccaggctggagtgcaatggcacgatcttggctcgctgcaacctccgcctcctgggttcaagcaattcttcgtgcctcagcctcccaagtagctgggattacaggcatgcaccaccatgcctggctatgtttgtatttttaccggagactgggtttcaccatgttggccaggctggtttcgaactcctgacctcaggggatacacctaccttggcctcccaaagtgttgattacaggcacragccaccgcgcctggccctggatggagctttcatagaggaggagcagatggagttgtcaaggcaaaaatgtccactttcagccacgtttgccctaggagatatcaaaatcaacattgtgtctcctcctaacccattctaagcagctgaaatggacccaaacacaaaacccctacaggcccaaccaaagact

SEQ ID NO: 95117 - DNA, 629 bp, Homo sapiens
cagaatctatttgatgtacatcttgctgtagccttaaagtattacaacccaatcttgtttctgcytctggctgttctgatctttaaaagattttggtttttaatacaaagtacatgatgatttgcatgtactgaataagattgtgatccaatgtctttgatggtggccttcccttttattgctatcttcaagtaaggtttattcagtgcctactgttcagggctttatcctgggaatatacaaaacgatgtttgagtatcttgcctctgccttctaggagttcaacttaagccatcttacttcttccctccctcaaacgtttttaacaggcagaaaaatgaacataagaggaattcttcaataatttaagagacaggccagaacaaaggctcctccaaagaatgaatgtttaatggcatgtttccagaatgtaggctgcaggagaatgtgcacccggggtgggagtagatcaaaggaaggaggttaaattatggtttatttctcatccttttgtagaactctttctgcaagacatagtttcttggaggatgtaccagttatcaattgctgtataacaagccaccctaaaactgagtggcttaaaaagcacagtgatttattatctctaa

SEQ ID NO: 95118 - DNA, 629 bp, Homo sapiens
cagaatctatttgatgtacatcttgctgtagccttaaagtattacaacccaatcttgtttctgcctctggctgttctgatctttaaaagattttggtttttaatacaaagtacatgatgatttgcatgtactgaataagattgtgatccaatgtctttgatggtggccttcccttttattgctatcttcaagtaaggtttattcagtgcctactgttcagggctttatcctgggaatatacaaaacgatgtttgagtatcttgcctctgccttctaggagttcaacttaagccatcttacttcttccctccctcaaacgtttttaacaggcagaaaaatgaacataagaggaattcttcaataatttaagagacaggccagaacaaaggctcctccaaagaatgaatgtttaatggcatgtttccagaatgtaggctgcaggagaatgtgcacccggggtgggagtagatcaaaggaaggaggttaaattatggtttatttctcatccttttgtagaactctttctgcaagacatagtttcttggaggatgtaycagttatcaattgctgtataacaagccaccctaaaactgagtggcttaaaaagcacagtgatttattatctctaa

SEQ ID NO: 95119 - DNA, 629 bp, Homo sapiens
cagaatctatttgatgtacatcttgctgtagccttaaagtattacaacccaatcttgtttctgcctctggctgttctgatctttaaaagattttggtttttaatacaaagtacatgatgatttgcatgtactgaataagattgtgatccaatgtctttgatggtggccttcccttttattgctatcttcaagtaaggtttattcagtgcctactgttcagggctttatcctgggaatatacaaaacgatgtttgagtatcttgcctctgccttctaggagttcaacttaagccatcttacttcttccctccctcaaacgtttttaacaggcagaaaaatgaacataagaggaattcttcaataatttaagagacaggccagaacaaaggctcctccaaagaatgaatgtttaatggcatgtttccagaatgtaggctgcaggagaatgtgcacccggggtgggagtagatcaaaggaaggaggttaaattatggtttatttctcatccttttgtagaactctttctgcaagacatagtttcttggaggatgtaccagttatcaattgctgtataacaagccaccctaaaactgagtggcttaaaaagcacagtgatttattatytctaa

SEQ ID NO: 95120 - DNA, 951 bp, Homo sapiens
tgcatatatccaatcgaatttcatgcctcttcatgggtcacatgtacaaaaaatggtgtgttagcatgatcagagggtggagttctcagccttctgatgtcaaaaggtgaagcagaggacgtgaaaaccctcactgtacgtcatttgtagaccggccggaaccactccatgatcggtggcctcttatcaggaaggaatgctggtcagttgctgtgttgaaaccacaaacgggaaggaaaatctggtcactgccccagatacttggctaaggatgataaaggaatgagtcgtccatttctgattttccaccactgatttctgcttactctttaggaaagaatttgggttaaaaattaataagaaaaaggcctrttgaggcatgtcttacctcctatcctttcatggccaggaactccacttttcaggtttctctgggattccccttagccaagaggaggtctgttcagtcagttgggggtcttaggattttatttttatttctcattatttttttcaaatacttttgatctgcagtaggttgaatctgctgatatggaaccatcaggtacagaggacctactgtactctttttcatttctgtgtgcttttgccttatctttctccactcccttctccctgctctttgcagaggccttccaaacccttccacacattttatctcacttctttggtgattctcagtccagtaatcagcaagccctttgctaaaattatgatcacattccacaatgggagcatgtaaatgataatttattcacaatattctcattttcagtaaaggggttcctgaaaggttataagacaaatcactattaacctaatcatattgtgaaaggaaaataaatcttggggccccaaaatcactatgctaaagggaaaagttaagctgggaactgggaaaaacctgtctcccattttattataaatgca

SEQ ID NO: 95121 - DNA, 951 bp, Homo sapiens
tgcatatatccaatcgaatttcatgcctcttcatgggtcacatgtacaaaaaatggtgtgttagcatgatcagagggtggagttctcagccttctgatgtcaaaaggtgaagcagaggacgtgaaaaccctcactgtacgtcatttgtagaccggccggaaccactccatgatcggtggcctcttatcaggaaggaatgctggtcagttgctgtgttgaaaccacaaacgggaaggaaaatctggtcactgccccagatacttggctaaggatgataaaggaatgagtcgtccatttctgattttccaccactgatttctgcttactctttaggaaagaatttgggttaaaaattaataagaaaaaggcctattgaggcatgtcttacctcctatcctttcatggccaggaactccacttttcaggtttctctgggrttccccttagccaagaggaggtctgttcagtcagttgggggtcttaggattttatttttatttctcattatttttttcaaatacttttgatctgcagtaggttgaatctgctgatatggaaccatcaggtacagaggacctactgtactctttttcatttctgtgtgcttttgccttatctttctccactcccttctccctgctctttgcagaggccttccaaacccttccacacattttatctcacttctttggtgattctcagtccagtaatcagcaagccctttgctaaaattatgatcacattccacaatgggagcatgtaaatgataatttattcacaatattctcattttcagtaaaggggttcctgaaaggttataagacaaatcactattaacctaatcatattgtgaaaggaaaataaatcttggggccccaaaatcactatgctaaagggaaaagttaagctgggaactgggaaaaacctgtctcccattttattataaatgca

SEQ ID NO: 95122 - DNA, 951 bp, Homo sapiens
tgcatatatccaatcgaatttcatgcctcttcatgggtcacatgtacaaaaaatggtgtgttagcatgatcagagggtggagttctcagccttctgatgtcaaaaggtgaagcagaggacgtgaaaaccctcactgtacgtcatttgtagaccggccggaaccactccatgatcggtggcctcttatcaggaaggaatgctggtcagttgctgtgttgaaaccacaaacgggaaggaaaatctggtcactgccccagatacttggctaaggatgataaaggaatgagtcgtccatttctgattttccaccactgatttctgcttactctttaggaaagaatttgggttaaaaattaataagaaaaaggcctattgaggcatgtcttacctcctatcctttcatggccaggaactccacttttcaggtttctctgggattccccttagccaagaggaggtctgttcagtcagttgggggtcttaggattttatttttatttctcattatttttttcaaatacttttgatctgcagtaggttgaatctgctgatatggaaccatcaggtacagaggacctactgtactctttttcatttctgtgtgcttttgccttatctttctccactcccttctccctgctctttgcagaggccttccaaacccttccacacattttatctcacttctttggtgattctcagtccagtaatcagcaagccctttgctaaaattatgatcacattccacaatgggagcatgtaaatgataatttattcacaatattctcattttcagtaaaggggttcctgaaaggttataagacaaatcactattaacctaatcatattgtgaaaggaaaataaatcttggggccccaaaatcactatgctaaagggaaaagttaagmtgggaactgggaaaaacctgtctcccattttattataaatgca

SEQ ID NO: 95123 - DNA, 748 bp, Homo sapiens
ctgtccctgctggaagctgggcccagggccatgccagccgtgcaggggttcctcatgagcctcctcccckggagccaggccccatgagctgccccctcccacctgcctgacccccctgacctgcacttccctccatccgaatcctcaatctctgcctggaattcccttccctcctcaaccccacctggaaactcccttcctcctcccacacagctgggaccccctttctccccctctgggggcccaaagctctgatgccaccccagccctcagctggcctcacctgtctcctcgtagccccacagttcgatggtgatggtctgcgtgggcagcgacttgacatgccaggtcaggctgaggttgcctgaggtgttggcggtgccgtagtattgccaacgcgtctcgttcaccaactcgctcttctccatcattgacactttgttggggtgcactgggcaggggaggtgaggggtgagtgagggcctgggcccagggaagcagggaggaggccctgaggcttcaagggctgtgggagcctccagggccaatgcatggcagcagctgggtgatggtctctctggcccgcacagcagaaaaggacgctgaggccgcagaggcaggggcctgccctccctccactgcccacgcctctagcctcgacctggcttctcccctgccctggcatggcggagctcagtggataggcactggcccacctctctagggacccctgcagctcccactcact

SEQ ID NO: 95124 - DNA, 594 bp, Homo sapiens
atctgtggtgtagggaaaagagaatcagaaagaagccagctcatacagagtccaagggtcttttgggatattgggttatgatcactggggtgtcattgaaggatcctaagaaaggaggaccacgatctcccttatatggtgaatgtgttgttaagaagttagatgagaggtgaggagaccagttagaaagccaataagcatttccagatgagagataatggttcttgaaatccaatagtgcccaggtctaaattgagatgggtgaatgaggaaaataaggaagagagaagaggcaagatgrtgcctaggtttgtgatgcctctttcctgggtctcttgtctccacaggaggagccatggggcactacgtcttagctgaacgtgagtgacacgcagcctgcagactcactgtgggaaggagacaaaactagagactcaaagagggagtgcatttatgagctcttcatgtttcaggagagagttgaacctaaacatagaaattgcctgacgaactccttgattttagccttctctgttcatttcctcaaaaagatttccccatttaggtttctgagttcctgcatgccggtgatcc

SEQ ID NO: 95125 - DNA, 485 bp, Homo sapiens
tcctcaagttgtaaacttgtgttttccctcttacaaactgtaaatataccacagggtgatgaaatggcrccctgtaaatattcagaagccatggataatcattgccagaatcaattatttcattagggtttgcaaaacccagtgggttttaattttaattatatttcaggtataaattatgctgaccaaggtgaacactttgaggaggcttcctgcttggggaagagcatatcttttaaaaaacatttatttatttattctgtagaaaagtttagtctatttatccagatcttttaaaatgtcatttaataaagttttagggtttcctttcagaaaatttctgtacatctctagatttatttgtaggtattttatattttattcactttgataatgttgaataggattttttttttttactattaggttgtcttagcaggtttgggctgctataacaaattaccatagactgggtggattataaa

SEQ ID NO: 95126 - DNA, 485 bp, Homo sapiens
tcctcaagttgtaaacttgtgttttccctcttacaaactgtaaatataccacagggtgatgaaatggcaccctgtaaatattcagaagccatggataatcattgccagaatcaattatttcattagggtttgcaaaacccagtgggttttaattttaattatatttcaggtataaattatgctgaccaaggtgaacactttgaggaggcttcctgcttggggaagagcatatcttttaaaaaacatttatttatttattctgtagaaaagtttagtctatttatccagatcttttaaaatgtcatttaataaagttttagggtttcctttcagaaaatttctgtacatctctagatttatttgtaggtattttatattttattcactttgataatgttgaataggattttttttttttactattaggttgtcttagcwggtttgggctgctataacaaattaccatagactgggtggattataaa

SEQ ID NO: 95127 - DNA, 559 bp, Homo sapiens
tataagtacatattttagttctctagtccatctagtacaaaactaaatatataagattttcttcaaatcattgtaaacttttttttaatggagayatcacaatatgactgtgagattatagaatggtatggttttagttttgaaaagctaaaacacggagcaggaaagttattttccagatgccactgaataagtgcccagccaagcctggcaatgaatcaagagaacaggaattcagggccagaaggcctgacaccctcaggacccaagggagatacacgtcaggtgccataaaaaatggtttcaaggctctggggagggctctaagaaattaaagaatcagaatcaagattctttaattaaacaagatccccaacacacaaatagcagcatggggcagggaagggaggatgtgcacacaccaaaatgcctgcagagaggatggtgcgtaacagctttggcttacactgaggagaaggtatccttcctgtgcttggagattcaagactgtacggtgtcatcttgaaaatgacatcttcaggataagcaagccagccca

SEQ ID NO: 95128 - DNA, 2307 bp, Homo sapiens
ggtactttatcattgatcaaggctcttgccaatgtttgagggtaagattgcagtcagtttgtgagtttttctcttgaatactatccctacagcaggaagttgctaaacagatctattattacctgagttcagggaagcaagcttaacggaagggtctgatgacacaacatcctcctttgtctgcagtataaaagggaaagaaagtcaactttgaactgccttaagctataagttattttgtagttggtaatggctttcctaactgtgaagtaggcaaagatggtattaactatttaaaccattttacagatgtagagcgggatatcagaaaagtaaatgacttttttttcttaaggtcaattattagtagctagtaagttgcagagctgaggctgcgtttcaggatttgacttgcaaacttgtgctttttccctgataccgcccaccatctgaaatgctcttcttcctaccctccctcacctccagtataacttctgtccaggctgagaaaattcaagttcagatgtcagttcttccaggatgttttccttgatttacatcccatcaaatatgtcatgttttgtgattaacttccatcatagtactgatcataattactctgtaatataataacttaattagctttttataggttgtttgctacaggaaggcagaggctgtttcataatatccttagyacctaacagggatcatacctcagaggctcttaaatgtgtgttaaatgaacgagttccttccaaatactaaactgagttatcaaaaaaaaaaaaaaagtttagtattttttaaaaagccactgaaagctgtgatggtaaggattttcttattcttaaagtttggtttttcttaccaattttcgaagtttgttaagattataaacaagctttcctggttgagtaagtctgctctggagtcgtagggccatatcccccttttccctagatctcttgttttttttttttttaccttaacaattttactaacaggagtgtatgcatgcacacacacacccccaaggtgttagaatttgttacctctggtggtattacgcatagtggtttttgctcatctgtgtttttttttctacaattgaatatatattgcttttgtaatgagaaatgtcatttttatctaagcattacctaaaatttcatcgagtgtttacttctagattgtataattattacctaggcttccataggataaatcctaaagattagatatttattgttgcttataagagtgcggatggttctgaaggacatacattgacagcttaaatatgtgcaaatatagttattggcagatagatattcattgagtggaatgagtgaaaactggaaactatccaggacatcagtttaaaagttaagattcagcaatactttagccaataagatagcctgtgagttcactctctgtcgtgtggtgaaaagggatgagagaatgaagctcaatcattttttaagttatcagttacccttgaaagaatgtatatttttaagtagtgaggacaaatgccagaatgctatttaaaaacagcctaggagtggattgagtatgaggtccggaacgaggtgaagcgggttccaggagtgagatgtatttgttttgagagtgaggttttccccttacatactagaaatcagtgctgggggtagggggagagggctggctggggagttggtggggcagcagttgattaacgaagacgtacagatctgaatttgaaaaataataggattgtgtggaagtatgatttctccatattgatgtaaagtcataaaaccactacattttagcatatgtactttttttcctcccttacctccgggggtacaaatttgttaaaagtcagcgacatgtttggctttgaatacgttcaagatttaactaaataccttttttgcagatttctgttgccttatgaaattagtttattcgtaggctatgtagttcagtagtgatttattttaaactaagctgcaagtatgatatttctaaaattaggtttgttttttcgttttcagtaatgatgtagacatggaaacagatcactactccaatggagttggagaaacttcatccaatggtttcctaaatggtagctctaaacatgaccacgaaatggaagattgtgacaccgaaatgggtctgcagtgatatttcttacatttttaataaaaaatgatggctacaaggttatgtttttacttgtactgattcacagctgatgagcataaaccagatttaaagatgtatgtgctgtaggacttgacagtaatg

SEQ ID NO: 95129 - DNA, 1160 bp, Homo sapiens
tttttttttttgagacagagtctcgctctgttgccaggctggagtgcagtggtgcaatttcggcttactgcaatctctgcttcccaggttcaagcaattctcccacctcagcctccctcccattagctgggactacaggcgcacaccaccacgcccagctactttttgtattttcagtagagacagggtttcaccatgttggccaggatggtctcgatctcttgacctcgtgatcctcccacctaggcctcccaaagtgttgggattacaggtgtgagccaccgcgcccggcctggtatcctctttatacaggtttttacatcctgtgtttatcattgatttatttagtatttttggggagacagggtatttctctgttgcccaggctgtagtgcagtggcgcattcatagctcactgtaaccatagctcactgtaaactgttgggttcaagtgatcctcctgcctcagccactcgagtagctaggactacagagatgtatcctatgcctggcttatttttgaatttttttgtagaggattattattgatttatttctatgtagcagttatagtatgtttcttacataattataagcattcttctatgagattaaaagctctgaatatctttttatttttggctgtggcatagtctaagtttattaaggcacatccatagctgttctcctgttgccagttatttagattgttttaattctttcactattctaaatactcttttttgcatgaaatttgtctttatttccgtaggaaagatttcttgaagtggaattatggatcacaagaaggggtatgcacatttttaaggcttatgatgcacatggccaaattactctccggaaaaattattgcaatttatgtttgggtgggagagaccttgttgtatgtatatgctgaggagaaggaatcactagtgagtccaggagaaggctgaggaggcgaatgaggcaagtttctttgcccagyaggtgggatatggggttttaagtataaattaggaaggtgggatgctgtgcggaatttatttattggcacttatcactacttctggaagcctgtcttgacagccttttcacctccaaacaagatgaggctcctctgttaacaccctttcacagcatcttgtacttccccttca

SEQ ID NO: 95130 - DNA, 705 bp, Homo sapiens
atgagggatggttctgtccttcttattcagacattcaggctggaattaccccaggagcagccctcaaccaggacacaagaggagttggtgtataaataccccagctccatcacctctcarctgggataaatctgagccatgtcctgcaccatttcccagaatttcccagtgggattaaactctagtcatgcacagtaatagtatgcttgacaatgcactctttataggctgcctttccttcctgtctcacttacttgcttctatatttccttacgagcatttccttgcctctcaaataaactacagtcagttctgctataacatgacaaatgagtttctagaaaatcaccatgctatgcaaaattatgcaataaaaaccacagggcttgtgggataaatgagattagggggcacaacacttaaaaacgtagtgatatataaaaaataagataggaacctaataaaaattgtagttttacacataatgtatgttttaaaaatgcataagtacaaaaatagatatggcattttacctagaaaaatccctgaaggtggcttgtggaagtggtcattggaagagttgcagcttgtgacttaccatgcaagagtggaaggaaggtggtcagaaacccgaaggaaaattttaacaccagatatggatggttgtggcttctaaggtgaactgaggtagctggtcgatgttca

SEQ ID NO: 95131 - DNA, 631 bp, Homo sapiens
aaaggaggaatgtgacaccccgcacaagctctggggtgtgtgtgtgtgtgtgtgtgtgtgtgtgtgtttctctgaaagaatcactttaacctaattttcttagcatcaactcaaaatgccactgagaccaagtgaagaaaatttcacctaagtacaaagggtaaatcttgttattcaccttaaacaatgcgtgaagcttttagcatttctatgttcctctcactcttcctcctctgttctctaagctttgaagaaaggamgactttctggaaaaaatgtctttctagtgacgtggccagggcagtgggatcatttggatgtgggccatgcttgttcaccttgaaaataaagggcactttctggtgagctgtcagccaggggcagctcctgtgcacctctgggagaaggccgagcagatggggttctgggatgcagggcaggtgcccagcccacccatgtcacctggcactgacatttcgaggatggttctgctccggttaattttcctgtgcacgcgtcactccacccacagcgcaattagcccagctgagggcaggaagtggtacctggattcacattcctccaagactgtccatggtggtggggagaggagaaattagggcgctggtgg

SEQ ID NO: 95132 - DNA, 671 bp, Homo sapiens
actgtctctgcgtctgagtcctggcctggtttacctgctgggtgacccctggcaagttactttgcctctctgggccttagttcccgcacgtgtaaaatgaggttgggctcaatgacctggccagctctgacatcctgtcattttcttgccaaggtctcagcctatcagttgtgacacaagtctcatcagtttcagttttcttgtccatagaatgaccacagatcggccagatgcggtggctcacgcctgtaatcccagcactttgggaggccgaggctggcggatcacctgaggtcaggatttcgagaccagcctgaccaacatggagaaatcccgtctctactgaaagtacaaaattagctgggcgtggtggcacatgcctgtcatcccagctacttgggaggccgaggcagragaatcgcttgaacccaggaggcggaggttgcagtgagccgagattgcgccattgcactccagcctgggcaacaagagggaaactccgtctcccaaaaaaaaaaaaaaaaaaaaaaaaaagaatgacggcagatcccataaggataaggatcatgtccatctctgtcaccacatccccaatcctggcacctagtaagggctcagtaaatgttccttgcatgagctcagctagctcaggggctattataaggatccaa

SEQ ID NO: 95133 - DNA, 671 bp, Homo sapiens
actgtctctgcgtctgagtcctggcctggtttacctgctgggtgacccctggcaagttactttgcctctctgggccttagttcccgcacgtgtaaaatgaggttgggctcaatgacctggccagctctgacatcctgtcattttcttgccaaggtctcagcctatcagttgtgacacaagtctcatcagtttcagttttcttgtccatagaatgaccacagatcggccagatgcggtggctcacgcctgtaatcccagcactttgggaggccgaggctggcggatcacctgaggtcaggatttcgagaccagcctgaccaacatggagaaatcccgtctctactgaaagtacaaaattagctgggcgtggtggcacatgcctgtcatcccagctacttgggaggccgaggcaggagaatcgcttgaacccaggaggcggaggttgcagtgagccgagatygcgccattgcactccagcctgggcaacaagagggaaactccgtctcccaaaaaaaaaaaaaaaaaaaaaaaaaagaatgacggcagatcccataaggataaggatcatgtccatctctgtcaccacatccccaatcctggcacctagtaagggctcagtaaatgttccttgcatgagctcagctagctcaggggctattataaggatccaa

SEQ ID NO: 95134 - DNA, 671 bp, Homo sapiens
actgtctctgcgtctgagtcctggcctggtttacctgctgggtgacccctggcaagttactttgcctctctgggccttagttcccgcacgtgtaaaatgaggttgggctcaatgacctggccagctctgacatcctgtcattttcttgccaaggtctcagcctatcagttgtgacacaagtctcatcagtttcagttttcttgtccatagaatgaccacagatcggccagatgcggtggctcacgcctgtaatcccagcactttgggaggccgaggctggcggatcacctgaggtcaggatttcgagaccagcctgaccaacatggagaaatcccgtctctactgaaagtacaaaattagctgggcgtggtggcacatgcctgtcatcccagctacttgggaggccgaggcaggagaatcgcttgaacccaggaggcggaggttgcagtgagccgagattgcgccattgcactccagcctgggcaacaaragggaaactccgtctcccaaaaaaaaaaaaaaaaaaaaaaaaaagaatgacggcagatcccataaggataaggatcatgtccatctctgtcaccacatccccaatcctggcacctagtaagggctcagtaaatgttccttgcatgagctcagctagctcaggggctattataaggatccaa

SEQ ID NO: 95135 - DNA, 546 bp, Homo sapiens
taaaaatagccattctgtgcctgaggagaaagagaagaagagatgttggagtaggcaatagccatctgtggcacaacagccatctgacgagttggagcttaacaaagtttaagattctttccaacccttagattgcgtgagctcataacaggattatgcatcaagagaactgctttcaacatactcttgatctgggaggcaagactgtccttatatgtatccccaccatctgtgtaactggttcccggcattaaatatcctctgttttaagcacttacagtggttttctatttttctggttggccccagattaatkcagtgcctgaaactattaatcttattgttaaaatctgctctctttagagagtctctgagggaataagatataaaataagcaggttttagtgaaaataattggataaggagagatacagagactggaggcaatttcttagtaggggaggaaagccaccagagctttcaaggcagccaggagaacaactatttgttcaaataccaaatatttactgagcaggcactacatgc

SEQ ID NO: 95136 - DNA, 668 bp, Homo sapiens
atcctgcatgcctccactcttgtctgcctctctgggttttatttctggcctctgagaatgatgctcacactgcccagtggcaggacgcaacctgggttcctgagccttatggggttaagtgcaaaagtgagtcctgtcagctaagcaggagctgctgagagacracccacggaggtgggctccagcagcttggcacgtgtaccttcgtggtgcatgggaaattttgattcaggtgaaaaaacagtttaaattctaggatattcttgctttctacccaggcaacacctcacatgttgacttaacttgtgagtctccctttcttcatctgtaaagtagagatgattttacttccctcatacatttattgtgaggattaaattactattgatgacagcagtcacagtgaccttccatgaatgcctcctgcatgtgcttgagtgggatgtttcagaggtgtgttttgttttatctcatcctcttcagagcctgtgcttactgtgtcattctgcctctctaagttaaatgtgcaggaaaggcttcctcaaagccactcagtggtgggagtgctgtctcagtagtcccgcaagcctgtaatcccagcactttgggaggccgaggccagcggatcacctgaggtcaggagttcgagaccagtctgaccaacatgg

SEQ ID NO: 95137 - DNA, 712 bp, Homo sapiens
ggttactgtcatcaatatcttgttggtgtttttcatgctactaatagtaataatttgtgtatatttggaagtacccctgtgtcttttgggggaaaggtattattaacttggtttcttctatagattggaaaaataaaattttgaaccttattcaagaccctgaaaaagtaaactgtttccaaaatgaataataatgaccagagtcaacagtagtgcaggggagcattttatagtgctcactgtgtgtcaggtactcttctgagcccttaaatatatcagtgcgttcatcctcatgatatttcctagatgggaacatattatccccatcatagaaatctgtgaactgagccacatcagggttcaatagcttgcctgaggtcacacacagccaatcaagggtgcaaccgcataagaacccaggtggcctggccccagacccatgctctgcaccactacatagccaccyacccacctcctccttctgccatgtttggcacagacttggccttggccaagtctctgagagaggtgaccactgggcatgccattagccagagttttccatgttatcgtaaattaagtttaaaatggaattctctttgtttacctagactttttttttttttaaagagacaaggttgtgctttctcacccaggctggagtgcagtggtgtgaacgggctcactgtagccttaaactcctgggctcaag

SEQ ID NO: 95138 - DNA, 712 bp, Homo sapiens
ggttactgtcatcaatatcttgttggtgtttttcatgctactaatagtaataatttgtgtatatttggaagtacccctgtgtcttttgggggaaaggtattattaacttggtttcttctatagattggaaaaataaaattttgaaccttattcaagaccctgaaaaagtaaactgtttccaaaatgaataataatgaccagagtcaacagtagtgcaggggagcattttatagtgctcactgtgtgtcaggtactcttctgagcccttaaatatatcagtgcgttcatcctcatgatatttcctagatgggaacatattatccccatcatagaaatctgtgaactgagccacatcagggttcaatagcttgcctgaggtcacacacagccaatcaagggtgcaaccgcataagaacccaggtggcctggccccagacccatgctctgcaccactacatagccacccacccacctcctccttctgccatgtttggcacagacttggccttggccaagtctctgagagaggtgaccactgggsatgccattagccagagttttccatgttatcgtaaattaagtttaaaatggaattctctttgtttacctagactttttttttttttaaagagacaaggttgtgctttctcacccaggctggagtgcagtggtgtgaacgggctcactgtagccttaaactcctgggctcaag

SEQ ID NO: 95139 - DNA, 712 bp, Homo sapiens
ggttactgtcatcaatatcttgttggtgtttttcatgctactaatagtaataatttgtgtatatttggaagtacccctgtgtcttttgggggaaaggtattattaacttggtttcttctatagattggaaaaataaaattttgaaccttattcaagaccctgaaaaagtaaactgtttccaaaatgaataataatgaccagagtcaacagtagtgcaggggagcattttatagtgctcactgtgtgtcaggtactcttctgagcccttaaatatatcagtgcgttcatcctcatgatatttcctagatgggaacatattatccccatcatagaaatctgtgaactgagccacatcagggttcaatagcttgcctgaggtcacacacagccaatcaagggtgcaaccgcataagaacccaggtggcctggccccagacccatgctctgcaccactacatagccacccacccacctcctccttctgccatgtttggcacagacttggccttggccaagtctctgagagaggtgaccactgggcatgccattagccagagttttccatgttatcgtaaattaagtttaaaatggaattctctttgtttacctagactttttttttwtttaaagagacaaggttgtgctttctcacccaggctggagtgcagtggtgtgaacgggctcactgtagccttaaactcctgggctcaag

SEQ ID NO: 95140 - DNA, 1191 bp, Homo sapiens
gctggggagttggagggagaagactcttctgtgtacctcttgtcacatggatgagaaggcaagtttggcaggtgggagcaccttggcagtagggagactggggagacttttagtgactcctcccttttctaggtgaatccagctaggcacttctctaggacactaggttaaccagtcatcctcatttgccaaagatattagggatccaattaatatcaagactgaggatttcctgggacacagaatttttaatgctaaaactgggagagtaccaggcaaaccaggagggttggtctccttaagaaaaaatccacttagaaattccaagctggctgggcgcggtggcttaagcctataatcccagcactttgggaggccgaggcgggtggatcacctgaggtcaggagtttgagaccagcctgaccaacatggagaaaccccttctctactaaaaatacaaacaaacaaaacaaacacaattagccggacgtggtggcgcatggcagtaatcccagctacttgggaggctgaggcagaagaatctcttgaacctgggaggcggaggttgtggtgagccgagattgcaccattgcactccagcctgggcaacaggagtgaaactctgtcttaaaaaaaaaaaaaaaaaaagaaactccaagctaaagagagcctacactcttccgagcctgatattagaaaaaacgacatgcagagaccagagatagcttttgagagaaagtcactattaaacccaggcttgtaaacatgggcggtggtttactagctcagtttttgccaccaacccattttcctcatactatgtagtatgtcaagagattcccggccaggcacggtgggtcatgcctgcagtcccagcacttcgggaggccaaggcaggtggatcacctaaggtcaggagtttgagaccagcctggccaacatggtgaaaccccatccctactaaaaatacaaaaattagctgggcgtggtggtgcatgcctgtagtcccagctactcgggaggctgaggcaggagaatcacttgaacccagtggggcagaggttgcagtgagccaaaattgcaccactgcactccagcctgggtgacagacgagactctgcctcaaaaaaaaaacaaaaaacaaaaaraaattctccaagcttgagcaacctcttggggtccttgttaaaa

SEQ ID NO: 95141 - DNA, 1390 bp, Homo sapiens
caaggaaagatccccagccacaaaagcctggggagtacgaaaaaatggtgacaaattctgggtgatcgagtctatagtgggggagatgagcaagagtagtgaattggggtcagattgcaaagggtcttgaaaggcgcgataaggaagtcaagcttcacaaaactgtgggatgccagctgtggaattaaaccagagactgacgttatcatatttccccttttaaagaaagcacacacgggtgatagtttggatcgtgtaaagagaagctacatagaaagagagggagcaaggctgtcagatgcgtgtcttttggttcatattgcaattacctccgtcctttgataacttggataaatgccattttcaccactctgtttccttctcagcaaagcgatgcatttcacctgtgcttgaagaacctttgcagaaacattcaggggcaatagaagtcaggcactgggtggagttgcccacagaagagagaaaagcaagggagatctgcctgtgagcccaagtggacccctgagctcagggtacatgctaactccagaaatcctcaagtctaatgctcctccaacaagtggtttattcctagaaggtaaagatgcccaaaacgtggtggtccctctgggcaaacaccggtcattgcccctgattgcactcccccaacacaaatgtatgcatgcataaaccagtgttttgcaagctttaacttacgaccaaactgaactctgattcagtagattgggctggggcctgagattctgcatttcaaacacattcccaggagattctgatgctgttgttaattggtggatcctacatggtgtaacgaggttctaaacaccaatagactttcagctgcaagctctttgtctcaatttcaaagtaccactgacctcaacctaaaacctcaacctaacaaacgacctcaacctaaaatcctgtgcttccggttgtgagccttgtgactgtggaggagrcatttcctagcgctgagcctcagttcgccacctctgtaaattgcctgtggaagacatggctttggaggacagaaaagaaaagtgaaggaagagaaagatgaagccagagtgaagtggtagcattagtgctgtgattcacaaaaataacactataggaagaacctggatgatagtattctgaatacagcaggagcaccaatagagtagcagtagtaaaaatagcatcattataactaatagtgcagaaatagtactaggggtcctacccagaggaggactgattatttcagaggcagaggttggggcagaatagaaggcttaacagatgtggtacatctcactggttgagaattcagattctggagccaaaccgacatttgatgaaatgaagtgtgtattgaaaacag

SEQ ID NO: 95142 - DNA, 1133 bp, Homo sapiens
acaaaattctggcatggctatcatcataatgaattacctgaggcatgatgtaaaacgaagctagcgacataagaccaggagaccttttgggactatagagttttggtctatattttaagaacaacaggaagtcattaaagagctatttaggcaggaagaattgaaatttcaggtttaaaatttttaaaggtagaggctgttacatagagaatagacttacggtgcaagagaaacaagttggtgagaagaaggtggtggtatagtcgaatgatgagatggtggtgccttagaccagaagagtggctgcagtgatcctacctcaacctttccctacctttggaaagcatatttttgctctgtttgactctagagctccctcccaccatcccaccccacctcacgcatacggatcagcctgggcttatggtattgacagcgttgggtccttagtctagccttcccacaaactgactctccttgactttcttccattgcactgacccttaagctattgtttagccccaatgggactcactcacttaacatgtttgttacctgaaagaagcactaagaatttttttttttttttaaaagatgtcctcttttcttttttctttttgaaacagagttttgctctttttgcccaggctggagtgcaatggctcaatcttggctcattgcaacctctgcctcttgggttccagtgattctcttgtctcatacctacttagcatagtttatgtcttttaatccttataacaagactgtgaggtggataygacaatgtccatttttttctcacaagattaaataacatttttcaaggttacacgtataataagccaggctaaaatacaaagtaaacttcaagcaagtggccttcttttctgaggtgtctgtaaggcaaatacccctttgtcattgaggtcagatgctatgctttcttgggttgcaggcaggcacacaaagacaatggggcacagctttctttggaaaacaggctaagtggtttgtgatattacaaaattctgtttgacttgacgcaggaccttgaacaatcagataagatctggaatccttgagtaactcagaaccattaggactacgtaatgtggtagcctcctcctcaaagg

SEQ ID NO: 95143 - DNA, 566 bp, Homo sapiens
atatgtccagtctggatgaattacctccctctttagttcccctagagctcatctaatctccatctgctttgttttccaatatcatgagatgggactactctttcactggctagattgtgaccttttacaaagtaggcattgtygcttacttatctctgcctcattctccacccccaccccatactgcccagcaggatgcctgtcacccaacaagtgatcaatgaatgcttgttcaaatgaattaaattggattgaattaaaattgaaagcaaacatgaaaccaaatctgcctggatgcagaaaccctaatcggataaacagcgattgccttgagttcctgtctagtgatctcatattgttcccttcaagttagaaggatgtaagaagatgctagtgtgtgaatagagatgactgatcctttattgaatatcaactgatacccaatgttagactctctttgtaaaagttcttttaaggtttgtaagttggagaacatttttcaatctctttgaatgccccacagtttatagttctctggaataaatgctcttcttttagaagagctt

SEQ ID NO: 95144 - DNA, 552 bp, Homo sapiens
gcactagctttcctggtcagagcccctgcccaccaacagtgccggtcttggacccattccagtgcctaccctcgcccctcagtcacactccccaaatctcaggaaacccatgtgggccacaggccctagactgggggtctctggcaggggcgtggggagagccggggccccccaagctgaggtgggtggcagccaagcgacatgttgctaggcgggcaaagctgctagtagaggcgtccccacaccccgctgggccagctcccacccagaggtgaaggatgatggactccggcccatcagcatcctgactggtcaagaccccagtctcaggaccgcagatttgcytcccaaaagagctggccccaggagctgctgccaggctggccctccctcaccaccctctgccaccgcctacatggacagagaaccccagagcccaacggtcactctgggcaccaactgccaggcacagggttaccatggtgacagaggctggctgggaggggctggggcgccacgaacccagcctgctcctcaaccctctctcgggtg

SEQ ID NO: 95145 - DNA, 565 bp, Homo sapiens
tggagtctcgctctgtcacccagactggagtgcagtggtgtgatctcggctcactgcaacctccacctcctgggttcaagcaattcttgtgcctcaacttcccaaggagctgtgattacaggcgcccaccaccacgcccggctaattttttgtatttttagtagagacagggtttcaccatgttggccaggctggtctcgaactcctgacctcaagtgattccccccctttggcctcccgaagtactgggattacaggcatgaaccaccaggcctgacctttattcacattttaaatgagagtgaaaaaacattcattgtcaagatcaaagaatatcatyatcattattattgggttttttttaattatgtaaggtgacttgagtggggctgctagagattcacatgcggcaagcaaagcaccccagtaaccccttggtgcaaccactatgctgggcaaattactttgtttcactaagccttccattcctcatttgtaggataacaataatagtcacagtgttgttctaaggattaaatgggacaaaagtaaacacttagcacag

SEQ ID NO: 95146 - DNA, 1446 bp, Homo sapiens
ttcccattccttcacttgttcacttattcagcaaatatttaggaaccccttcttccttgctagacttttatatatttatgcaggtggtgataacgatgaacaaaacatacacgttcctacactcaggagcttgcctgctggcaggggaggctgatattttacaaataatttgaaaactatcgaattacatgagtgctacaaaggtataataagggactgtggcctgatttggggaacgagtcagattgccctcataattaagatgagccatgaaggacaaatacaacttgtctaggaaaagaaaggctgggatggtgcttctggcaaagggaatggcatgatcaaaggccctgtggtaggggagagagcatggcacattgtgagcactgaagaaaggccaggatggctggaattgtgtgcgtgtgcatagatccctttgcccctgtgttgatcaccatgctggtgtctctgtagagtaactgtctgccttttctcttttccagctgggtttgctcccagtttccgggctaccgaggatttcagtatgtgctggaatgcgatcaccattccggtgactacaaacatttccgggagtggggctctcatgccccgaccttccaggtgcagagcatccgcaggatccagcagtgaacaggggtgcggcacggaggagcgcatgcgtgcttatctgcaatggaggcgctctggaggctgtggtgtgttctctccttctgcctccccctgtaacctgtgtgaacccagcacccatgtgaactggtccgtgcacagtcagcacaaaaaactcaaacgaataaaaaagagaaagtctggtattagttgtgcttttcaattttattaatcttttcaaagaaccggtttttagccttgttttctctatcattattccactgatttttactcttaacttcagtatttcctttcttctatttacttcaggcctactttgttcttagtttttctagcttttttttaaggcagacttytgggtcattaattttaggcctctctttcccccacccagtacggtcatttagctataaatttccctccaagtatggctttagctgcttcccacaaatattaatttgatgtgttttcattgtcattcagtttgatattttctagtttcacttgtggttttttttttttcttttgacctatgggctatttaaagggatgttatttaaattccaaatactttaggattttctaggtgtttattgttattggtgtgtttttaaagaccaatgtggtcggagaacatattccttaagatttaagtcttctgcaatgaattaagacttattttatggcccagcacatggtttttgtattttaattttattttttgtttgtttgtttgttttgtttttaatgagtcaaggtttcactcgtcacccaggctggagtgcagtggtgcaatct

SEQ ID NO: 95147 - DNA, 981 bp, Homo sapiens
gaaggatgcattttaacttttgtgtggtgagccacatttgttatatttgaaccatgtgtgacgcaagggagaaaggtaaccacttggcttagagggggaagggtgagtctttgggttaacagaggtacttcctgccaatttaaaatgagctggttagatggtggaatacattaaaacgtgtgtgtgtctgtgtgtgtgtgtgtacatgcgcacatacacatgaatatatttttatatgcccaaaagactaatgtggatataaagcttattaaactggaccatgctgttttccagtctgaaacataaaggaaaaaaatgctattggaccgggcgcagtrgctcacgcctgtaatcccagcactttgggaggccaaggtgggcggatcgcaaggtcaggagatcgagaccatcctggctaacatggtgaaaccctgtctgtactaaaaatacaaaaaattagccgggcgtggtggcgggcgcctatagtcccagctacttgggaggctgaggcaggagaatggcgtgaacccgggaggcggagcttgcagtgagccaagatggcaccactgcactccagcctgggcaacagagcaagactccgtctccaaaaaaaaaaaaaatgctatctaagagtctatatgcctgtcactttggaattgtataatacataactctcagctgacctagaagtgcttctgagaccaggcctcatttgtgttttgttatatcttcagttatataaaccatgaggaacaaatggagaaagggaaaggacttcagctgatagtggagtgattcataaatcgataacatagatggaaaactaaggtccacagagattcatcgtccatgacccatgatgaattaatttctttattcaataaagctatatttagtattataaggtatattatctattgctgcctaacaaattacctcaaaacttggtggcttaaaacaacacacattcattatctcatg

SEQ ID NO: 95148 - DNA, 782 bp, Homo sapiens
gatccagggccttgacctcaccaacatcatgttctaaccactgagccagctgattcctcatcataatccaccagcatcctctcagtggcagtgaaactttatgataattacagcgctgtgcagcaccagatttaaagatagtggaggcagacaaaaaaaaaaaaaggctcgagattaccaagaaatattgtagtgtctgtggtgtctttggcctttaggctagaggaggtgcgctactggcatctcaaccaggcagcatggctagttttgagcaaaaatgacatatggtttattagtttcctaggactgccataacagattatcaccaactgggtggcttaaaacaacaaacattcattctctgacagttctggaggctagaaatccaaaatcgaggtgtcagcagggctgtgctctctccaaagtctccagggaagccctcctcacttctggtggttgtcggcgatccttggcatttgttggctgcaccactccagtctctgccttctctttcacatggccatcttccctctgtgtgtgtctgkgtgtctatgtctctgtgtgtctccttaaaaggaaccaatcattggatttagggcccaccttaatttagtatagcctcatcttaactcggttacataacattcacaggtaccaggtgttaggactcgaacttatctttctaggggacacaattcagccactatatatatggtgactataaaacccagccaaggtttataactgagccttttacatgttatagcttagatattatctaa

SEQ ID NO: 95149 - DNA, 1234 bp, Homo sapiens
atcagtttaaacccatgttgttcaagagtcagctgtgtttttgttctatacagaaattgtggcctggcacagtggctcacagtgtaatcccagcactttggkaagccgaggtgggtgaatcacctgaggtcaggagttcaagactggcctggccaacatggcgaaaccctgtctctactaaaaatacaaaaattagccaggcgtggtcatgcatgtctgtaatcccagctactcaggaggctgagtcaggagaatcgcttgaacccaggaggtggaggttgcagtgagccaagattatgccactgtcctccagcactccaacctgggtgacagagaaagactttgtctcaaaaacaacaacaacaacaaaaacagaaattgttacgcacccagatgtatcttgtacagcttctggagttgtatgtgccctagaactcttagaaaggttataaaaagggctcagcatctgtgcctatttatgatccatcaggggaaccacacaaatcaacagatgtccccagcccagaacgctgtgagtggtgaaccccagtggacacatgacccagtgttgggggtgtgaaacatccttctaggggtggagtgggggtgatgtctgagctgagactggatggtgagctcaggcagggtgagtgggtattggcaggcagagggacagggcaggaaaacccgcagacagacggagagcacaggatgggctagggaactgagacatcccctagcccaccctgggtgtgggggtctgtcccagggtctggggacagtgggaggacaagcaagctgggccaccttcagttctcagcctgagggggacagggagactggaaggttttcttcgcagggttgcttggctccatttgcctttgggaagattctgcaggactgaaagtatcagaggagacaagaggccatcgaggagaccgatgccacatcccataagggggtggaggctggatgggatggagccaaggaatggacacagggaaagaggacccagacttagccctgcaaggctgaccggatggtggggcagggacaatctatagtcaggtccccctccccctatatagctgtccatccacctaagactcccaggaccaagcctcaggtgaggaatccattccccctgggcccaagggctctgtctaatggggcttcccaagcatgatgtattccagccccaagcagcccagagcccacaggcagccattaccag

SEQ ID NO: 95150 - DNA, 638 bp, Homo sapiens
cagccccagtcccagctctctggggaaagaatgagctgggtgaatgagaagggcagctccatggagcataaataactcggctgggcagctgcaggctgcctaggtctcccagcgccccgaccctggccctgcagggtgcttccatctctgagagccagggacaggagggccaaaccccctgatcaaaagtgcagagagcagccattgctcttgggccctgtcctttgtctggtcagcagcttttaaggctgtggcttacacggtcccttccctttcatggtgtccaggcactgcttggcaattaggcctgggcccctgggkgctgcggccatgggctctgggcaccccttgggctgcttcctcacctatggaacaggcacgatatgggaagagtgcctgggctcacacgagctaatgtgtgcacagggctgatatgacggggcacacccaagctggagagacagtcctgtaggacacagcgggaggaaagagtcccttagctacggcccccagagacttcacaggggaaggaggctgccgcccaggttgtttgttaagaggataaaacatttcctgtttggactaggccagggtggatgcgtcagtgaatctgccccagaggggctgtgtttcccgga

SEQ ID NO: 95151 - DNA, 638 bp, Homo sapiens
cagccccagtcccagctctctggggaaagaatgagctgggtgaatgagaagggcagctccatggagcataaataactcggctgggcagctgcaggctgcctaggtctcccagcgccccgaccctggccctgcagggtgcttccatctctgagagccagggacaggagggccaaaccccctgatcaaaagtgcagagagcagccattgctcttgggccctgtcctttgtctggtcagcagcttttaaggctgtggcttacacggtcccttccctttcatggtgtccaggcactgcttggcaattaggcctgggcccctgggggctgcggccatgggctctgggcaccccttgggctgcttcctcacctatggaacaggcacgatatgggaagagtgcctgggctcacacragctaatgtgtgcacagggctgatatgacggggcacacccaagctggagagacagtcctgtaggacacagcgggaggaaagagtcccttagctacggcccccagagacttcacaggggaaggaggctgccgcccaggttgtttgttaagaggataaaacatttcctgtttggactaggccagggtggatgcgtcagtgaatctgccccagaggggctgtgtttcccgga

SEQ ID NO: 95152 - DNA, 638 bp, Homo sapiens
cagccccagtcccagctctctggggaaagaatgagctgggtgaatgagaagggcagctccatggagcataaataactcggctgggcagctgcaggctgcctaggtctcccagcgccccgaccctggccctgcagggtgcttccatctctgagagccagggacaggagggccaaaccccctgatcaaaagtgcagagagcagccattgctcttgggccctgtcctttgtctggtcagcagcttttaaggctgtggcttacacggtcccttccctttcatggtgtccaggcactgcttggcaattaggcctgggcccctgggggctgcggccatgggctctgggcaccccttgggctgcttcctcacctatggaacaggcacgatatgggaagagtgcctgggctcacacgagctaatgtgtgcacagggctgatatgacggggcacacccaagctggagagacagtcctgtaggacacagygggaggaaagagtcccttagctacggcccccagagacttcacaggggaaggaggctgccgcccaggttgtttgttaagaggataaaacatttcctgtttggactaggccagggtggatgcgtcagtgaatctgccccagaggggctgtgtttcccgga

SEQ ID NO: 95153 - DNA, 802 bp, Homo sapiens
tgaagatgctccgtgtgctcttgtttggttgggtttgactaggttcggtgggaagctcacagatttgagatcacatgattggagttcatgmtgccttcctcctttaatagctgtgcatcctcaggcacatcctctaccgtaacctctctggacctgtacaatgtggacagtaatgtctgttatggttctgtctatgtccctgtgaagagtaagcaagttaatggctatgaaaccattcagtaacctgcaaaatgccagcaatggtggcattatgactgtctgggctctgtgctaagagtctatgcttggagaatgtattctggcctctaggcaactagctttggcttgagttgactgagacatttggcttcatagttattttttgcagtccgtcagcctactctagtctcatctgtccaactacttcaccatgggatgttggccaaaccaccccacctgtctgtgcctcagtgactccttctggaaaatgggtctggtatatagctccatttgtctcagggagacccatcaaagcaaatcaagttcattcacttaaccagcatttatcaagggtctactctgtgcctggcacctttagggtagaatcatgaataaaataaagctcctgccctagaagaagagacagacaagtgatcagtcagttccaaggcaataaaatcaggttacaaaagaaaaacaaggatgatgacatggggcccaccagaagccttgtgctaaaacagcaggattagaagagaccttcttgccaacttaatttcactaatgtctccaggaaagaacc

SEQ ID NO: 95154 - DNA, 802 bp, Homo sapiens
tgaagatgctccgtgtgctcttgtttggttgggtttgactaggttcggtgggaagctcacagatttgagatcacatgattggagttcatgatgccttcctcctttaatagctgtgmatcctcaggcacatcctctaccgtaacctctctggacctgtacaatgtggacagtaatgtctgttatggttctgtctatgtccctgtgaagagtaagcaagttaatggctatgaaaccattcagtaacctgcaaaatgccagcaatggtggcattatgactgtctgggctctgtgctaagagtctatgcttggagaatgtattctggcctctaggcaactagctttggcttgagttgactgagacatttggcttcatagttattttttgcagtccgtcagcctactctagtctcatctgtccaactacttcaccatgggatgttggccaaaccaccccacctgtctgtgcctcagtgactccttctggaaaatgggtctggtatatagctccatttgtctcagggagacccatcaaagcaaatcaagttcattcacttaaccagcatttatcaagggtctactctgtgcctggcacctttagggtagaatcatgaataaaataaagctcctgccctagaagaagagacagacaagtgatcagtcagttccaaggcaataaaatcaggttacaaaagaaaaacaaggatgatgacatggggcccaccagaagccttgtgctaaaacagcaggattagaagagaccttcttgccaacttaatttcactaatgtctccaggaaagaacc

SEQ ID NO: 95155 - DNA, 802 bp, Homo sapiens
tgaagatgctccgtgtgctcttgtttggttgggtttgactaggttcggtgggaagctcacagatttgagatcacatgattggagttcatgatgccttcctcctttaatagctgtgcatcctcaggcacatcctctaccgtaacctctctggacctgtacaatgtggacagtaatgtctgttatggttctgtctatgtccctgtgaagagtaagcaagttaatggctatgaaaccattcagtaacctgcaaaatgccagcaatggtggcattatgactgtctgggctctgtgctaagagtctatgcttggagaatgtattctggcctctaggcaactagctttggcttgwgttgactgagacatttggcttcatagttattttttgcagtccgtcagcctactctagtctcatctgtccaactacttcaccatgggatgttggccaaaccaccccacctgtctgtgcctcagtgactccttctggaaaatgggtctggtatatagctccatttgtctcagggagacccatcaaagcaaatcaagttcattcacttaaccagcatttatcaagggtctactctgtgcctggcacctttagggtagaatcatgaataaaataaagctcctgccctagaagaagagacagacaagtgatcagtcagttccaaggcaataaaatcaggttacaaaagaaaaacaaggatgatgacatggggcccaccagaagccttgtgctaaaacagcaggattagaagagaccttcttgccaacttaatttcactaatgtctccaggaaagaacc

SEQ ID NO: 95156 - DNA, 664 bp, Homo sapiens
tttttaccctgttcatgaggactccatcctcatgacctaatcagcatccaatggctccacttcctaataccaccacattgtgggggaggtaggatttcaacatatgaatrttgggaagaaacaaacattcagtccattacgagatggtttgtaaatggtttcatctggagaacacaataaatgactgctttccctaccagtcctcgtttcactggactggatttcactgaattccactgagccaggtgaactggagtgtacatttatgttcacaaaagtgatacttcattttttttccttctttgttcttaaagaaagtgtcagtggttcccacaacttgagggcctgagactggtttttagttttatccttggcagtggctcctcctaaaacaggctaattgcttttacatagaatatgaatttaatgagactgcttattttccgaataaaaatcttaggtttataatctgcctgacatttttgttttgcctgatgttttaccacaatgtttggtcttggtagcttttaaaaaggttgagctttttataaacctcataaaccagcttgagttgtcttttcttttcactcccagccccctcatcattgtcttttttaaaataaatttaatgtatatatttaaggtacacaacatgatgctacta

SEQ ID NO: 95157 - DNA, 664 bp, Homo sapiens
tttttaccctgttcatgaggactccatcctcatgacctaatcagcatccaatggctccacttcctaataccaccacattgtgggggaggtaggatttcaacatatgaatgttgggaagaaacaaacattcagtccattacgagatggtttgtaaatggtttcatctggagaacacaataaatgactgctttccctaccagtcctcgtttcactggactggatttcactgaattccactgagccaggtgaactggagtgtacatttatgttcacaaaagtgatacttcatttyttttccttctttgttcttaaagaaagtgtcagtggttcccacaacttgagggcctgagactggtttttagttttatccttggcagtggctcctcctaaaacaggctaattgcttttacatagaatatgaatttaatgagactgcttattttccgaataaaaatcttaggtttataatctgcctgacatttttgttttgcctgatgttttaccacaatgtttggtcttggtagcttttaaaaaggttgagctttttataaacctcataaaccagcttgagttgtcttttcttttcactcccagccccctcatcattgtcttttttaaaataaatttaatgtatatatttaaggtacacaacatgatgctacta

SEQ ID NO: 95158 - DNA, 664 bp, Homo sapiens
tttttaccctgttcatgaggactccatcctcatgacctaatcagcatccaatggctccacttcctaataccaccacattgtgggggaggtaggatttcaacatatgaatgttgggaagaaacaaacattcagtccattacgagatggtttgtaaatggtttcatctggagaacacaataaatgactgctttccctaccagtcctcgtttcactggactggatttcactgaattccactgagccaggtgaactggagtgtacatttatgttcacaaaagtgatacttcattttttttccttctttgttcttaaagaaagtgtcagtggttcccacaacttgagggcctgagactggtttttagttttayccttggcagtggctcctcctaaaacaggctaattgcttttacatagaatatgaatttaatgagactgcttattttccgaataaaaatcttaggtttataatctgcctgacatttttgttttgcctgatgttttaccacaatgtttggtcttggtagcttttaaaaaggttgagctttttataaacctcataaaccagcttgagttgtcttttcttttcactcccagccccctcatcattgtcttttttaaaataaatttaatgtatatatttaaggtacacaacatgatgctacta

SEQ ID NO: 95159 - DNA, 664 bp, Homo sapiens
tttttaccctgttcatgaggactccatcctcatgacctaatcagcatccaatggctccacttcctaataccaccacattgtgggggaggtaggatttcaacatatgaatgttgggaagaaacaaacattcagtccattacgagatggtttgtaaatggtttcatctggagaacacaataaatgactgctttccctaccagtcctcgtttcactggactggatttcactgaattccactgagccaggtgaactggagtgtacatttatgttcacaaaagtgatacttcattttttttccttctttgttcttaaagaaagtgtcagtggttcccacaacttgagggcctgagactggtttttagttttatccttggcagtggctcctcctaaaacaggctaattgcttttacatagaatatgaatttaatgagactgcttattttccgaataaaaatcttaggttkataatctgcctgacatttttgttttgcctgatgttttaccacaatgtttggtcttggtagcttttaaaaaggttgagctttttataaacctcataaaccagcttgagttgtcttttcttttcactcccagccccctcatcattgtcttttttaaaataaatttaatgtatatatttaaggtacacaacatgatgctacta

SEQ ID NO: 95160 - DNA, 681 bp, Homo sapiens
ctaggccttcaaaagtatcagagaactgaaactcacagattgccacatgcagacaatgaaatacattcaagatgattgtttctttgcccctccctaactcctgtttgcttactcattgttacatttcttctctgctgtataaaaacccctagttttagttgatcagggagatggatttgagactgagctcccatctccttggctgcagcacccgattaaagccttcttccttggcaatactcatcatctgagtcattggctttcagtgtggcgagcagaaggacctagaccaaacccctggtgttttggtaacagtcaggttgctgaaaggtccaaaactaagtcagaaggaattgccaaggaacaatggggctgaaagtgtcaggaaggattgtctgatggcaagcaacagaactcaacttgggctgtactcacagaggagaattgatcggtaggctatttggcagctcagagaatcaaaagaaaggcaagaaaccaggtttagaaaaagaataagaaccgaaaccatgtcagggcrtggagagtaggaagttatgggcaggcccggaagggcatcactggtcatatgaatagttcttggttgtttctgtagcccgtgctgcttctgttaagatccaaggtccagagagggctgggacctcccagctgaggtctcatgcc

SEQ ID NO: 95161 - DNA, 548 bp, Homo sapiens
ggaagctggagacttagggaggagacgtcttgttctagtttcagggtcgtggagctgcagactgaggcaggagcattattgttayagttggagtgtcagaaagctggcgacccagggaggagaggtcttgttgtggtctgagggtcgtggagctgctgacccagggaggagcaattttgttgtagttcgagggtctggaagctggcgacccagggaggagaggtcttgttctagattgatttttgtggagctgaagacccaggcaggagcaacgttgttgcaattcgaggatctggaagctggagacttagggaggagacgtgttgttctagtttcagggtcatggagctgcagactgaggcaggagcattgttgttatagttcgagggtcagaaagctggcgacccagggaggagaggtcttgttgtggtctgagggtcgtggagctgctgacgcagggaggagcaattttgttgtagttcgagggtcaggaagctggcgacccagggaggagaggtcttcttctggtgtgagggtcgtggagctgc

SEQ ID NO: 95162 - DNA, 548 bp, Homo sapiens
ggaagctggagacttagggaggagacgtcttgttctagtttcagggtcgtggagctgcagactgaggcaggagcattattgttatagttggagkgtcagaaagctggcgacccagggaggagaggtcttgttgtggtctgagggtcgtggagctgctgacccagggaggagcaattttgttgtagttcgagggtctggaagctggcgacccagggaggagaggtcttgttctagattgatttttgtggagctgaagacccaggcaggagcaacgttgttgcaattcgaggatctggaagctggagacttagggaggagacgtgttgttctagtttcagggtcatggagctgcagactgaggcaggagcattgttgttatagttcgagggtcagaaagctggcgacccagggaggagaggtcttgttgtggtctgagggtcgtggagctgctgacgcagggaggagcaattttgttgtagttcgagggtcaggaagctggcgacccagggaggagaggtcttcttctggtgtgagggtcgtggagctgc

SEQ ID NO: 95163 - DNA, 548 bp, Homo sapiens
ggaagctggagacttagggaggagacgtcttgttctagtttcagggtcgtggagctgcagactgaggcaggagcattattgttatagttggagtgtcagaaagctggcgacccagggaggagaggtcttgttgtggtctgagggtcgtggagctgctgacccagggaggagcaattttgttgtagttcgagggtctggaagctggcgacccagggaggagaggtcttgttctagattgatttttgtggagctgaagacccaggcaggagcaacgttgttgcaattcgaggatctggaagctggagacttagggaggagacstgttgttctagtttcagggtcatggagctgcagactgaggcaggagcattgttgttatagttcgagggtcagaaagctggcgacccagggaggagaggtcttgttgtggtctgagggtcgtggagctgctgacgcagggaggagcaattttgttgtagttcgagggtcaggaagctggcgacccagggaggagaggtcttcttctggtgtgagggtcgtggagctgc

SEQ ID NO: 95164 - DNA, 713 bp, Homo sapiens
tggccctgtgccggggsgaggcaaaggaccacacaatacatgtgatactcacgggatccttcataggccttacaccagtcctgccaggcaggtggtcatcctcatgaagactcagagagggcaagtgatttgcccaagatcacacagctggtatccgagccctggtttactgactccacagatctggctgttgcgttctgccagaatacctccactgagggccttaaccccctgcctccctccatctcctccaccatggtccagccaagccagtcatctgtccccctctgctgctcccagcgtccattcacctcccctacagctcattctttgcttagcagctggagtgatcttttagcctctgcctaaaaccgttcctggcttccttaccatttgggttaaggcctccagatcctcaagatgtctgaaggccgtgcctaatttagtccttgcatgcaatttccagcctggcctcaacttgttctatccttgcccacttcccttgagccacgctgcaagctctgctgcctccggcccttggtacgtgctttgcacccttggcctgaatgttgcttaaactccagctcatgtgcctgcctcagagaggccttccctgccacccctggcttctgttttctctgtccgtccttctcatgacccctttccttcatggtgcttgtaacaggctgcggttcctgttgactcgcgtttca

SEQ ID NO: 95165 - DNA, 713 bp, Homo sapiens
tggccctgtgccggggggaggcaaaggaccacacaatacatgtgatactcasgggatccttcataggccttacaccagtcctgccaggcaggtggtcatcctcatgaagactcagagagggcaagtgatttgcccaagatcacacagctggtatccgagccctggtttactgactccacagatctggctgttgcgttctgccagaatacctccactgagggccttaaccccctgcctccctccatctcctccaccatggtccagccaagccagtcatctgtccccctctgctgctcccagcgtccattcacctcccctacagctcattctttgcttagcagctggagtgatcttttagcctctgcctaaaaccgttcctggcttccttaccatttgggttaaggcctccagatcctcaagatgtctgaaggccgtgcctaatttagtccttgcatgcaatttccagcctggcctcaacttgttctatccttgcccacttcccttgagccacgctgcaagctctgctgcctccggcccttggtacgtgctttgcacccttggcctgaatgttgcttaaactccagctcatgtgcctgcctcagagaggccttccctgccacccctggcttctgttttctctgtccgtccttctcatgacccctttccttcatggtgcttgtaacaggctgcggttcctgttgactcgcgtttca

SEQ ID NO: 95166 - DNA, 713 bp, Homo sapiens
tggccctgtgccggggggaggcaaaggaccacacaatacatgtgatactcacggratccttcataggccttacaccagtcctgccaggcaggtggtcatcctcatgaagactcagagagggcaagtgatttgcccaagatcacacagctggtatccgagccctggtttactgactccacagatctggctgttgcgttctgccagaatacctccactgagggccttaaccccctgcctccctccatctcctccaccatggtccagccaagccagtcatctgtccccctctgctgctcccagcgtccattcacctcccctacagctcattctttgcttagcagctggagtgatcttttagcctctgcctaaaaccgttcctggcttccttaccatttgggttaaggcctccagatcctcaagatgtctgaaggccgtgcctaatttagtccttgcatgcaatttccagcctggcctcaacttgttctatccttgcccacttcccttgagccacgctgcaagctctgctgcctccggcccttggtacgtgctttgcacccttggcctgaatgttgcttaaactccagctcatgtgcctgcctcagagaggccttccctgccacccctggcttctgttttctctgtccgtccttctcatgacccctttccttcatggtgcttgtaacaggctgcggttcctgttgactcgcgtttca

SEQ ID NO: 95167 - DNA, 1117 bp, Homo sapiens
tatccaaattttcacagaacagttttaatgaaatggaagcacatactggaatcattttagttagggatgatttgtatcagactaaaacactctgaccttttggtttcacatactaattgaaaactctttaggatgaatgttgaaatagggaagagagacttacaggctcagaaagctagggaagtgaaaataattgtaaaacagctctaacatttttaaatgtagcrgctgctgttgtgaacttcattctgccttttctttctaattctctgggtccagatctgtttacaccacctcctggtacaacacccctaagagctgactttggcagttgtgtatctctgttactggggcttgaattaaacatcttagtgaacaaactttagctttactcttcaatactgaaaaaaaaaatgttatgcccatggttaaaccagtatcctactcaatccttctgtgatgttactcacaaaatgaattgcataaaatcggatacctgagattgttttggctgggaggatccttgaattataaagattaaattagattaatcaggaatgacctctgttactcctcatggggacattcaacttctgactgaactttttttttcctttaaaattggggtaatagcccatatcctccacatctcagaaggttcatttttattggtccaaaggaagtatatgaaaacacttccaaaaaaagtgtaggtgttatcagtatatcataccatgtgagagaaggtgtaaagcaacaaaaggagttttgttttgttttgttttgttttgttttgttttgtttttgagatggagtttcactcttgttgcccaggctggagtgcaatggcgccatctcagctcactgcaacctctgcctcccaggttcaagcgattctcctgcttcagcctcccaagcagctgggattacaggcatgcaccaccatgaccagccaattttgtgttgttagtagagatggggtttctccatgttggtcaggttggtctcgaacgcccgacctcaggtgatccgcctgccttggcttcccaaagtgctgggattacaggcgtgagccactgcgcctggacaggagtttggtttttaaaaatttaacaca

SEQ ID NO: 95168 - DNA, 1117 bp, Homo sapiens
tatccaaattttcacagaacagttttaatgaaatggaagcacatactggaatcattttagttagggatgatttgtatcagactaaaacactctgaccttttggtttcacatactaattgaaaactctttaggatgaatgttgaaatagggaagagagacttacaggctcagaaagctagggaagtgaaaataattgtaaaacagctctaacatttttaaatgtagcagctgctgttgtgaacttcattctgccttttctttctaattctctgggtccagatctgtttacaccacctcctggtacaacacccctaagagctgactttggcagttgtgtatctctgttactggggcttgaattaaacatcttagtgaacaaactttagctttactcttcaatactgaaaaaaaaaatgttatgcccatggttaaaccagtatcctactcaatccttctgtgatgttactcacaaaatgaattgcataaaatcggatacctgagattgttttggctgggaggatccttgaattataaagattaaattagattaatcaggaatgacctctgttactcctyatggggacattcaacttctgactgaactttttttttcctttaaaattggggtaatagcccatatcctccacatctcagaaggttcatttttattggtccaaaggaagtatatgaaaacacttccaaaaaaagtgtaggtgttatcagtatatcataccatgtgagagaaggtgtaaagcaacaaaaggagttttgttttgttttgttttgttttgttttgttttgtttttgagatggagtttcactcttgttgcccaggctggagtgcaatggcgccatctcagctcactgcaacctctgcctcccaggttcaagcgattctcctgcttcagcctcccaagcagctgggattacaggcatgcaccaccatgaccagccaattttgtgttgttagtagagatggggtttctccatgttggtcaggttggtctcgaacgcccgacctcaggtgatccgcctgccttggcttcccaaagtgctgggattacaggcgtgagccactgcgcctggacaggagtttggtttttaaaaatttaacaca

SEQ ID NO: 95169 - DNA, 1117 bp, Homo sapiens
tatccaaattttcacagaacagttttaatgaaatggaagcacatactggaatcattttagttagggatgatttgtatcagactaaaacactctgaccttttggtttcacatactaattgaaaactctttaggatgaatgttgaaatagggaagagagacttacaggctcagaaagctagggaagtgaaaataattgtaaaacagctctaacatttttaaatgtagcagctgctgttgtgaacttcattctgccttttctttctaattctctgggtccagatctgtttacaccacctcctggtacaacacccctaagagctgactttggcagttgtgtatctctgttactggggcttgaattaaacatcttagtgaacaaactttagctttactcttcaatactgaaaaaaaaaatgttatgcccatggttaaaccagtatcctactcaatccttctgtgatgttactcacaaaatgaattgcataaaatcggatacctgagattgttttggctgggaggatccttgaattataaagattaaattagattaatcaggaatgacctctgttactcctcatggggacattcaacttctgactgaactttttttttcctttaaaattggggtaatagcccatatcctccacatctcagaaggttcatttttattggtccaaaggaagtatatgaaaacacttccaaaaaaagygtaggtgttatcagtatatcataccatgtgagagaaggtgtaaagcaacaaaaggagttttgttttgttttgttttgttttgttttgttttgtttttgagatggagtttcactcttgttgcccaggctggagtgcaatggcgccatctcagctcactgcaacctctgcctcccaggttcaagcgattctcctgcttcagcctcccaagcagctgggattacaggcatgcaccaccatgaccagccaattttgtgttgttagtagagatggggtttctccatgttggtcaggttggtctcgaacgcccgacctcaggtgatccgcctgccttggcttcccaaagtgctgggattacaggcgtgagccactgcgcctggacaggagtttggtttttaaaaatttaacaca

SEQ ID NO: 95170 - DNA, 735 bp, Homo sapiens
cagctagaagagcttgaatgcctcagccagggaatcccttctgagcctccagctggggcaggagttgtcccaggacacagcaggtaactggccatgaaagagaaaagaggctcatatatatcgaatatgtgctatatgatgcaaacataatgatctggctctcatcatgtcttctcaaagaatgatctccattttacagataaggaaaactaaggctcagaaagggcaagcatcttatactagttcacacagccaaaaagtggctgaactcagaatccaagctcctaaatgtagattttttttttcagttttctagagcagtgctgtccaacacaaatgtaatacaagccacatatgtaatttaagcttttctatttttgttgttaattcttttgttaattaaattttctatttaatattcactmtttgggtgatgggtacactaaaagtccagatgtcaccgctatctatgcaatatatgtatgtaagaaatcggaacttgtactccctatatatacaaaaattaaaaaaaaaattcaagcagcttcattaaaaaagtttgacaagtaacaagtgaaatgaatgttaatatttaatttaaccaatacatcaaaattatcatttcattatgtaatcaatagaaacggtgatgaatgagatgtttcactttttttcattctaaagattttacacttgaacttacagcgcagctccattcagatgagctacctttca

SEQ ID NO: 95171 - DNA, 553 bp, Homo sapiens
gcaaatggggtctgagaggagggtttggatgcaggagggttggttggaaggagatgcaggaagcaggagtgagggagcggggagatgaggaagaaaagcaggccaccatatggggggcatgtgtagctggttatcactgggggaaactgggactctagcctgcaacacatcctctgaggagccccgcagaatgtgcctcagaattgctcccttgagggatgggggcatttgtccctcaactcctgaacccctagcagagggccagccctggggacgtgagtgccttgtacttgttggctgcacctagtggagaactaagctgcttctgcatctttggagatgtccctaaggcagaaaagtggagtcgtttcctggctgctkcttgcgaagagtgttactagtctgcatggaagtgtgtgccacagcgatgcagaaatcggaggtggttcaaggccgtgaaatgcaggcaaacaatttcccattagtcataaatgctgagggtgtcaacaggctcagtgtggaatcatgattagcactggagccatgctgtctg

SEQ ID NO: 95172 - DNA, 582 bp, Homo sapiens
ccattcatcaccgcgcggccgcggcgcccagacaatgtggggagcggccctggcccgcgcccgcgcggctgtctgtacaaaggatgcgctgttaacacgtgtacggtaatgggctccctcacggcctcctccccggccaccckctcccagcctgacggatggcccgagccatccatctacattatgtcatgggcggtgagcctcctcctccgtccagtccgtctggccgtccaggaccagccatggccttggccgtgcgccctacttgggcaacccccattcccttcccctctgcggaaggaacctcgtgcggagtgaggcctactacgtgctgggccccagctgtgctgtctccttgattttcatgcaaggtgatgtggcttattagcccatcctgcagaggaggaaactgagacttgaagctgggaaacctttattctaagaacacacagctctggggtttgatagagttggaatttttttttcttacagctttgttgagactagacttctcataccatagaattcacacatgtaaagtatacatttcaatttttttttgtatgttcacatagttctgca

SEQ ID NO: 95173 - DNA, 1631 bp, Homo sapiens
aatagctcattcacaaaaaagtcacacacacacacacacacacacacggtaaagactatatcaaatgtgaatttacgtatgcctctgtatgtttgccaggatgaagaagtagagaggaagagattaaggaaatttcagaaggacagatgcacaagaagataatactctcaagtaattttattgaaaaacatcaattacctaggagggaaagactgggcatctcccaaagtctacagaaccattctaaaagagagagtaaagtaattgaaaatgtacatgcagccatgtgaattctcaaaagaatatctaatgaaatatttttctttgggcacaactagggaatagcatatttccctgaaattgatactaaatagaaacaagatgtctgataacaatgtatatatagctcagaatgctttcattctcaaagtatcatcaagtaagagattgtggtgctgtgtgcaatatggaaaatgacaacagatatgacatggctagaaagtaagaagactatctcccttaagccacatgtatagatgcatcttcttggcccatctactcaattctcaagagaattcaaagtctgtctttcagaaggcagcagcagaagggcgtgtcaggcatgttaccaattaaccatggaggcaattcatttaaaaaacttctggcaaactttccgtaggcatgaaatgggaatgaagaaacatctcaatggaaaaaaaaatgagaataaatgaaataatgtaaatgaaagacttaagcctttaaaaggaatgaaccatrgaaatgggaggtgggagaatgtagtagtgaagaagcaaggttccagaggcagactgctcaagtccaaaagtcatatctccaccatttactacctgggcaagttccttaaggtctgagactcagtttattcatctctaaaatgagagattaaataaacacctacttcatagaaatggaaacacccagcctagtgtatggcacatagtaatacttaataaatgttagattcttctttttactactatatccatatatataataaaaatgttgttgagggactactgttattatatggattataagttgatagggcttttttctacatattaaaatcaatctctttcagatgtgaatcaaatgatccaaattattccatatgtttcagcagaataaaggaaatggctttttatgaaatagcatttctattgaatttagtaatcactctctaacaaattaatctcgatgacttggtgagttgttccataaggaattccttttgtattggtggcaaaataccaacattcccattttaaaatattttattttcttttcatattttctttcctttttaatttcttttaatttttattttctttaatcaagaaatgctgtagattgtgtgctatagcaataggtgctgatactgaccatgaaggtgactaaaacagaatgtgcatgaacaaagagaatggtttctgcaccagtgacatttgtttagttcctttatgtgatcctaaaaataacattaagagaagggacaaagaagagcaatggagagatcagatgtacagacaagaaagtagaggaagcaagaaaaagaaaacataaattttttacaaggagatatg

SEQ ID NO: 95174 - DNA, 1631 bp, Homo sapiens
aatagctcattcacaaaaaagtcacacacacacacacacacacacacggtaaagactatatcaaatgtgaatttacgtatgcctctgtatgtttgccaggatgaagaagtagagaggaagagattaaggaaatttcagaaggacagatgcacaagaagataatactctcaagtaattttattgaaaaacatcaattacctaggagggaaagactgggcatctcccaaagtctacagaaccattctaaaagagagagtaaagtaattgaaaatgtacatgcagccatgtgaattctcaaaagaatatctaatgaaatatttttctttgggcacaactagggaatagcatatttccctgaaattgatactaaatagaaacaagatgtctgataacaatgtatatatagctcagaatgctttcattctcaaagtatcatcaagtaagagattgtggtgctgtgtgcaatatggaaaatgacaacagatatgacatggctagaaagtaagaagactatctcccttaagccacatgtatagatgcatcttcttggcccatctactcaattctcaagagaattcaaagtctgtctttcagaaggcagcagcagaagggcgtgtcaggcatgttaccaattaaccatggaggcaattcatttaaaaaacttctggcaaactttccgtaggcatgaaatgggaatgaagaaacatctcaatggaaaaaaaaatgagaataaatgaaataatgtaaatgaaagacttaagcctttaaaaggaatgaaccatagaaatgggaggtgggagaatgtagtagtgaagaagcaaggttccagaggcagactgctcaagtccaaaagtcatatctccaccatttactacctgggcaagttccttaaggtctgagactcagtttattcatctctaaaatgagagattaaataaacacctacttcatagaaatggaaacacccagcctagtgtatggcacatagtaatacttaataaatgttagattcttctttttactactatatccatatatataataaaaatgttgttgagggactactgttattatatggattataagttgatagggcttttttctacatattaaaatcaatctctttcagatgtgaatcaaatgatccaaattattccatatgtttcagcagaataaaggaaatggctttttatgaaatagcatttctattgaatttagtaatcactctctaacaaattaatctcgatgacttggtgagttgttccataaggaattccttttgtattggtggcaaaataccaacattcccattttaaaatattttattttcttttcatattttctttcctttttaatttcttttaatttttattttctttaatcaagaaatgctgtagattgtgtgctatagcaataggtgctgatactgaccatgaaggtgactaaaacagaatgtgcatgaacaaagagaatggtttctgcaccagtgacatttgtttagttcctttatgtgaycctaaaaataacattaagagaagggacaaagaagagcaatggagagatcagatgtacagacaagaaagtagaggaagcaagaaaaagaaaacataaattttttacaaggagatatg

SEQ ID NO: 95175 - DNA, 1006 bp, Homo sapiens
accattcctggaatttctcccaactaaacagatgaatcataggctcacacactcaacgactcacaaaaaatagaawttaaaagtgtagaaaagatgcttagtatttgaatatccttctatctaagcacataaatagaaacaaacaaaatgtatcatcatatctgaaagcagttctgtagtctccttggcttctctctaaaagtatagttctctcagagactgcagacaggatgcatccactcttggttatttggctggttctgccataaaggaaagattaattaatgacctctatagttctatgtgtaactatccttcaaatgtattcacccatattttacttcattttctttgttgctttcccatagaagagataatggggtacatattcccgtagaacaatagattattatcctaattatagttgcctggtgttttctacacttttaccattttattaaaaacaattatctgagaaaaaccaatcttttgtaatacctaccctattgttctcatttctctctgattctgatgaggtcttttcaaagggtattttattcataattatagactacagggcaattgctcagaaactgagtccaggagatattttgttaagcttaatttttcttgtacttcttgatccaattatatccttagtttttaaaaactactagcaacttaataaaccaatttcttttctataagccacacatactattagtaataatcagcattcaagatgtttttaaaaagtgaatattttagaaaagtatgaaatggtaaatatgattttgtgtaataaaattcatctatctcttgcacataaataactgtgaaaaaaatgtaccttaaatccaagcattcttccctgattatggggagcacttaataggtattttatgtaggcttttgatcatctcagaaaaaaacatctatggcattgggtctgtgcttttaaaaagtcaggatcagtcaagagatacctgggtgaataaagaggctg

SEQ ID NO: 95176 - DNA, 512 bp, Homo sapiens
tccagtgccatgttaaatattggtaacattaggggaccacctcattcttcctgaaagtctgttaccatgttattacagatgaggcctacctctaaatgatcttctgctacagatgaggcctacctctaaatgatcttctgctacagatgaggcctacctctaaatgatcttctgcttcattcactctgtcttcctcctctctctcgccaattctcaaccatcagctcttctctttatatacttatttccttaaaaaagcatctgtgttctcacatcagcatctacattttagcacattttaataycttctttggtcctaggtgctcttatctcaaaggtcctacctcatattatatcaaatatattaaaataactgtagtcagtaaaatgcacccatagcatttgtgtattatatgagttgagttgtattaatagttgacgacttgacacattattttatagatatgtaattaaatatctatataaaatatttactgatttccatttttcag

SEQ ID NO: 95177 - DNA, 855 bp, Homo sapiens
ttaaaaatgcctttttcttcctctcctatacacttttatcacatctcagctactcccacacttattatctctcaactcccccactctatgaaatatcctctagccttaagctttaaataccagttatatttttctttattcctgattctcaatttctaaagcctaaaaatctatttggcaaagctagactttcctttaggggtgataaatgtaagaaaaaaaagagacttttttttaatagttggaggaaaaaagctgtgaataatcaaaaagtaattttttaactttctgtattatgaatttattgtgtgaccttaagtagtcacatarcctctcattttgtcatgttcttactcaaattctacatgtaaatgtaaaatgaaaaaaatcttgaaaaaatttaaagcttctgtacaaatccaagttggttttattttatacagaatgatacaggttaaaaaaacaaatattttaataactttttatataaaatagtttcagtctttactgaacagaaatattgtcatggtgaatttttcatataatgtttggtttggacattttcttctccaaaatattaaaagttatccttaaaatgttgattaatttattacttgtgtagcatttcattcttatttgactttcaaaaatttaaaaactttaagcaattttctgtgattaattttataatactctttaaattccatactaagagtaagtttaacaactttttttttttagtttcaacatttattttcattttaggggtacatgtgcaggatgtacaggtttgttacataggcaaacgtgtgccatcgtggcttgctgcatgtaacaacccatcacccagatact

SEQ ID NO: 95178 - DNA, 1017 bp, Homo sapiens
cctctgcctgcacaccctacactgcccactttctgtcccaggacctcccaaagccatggctggccatggggagccccctcaggaaggcaggaacagaactgcactgaggagctctgccaccactcccaagggaaaggtggcccagcggggcaagagagtaaggactgggagcgagtgggaccragacaagaggcctggtcccgccttccttgagagcagggcagggtggaacccagcctcgctcctcctcaggggctggaatggaagccagagaacagcacatggcactctcggcccggctgtcctcctccctgcgggcacaagtgtgccctgccccggaggcttgcctgtgcctgaggttcagcccggctgtcctcctcccagcgggcacaagtgtgccctgccccagtagcttgcctgtgcctgaggttcagccaaaggcccatgcctgtcacacttagctccagtctccactccaggccctatcactaacagtagtgatacctgggcctccatttttactgttttcattctctccctgtttgaaacccaggtaggaaggatggatgttttaactggggaacttctcagacaccccgacagtgtggtagaagagaagggctctgggttcagatggacctgctctgacacacaccagctctaggatctcggccacgttcacgaccctcggcctcagtgtcttcatctgtaaagtgaccgcgggcctgacctacatggtcactgtcagaactggagaccgtgtcggggaagcacccagcacctgccaggccgtccacgacaacagacggctccggttctaacatgccgccaggctgcaacactcacgcttatcattcataaacctccggcagaattcttgaaaggtgcctcggtagctcatggtccgcagagagcggtggaactgataataagacaccaccagatccttggggttgcgagccatatagatgacctgtgggtgacaggagcaggatgagtccgtgtctccttccctcc

SEQ ID NO: 95179 - DNA, 1442 bp, Homo sapiens
ggattttccagccacggattttccccgctgacagctctcgccgtttcctgggtctcgagtttatcctctgtgagggccgccccttgtggctgggccatcagctccctgaatgatcagcccagcctcatccaacaccacccaacaggacaggtccccgcggcctctgagacctccccgggtgcccccaaaacacaggccacagaacagccagagaaaccgcttgctgattcagtgtttagactcttggatcgaattctcagttcttccagatgtgatttagcctgctgcattatttagctaactttctgtgtcaaaatcataacttcttagaaatttttcaaggtactcaaaactgatttcacagtcgatttggggagtcaccgcaagaatcagtcagagaggaggctctgtgagaagggaaactgaggctcagcagcctgtgacgagccccaaggcgtatccacaacacatcctaggatcacagagcctgctccagccggcggagtggttctctcggctctgtggataactgaaagctcagaaacatcaaaagttaattaaaataagaatatgttactctgaaataatgcattaaaaacgtccaaaggtgagcctgctccacttcattcccctccgcatctcccgagcacggctcttcgggcggacggagcccccagcagcccctgttgtcattctctgagcgtggagaacccccatttctatcagccggtaatcccatccattgatttgaattgttcaatgtcaggcttgaaaaggcggatcaagtgtcctttggtcctggcaaagaatgaatcatttggcaccagcccaggccacaggccggataaagcccgcttcatctgcagtctggccttgcctggaacgccagtggccgccagcgcccctgacccgggcggtcgcaccacgattattcaaatcagctctctccatagatctcagaataagcaatcaattcatttgatagggtttaaagacaaagagcagagctcattaaatcaagctaagcctctgccatcaaagactggcagggactgaggctgartccggccttccctgcagccacacagaggctcctggggagggaggggcagggacccagcacaggtggacctcaggagtcccagggccccgtgcccatccccctgccctcacgccccctctctacccctgtcatttcctaccccacccacaccccaggaccccgaccccagaacacctcggaccccgccctgcctcccagcctgtcatgggtgggtctgtctttccagaactccctgcctggtgtctctcatctgccaaacaacctcaaacccaggtggcctgtcatatcctaacattttcctggagcccccaggcaggacccacagcccctctgcacctcctctgcccgttcagagtcacaacaccacatgggaattgtg

SEQ ID NO: 95180 - DNA, 781 bp, Homo sapiens
tgatgtaccctgggacttggctgtctctgagtgtctgcagtgcctcgagcacactgtgcgtacctgaggcagttggtgggaaatggatttagttccatgcgttcagctgggtggccggatttcagggcatcatttgtgaaatgacccactgtaatgtggtggttcaaggggaggcactgagccagttctgctgctcgcctttagctcagggtcctcatctgtcaagtgggaatcacttgcttctgttgttacgagcattcggtgtrctaatacagtaatacaaaccaccacctgcacagagcagcgctcagtcaagtcagctgttgttgttgtcattgatttttatgataataactcccctgcagagataaaacagccacgggtatacagtggctgcccggccggtgctgcagcagctcttcctcctgggatgccaggggattgagactcggctttattctgaagctgtcccaaatatgaatcattcactgttattaagccacctcagcatgccccctttgttatctgggcccaaaagagcacagagtgtggcccccagtacattttgggtgacgcctttacacccatccagcaagttggggctgggagtgggtatcacgcgttctgtagatgacgtctgtagacttctggggtttttcaatagaggggccatattgtttatcatctgttttgggggtaaacggggcactcttaacagtttaagaggggcaggtgagcggtgaactgggtaaactgagatgtatgatatcctagttccctg

SEQ ID NO: 95181 - DNA, 781 bp, Homo sapiens
tgatgtaccctgggacttggctgtctctgagtgtctgcagtgcctcgagcacactgtgcgtacctgaggcagttggtgggaaatggatttagttccatgcgttcagctgggtggccggatttcagggcatcatttgtgaaatgacccactgtaatgtggtggttcaaggggaggcactgagccagttctgctgctcgcctttagctcagggtcctcatctgtcaagtgggaatcacttgcttctgttgttacgagcattcggtgtactaatacagtaatacaaaccaccacctgcacagagcagcgctcagtcaagtcagctgttgttgttgtcrttgatttttatgataataactcccctgcagagataaaacagccacgggtatacagtggctgcccggccggtgctgcagcagctcttcctcctgggatgccaggggattgagactcggctttattctgaagctgtcccaaatatgaatcattcactgttattaagccacctcagcatgccccctttgttatctgggcccaaaagagcacagagtgtggcccccagtacattttgggtgacgcctttacacccatccagcaagttggggctgggagtgggtatcacgcgttctgtagatgacgtctgtagacttctggggtttttcaatagaggggccatattgtttatcatctgttttgggggtaaacggggcactcttaacagtttaagaggggcaggtgagcggtgaactgggtaaactgagatgtatgatatcctagttccctg

SEQ ID NO: 95182 - DNA, 781 bp, Homo sapiens
tgatgtaccctgggacttggctgtctctgagtgtctgcagtgcctcgagcacactgtgcgtacctgaggcagttggtgggaaatggatttagttccatgcgttcagctgggtggccggatttcagggcatcatttgtgaaatgacccactgtaatgtggtggttcaaggggaggcactgagccagttctgctgctcgcctttagctcagggtcctcatctgtcaagtgggaatcacttgcttctgttgttacgagcattcggtgtactaatacagtaatacaaaccaccacctgcacagagcagcgctcagtcaagtcagctgttgttgttgtcattgatttttatgataataactcccctgcagagawaaaacagccacgggtatacagtggctgcccggccggtgctgcagcagctcttcctcctgggatgccaggggattgagactcggctttattctgaagctgtcccaaatatgaatcattcactgttattaagccacctcagcatgccccctttgttatctgggcccaaaagagcacagagtgtggcccccagtacattttgggtgacgcctttacacccatccagcaagttggggctgggagtgggtatcacgcgttctgtagatgacgtctgtagacttctggggtttttcaatagaggggccatattgtttatcatctgttttgggggtaaacggggcactcttaacagtttaagaggggcaggtgagcggtgaactgggtaaactgagatgtatgatatcctagttccctg

SEQ ID NO: 95183 - DNA, 719 bp, Homo sapiens
cagagtgaaccaggcagaggtggggccgagtgattcctgggaagggttgggctgagctggatgcttccatctgggtcccccgtggggtctggagcagtcacttacccagttgtaatgaagccctcctgctcacttgcaggcatcatagcagttgacggtctgagcacagtgaggctggcctggacgtctgagcggggtcatcccaggcccaggggtcctactgggctcttaagtggagagyggtaggagactgttgggttggagatgctgcgccctccttcatgccagcaagtattgcctgggtggtctcaaaagtcctgtgccatagtcagatttggtttctaggacttctccaactctggaattctctggagaagggagtcctgtctgtgcctggagtccagtgggccctggtgtttcttggtcataccctggcgtccagtgactgtagtctttgattcctgcattatctgcaggcggttgcctgtgccaggagaaggccattttggtgagacgaggaatgtctttgttgatccgtggaggaaagaacgtaacagtgggatattgagattgttaatcaattgttttaggataaatacccaactttctctcctcttagctgattagattccatctttctctgtgcttgagacgtaaggacgtctgtgcttgggcacaaggttgtatctgacgttattttcagtcttctacatggatcc

SEQ ID NO: 95184 - DNA, 719 bp, Homo sapiens
cagagtgaaccaggcagaggtggggccgagtgattcctgggaagggttgggctgagctggatgcttccatctgggtcccccgtggggtctggagcagtcacttacccagttgtaatgaagccctcctgctcacttgcaggcatcatagcagttgacggtctgagcacagtgaggctggcctggacgtctgagcggggtcatcccaggcccaggggtcctactgggctcttaagtggagagtggtaggagactgttgggttggagatgctgcgccctccttcatgccagcaagtattgcctgggtggtctcaaaagtcctgtgccatagtcagatttggtttctaggacttctccaactctrgaattctctggagaagggagtcctgtctgtgcctggagtccagtgggccctggtgtttcttggtcataccctggcgtccagtgactgtagtctttgattcctgcattatctgcaggcggttgcctgtgccaggagaaggccattttggtgagacgaggaatgtctttgttgatccgtggaggaaagaacgtaacagtgggatattgagattgttaatcaattgttttaggataaatacccaactttctctcctcttagctgattagattccatctttctctgtgcttgagacgtaaggacgtctgtgcttgggcacaaggttgtatctgacgttattttcagtcttctacatggatcc

SEQ ID NO: 95185 - DNA, 719 bp, Homo sapiens
cagagtgaaccaggcagaggtggggccgagtgattcctgggaagggttgggctgagctggatgcttccatctgggtcccccgtggggtctggagcagtcacttacccagttgtaatgaagccctcctgctcacttgcaggcatcatagcagttgacggtctgagcacagtgaggctggcctggacgtctgagcggggtcatcccaggcccaggggtcctactgggctcttaagtggagagtggtaggagactgttgggttggagatgctgcgccctccttcatgccagcaagtattgcctgggtggtctcaaaagtcctgtgccatagtcagatttggtttctaggacttctccaactctggaattctctggagaagggagtcctgtctgtgcctggagtccagygggccctggtgtttcttggtcataccctggcgtccagtgactgtagtctttgattcctgcattatctgcaggcggttgcctgtgccaggagaaggccattttggtgagacgaggaatgtctttgttgatccgtggaggaaagaacgtaacagtgggatattgagattgttaatcaattgttttaggataaatacccaactttctctcctcttagctgattagattccatctttctctgtgcttgagacgtaaggacgtctgtgcttgggcacaaggttgtatctgacgttattttcagtcttctacatggatcc

SEQ ID NO: 95186 - DNA, 707 bp, Homo sapiens
aagtcccccatcagggtggcttcagtctcccacccactgttccatggggaggggctcccaccccccagtctccatcagacacctctgcccacagcctacagttctctgcctatctgcaggttcaggccccgcactcagccctgcaggaccctggtgcttcccagcctcccctctgccctggctgtggggctcccatgggcacccccttggggcagtacccagcctgcagttcccagagcagatgggagggcagagcatgcagctcacaagcccagggcatgagtctccccttgccagggccagctgccacagagagtccccaaagcatcattggccccaaggacccagggagcatgggtgggggcttctygaaggcagggggcctggcctcccctgcctaccaccttccttcctggcatcctccaaacagctggcactgccccctcacaactgcctgcggggtctcagacccgcatctccgtgtggcatcacagaagacatgaggtttcttttcttttcttttgtcacccaggctggagtgcagtgctgtgacctcggctcactccaacgcctccaatgcctgggatcaagcgatcctcccaccttagtctcccgagtggctgggaccacaggcatgtaccactacgctcggctaacttttcgattttttgtacagcccaggctgctcttgaacccctggcctcatg

SEQ ID NO: 95187 - DNA, 707 bp, Homo sapiens
aagtcccccatcagggtggcttcagtctcccacccactgttccatggggaggggctcccaccccccagtctccatcagacacctctgcccacagcctacagttctctgcctatctgcaggttcaggccccgcactcagccctgcaggaccctggtgcttcccagcctcccctctgccctggctgtggggctcccatgggcacccccttggggcagtacccagcctgcagttcccagagcagatgggagggcagagcatgcagctcacaagcccagggcatgagtctccccttgccagggccagctgccacagagagtccccaaagcatcattggccccaaggacccagggagcatgggtgggggcttctcgaaggcagggggcctggcctcccctgcctaccaccttccttcctggcatcctccaaacagctggcactgccccctcacaactgcctgcggggtctcagacccgcatctccgtgtggcatcacagaagacatgagrtttcttttcttttcttttgtcacccaggctggagtgcagtgctgtgacctcggctcactccaacgcctccaatgcctgggatcaagcgatcctcccaccttagtctcccgagtggctgggaccacaggcatgtaccactacgctcggctaacttttcgattttttgtacagcccaggctgctcttgaacccctggcctcatg

SEQ ID NO: 95188 - DNA, 707 bp, Homo sapiens
aagtcccccatcagggtggcttcagtctcccacccactgttccatggggaggggctcccaccccccagtctccatcagacacctctgcccacagcctacagttctctgcctatctgcaggttcaggccccgcactcagccctgcaggaccctggtgcttcccagcctcccctctgccctggctgtggggctcccatgggcacccccttggggcagtacccagcctgcagttcccagagcagatgggagggcagagcatgcagctcacaagcccagggcatgagtctccccttgccagggccagctgccacagagagtccccaaagcatcattggccccaaggacccagggagcatgggtgggggcttctcgaaggcagggggcctggcctcccctgcctaccaccttccttcctggcatcctccaaacagctggcactgccccctcacaactgcctgcggggtctcagacccgcatctccgtgtggcatcacagaagacatgaggtttcttttcttttcttttgtcacccaggctggagtgcagtgctgtgacctcggctcactccaaygcctccaatgcctgggatcaagcgatcctcccaccttagtctcccgagtggctgggaccacaggcatgtaccactacgctcggctaacttttcgattttttgtacagcccaggctgctcttgaacccctggcctcatg

SEQ ID NO: 95189 - DNA, 707 bp, Homo sapiens
aagtcccccatcagggtggcttcagtctcccacccactgttccatggggaggggctcccaccccccagtctccatcagacacctctgcccacagcctacagttctctgcctatctgcaggttcaggccccgcactcagccctgcaggaccctggtgcttcccagcctcccctctgccctggctgtggggctcccatgggcacccccttggggcagtacccagcctgcagttcccagagcagatgggagggcagagcatgcagctcacaagcccagggcatgagtctccccttgccagggccagctgccacagagagtccccaaagcatcattggccccaaggacccagggagcatgggtgggggcttctcgaaggcagggggcctggcctcccctgcctaccaccttccttcctggcatcctccaaacagctggcactgccccctcacaactgcctgcggggtctcagacccgcatctccgtgtggcatcacagaagacatgaggtttcttttcttttcttttgtcacccaggctggagtgcagtgctgtgacctcggctcactccaacgcctccaatgcctgggatcaagcgatcctcccaccttagtctcccgagtggctgggaccacaggcatgtaccactaygctcggctaacttttcgattttttgtacagcccaggctgctcttgaacccctggcctcatg

SEQ ID NO: 95190 - DNA, 707 bp, Homo sapiens
aagtcccccatcagggtggcttcagtctcccacccactgttccatggggaggggctcccaccccccagtctccatcagacacctctgcccacagcctacagttctctgcctatctgcaggttcaggccccgcactcagccctgcaggaccctggtgcttcccagcctcccctctgccctggctgtggggctcccatgggcacccccttggggcagtacccagcctgcagttcccagagcagatgggagggcagagcatgcagctcacaagcccagggcatgagtctccccttgccagggccagctgccacagagagtccccaaagcatcattggccccaaggacccagggagcatgggtgggggcttctcgaaggcagggggcctggcctcccctgcctaccaccttccttcctggcatcctccaaacagctggcactgccccctcacaactgcctgcggggtctcagacccgcatctccgtgtggcatcacagaagacatgaggtttcttttcttttcttttgtcacccaggctggagtgcagtgctgtgacctcggctcactccaacgcctccaatgcctgggatcaagcgatcctcccaccttagtctcccgagtggctgggaccacaggcatgtaccactacgctcggctaacttttcgattttttgtacagcccaggctgctcttgaacccctgkcctcatg

SEQ ID NO: 95191 - DNA, 545 bp, Homo sapiens
tcccaccatgtaagatttgagccgaaaaaaggaagcgataaagcctagaaaactcggggaagctttttccgtcttagggccaagtcggcttttccaagcgtggcacagagtccagaagttccgccgcgtcgtgggtgggagkggggtgggggcgtctgcaaagccaaactgcataagcgaagtccaaaagacgagcccccgactgggaggtgggggacacagcttgcagctcacaccgcagagctcaccttaataagactagtaacagtgcagtaataaacagctctaaatcaatcacagaaacgctcccctagaaaatactgaaggacagctgccagggatacgctgatcctcctccctcagcgcagaaatgcaaattaaaaactactccagctactccggaggctgaggccagagaatcgcctgaacccgggaagcggaggttgcagtgagccgagatcgcgccaccgcactccagcctgggcgacagagcgagactccgtctcaaaaaacaaaaacacaaaaacaaaaacaaaaacaaaaaa

SEQ ID NO: 95192 - DNA, 817 bp, Homo sapiens
tgcaggcccaaccacctgtgtcgcctgacatggcatttttctggttttccagtagctccaagactgggttcttccatgcaccccatctgctcttgcccctctgcccaagtccagccttctctctcctccaaaagtctctttctcattgcctgtagctctcacctctctgataactgcccccagatctggaagagcagaatcaccaggccagcagggaccagcgactgccagtttactcaactggacgggtggtttctattcttcatctcagctgaatttctgggtagcatttgatgacagttcatttcagcctctttcctgaaactccttttctaggcttccttgacctagaaatctgagtcttggtgacctctctggccactccttctggatctaaagctctagaaggactccacgtgaaggctgagtaaagaaggatatgccagaaaggagagttggggctgccctccctcagggagcctgcagtgagggagggaaatagattgggcagggggtggcagtgggatagaggtgactgtatttacacaacactgggggacagarggatatgggtttgttgcctatggccatcaggaacaatgatagttttcaaacaggaaagctgcagtcctaacacccttgtgtctcgtgacatagcctttttctggttttccagtagcaccaagacagggagctccaagacaaggacaatatgacaaaatgtccgcaagattcatgtaggatgatgctcattacagcagtattgataatagtgggaatttggaacaacctaactcttcaatgataaggaacaagt

SEQ ID NO: 95193 - DNA, 565 bp, Homo sapiens
catgacaaggcaccgcacacggggcgacgtacgcagcagccttgattttcttgcagtcctggagaagcgaagtctgagatcgaggtgcgggcagggcaggttcctcctgaggcctctgtccttggttctctcagggtcttccctctgcctgtgtctgtgtcctcatctcctcttatataaggtgaccggtcagactggatcagggcctgccctcctgacctcactttaactttatcatctgcgaagactcgctttccaaaaaggtcacattcataggttctggggcttagaactttgacaccttttcacagggacacaattcactccataacagtcctgaagcaagatgmatctgaacctcatgttcaaagtaagccctggtgagccctgggccttgggggcctcctggcttcactcctgtataagccccggtgagaacaggagggaacttctggcagaagggaagagggatggggtctcagcttgggctcacactgggctctctgtgtgagtatctttgtctaaaggtgccctgtgtgggcaactttacaagtatctcacctat

SEQ ID NO: 95194 - DNA, 662 bp, Homo sapiens
tatttatgtatgcaagtatacgtataatagacatagatatgaacataacatatggaaagagaagctgtggttaggctcttggtcacatttggatccctgtagctatttctccagagcagaaaatattttgcctaattttattctgctgaaacygttttttttaaaaaaacaaatcttgcagatgcttcctccagaatagcatgttttccccaaaaataactgggccagggttatcctaattaactgagtattccggaagttacctttggaaatgatactatgtataatgtcaaaattttccaaaaattggccctggagcacagtgtaagccacccgtccattacagcgccgaggtcccagcacccctgatgtccagcggtcccagccgccgcccagcctctggcagaagtcaagcctccattccaagcctgctcttgtttcagaggagttaactgggatttacaataagaggctgacttggcaagccgggaaaatgggtgtttgaggcttcatttcccccctttcttaagcaacatcttttctgaagaatttctctgtgccttgtccctcctcccatggcctcaatctatttttaatgacatttctgtcagccttgtatttcccttctcccctgttaatatccaggtttttcattattcacg

SEQ ID NO: 95195 - DNA, 662 bp, Homo sapiens
tatttatgtatgcaagtatacgtataatagacatagatatgaacataacatatggaaagagaagctgtggttaggctcttggtcacatttggatccctgtagctatttctccagagcagaaaatattttgcctaattttattctgctgaaaccgttttttttaaaaaaacaaatcttgcagatgcttcctccagaatagcatgttttccccaaaaataactgggccagggttatcctaattaactgagtattccggaagttacctttggaaatgatactatgtataatgtcaaaattttccaaaaattggccctggagcacagtgtaagccacccgtccattacagcgccgaggycccagcacccctgatgtccagcggtcccagccgccgcccagcctctggcagaagtcaagcctccattccaagcctgctcttgtttcagaggagttaactgggatttacaataagaggctgacttggcaagccgggaaaatgggtgtttgaggcttcatttcccccctttcttaagcaacatcttttctgaagaatttctctgtgccttgtccctcctcccatggcctcaatctatttttaatgacatttctgtcagccttgtatttcccttctcccctgttaatatccaggtttttcattattcacg

SEQ ID NO: 95196 - DNA, 662 bp, Homo sapiens
tatttatgtatgcaagtatacgtataatagacatagatatgaacataacatatggaaagagaagctgtggttaggctcttggtcacatttggatccctgtagctatttctccagagcagaaaatattttgcctaattttattctgctgaaaccgttttttttaaaaaaacaaatcttgcagatgcttcctccagaatagcatgttttccccaaaaataactgggccagggttatcctaattaactgagtattccggaagttacctttggaaatgatactatgtataatgtcaaaattttccaaaaattggccctggagcacagtgtaagccacccgtccattacagcgccgaggtyccagcacccctgatgtccagcggtcccagccgccgcccagcctctggcagaagtcaagcctccattccaagcctgctcttgtttcagaggagttaactgggatttacaataagaggctgacttggcaagccgggaaaatgggtgtttgaggcttcatttcccccctttcttaagcaacatcttttctgaagaatttctctgtgccttgtccctcctcccatggcctcaatctatttttaatgacatttctgtcagccttgtatttcccttctcccctgttaatatccaggtttttcattattcacg

SEQ ID NO: 95197 - DNA, 1349 bp, Homo sapiens
agtagaaggctccaaaggagttctcggggatggtggtgccctaaggtgaaaaaagcccaagtgataacttagaggagagatactctggagagctgctcaaatcacactgcactagagtatgactgaattgtgttaagcctctgatattactggaatttttattactgtagctagtgttaattaccctgactgatacactgtgcaaattaagagccctaggacagtctcattcttaagcttaaatagcagagagatagtactcattattcctttagtttgagcttgtcagaatgaggaagctagatcatacattctctttggttctatgtatgttaggtgtgggatgtctgagtcccaaagtaatttactgtggcccagtgtggagggcaaatcgtggcaaaccggtcactgcactgaatagacaaagacactctgaaaataaaacatcagggcatgttcttctctcgcttctgggaattagttatttgtataaagaggcttgacatggaggcacacaatagaatgtgtgacggaagggaccactttccctgttaaagcccagcccccactctgtcaggtagctccacccgggtccacactgtttgcccactggaagagcttccaaggtctgggctctattgttcactgatgagcagaaatagacttggtcacatataatgcacaaatatttttaaagtgccttatttttcatatttaaattatattaaatgtatatttatattaaatatgtatattaaatgactatatacacacacatttccctccattttccccttcagataacctccgaatatatatggacttttttggggtatgaatggatgaaaaaggaaagatactgcacataggtatccttccaggtcaaacgagtgagatctacttctgcagcctcctctgatctcacagctgtcaggctataaagtcagccagagaacatctctgagacctcagctggggagaagctatcccctgaccgctgagattcaagaccctctggagaactgccctgaccctcaggtggtttctttatgtgacgcccacagagttagcayggatttcctgaaggtctgcatcctgtgatccaacacctcgtgagtaaatcatttttaacagcagcatggcacaatataaagtttatggaggatggacgtaaatttggttctggaaaaagcatggttccctgtggtgacaggcagctgggctggtgtgctcaaacaccccctttattggatcgcaaatgatatcagctggaggccttgctagcccctaacagaacacacaaaacaaggatctgagagagagagagccagtcccatgctagcacctag

SEQ ID NO: 95198 - DNA, 356 bp, Homo sapiens
aggttgcagtgagccgagatcgtgccgcctcactccagcctgcgtgacagagcragactccatctcaaaaaaagaataaacaaataagtataatgccaggtgccgacacacatgcttggaagagaaaaaaggctgagcgagggatggggtgagaaggagctggggtgctgtcttgaaggaaggactctgataaggggacgtttggggctagaccaagggatgtgggctccatgtgcagagatgttcatggctcatgtcatgacatgacatcctatgcatgtcagggaccccaggaaggcttccatgcaatggaaatatttttcatttggctgcaggatctgaaaatgcatccttca

SEQ ID NO: 95199 - DNA, 356 bp, Homo sapiens
aggttgcagtgagccgagatcgtgccgcctcactccagcctgcgtgacagagcaagactccatctcaaaaaaagaataaacaaataagtataatgccaggtgcygacacacatgcttggaagagaaaaaaggctgagcgagggatggggtgagaaggagctggggtgctgtcttgaaggaaggactctgataaggggacgtttggggctagaccaagggatgtgggctccatgtgcagagatgttcatggctcatgtcatgacatgacatcctatgcatgtcagggaccccaggaaggcttccatgcaatggaaatatttttcatttggctgcaggatctgaaaatgcatccttca

SEQ ID NO: 95200 - DNA, 356 bp, Homo sapiens
aggttgcagtgagccgagatcgtgccgcctcactccagcctgcgtgacagagcaagactccatctcaaaaaaagaataaacaaataagtataatgccaggtgccgacacacatgcttrgaagagaaaaaaggctgagcgagggatggggtgagaaggagctggggtgctgtcttgaaggaaggactctgataaggggacgtttggggctagaccaagggatgtgggctccatgtgcagagatgttcatggctcatgtcatgacatgacatcctatgcatgtcagggaccccaggaaggcttccatgcaatggaaatatttttcatttggctgcaggatctgaaaatgcatccttca

SEQ ID NO: 95201 - DNA, 1625 bp, Homo sapiens
ttttatttatagagatggggtctcgctatgttgccgagattggtcttgaactccggagctcaagcaatcctcccaccttggcctcccaaagtgctgggattacaggcgtgagccactgcacttggccttaatctgtttacttttataagccttctctatttagaagtacrcactacacaagtacatacattctggtattttaccatgaaaatttcacttttcatcacaaactagtgacttgcctttttacccatacttatacgcatgtaataccttcctagtggtacatcttaatcaatatatattttttaaatcttgatttttaaatgaatctttttagtgctatgacatgatgggcttaatttaacagatgaagcatgatatggtaactacattgtactgtttaaactaattcacagctgtaggaaaatgtttgatttttgaaatataaccaagatgaggctggacaataataaacactgggccgggcgttgcggctcatgcctataatcccagcactttgggaggccaacgcagacagatcacgaggtcaggagttcgagaccagcctgaccaacatggtgaaactccatatctactaaaaatacaaaaattagccaggcgtggtggtgtgcgcctgtaattccagctactcaggaggctgaggcagcagaatcacttgaacctgggaggcagaggtcacagtgagccaagatcacgccactgcactccagcctgggagagagagcgagactccatctcaaaaacttaaaataaaataaaataaaaacaaaacaaaacactgaaatactggaagacagtgaatgaataaataatatgatttttcatcagtggccattcattattttgcttttagaaacctggaagaaattatcttctttgagtttcaaatgttctggtaaatctagtcatttcttagcttcctcaaaaatcaccttgaattgctgaaataagtgactctcatgaatcaaagttcttttctggtctgaggtagccaacaacggccacactcaggatttccccatagaagtgctctttgaaggtatgcatggtatgtgtttccatggacttcttcgtattctcatagtatgggttccatcctatgctcaccaccatcttctgaccatctctacttccagcactggcccaaccataataaatgccactggatatatcggctggcagattatctaccacttgctcaggaaaattagctgtgggggatgcccagctgcttgtagccacggccgaagccccataccacttggtcccggcaggagtatgacagatgcttcgtaatgcagtctgctcgaggcatgggctgcagcccggtccctgcgtcctacagagacaccgtccacgcggtgcccggaccccggaccagccacggggtgggaaggggcgtgagctctgtctgccgcgggggtgcaccaggggcccgacgatgccgatgacacgccacggaggatccctgatgccagcgactcaggagctgggtctcccaaccattttcattttctttctttccttctttccctaccttttaaaatattttatgtttgtttgtttatttagaggtagagtttccctcttgttgcccaggc

SEQ ID NO: 95202 - DNA, 1625 bp, Homo sapiens
ttttatttatagagatggggtctcgctatgttgccgagattggtcttgaactccggagctcaagcaatcctcccaccttggcctcccaaagtgctgggattacaggcgtgagccactgcacttggccttaatctgtttacttttataagccttctctatttagaagtacgcactacacaagtacatacattctggtattttaccatgaaaatttcacttttcatcacaaactagtgacttgcctttttacccatacttatacgcatgtaataccttcctagtggtacatcttaatcaatatatattttttaaatcttgatttttaaatgaatctttttagtgctatgacatgatgggcttaatttaacagatgaagcatgatatggtaactacattgtactgtttaaactaattcacagctgtaggaaaatgtttgatttttgaaatataaccaagatgaggctggacaataataaacactgggccgggcgttgcggctcatgcctmtaatcccagcactttgggaggccaacgcagacagatcacgaggtcaggagttcgagaccagcctgaccaacatggtgaaactccatatctactaaaaatacaaaaattagccaggcgtggtggtgtgcgcctgtaattccagctactcaggaggctgaggcagcagaatcacttgaacctgggaggcagaggtcacagtgagccaagatcacgccactgcactccagcctgggagagagagcgagactccatctcaaaaacttaaaataaaataaaataaaaacaaaacaaaacactgaaatactggaagacagtgaatgaataaataatatgatttttcatcagtggccattcattattttgcttttagaaacctggaagaaattatcttctttgagtttcaaatgttctggtaaatctagtcatttcttagcttcctcaaaaatcaccttgaattgctgaaataagtgactctcatgaatcaaagttcttttctggtctgaggtagccaacaacggccacactcaggatttccccatagaagtgctctttgaaggtatgcatggtatgtgtttccatggacttcttcgtattctcatagtatgggttccatcctatgctcaccaccatcttctgaccatctctacttccagcactggcccaaccataataaatgccactggatatatcggctggcagattatctaccacttgctcaggaaaattagctgtgggggatgcccagctgcttgtagccacggccgaagccccataccacttggtcccggcaggagtatgacagatgcttcgtaatgcagtctgctcgaggcatgggctgcagcccggtccctgcgtcctacagagacaccgtccacgcggtgcccggaccccggaccagccacggggtgggaaggggcgtgagctctgtctgccgcgggggtgcaccaggggcccgacgatgccgatgacacgccacggaggatccctgatgccagcgactcaggagctgggtctcccaaccattttcattttctttctttccttctttccctaccttttaaaatattttatgtttgtttgtttatttagaggtagagtttccctcttgttgcccaggc

SEQ ID NO: 95203 - DNA, 2366 bp, Homo sapiens
atccagcaaaaagtggaaaaagtttaaacaggagttcgcaaatgccagtgaacagccaataaacatttaaatatgctcagcctcattaggaatcaggaaaatgcatttttttttttttttttaaatagagttttgctctgtcgctcaggctggagtgcaggggtgcgatctcacctcactgcaacctctgcctcctgggttcaagtgattctcctgcctcagcctcccaagtagctgggattacaggcgtgcaccatcatgcctggcttatttttgtattattagtagagacggggtttcaccatgttggccaggctggtctcaaactcctgaccttagatgatccacccacctcggcctcccaaagtgctgggattacaggcgtgagccaccctgtctggccaggaaaatgcaaattaaaagccacaaaaagataccatttcccacaatacttggcaaagatgaaatctgataatatcaagttttgaggataaaaaccaatcttttaaaactgctattactatattagagtgtttctcaaatttttatcagacactaaggagcctttttagacatcttttcctcatttccatatccccaattttaataccacagatacactacatattaatattctatgagtctttggaggaccactaaccattgtaatatatagaattttttttaagccctcctcccaagaaccaattttcactcccttgagggcctgttatgacaaaccattctgtaatacaatttggcattagatattccatcaagagcaactccactaataggtatgtattttaagtgaattctgcgttacagtgcaagcagtcacaccagatgcaaacttaaaaaacagataaaacagaaagtaacagtatttattttcattagtattttaagtagtaaaatacaatgcttgcctaaaacgcctgaagtcagagaaagatttactatgcgcttttcctggaagaatcgtgtcataaaatcattgcaacagcaggacctttcacatttcttagaacaagcaggaaatcaagtcaccraacttacctccgcattttcatctcccatttcttgaggagcatcagtgtctggttcaatcacaccttctttatcaatttctgccaaagtcgagaaaatgacaataagacctgcaccgtacaatatagtagccactcccaagattattaaaaactgacatactatgactactacaattaattattttaagtattgatgcattttaaaatatgttcccattaaacatttcgttactttggtaagactacactttacgttaactgtcacatcatgtaagatatttattatcaggttgtagtggggttgttgacatgtgcagtttctagtattacacataaatacaccactgatttagtcattgtatataaatacaccattgtcaacaaactgatttagttcaaataatttttttctacacactgatgtactatgtttttcaaaaatatgcaggtaagctacagtgatacttcaacgtaaatcaaaatattttaatataattacattcattactttccttttttaaaattaaaataattttggggggggcacaggatcttactatgttgtccaagaaatcctcccacctcggcctcccaaagcactaggattccaagcatgagccactgcacctggtccctaattattttcatttttaaaagtagcatggacaagttttaattttaaaataaaggcttactactgatgcagaatcaagtaccaaggctagatttaaaaataaatttagtttccatatgtacagtagtgaccaaagctagtacttacaaccaaaacagtaaagaatgaaaagcagtatcttgcttttcaaattgtcatttaacagttgtcagttaaatgacaactgtaatttgttgcaagtggaaaacgagttttatatatatatacacacacacacgcacgtatcatttaaaaagaacacatttgcaaatagttaatttgataagaagtttccttagtcaaaaaaaaaaaatttaaaatcacccacctaaaatcagaattactgtccagcaacaacaaaacttgacgcatgactgacaaactatatatatacatatatgtatatggtgtacaatgcgatgttttaacatacaggcatatcgttttttgagacggagtttcgcttttgttgccgaggttggagtgcagtggcgcaatcttggctcaccgtaacctctgcctcccaggttcaagcaattgtcctgcgtcagtctcccaggtagctgggattacaggcatgtgtcaccacacctggctaattttgtatttttagtagagatggggtttctccatgttagtca

SEQ ID NO: 95204 - DNA, 1003 bp, Homo sapiens
tccacataaaatgaattccaaagggtaatatccccactttgtattgtaagggaacttgatttaaaagaatgtgttgcaaagaaacgtgttcccaaccgtgagaccaagaatgaaccaagcctcatcttcatcaaacagggttggtcatgcaccttaagagatgggctgtattgtatggagcagtagttctcatcctcagctgcaagctggaatggcctgggggactttcacaagatgctgatgcctcggacccctctgggagactctaagttggttggtctgagcgcgagaattgatgaaagctacctccgccggtgtctctagggcactgccaacatggagaatccctgatacaggggccaggaacaccaagtccagaccctggagctgagtccagctctaaccccacgagctgtgtcatcttggggtgcctctcctggcctcagtgtccccctgctgaaagtgggataggttgtattaacagataactaccccacatcattgccgacgtgaggctctcccttgttagagtgtgcagagtgctgccggctcaagcaaaggcttggaaagtgtaagctgtgttcaccttcagccctttyctccacaaagactgcttggctttggagctgtgttaggactttcctggttgaggttttatttagttctgctgaatagggatgtggggaggaagttagatgccacctggttagaaagaatgatgtcttggttcagctgtaatacctccagttacaatatgaaaggcctgtgatcatgttcatgactaaagatggccggtgcctgcacggagaacacaggtgcgcccttctgcaggagggcttgcagtgtggaattccttcgtctcggtaggcgctctccgcagtgtcgaatgagctgcttacgtgaaatatttcttggtaatgatgatttttctgataggactgcacctgggttttcatgcctaactagttttcaagcattttccctgcaagtcaactttctcagc

SEQ ID NO: 95205 - DNA, 597 bp, Homo sapiens
gggattcttattatggcctggcaacctccaggttactcacaactggcacaagagggtatctgagtgacattgttaagcagtaattagaaacagttgattagtcagagtggtatttggtttgactcggggtaattttgtttttgtaagtcttgggtttttttttttttttttgaaacgaagtctcgctcttgtcccccaggctggagtgtgatggctgatctcggctcaccagaacgtccacctgcagattcaagcgattctcttgcctcagcctcccaagtagctgggattacaggcgcctgccatcatgcctggctaatttttgtatttttagtagmgatggagtttcaccatgttggccaggctgatctctaactcctgacctcaggtgatccacctgcctcggcctcctaaattgttgggattacaggcgtgagccaccgtgcccggccagtcttgggtatgtttttaggagccgttggacttcagatataaaaagcaagcttgagctaactcctccagtttccccatttagtaaatgaagaaagcgatgtccaaagagggtgaatactctccatcctttaaaaaggatacaaa

SEQ ID NO: 95206 - DNA, 1953 bp, Homo sapiens
aatggaaaaatgactattttaggttgaatccattcttaattatcccctgatacttcgtttaggacatttctggattactttttctcttcctgttccttttctctttttttccagtcctttcatgacagataaatgttggttggataaaccaaggagttggtacatatcccaagaatgcaaattcattttgatattaaatttaaaaacatattccaaggaaggtaaattcaacccacccaccccctacctcaaacactatgggtgctggttcccattctctcttctcttgacccatcctctgtagcatgagcattagccacgtgtcagaagagttacagtcactagaaagctacctagaaatcagaattccctcttctttcaattgtttttgaaagttaagtcatcatagggcacaccttctgaaatccacagtctgtaatgaatgtaaacacagaatgtgcatttgtgaactgtgccccaaagggttggctttctagattccaaaaaaggacaaacattttcagatgttgaatgcacagtgatgtcagacatcattagtgacagctcatttctgcattttgtggttggactctaaactatgttatcccagaagaagtgtctccatcttgccctggatttggtgggagaaggatctgacacagggagctttgcccctgaaaacagcactgtggcagctggaaatgaccttatatggtagcttcgctttacactccctgtcccagaaagatccgtatggaatgtggtgacttttgatgctgataaggacattccacaggagaatgctggggtcgggtagacgaaggatccctgtgaacggttacccattaacactggctctggtttcacaccagtgaagagtggcagtcggcatagttttcattagtcagacattataacctgagtttggcctatttttctttgaaacatttggaattgtcaagccaaaatgcatttcctatggagtgagtgagtttgcctctgccagcctttccatgtgatagtttattattatagaggtgacatgggcacccagagtccctggcaagctattgtttttctttgctaagaacagcaggaagagacaaaaaaaagtccttcagaaaataatttatctagacttttgcaaggcaatgagaaaatgaattgccattaggctgagcaatctaccctgtatcactgaggatagaaaatgtctcagaaggtcactcatgtctaagaagtttcacgtggatcttggtacaattgtggcttaaaatgtgaagttcaggccaggtgcagtggctcacgtctgtaatcccagcactttggggggccaaggcaagtggatcacctgaggtcaggagttggagaccagcctgaccaacatggagaaacccygtctctacttaaaatacaaaaattagctgggtgtggtggcaggcatctgtaatcccagctacttgggaggctgaggcaggagaatcacttgaacctgggaggcggaggttgcagtgagctgagtttgcaccactgcactccagcctgggcaacagagtgaaactccatctgaaaaaaaaaaagaaaaagtgaagttgtgaagttcaggggttcagagaaaatcccttcccctcataagtgaggaatgaagaatggaagcactctgaggacacttccatgcagacagtcagatggacacacccagtagagtggctttgtaatattgcactgtctatcataggacacttcccagctaccagacacagagtttctcttgggctcagcccagtttttcatctttgtgttgccagcaccacggcaccctgcacagcacatagcaggtgttcaagcttcctcccttccccgtctatcctcccctttctccctccctttcccccgcttccctcaaccctcatctacggagtgcttcttatatcccaggcactgtgcccaagc

SEQ ID NO: 95207 - DNA, 1513 bp, Homo sapiens
ttttttttttttttgagcaggagcacagtggtgtgatcctggcttactgcaacctctgcctcccaggttcaagagattctcctgcctcagtctcctgagtagctgggattataggcatgcatcaccatgcccggctaatttttgtatttttagtagagacggggtttcmccatgttggccaggctggtgtcgaactcctgacttcaggtgatccgcccgcctcggcctcccaaagtgctgggattacaggcatgagtcaccgtgcccggccccttaacatgctttttgaagccatccttttaccactacaaacaatattgtaatgaataagtgtctatgacaaggttgtgaacttgctgcatcaaagagcttgtgcatttgcaaggttgttggttctgcacattgatttccatagaagttaacaatttacacatccacctgcaacacaggatggtgcttgaaagaatttaaaagaaagataattctaatacatagaaagacctaagagttacatgatgacttttgcaaaacttaagacaacttattttctcttttggaaatacgtttattgttacacaaatcaaatttcctactattcagtttcttagtaacaaaaatgaaacaaaatttagctatcccaagcaaatttaggaacataaaacaataaccaaacagacggggtaaaaagtaactataagaacccccaggctgggcacagcagcctgtgcctgtagtccaattgtttggcaggccgaggcaggaggatcccttgaacctaggagttcgaggccatcctgggcagtctagcgagactatgtctcaaaaccaaaccaaacaaaatacacaacaacaacaaaaaagtttttgaagaaccctcagaaacataaattaggaccctaagctaagtagactttagtgcaacagctctgcaatttacaaggcaaaaattacaaccctgaaaagcaggatgacacaaagcccggaaataattttctaccaacctggttggtcagatacttgtcagaaaactgttttccaggttatgagcttaaattctttttacagactggcaacggtatcaggacgctttttagagtgtcccctgctattgcctcgggcatgtcagaaactggataggagtttcaagttgagcagtttgtccaggatttcctgggctttagcactgaacgcgctgcgtccctggtaccccttcagttccaagcaaacctgcttgttggccactgtaggaccagacttacgtcaagtacagttgccactacacagatgtggctacttacatttaagttaaatactttttacttttgagatggagtctcactttgtcgtgcaggctggggtacagtggcgcgatctcggctcactgcagcctcgacctcctggctcaagccatcctccccgctcaacctaggactacaggcttgcgccaccacgcccagcggctaatttttgtatttttagtagatacggggtttcgccatgttggcgaggctgg

SEQ ID NO: 95208 - DNA, 883 bp, Homo sapiens
ttgttgggtggtgartgaaatattagataccattctttcctcctagaggcccagttttacatagaaattgtaactttgtgttgtcatcccactgataatattaaggccaggcacaaggtttttcaacttttgaagtttattttctcactcgaaaccttttatgtaaactcctttgaatacccacataaaggaaagaaagttggtgctgataaactagtgggcagcaggttcatggtggttcagggtcggtcagcaaaccagtgccaacactgaagatgatgccaaacaaaattgactgcaatctgttctagccaggatcatggtttagatattttctagccagaattaattaatttattatttttttctttttttgagacagagtctcgctctgttgccaggctggagtgcagtggtgcgatctcggctcactgcaacctccacttcccaggttcaagcaattctcctgcttcagcctaccaagtagctgggattacaggcacgtgccaccatgcccagctaatttttgtataattaattaatttctcatacagtatcatcatttaatgatttgtggggttttgtgtgtgtatgtgttttaagagacagaatctcactacattgcccaggttggtcttgagctcgtgagctcaagtgatcctcttatctgcctcagtcttctgagtagctggtactacagatgtgagccattacacctgtcttaatgttttgtattcttacatgttaaccccctatgtaatatggcaatgtgcagttgtataaataatttttaataatatttaagttggtattggttgaactattaacataggtaagtcctttctacaaactctgtctctcttgtctaaaagctgggtgtggt

SEQ ID NO: 95209 - DNA, 753 bp, Homo sapiens
agcctccagaaggaacggccccaccaacacgttgattttagtccagggaaactgatttagaacttccaggccaggcgcagtggctcacacctgtaatcccagcactttggaaggccagcgcaggcggatcaccaggtcaggagttcgagatcagcctggccaacatggtggaaccccatctctactaaaaatacaaaaattatccaggagtggtggcgcgcacctgtaatcccagctcctctggaggctgaggcaggagaatcgcttgaacccaggaggcagaggttgcagtgagctgagattgcaccgctgcactccagcctaggtgacagaacgagactccatctcaaaaaaacaaacagagaaaaagaacttccgacctcagaaccgtaagggaacaaatttgagttgttttcagccaccgagttaggggtaatttgttatggccgccacggaaacccacacactgagctgctcttttctcacgtgtgtggtggtacaccaccctgaccccctacccgccgcccctcccaacccggcctcatgctggggaggtggagggtggaggtgggatgtgaggcgggtaggcaagcagccaaagggaggccatgggtgcggcactgtcctcccccayggcctgttctggacagacagggcccccggatcagcccctagggcctcagcccttctcttcagcccaagccccagtggcagcagatctcagcactgccaggcagcatggagcctccctaa

SEQ ID NO: 95210 - DNA, 1166 bp, Homo sapiens
tgcatttctcagaatgtatcccctttattactggatgttattaactagcgatgttaagctcctttatrcagactttttttttggcttcttaggattctttacaagtattgcctttatgcctctttaagtaatccttccctatctccaagtgatatcctttcctcatttcttttaaaatgttgaagctttattttccacatttaagaactttaactcatatgcaatttatgtgtacagttgtgaggtacaaatttgattttcttatacaaacttaaggtcacctctgtcaaaccaagttctatctagagatgtgcatatctgttcatcccttgcctctggtttctgtttcattgctttaatttcttatagctctgccaatggcatagtttttatttctataattttataatgaacttgtacctgtgatagggccagccacccattcttgttcagctctttcaaaattttcttggccatttaaaaatacccttccatatcatttcaataatcagtttttaactttcataaaatatcctgttggccttttggaatcccattaaatttatagattaattcttctacatattttatatttatgccctagatatcttataatttgatgttctgatgaaagagtttcaaaattatattttctaatattttttttttaagacagagtcttgttctgtcactcaggctggagtgcagtggcacaatcatggctcactgtagccttgacttcctgggttcaagcaatcctcccacctcagcctcccaagtggctgggactacaaatgtacgccaacacacccacctaatttttgtactttttgtagagacaggtcttcaccatgttgcccaggctggcctctaactcctaggctcaagcaatcctcccatctcggcttcccaaagtgctaggtttacatatgtgagccatcatgctctgtttctaatttttttttcttttagaaattcttacatgatattcaagatatacaataagatataaagaacaaaataatatatgctcatgtgcccatcaccctggttaagaaataacatgttatcaatgtcattaaatctccctggccccccttcccagtcacacatctctatctctctgtaagaggtaaccactattctgtttggcttttttatgtaca

SEQ ID NO: 95211 - DNA, 986 bp, Homo sapiens
tgggcagaagcagtggattccacctccgggcctggccaaccaaaccctctcagaggacacccccatgggcttttctgttttggtggcagggatggagatggccttctgggtgaccttgggaaaagccacacatggaaggagtgtgggcccatggatcaatgtcttggaaaaccctggaacagtaactcctagacaggaccagacacaagcagaaaataaactctattttgtcaagtctctgtgatttggggttaaactgaggaaagctggcacagggagcagacggcaatcctggcctgcctatggcaatctcgccagcccatgcagaggctgagaagagtgaagatcccacggagaggaggcaagcgagagggagagccctggctgtggggtttgggctcaaggaggtttggcccctatcaggggccggctgcaccccagaccaccaggcactctggcaggtggattttctctctctyttttttttttagggagattggcttggttttctgcctcgtgggtgcaccttgttgcagggatatggggaaaatttgccccgatggtggaggtgaagctcgcagcactatgaggagttggttctcatggacattattccctgtcttttcccattggcctagagaagcagcattcgtgcaagtgagagtgacagaaggacgcttactcacggcgtccagcccggctccctaggcaaagccactgtgggagggcatctctgccaggaccgggctgaaaggctctcctgaaggacgcatgggccagggccactcacagaatctggaggagccatgtacagctatggtctctgtagaaataggtggtgtgggggcaaagctggggacaggaggtggggaggaaagcaaaccaggtgactgtgcatgtgtgtccctcggaacagggcgggtggaaggagaatccgctttggagtctggaagcactggtttgctgctcacctgcgtgggactcac

SEQ ID NO: 95212 - DNA, 1418 bp, Homo sapiens
agcgaatgcatgccatttttyggctgcaaggaccgggctgggagcttgtggacttcccatatcctgggatgggaactcccctggttctcccttttggccattgagtgatccaagggaactggcctttgggaaaattgtgggtgtaaattagtgcattttgaaccattggctgtgtgtgaggctctgcagggaatcccgttggtaaaggggacgctgagggaatttcctggcatggaaggtgcttgcttactgcttatgagttgatatgtcaagatagaaactggttgcttcaagagaaatgtaagctggaaaaggaaaacgtgaatctgacttccagactggccctggcccaatgccaggcctatgtcttgactgatcaagctcaaagctgtcagcctattgctgaagaaagcagctgtccaagtggcctagtcagggtagaactgaagaactagtcaaccggggcttggagcaggtaaaaacccagctcctatctcaaggataagaaattaaccctagtaaaattcaaggacctgcacaaactgtaaaattctttggcattctatggaatgcagggaaatagtttactttaccaaaggctaaggctaaaatactagaatttgcaacccctaccactaaaaaggaggcccaaacatttgttggcttgtttggattctggagacatcatattcccgacttgggtaacattttacaacctctgcatgctgtcactagaaaacgctacgactttcgctggggagagaaagagagcacggcttttaacaggctaaacaagcagtgcaaccggccctggatctatggcccttacgggatgggccagtagaactgcaagtaacggccgggcgcggtggctcacacctgtaatcccagcactttgggaggctgaggcgggcagatcacgaggtcaggagattgagaccatcctggccaacatggtgaagccccgtctctactaaaaaaaatacaaaaattagccgggcatggtggcgggtgcctgtagttccagctatcgggaggctgaggcaggagaatggtgtgaacccaggaggtggagcttgcagtgagccgagattgtgccactgcactccagcctgggcaacagagtgagactccgtctcaaaaaaaaaaaaaaaaaaaaaaaaaaagaactgcaagtaactgtcctagatcaatatgctaacaagagccttaggcagaaacaagatgggaataagctatctttggaattttggaaccagaagatgtcagaggccggcaaagcttatacccctttcaaaaatcaactgttagcttgctattgggccttgctggaaacagagcaccttgcttcaaccatgatgtctttttgattatgacttggatcctgagttcccctagaactcactggttctgacgaa

SEQ ID NO: 95213 - DNA, 1418 bp, Homo sapiens
agcgaatgcatgccatttttcggctgcaaggaccgggctgggagcttgtggacttcccatatcctgggatgggaactcccctggttctcccttttggccattgagtgatccaagggaactggcctttgggaaaattgkgggtgtaaattagtgcattttgaaccattggctgtgtgtgaggctctgcagggaatcccgttggtaaaggggacgctgagggaatttcctggcatggaaggtgcttgcttactgcttatgagttgatatgtcaagatagaaactggttgcttcaagagaaatgtaagctggaaaaggaaaacgtgaatctgacttccagactggccctggcccaatgccaggcctatgtcttgactgatcaagctcaaagctgtcagcctattgctgaagaaagcagctgtccaagtggcctagtcagggtagaactgaagaactagtcaaccggggcttggagcaggtaaaaacccagctcctatctcaaggataagaaattaaccctagtaaaattcaaggacctgcacaaactgtaaaattctttggcattctatggaatgcagggaaatagtttactttaccaaaggctaaggctaaaatactagaatttgcaacccctaccactaaaaaggaggcccaaacatttgttggcttgtttggattctggagacatcatattcccgacttgggtaacattttacaacctctgcatgctgtcactagaaaacgctacgactttcgctggggagagaaagagagcacggcttttaacaggctaaacaagcagtgcaaccggccctggatctatggcccttacgggatgggccagtagaactgcaagtaacggccgggcgcggtggctcacacctgtaatcccagcactttgggaggctgaggcgggcagatcacgaggtcaggagattgagaccatcctggccaacatggtgaagccccgtctctactaaaaaaaatacaaaaattagccgggcatggtggcgggtgcctgtagttccagctatcgggaggctgaggcaggagaatggtgtgaacccaggaggtggagcttgcagtgagccgagattgtgccactgcactccagcctgggcaacagagtgagactccgtctcaaaaaaaaaaaaaaaaaaaaaaaaaaagaactgcaagtaactgtcctagatcaatatgctaacaagagccttaggcagaaacaagatgggaataagctatctttggaattttggaaccagaagatgtcagaggccggcaaagcttatacccctttcaaaaatcaactgttagcttgctattgggccttgctggaaacagagcaccttgcttcaaccatgatgtctttttgattatgacttggatcctgagttcccctagaactcactggttctgacgaa

SEQ ID NO: 95214 - DNA, 2002 bp, Homo sapiens
ggatccacccactttctatccagtcccagtgagatgaactgaatacctcagttggaaatgcagaaatcacccgccttctgcattggtctttctggcagctgcggactgaatctgttcctatttggccatcttacaagctctccagaacctttgaatctggtcatttcttaataaagttttagaatatgtcattcattggtgaatggacagctttcagtctctttctgcctctaaatattttaggaccagtctttttttaatccatcctgccatctcagtttcttttaatctaggcagcttgtacttttgccaatagagctctctcaaaaatgatttatgtgttctatgcattcatttctaattaaatttatttgcctgaaactatacccacaatttctttctggatttgtatttctctttagatwtacttactagtaatttgagggcatttgattttgtcaaaccccacatcaactttgtagaagctccttggtctagctgaagggactactagagtcaggttaattctttcagaggtctaaaaggaatgttacagacacattttgatttcatctttgacttagaaacagttcagtttttcaactctataaactctaggctgtctctatttcctctgaactctacttgacaacaggtcagttccttttggagtgttctcttgtagtgtcttagctaatatacttactggcaacttttcacactttgaaaatactgcctcaaaactttctagcttaatgcagccaattcagtacatagatattttcttttctatattactgctagagtcaattttaccaaatgttttgccactacattatacagattattgttctcaaactcatttaacaattttcttaccatcttgccagttctcagaattactgccacatattttaggttttaattatggcaacaccagacttctaggaccaattctctgttaatcagtttttgttgcataacaaacgactgcaaaaatctctgtgacgcacaaaataagcacttactgcttattcatacatctgtgattcagctggtgtatctctgtttcagactctggagatggctgctttggctttgaagtctgtgcttgggcttatgtctgctccagtgtgctcattctggagctgggactgaagaggctgaggcaatctgggggaaactctttgcaaggcagaataccagaacccaagaatgcctgcccaaaggcatatgcatgttttaaacttcgtcatgttcactgacatcccattacaccaaaaagtcacaaggccaattccaacctcaagtggacggggagaattttttttccctttggagaccaaggtatggagggagggagtgaatatttgctaagcaataatgtaatctactatgcaaaggaaattataagaagaacacagtattttaaatcttgtcatgaaggtgaataaatgtgggcttcttgttctctctgtgtatatagaagtccgtaggagatctatgatctgtgaattttcaacctaaaaatatactgtttaacaatcttagaaaaacagaaggtagttggattctggtgtttaaatgggaggagaggaaggactaactggcagctcagaataaaagggagctgaataccagaaaaggaaggttgggaagggacagaatttaagtttgctttcccctcccctcaactctttcctatttgcctttatgtgaagaggaaaatacacagcattaattatcacagtagtccagagggctaatgccaagatggtgtaaacacaaaattaactatatcccgtaggaggggcaaccactaaataatactatgcagtggtcaaagccataaaataaaggggtgtgtgggtgtgtgtgtgtatttttcaaagacatatttaaatgcaggaatatattccaagcatattataggaaattgagaagattgagactggggattacatagaaaagaaatagataaaagaagaccctggcagaaatg

SEQ ID NO: 95215 - DNA, 1171 bp, Homo sapiens
tgactttgacaggaaaaaagtgtttgtggcttgttaaaattactttactatgcctagaatagtgcttggaatgtaataaacactcattatttgktaaataaatgcataaataagtagatatactattaaaatacttaatatgattttaattgcctttatgtcttatgtgatagaattcaaagatgcccataaagccccagtccatcctgtgtccatgccacttgcaatgtaacgtgatacatccctctatcacaaggtgtactttatatttccacacagcaaatctaggcttgtctgatttgcttttgcaaatataatggagtgtggcagcagtgacagtgctagctctgagctaggggctaaagagattttgtatgaatctacactgcctttgagctctactgctaccatatgaacaagcctgagccaacaagctgaaaaatgataaaccacgtgaaaaagacacaatctcaaacatcagatctatccaatcagaaacatcccacctctctacagagtggcagctccctggtgatcaagaagtgattaaacacataactgtacccagccaacaccatcaggatgagttgagcctggcttaaacttatggttctgtagaaccatagaattgtgacatgaatcaatgtttattgttttgaagtggttaattacagagtaaaatctaaataatataactcatgaatatttttaatctttaggtttacagtaatgttgaaacatagtactgaatgtttctgcatatctgtcattcagtttttgcaatttaattagtggaagggcttttctgtgttatttgtctttgttagtaagttttaagtttattatattgtgattacagacatttgataaaatatttcagtttataaaatttattattcatatatgtacataatacagttgtaaatatatacagaataaaagaaaaaaataaaaaataaaaaacaaaaaagaaaaagaaatatatatatacatacacatgtgtatactatgatagtgattacattgcttaaattttatttcctaatgtatttttttgtccacccacttaatttgtcttgtcctaagaggaatgtattaaagttcccatcattggtatatttatatctatttctctttgcgtacccgataatttttgcttaataaatgtttt

SEQ ID NO: 95216 - DNA, 1171 bp, Homo sapiens
tgactttgacaggaaaaaagtgtttgtggcttgttaaaattactttactatgcctagaatagtgcttggaatgtaataaacactcattatttgttaaataaatgcataaataagtagatatactattaaaatacttaatatgattttmattgcctttatgtcttatgtgatagaattcaaagatgcccataaagccccagtccatcctgtgtccatgccacttgcaatgtaacgtgatacatccctctatcacaaggtgtactttatatttccacacagcaaatctaggcttgtctgatttgcttttgcaaatataatggagtgtggcagcagtgacagtgctagctctgagctaggggctaaagagattttgtatgaatctacactgcctttgagctctactgctaccatatgaacaagcctgagccaacaagctgaaaaatgataaaccacgtgaaaaagacacaatctcaaacatcagatctatccaatcagaaacatcccacctctctacagagtggcagctccctggtgatcaagaagtgattaaacacataactgtacccagccaacaccatcaggatgagttgagcctggcttaaacttatggttctgtagaaccatagaattgtgacatgaatcaatgtttattgttttgaagtggttaattacagagtaaaatctaaataatataactcatgaatatttttaatctttaggtttacagtaatgttgaaacatagtactgaatgtttctgcatatctgtcattcagtttttgcaatttaattagtggaagggcttttctgtgttatttgtctttgttagtaagttttaagtttattatattgtgattacagacatttgataaaatatttcagtttataaaatttattattcatatatgtacataatacagttgtaaatatatacagaataaaagaaaaaaataaaaaataaaaaacaaaaaagaaaaagaaatatatatatacatacacatgtgtatactatgatagtgattacattgcttaaattttatttcctaatgtatttttttgtccacccacttaatttgtcttgtcctaagaggaatgtattaaagttcccatcattggtatatttatatctatttctctttgcgtacccgataatttttgcttaataaatgtttt

SEQ ID NO: 95217 - DNA, 553 bp, Homo sapiens
cttttacaggttaaaatggcttaaaggtgtcagcgtttcatgataagccttgtatttgggaccttgcaactcagtcagaaacttgtcgtgtggaatgatagttaaaaatcagaggctgaatgctaagtagatttgtgtatggtgggaattggaaggcataaaaaaattatgttagtgtttcaaaactggatagaaaatattaatccgaagcatttaaaattttactgtcgaaatctgtttttagattcataaacgtctaagggtattgctattaaaatttttctccaagaagggcaaratattttgatattttagggaaaaaatatatgtctgaaggcaacccttaaagtaatattttacattttggaaaggtaggtgtaaagattcctcatttgcctcttttgtgattaaaccccggacagagaatgtgataatagaggggaaaagcattttctcttcttcccttcccggtaagctcgaaggacgctgagcccgtgcagcccctgttgttactgtgtcgcttgttcttgtttcccctgcagtacgcacttta

SEQ ID NO: 95218 - DNA, 802 bp, Homo sapiens
aacagggagggggcaggaggcaagggagatacttacacatctgtaagaagggatttcttgtctgtcttcctcatggccacatccccagggctggctcacagttggtgctcaataaatgtttgttgaatgaataactgaccagagcatcaaggctggascagaaatattaattgtatttggtcacagctcagcattgattgtggcacagagagggttggtagtttactaatagcacaaagtaggtaagtggaagagccagaatttgaacctaggttggaatcccaccaaagcctctattttatttgccatgctaccacagctctctgacattcatccaggaggtagaccactcacctggtaaagtttactggaaaaatctgatctctgtttattagtactaaaactgcctaaggattattatgcaaccttcaatgttcagccaagacaaagtgctactgagcaccagatcctacgacattaagccctaaaaattatgaaccccttcctttgaatatgtttatagcttgaggactcaaggcattctgagttgcaaaggaccaccgggattatccagcccaacttgctcagtttatagatgggaaaacctgaggtctgcagagggaaatatcttatccaaatttatggtatgaactgacacagagtacaggtgtcttgacttctagctctttttaattgcacaagcaatctatgaatacttctctcaaagaacttaaaatatatcagaaggctgaaatgcccttggccaccactgcagtcttaagcttccttctcagaaggatcc

SEQ ID NO: 95219 - DNA, 658 bp, Homo sapiens
gaatctgcatgtactgcactttccaggtggtgaccgtgcacagaacagtttaggcaagtccatgctagctgtgcttctcaaaggaacgtgcacaggaatccccgggggattgtgttaaagtgcaggttctgatttagcaggtctggaatggagtgcgagattttgcatttccaacaagcacccaggtggtgccaatgccactggtgcgtgggccacactgagtatccagggcctaggggaagggagagaggagccatcagcagacaaaatgctttgataatttagactcccccacctcccacttaaagggcaactgccaacaaatattgcaggtgggtgcaagagaagtggggtmtgatttgcaagcacccccccattgtagacagccttcttcagcagaggactcacctgaaaccttccctctccccaggtttttctcaaggcaggtgtgatctccaggcttgagaagcagcgagagaagctggtatctcagagcatcgttctcttccaggcggcttgcaagggctttctgtctcgccaggaattcaagaagctgaaggtactgcatgccgttcccatgaggagtctgatccaacgggtctggagcgggcatagggtctgcctgtctttcaggatgataccggtgcaccgggtccaa

SEQ ID NO: 95220 - DNA, 658 bp, Homo sapiens
gaatctgcatgtactgcactttccaggtggtgaccgtgcacagaacagtttaggcaagtccatgctagctgtgcttctcaaaggaacgtgcacaggaatccccgggggattgtgttaaagtgcaggttctgatttagcaggtctggaatggagtgcgagattttgcatttccaacaagcacccaggtggtgccaatgccactggtgcgtgggccacactgagtatccagggcctaggggaagggagagaggagccatcagcagacaaaatgctttgataatttagactcccccacctcccacttaaagggcaactgccaacaaatattgcaggtgggtgcaagagaagtggggtctgatttgcaagcacccccccattgtagacagccttcttcagcagaggactcacctgaaaccttccctctccccaggtttttctcaaggcaggtgtgatctccaggcttgagaagcagcgagagaagctggtatctcagagcatcgttctcttccaggcggcttgcaagggctttctgtctcgccaggaattcaagaagctgaaggtactgcatgccgttcccatgaggagtctgatccaacgggtctggagcgggcatagggtctgcctgtctttcaggatgatacmggtgcaccgggtccaa

SEQ ID NO: 95221 - DNA, 775 bp, Homo sapiens
ggatccacttrcacagagaaaaaacatgggcagacatggtgccttgatgcctttggaaactgtttcctctttcaggaaaggagactcattccacagttggcaacttttgacttcatttcttaaagagttaacagcattcagaaacgcttcttgctcaactaacataccggatactgtgattcaaaaggtaaagggtcatttgctctaggagtttcaaaacactgctgtattttgacctatcttaataaaggtgagatttttgactgttttactcactgctgtgtcaccagtgactagtgcatgactggcacataataagtactgactaccagtttttataccagtgtataataagtgctcgataaatatctgattgcatgtagacaaggcttctcagtccatagggaatgatgttctaaaggtctcatatcccaagaccaggtaatttagataagaaagtcttgtcatgcaaatggggtgaaaagtgcaaaagtggaacagcataattagaaagaaccatctgagattgcctgcctaattcatctgctactgccaaaaaaaaaaaaacaaacactgcagctcgacgcctataaaccttttctgagcagatgaggctacacaacatgtttatgagagaatgagtgaaaccagctatgaggaagttggaggtaatatatttaacaatatataccatggcaagagaactgtgctaaatatctcaccagacgtgattaaaacgaatgcttgagagcagaatattaatgaacaatgaaaa

SEQ ID NO: 95222 - DNA, 534 bp, Homo sapiens
caagtttccacgctaggagactttgggcttatcatttaacatttccatgctttcataaattagatgaataacctccggactgcctggtttgtaagatggttgtgaagattaaaggtggaaatatataggaaaacactttgtaaatcatgaaagcttaataagtatcaacactattttctacctgagtcagtagtcattggaaattccaatatttggcagttgtgaataactgccaatttaacagttgttcaatatcaacagctttttaaaagctgaggtcttcaagctacaggtagaaggagataaaagaagctttcctaattcattagaacatcagttctccccaggtayactgcagatatgttataaggcaaattaaaacaagctgcagtttgccttcatgacactatgaaatgcttaggttgctgcttttttaattcgcatggaaaactaaagtttttgatgcttattttcttgatttttatagacataatgttcatcatggaagtacttttcccctttggagatcactgg

SEQ ID NO: 95223 - DNA, 788 bp, Homo sapiens
aaaatctggttttacgtaggagaccaatcttacaaaagctattataaatgatttccttttaattataatcaacttaatcacatacaaattccttttataaattctccttcacaagccttatcataacttacacgggctacctacaacatgcttggactttctgagttgttctaaattttgtctctcttaacttatcagttgttttaatttaatacaacagtttaccatataagaccctttttcatacaaaattattctcttttcttcataactttccttacaaaaaatacatctttatattcataattttcttcatatctctctctcccctacatattggttcctttctaccttgtctcataaataaccatttttgagtccataayttaattgaccttagataatttctgaattagataaaattatgtttttactccatgaaactagatcccggaaggcttttggcctccaatgctgtccagagagataccaattaagcaatccaaagaataaaaatcatcaaaaccagaaagaaaatgataggtataaatttcagggtgatgcgcatcactagtgaggcacagacagcaaatatgcagccaaaaaaagagacacggggatcaagaagcagtacgttctggcaaatatccctctgagcctcagtttatccatcagagcaacattgtaacctgatacctctaaaggccaaaaaatattgtgcaacaaggtggtggccaacctgggagatcctacaaggccaggctccctagcagacacagcccaaagga

SEQ ID NO: 95224 - DNA, 629 bp, Homo sapiens
gcaactttccatgtcagtattttattttagccacagctacttctcccccaaattacaatgaatatgctcagaggtgaaatcattcccaacaatgagtccgcctcctttaagaggaaacttggccgggcacggtggctcatgcctgtaatcccagcactttgggaggccgaggcaggcggatcacctgaggttrggatttgggaccagcctgaccaacatggagaaaccccatctgtactaaaagtacaaaatgagccaggcgtggtggtgcatgcctataatcctggctacttcggaggctgaggcaggagaatcgcttgaacccagggagcggaggttgtggtgagccgagatcgtgccattgcactccagtctgggcaacaagagcaaaactccatctcaaaaaaaaaaaaaaaaaaaaaaagaggaaactcacattgcagaaatggagtatcacttttgaggctagatttacaaacacacacacacacacacacacacacaaagccatagtgttttctctcttgaaatgctcactctgagggatgttggtcaccatgtcataaggatattcaagcaggccatatgaagaactgagaccttgtgccaacagtcagcatgaacccacc

SEQ ID NO: 95225 - DNA, 1127 bp, Homo sapiens
gtcctgccattcaggaggatcggcttgccctccagctctcctctcatgggcaccaccgtgatcttatactcagtccccggrtgcagacctggaaacaagcaggcagcgcaggatgtgagtgcaggctccagacccctctccccagcactactcctccctgggatttctcccgtgagggaagatgagaggtgatgcttcctcctccaaagatgaatctgtatttgcaggcaaataaagccccgcaggtgcaatagaacatgaggtgtcactgagggggcttataggctggggatgggagtagggcatcacagcaaatgagatgacagcaattgaaatgcatttcaaatgttctctggttcttcactgggccacctagcacttatttcccaattttatttatagacccaaatgtgtttctgctcccagcaacccttttccttccaaagcatctctccttctcattgtgacatttagcctaattttttcctatttattttattagagacaggatctcactgtgtcactcaggctagagtgcagtggtgcaatcacggctcatggtagcctcaacctcctgggctcaagggatcctcccgcctcagcctcttaagtagctgggaccacaggcatgagccattatgcccagccctttttttaaaaaaaagttatttctctgtagaagcaactagaattatttttccttgggcacaaatattcagactgtggtggtaaaatgcagacaaacagaagcttgtgtgaggcacacaccctcattctgcactccacaaacactaagaaccccaaaatgtcctgtcaagacagaactcaaggagtggacagcagaacaaggctccaggagggaatttaccatgaagctaataagccccacactttcacgggcccattccaaggccttgtacctgattgggtattcatgattgcgtattacttttcttaaaaaagagccctggaattgtacagacttcaagcactgccaaacttgatccatccctgcagccttgtttccttagcagccatttgagctctagctcttggcagcattagctcagaaatcagagacagagagccacccctgctcactgcaccctgcccccctccacatcccc

SEQ ID NO: 95226 - DNA, 1127 bp, Homo sapiens
gtcctgccattcaggaggatcggcttgccctccagctctcctctcatgggcaccaccgtgatcttatactcagtccccgggtgcagacctggaaacaagcaggcagcgcaggatgtgagtgcaggctccagacccctctccccagcactactcctccctgggatttctcccgtgagggaagatgagaggtgatgcttcctcctccaaagaygaatctgtatttgcaggcaaataaagccccgcaggtgcaatagaacatgaggtgtcactgagggggcttataggctggggatgggagtagggcatcacagcaaatgagatgacagcaattgaaatgcatttcaaatgttctctggttcttcactgggccacctagcacttatttcccaattttatttatagacccaaatgtgtttctgctcccagcaacccttttccttccaaagcatctctccttctcattgtgacatttagcctaattttttcctatttattttattagagacaggatctcactgtgtcactcaggctagagtgcagtggtgcaatcacggctcatggtagcctcaacctcctgggctcaagggatcctcccgcctcagcctcttaagtagctgggaccacaggcatgagccattatgcccagccctttttttaaaaaaaagttatttctctgtagaagcaactagaattatttttccttgggcacaaatattcagactgtggtggtaaaatgcagacaaacagaagcttgtgtgaggcacacaccctcattctgcactccacaaacactaagaaccccaaaatgtcctgtcaagacagaactcaaggagtggacagcagaacaaggctccaggagggaatttaccatgaagctaataagccccacactttcacgggcccattccaaggccttgtacctgattgggtattcatgattgcgtattacttttcttaaaaaagagccctggaattgtacagacttcaagcactgccaaacttgatccatccctgcagccttgtttccttagcagccatttgagctctagctcttggcagcattagctcagaaatcagagacagagagccacccctgctcactgcaccctgcccccctccacatcccc

SEQ ID NO: 95227 - DNA, 666 bp, Homo sapiens
ggttctctgctgcctgccaagtagcttacaagtcaaatttatgtcccagttctaatttcacagcatgcacttttgtgtcctgaggcttttatctttcctactctcatttctctttgccccagtttcctcatttgtaaactgccttaaatctttcggggaacaagaaggaaggggtatgtatcaatcaatcaatccataatttctagccattctttaaggtccacctccatgaaacttggcttcaatcttcttgcccagtcatttctcctctccagttccttgtatagcatttattgtttactactcaatggctcaatcatggtttttttttgtttttttttttttgagatggggttttgctcttgttgcccaggctggagtgcagtggcacaatctgggctcaccacatctgcctcctgggttcaagcgattctgctgccttagcctcccggccagatgggattacaggcatgygccaccacacccagctaattttgtatttttagtagagatggggtttccctatgttggtcaggctggtcgcgaactcttgacctcagatgatccgcctgcctcggcgtcccaaagtgctgggattataggcgtgagccactgtgcctggcaatcatgttgttttatgtaattctgttagttcataatggtaac

SEQ ID NO: 95228 - DNA, 1866 bp, Homo sapiens
aaaaacatgtgccccaggcatagctttcgaggagagcgcctggtttataaagtggtgctgtcatagcacagagaaggggtgcagctcagccggccaagggagtgcagcccggggctcactgctggcgcacgggaagggcaggctgaccagaccctgccagggcaccaagccaggcacactgcagggccctggaagccaggcagcagttcccacccttaccagggatggcagcgtgactttcttcactgcatcttcggggtaaccctgagaaacaggccaggttttatggctaccttcatattacaagtgaggaggctgacgctgggagaggtggcgtgtacagggccacacagccaggacgagaactcagacccagagctccttcaccacctgctctctcagaataaaccctcaattgtctacaagacagctcatctcaacagaattgcttcagcctcattgaatcctcagccgtcctgggagcatgagtattaccctcccctcttactacacaggtgtttctgaagcatcctctgcctgccctcagcaccccactcctggcgctgctgccctcatacctgtggactgacaaggaggagaagcggggcccctgcaacgctgtcctttcttcttccctctctcttaggagccagatgcttagatagaggacctgaacccttagccctctatagggatccctgtccatagattgattcagggaagggcggggggctgtgcccacccagctggtaccccgggtgggctgtcagaccctgatctccagatttaagctccattctccatgccagtaccccgggtgggctgtcagaccctggcctccagatttaagccccattcgccatgccaggcactatcgataatgaaggtgctatttgggctgcctttctccatcatcttacttccagatgcaggccaaagctgaaaggtggcaagtgctagtgtgtctgggagatggtcagatccaatggaagcgaagccctctctctcaccacaatgacagtccctctcagtactccttctgctgtaacttccacaattccttggtcctgcggtgtttggaggccccgacttgtgatataatcaaggctggccagaagaaagtggcccacgggaggacaaggccataagagcggggaccagggagaaaccagagctgcccaggaaagggacggcaaggctcacattcaaggccgtggctgcagagctaagtggtacgagaaaaagccccacaccagagccaggagatccgcttctaggccccacccatgctccacacgcccttcaaatgccacctcagcttcctgggcctcaggttcctgactcacctgtgaaatgggcaaagccagggcatggaaccagaagatctcaggagattgttctagaacgaggattctgcaccttttccttcagctgtgactctcagcccaggccacacactagaacctcatggggaagcttttacaaacatcaatgcccaggtcttctgactactgtgctataaagatacgcaacctcaaactgggatacgttgactttaaagccaagaacagaagctggaaggaccgtgaagaggtgatactaggagatgtccaagcgtaagaaacaaagawgaaataaatatcagcgtagtaggtgagagttgggttttggagtcagacttgagtaccacgtcttgcttccttactcaccaagaaacgccactcaggaaagctatgccttcattaccagtagcacctggcatggagaatgaggcttaaatctggaggccagggtctgacagcccacccggggtactggctgggtgggcacggccccttgtccttccctgaatccatccatggacag

SEQ ID NO: 95229 - DNA, 1866 bp, Homo sapiens
aaaaacatgtgccccaggcatagctttcgaggagagcgcctggtttataaagtggtgctgtcatagcacagagaaggggtgcagctcagccggccaagggagtgcagcccggggctcactgctggcgcacgggaagggcaggctgaccagaccctgccagggcaccaagccaggcacactgcagggccctggaagccaggcagcagttcccacccttaccagggatggcagcgtgactttcttcactgcatcttcggggtaaccctgagaaacaggccaggttttatggctaccttcatattacaagtgaggaggctgacgctgggagaggtggcgtgtacagggccacacagccaggacgagaactcagacccagagctccttcaccacctgctctctcagaataaaccctcaattgtctacaagacagctcatctcaacagaattgcttcagcctcattgaatcctcagccgtcctgggagcatgagtattaccctcccctcttactacacaggtgtttctgaagcatcctctgcctgccctcagcaccccactcctggcgctgctgccctcatacctgtggactgacaaggaggagaagcggggcccctgcaacgctgtcctttcttcttccctctctcttaggagccagatgcttagatagaggacctgaacccttagccctctatagggatccctgtccatagattgattcagggaagggcggggggctgtgcccacccagctggtaccccgggtgggctgtcagaccctgatctccagatttaagctccattctccatgccagtaccccgggtgggctgtcagaccctggcctccagatttaagccccattcgccatgccaggcactatcgataatgaaggtgctatttgggctgcctttctccatcatcttacttccagatgcaggccaaagctgaaaggtggcaagtgctagtgtgtctgggagatggtcagatccaatggaagcgaagccctctctctcaccacaatgacagtccctctcagtactccttctgctgtaacttccacaattccttggtcctgcggtgtttggaggccccgacttgtgatataatcaaggctggccagaagaaagtggcccacgggaggacaaggccataagagcggggaccagggagaaaccagagctgcccaggaaagggacggcaaggctcacattcaaggccgtggctgcagagctaagtggtacgagaaaaagccccacaccagagccaggagatccgcttctaggccccacccatgctccacacgcccttcaaatgccacctcagcttcctgggcctcaggttcctgactcacctgtgaaatgggcaaagccagggcatggaaccagaagatctcaggagattgttctagaacgaggattctgcaccttttccttcagctgtgactctcagcccaggccacacactagaacctcatggggaagcttttacaaacatcaatgcccaggtcttctgactactgtgctataaagatacgcaacctcaaactgggatacgttgactttaaagccaagaacagaagctggaaggaccgtgaagaggtgatactaggagatgtccaagcgtaagaaacaaagatraaataaatatcagcgtagtaggtgagagttgggttttggagtcagacttgagtaccacgtcttgcttccttactcaccaagaaacgccactcaggaaagctatgccttcattaccagtagcacctggcatggagaatgaggcttaaatctggaggccagggtctgacagcccacccggggtactggctgggtgggcacggccccttgtccttccctgaatccatccatggacag

SEQ ID NO: 95230 - DNA, 1866 bp, Homo sapiens
aaaaacatgtgccccaggcatagctttcgaggagagcgcctggtttataaagtggtgctgtcatagcacagagaaggggtgcagctcagccggccaagggagtgcagcccggggctcactgctggcgcacgggaagggcaggctgaccagaccctgccagggcaccaagccaggcacactgcagggccctggaagccaggcagcagttcccacccttaccagggatggcagcgtgactttcttcactgcatcttcggggtaaccctgagaaacaggccaggttttatggctaccttcatattacaagtgaggaggctgacgctgggagaggtggcgtgtacagggccacacagccaggacgagaactcagacccagagctccttcaccacctgctctctcagaataaaccctcaattgtctacaagacagctcatctcaacagaattgcttcagcctcattgaatcctcagccgtcctgggagcatgagtattaccctcccctcttactacacaggtgtttctgaagcatcctctgcctgccctcagcaccccactcctggcgctgctgccctcatacctgtggactgacaaggaggagaagcggggcccctgcaacgctgtcctttcttcttccctctctcttaggagccagatgcttagatagaggacctgaacccttagccctctatagggatccctgtccatagattgattcagggaagggcggggggctgtgcccacccagctggtaccccgggtgggctgtcagaccctgatctccagatttaagctccattctccatgccagtaccccgggtgggctgtcagaccctggcctccagatttaagccccattcgccatgccaggcactatcgataatgaaggtgctatttgggctgcctttctccatcatcttacttccagatgcaggccaaagctgaaaggtggcaagtgctagtgtgtctgggagatggtcagatccaatggaagcgaagccctctctctcaccacaatgacagtccctctcagtactccttctgctgtaacttccacaattccttggtcctgcggtgtttggaggccccgacttgtgatataatcaaggctggccagaagaaagtggcccacgggaggacaaggccataagagcggggaccagggagaaaccagagctgcccaggaaagggacggcaaggctcacattcaaggccgtggctgcagagctaagtggtacgagaaaaagccccacaccagagccaggagatccgcttctaggccccacccatgctccacacgcccttcaaatgccacctcagcttcctgggcctcaggttcctgactcacctgtgaaatgggcaaagccagggcatggaaccagaagatctcaggagattgttctagaacgaggattctgcaccttttccttcagctgtgactctcagcccaggccacacactagaacctcatggggaagcttttacaaacatcaatgcccaggtcttctgactactgtgctataaagatacgcaacctcaaactgggatacgttgactttaaagccaagaacagaagctggaaggaccgtgaagaggtgatactaggagatgtccaagcgtaagaaacaaagatgmaataaatatcagcgtagtaggtgagagttgggttttggagtcagacttgagtaccacgtcttgcttccttactcaccaagaaacgccactcaggaaagctatgccttcattaccagtagcacctggcatggagaatgaggcttaaatctggaggccagggtctgacagcccacccggggtactggctgggtgggcacggccccttgtccttccctgaatccatccatggacag

SEQ ID NO: 95231 - DNA, 830 bp, Homo sapiens
tttcctttatctgagaatggcttgatttccccttcattcctgaaggatattttcactgggtataggaatctggattgacatttcctagaaactcatcacccgatttttcctcagatcccaaagtccctagccagcctgccgccttctccaccttttagagtcttatgtttattttgtatttcatgtccagggttgttagtggcacacagcaagagaagtaaggaaaagtatgtctgtcctatcttcccagaagcagacattgcccacacacattttaataagtgattgagtctggattcaaccctgagcagtctcagagcccatgatcataaccactaggctatacttccccaggccacctgagtttattcaagtgtgctcctctggagacataggccaaaatctcttctcaagaatatcagtggaaagtcctgttggttcagcacagagatctttgtagaatgtggacagacacccctcagacgtcccacactcacattgcactagcatgtgagctaagccgtttaaatatacatgtgagaccctcttacaaaaggccagggacttactcttttctttccttcatccattatttattgaaggcatgtaaccagggatacaaaatcgtaactgccttttaaattgttctcttattttgtaccagaaactttgcaaaacacttcacatactggccactcyttggacatcacatcaaatcttatcagcttcatctcttattccagccactgctgtgaagagcagaactgtgcaggtttagaccaatttcatgagtgttaaacctgactgtgccttatctcaggcccctacta

SEQ ID NO: 95232 - DNA, 948 bp, Homo sapiens
caacaggtaccaacagatatattcaggagtcaggaaaccttgggaaattcctatagtcccaaattcgaatctctaggtcaagttagctgaccataaaaaatcagcctgggaggtgttttaacactgcagtttcctgagcctgacttctggggattctgattcctgtggcatattcgttcttttgagaagcttcagagagaatcctgacaaccagccagattagagatacacaagrcacattatcacattaaaggcactaaaaagtcctgcaacaaagacacccatgacatttcattgaaccagtttatcaaagttaaacaaacacaggtccctctttctctatgttttggtataatacctgtttttacaaggtctactgctcagagagcttaccaactttcccgcttaataattatacactaatatcatgaatccagtgatttttttcatgcccttcctattttatagcattgggttattctctccctgaagacaggaataggatctgtgttatttgtaacatcctccacatagagtctgaggaaatgagtgagtctcttaaaatcgtctttgaataggggacgtggtcctctgcccaccaataggaacattgataacagggtaggagaaagatttaaagcagctggtcatagtaggaaagcctgcagagccacatttggttgacagttgtggatgttgagtgccagcagtccagctgcttctcttctgagctgtttctccactgctctgagatctgcctcttaacaaacttggtccccaggtatgagccctcctgagacatttggttaagaagaggagtttcccatttctctccttctcctcctttcggccaccagtggattgaagggagcagtgctgaggccatttaaatgggcttctctgcagaacgaacaagcccttgtgttggaaattgggttaaattcagca

SEQ ID NO: 95233 - DNA, 948 bp, Homo sapiens
caacaggtaccaacagatatattcaggagtcaggaaaccttgggaaattcctatagtcccaaattcgaatctctaggtcaagttagctgaccataaaaaatcagcctgggaggtgttttaacactgcagtttcctgagcctgacttctggggattctgattcctgtggcatattcgttcttttgagaagcttcagagagaatcctgacaaccagccagattagagatacacaaggmacattatcacattaaaggcactaaaaagtcctgcaacaaagacacccatgacatttcattgaaccagtttatcaaagttaaacaaacacaggtccctctttctctatgttttggtataatacctgtttttacaaggtctactgctcagagagcttaccaactttcccgcttaataattatacactaatatcatgaatccagtgatttttttcatgcccttcctattttatagcattgggttattctctccctgaagacaggaataggatctgtgttatttgtaacatcctccacatagagtctgaggaaatgagtgagtctcttaaaatcgtctttgaataggggacgtggtcctctgcccaccaataggaacattgataacagggtaggagaaagatttaaagcagctggtcatagtaggaaagcctgcagagccacatttggttgacagttgtggatgttgagtgccagcagtccagctgcttctcttctgagctgtttctccactgctctgagatctgcctcttaacaaacttggtccccaggtatgagccctcctgagacatttggttaagaagaggagtttcccatttctctccttctcctcctttcggccaccagtggattgaagggagcagtgctgaggccatttaaatgggcttctctgcagaacgaacaagcccttgtgttggaaattgggttaaattcagca

SEQ ID NO: 95234 - DNA, 948 bp, Homo sapiens
caacaggtaccaacagatatattcaggagtcaggaaaccttgggaaattcctatagtcccaaattcgaatctctaggtcaagttagctgaccataaaaaatcagcctgggaggtgttttaacactgcagtttcctgagcctgacttctggggattctgattcctgtggcatattcgttcttttgagaagcttcagagagaatcctgacaaccagccagattagagatacacaaggcacattatcacattaaaggcactaaaaagtcctgcaacaaagacacccatgacatttcattgaaccagtttatcaaagttaaacaaacacaggtccctctttctctatgttttgrtataatacctgtttttacaaggtctactgctcagagagcttaccaactttcccgcttaataattatacactaatatcatgaatccagtgatttttttcatgcccttcctattttatagcattgggttattctctccctgaagacaggaataggatctgtgttatttgtaacatcctccacatagagtctgaggaaatgagtgagtctcttaaaatcgtctttgaataggggacgtggtcctctgcccaccaataggaacattgataacagggtaggagaaagatttaaagcagctggtcatagtaggaaagcctgcagagccacatttggttgacagttgtggatgttgagtgccagcagtccagctgcttctcttctgagctgtttctccactgctctgagatctgcctcttaacaaacttggtccccaggtatgagccctcctgagacatttggttaagaagaggagtttcccatttctctccttctcctcctttcggccaccagtggattgaagggagcagtgctgaggccatttaaatgggcttctctgcagaacgaacaagcccttgtgttggaaattgggttaaattcagca

SEQ ID NO: 95235 - DNA, 948 bp, Homo sapiens
caacaggtaccaacagatatattcaggagtcaggaaaccttgggaaattcctatagtcccaaattcgaatctctaggtcaagttagctgaccataaaaaatcagcctgggaggtgttttaacactgcagtttcctgagcctgacttctggggattctgattcctgtggcatattcgttcttttgagaagcttcagagagaatcctgacaaccagccagattagagatacacaaggcacattatcacattaaaggcactaaaaagtcctgcaacaaagacacccatgacatttcattgaaccagtttatcaaagttaaacaaacacaggtccctctttctctatgttttggtataatacctgtttttacaaggtctactgctcagagagcttaccaactttcccgcttaataattatacactaatatcatgaatccagtgatttttttcatgcccttcctattttatagcattgggttattctctccctgaagacaggaatagkatctgtgttatttgtaacatcctccacatagagtctgaggaaatgagtgagtctcttaaaatcgtctttgaataggggacgtggtcctctgcccaccaataggaacattgataacagggtaggagaaagatttaaagcagctggtcatagtaggaaagcctgcagagccacatttggttgacagttgtggatgttgagtgccagcagtccagctgcttctcttctgagctgtttctccactgctctgagatctgcctcttaacaaacttggtccccaggtatgagccctcctgagacatttggttaagaagaggagtttcccatttctctccttctcctcctttcggccaccagtggattgaagggagcagtgctgaggccatttaaatgggcttctctgcagaacgaacaagcccttgtgttggaaattgggttaaattcagca

SEQ ID NO: 95236 - DNA, 948 bp, Homo sapiens
caacaggtaccaacagatatattcaggagtcaggaaaccttgggaaattcctatagtcccaaattcgaatctctaggtcaagttagctgaccataaaaaatcagcctgggaggtgttttaacactgcagtttcctgagcctgacttctggggattctgattcctgtggcatattcgttcttttgagaagcttcagagagaatcctgacaaccagccagattagagatacacaaggcacattatcacattaaaggcactaaaaagtcctgcaacaaagacacccatgacatttcattgaaccagtttatcaaagttaaacaaacacaggtccctctttctctatgttttggtataatacctgtttttacaaggtctactgctcagagagcttaccaactttcccgcttaataattatacactaatatcatgaatccagtgatttttttcatgcccttcctattttatagcattgggttattctctccctgaagacaggaataggatctgtgttatttgtaacatcctccacatagagtctgaggaaatgagtgagtctcttaaaatygtctttgaataggggacgtggtcctctgcccaccaataggaacattgataacagggtaggagaaagatttaaagcagctggtcatagtaggaaagcctgcagagccacatttggttgacagttgtggatgttgagtgccagcagtccagctgcttctcttctgagctgtttctccactgctctgagatctgcctcttaacaaacttggtccccaggtatgagccctcctgagacatttggttaagaagaggagtttcccatttctctccttctcctcctttcggccaccagtggattgaagggagcagtgctgaggccatttaaatgggcttctctgcagaacgaacaagcccttgtgttggaaattgggttaaattcagca

SEQ ID NO: 95237 - DNA, 532 bp, Homo sapiens
cctaggggaaaaaaggattcaggatgatgcagatgggttttcagagagtctgagggcagcttctggaatcagacagcactgggtttcaatctcaggtttactacacacattctagctggctgacctcggataagtcactttccctctctaagcctcgctttccttaccagttggagatgacaccgatacttccttagagggtgctaagacagagtgtgggtaaagcacttggaaagtcttctggcaagtaagtgggcaaggggtcaagttcattgcatctgatggtgattacagggccggggagggggtggcagggaaataattttgtagtttcagggaattgttgaaaggcacattctttctgggccataccaaatgcagctctcctctcctctgctctacaatcactcactgctgaactcagggagccccatgctcaccacaggtaaagatggccgctttgatgactcaaatgagattttctatctgggtaaaaccaggagctgtttgctcagggracagctgtcagaaa

SEQ ID NO: 95238 - DNA, 535 bp, Homo sapiens
cctgtgaacagatataatccctaaaaagatatgaaaagcaagctgcaaaattaaaacaaatgcttaataaaatgtctaccatacataacattatataggttctattagttattgaatgtgatatatgtaaagtctttattacatctgaaaacaacttgtagaatagatttttctcacttgcaagaattcctgagtattcactgtgcttgctaagaaagacgtctcagccaacctttaaataaaatgagtattcatagccaaagaactcaaaaggaaaatcataaaaatctctcaaacattttcacygaaaaaacagagagagagagagagaaagaaagttgaggggtttcccaaagaaagggaaagacttttgaaggggctaaaatggccttggaagtgctaaggactttacattcaccttgttcaagttcactctaagtttaagatgcactaaagaaccatgaaataagattcgaaagctgatgatcctgctctgctccccgctggccgtatgaccctgggcaaagcccttagt

SEQ ID NO: 95239 - DNA, 593 bp, Homo sapiens
catttcttaaaagaagacatacaaatagccaacagatatatgaaaaagtgctccacaccactaatcaccagagaaatgcaaattaaaaccacaatgaaatatcatctcactcaagttaaaakggcttatcaaaaagacaaaaagtaacagatgcttgtgaagatgcagagaaagaggaaggctcacacactgttggtgggaatgtaaattagtacagccactatagaaaagagtatggaagtttctcaaaatactaaaaatagaaccgccatatcatccagcagtctcactgctgagtatatatccaaaagaaaggaagtcaaaatattgaagagatatctgcagtctcatgtttatcacagcgatattcgcaatagccaagataatcaacctaagtgtccaacaacagatgaatggataaagaaaacgtgctatatacacacaatggaatattatttggccataaaaagaatgaaatcctgtcatttgcagcaatatggatggaactggaggttattatgttaagttaaataatccagggacagaaagactaatattgcatgttctcacgcataagtgggagctaaaaaagt

SEQ ID NO: 95240 - DNA, 627 bp, Homo sapiens
gatggaatttgagactacttttaacagacttagaaacccagaactataattgaatgttaacaataagggttgtttacaaatattttatatgatttccaacttagatattttaatgttgtataaaatgttacctatgttgtgaaagttacttaattactaaaattaagtagtttttaatggtctgttggttttcaatctttctttgactctgttcccagaagcctatcaagcaacccttttggaagcctcttctgatgttattttctttttcaatctgccttcttcctctttgcctatctaaggatacagtatccaaggtctttttaaataccaaaaatggaatgcagtaggattttaagacaggagatatgttttctgcgtgtgtgatacaatctgyccaatgtcataataaagagactcattttacattgtactaacaaacaagaccaaactcatttgtacaaatatcatacttcctcattttctccttttcaactgtctgtaatttttctcggctgttatccacaattcaattatggttatttcccctctttctcttatcacatacaaataagtctgatcttttattacatatcctaattctagtttacattttcatttccattg

SEQ ID NO: 95241 - DNA, 648 bp, Homo sapiens
ataaataaataaataaataataaaaatacccagaataggcaaatctataacaacagaaagcagattattggttgccagaagraggagggaatgggtatgaggaatgactttggacagcagctggtcacgaccctcaggctttcaatctgagggtccagggttcatatccctgttcaggcaccactttgccacagaccctggtggactaaacaaaggaggatgaatgcaggaataaagacaaagacaaaaagatctattttaaaagaaggggtgagggggctccttgcttcttgtgaacaaggaccttgagcttctatagcccttcgtatttattgagtaaaagaaactgggaggagggggtggttgtaggtcagctgcttgatttagtgcaggcccgcatgactgctttcttagaacagtaggctccagatgttccattagatactctcaaggagctcagcgccagggagtgattgccctcagcataccttctggcagcaagcgcagatgtgagtttgctcacatcctgtattcatgataaacagtttgctctttgatcatatagcctccagtggaatgctgagttggtcacgaccctcaggcttttggctcccaacatccagcagctttggggataatgaaaatgtt

SEQ ID NO: 95242 - DNA, 610 bp, Homo sapiens
agatcttaatgtacctgatatagtttgggtatttgtccccgtgcaaatctcatgttgagaagtaacccacatgttggagatggggcctggtgggaggggaggtgtttggtcatggaagtggattcctcatggcttggtgctatctttgcaatagtgagtgagaactcacaagatctggttgtttgagtgtgtagaactccccaccctgccactccctcttgttcctgcttttgacgtgtgacatgcttgctccctctttgcttttcaccatgrgtaaaagctccctgaggcctccccagaagctgagcagatactggcaccatgcatcctgtgaaacctgcagaaccgtgagccaattaaacttcttttcttcataaattacccagtctcaagtatttctttatagcaacacaagaatggcctaatactgtacccaatttcatttttctagtagcttactgctctgtgaacttcattataaggctagcttccttctttatggcaaaatgtcctcagaagtcacaagcttcacatctgcacataacagtgcccagaaggaaagaaagcgttcagttccggtagctattgtgacaaattatcacagtatgcc

SEQ ID NO: 95243 - DNA, 536 bp, Homo sapiens
tcccacctgctgggtaggctaaggcaggagaatggcacgaacccgggaggcggagcttgcagtaagccgagattgcgccactgtactccagcctgggcgacagagcgagactctgtctcaaaaaaaaaaaaaaaaaaaaaaattataattttaaactaatatgcatttatgcaattaaaattctgtagcatgctagtcaattgcccaagcttcattagaagggcctgaaattttaaaagtgatttttaaaaataatttaagactgtttttttatttaaacaatttgtgacaaatcrccactttttctagcactgctgttagagtgttcattttaagaaaatcaatgtgaccatgccattttctcttcccttccccagcaattcatccctccctcccactaacccctgccctgccaaaaaaaaaaaaatccttcttccaggcatggtggctcatgcctgtaatcctgtcacttttggaggctgaggtgaatggattacttgaggccaagagttcaagaccagcctgggcagcatagc

SEQ ID NO: 95244 - DNA, 537 bp, Homo sapiens
tatacatataaggtggacatgaaacaaatgaatttcatgtttatacttgtgtcccatccccaagatatgtcattatgtatatgcaaatattctaacatttgaaagaaattgaaatccaaarcacttctggtcccaggcatttcagataagggatatacaacctataattaacatttaaataaaaatatattataaagtctacctagagctatacattttgtcaagggaagttatatctccccatccctatgtagagatgcacacataaaggcctggaagaatacacagaattattaatagtgtaacttagggaagaaagtagaacagtagaagaccaaagaggaaattttccctttactctgcctaattctgtgtttttcacatatttatgaacacatattcatgtgttcaatgtgattgcagtgaagcctcaattaatgtccttcctacatccacaccctttgccctgtaattttgcattcttccttctgattctggctggccctgtgagttggtttggcctacagaatacaaatg

SEQ ID NO: 95245 - DNA, 532 bp, Homo sapiens
acttatgtagaaatatatctgaatgaaatgttgttgaaaagctgtatatcattttaattttaataaatcaaatcacattttatattcactgactgagaagctggtacttaggaaacctgtgagaaattagtttaataatttgtgtgtatkgcaaatattgaccttctgacttaattcagaatttctatataaaaacaaaaatttaattctttaatatcttaaaatgagggatgctcatgccatgttaaataaatcatttccacttatatttaatacattgtattagttaggatgcttgcagctgcaaatgatagaaaatccgatccaaaatggctttaaaaattgttgttctataggtctatcaccctagacttctgctgtccaatatgatagtcattagccacatttaaatgtaaagaaatcaaagttacatttacatttaagtgtaaagtaattaaagttaaatacaatttgaaattctattttttcagtttgcactagccatattccatcaagtgaccaatagccacat

SEQ ID NO: 95246 - DNA, 532 bp, Homo sapiens
acttatgtagaaatatatctgaatgaaatgttgttgaaaagctgtatatcattttaattttaataaatcaaatcacattttatattcactgactgagaagctggtacttaggaaacctgtgagaaattagtttaataatttgtgtgtattgcaaayattgaccttctgacttaattcagaatttctatataaaaacaaaaatttaattctttaatatcttaaaatgagggatgctcatgccatgttaaataaatcatttccacttatatttaatacattgtattagttaggatgcttgcagctgcaaatgatagaaaatccgatccaaaatggctttaaaaattgttgttctataggtctatcaccctagacttctgctgtccaatatgatagtcattagccacatttaaatgtaaagaaatcaaagttacatttacatttaagtgtaaagtaattaaagttaaatacaatttgaaattctattttttcagtttgcactagccatattccatcaagtgaccaatagccacat

SEQ ID NO: 95247 - DNA, 532 bp, Homo sapiens
acttatgtagaaatatatctgaatgaaatgttgttgaaaagctgtatatcattttaattttaataaatcaaatcacattttatattcactgactgagaagctggtacttaggaaacctgtgagaaattagtttaataatttgtgtgtattgcaaatattgaccttctgacttaattcagaatttctatataaaaacaaaaatttaattctttaatatcttaaaatgagggatgctcatgccatgttaaataaatcatttccacttatatttaatacatwgtattagttaggatgcttgcagctgcaaatgatagaaaatccgatccaaaatggctttaaaaattgttgttctataggtctatcaccctagacttctgctgtccaatatgatagtcattagccacatttaaatgtaaagaaatcaaagttacatttacatttaagtgtaaagtaattaaagttaaatacaatttgaaattctattttttcagtttgcactagccatattccatcaagtgaccaatagccacat

SEQ ID NO: 95248 - DNA, 532 bp, Homo sapiens
acttatgtagaaatatatctgaatgaaatgttgttgaaaagctgtatatcattttaattttaataaatcaaatcacattttatattcactgactgagaagctggtacttaggaaacctgtgagaaattagtttaataatttgtgtgtattgcaaatattgaccttctgacttaattcagaatttctatataaaaacaaaaatttaattctttaatatcttaaaatgagggatgctcatgccatgttaaataaatcatttccacttatatttaatacattgtattagttaggatgcttgcagctgcaaatgatagaaaatccratccaaaatggctttaaaaattgttgttctataggtctatcaccctagacttctgctgtccaatatgatagtcattagccacatttaaatgtaaagaaatcaaagttacatttacatttaagtgtaaagtaattaaagttaaatacaatttgaaattctattttttcagtttgcactagccatattccatcaagtgaccaatagccacat

SEQ ID NO: 95249 - DNA, 628 bp, Homo sapiens
taggactttcattatgtgaaatttgattatgggtcataaattacgtatttatcttgcattaactgatgaaggtaacttgttaattagatgaaatcaaagttattgacctatagtgaatctcttctacatttattgttggcataaaataaaatatcatgacaagaatacaaatgcatatttattttgttactagatatgtaacattttttaaaaattcctgggagaacagatgtgaaatttgggagaatctatgagagwtttactcagaattcatatttattatcttttccgtttatgaagttgttgtctctcaacaaacctctccaaatttgaatctctccaaatccactcttctatatactctgtttgtggtgctgggggaagagtgtctgcaaactacatttttttttttattttcttaaggttctattttatttttaattaacaaaccacaatgagatgtcaccttctacctgttagattagctattatcaaaagatgaaagagcttaaatgttggcaaggatgtgtagaaaaggaaacccttctatactcactgttggtgatattgtaaattagtaaaaccattttggaaaatagtatagaggttcctccaaaaaaaaaaaaac

SEQ ID NO: 95250 - DNA, 673 bp, Homo sapiens
gaattcaaatagtttattatttaatctgtacctgtataattatgcaattattgtagttatgagtatatggttgctttaataaattagaaatccgttgatatctggaaatacagttgacccttggacaacatgggtttggagtgtatgggtctacttctacattggtttttttcaatcgaacacagacagaaaatattgtattggcagatgtgaaacctgcctataagaaggcctgatttttcatatgcatggcttctgactaggggaaatgatcatgcatagattttggtatatgtggggtcctgaaaccaattccccatatctacatagggatgactgtatatcttatactgatgccctrccatggactatcatcctgcctggcagggaacagtcactgaataaataatctgtacatgagtgtacttcctaatagataatcttggatcatccatctatgttcagtcaatatgtagaaaagatcagcatattattcatgacatattaaatacacacttattgagtacttattctgggcttggcaaggatgtggttaaaatttaatcaccttaacacttgctcaatgtgtgaataatatgactctaccaaatcatattgttatcttttatcttgttattttataaacagagatataagtaatgacctcaaaatg

SEQ ID NO: 95251 - DNA, 525 bp, Homo sapiens
ctgagggatccagaggcagacaataacagaagttaaaaggcatagcacatgtgagcatggctgatttctaccgattaaaccaaccccaagctttcatgaataaaggccatgttaatatccatagcataaatgaggactaaggaactccaaggctactgacagtagcrgagatagtggcataggtgagagtgggtaattcctattctctaggtcctccctgcttcatgggtgcaagtcactttgacacccatggtggcatctgccgaggtcactggaccctggggatgcaaggacagaagaggaaaagaggatgctcttccctctcttcctcatgtactgtgggtatctgctaggaaaagaaaggaaccagggatgcctgctcccctttttctagatgggtagccatttatattcactctgtacccctttagactgcatcctaaacccctgggaatcctttaaaaggcaccttctcttttctcttcctctggtctctcttcacaaataggtaatcatgtctctgta

SEQ ID NO: 95252 - DNA, 565 bp, Homo sapiens
gagtgacccaaaaggctgccagttttgagtggtgtccagaacaggagaaggctctgcaacaggtacaggctgctgtgcaagctgctctgccacttgggccatatgacccaggagatccaatggtgcctgaggtatcaggagaagatacrgattgtatttggagcctttggcaggctcccacaggtgaatcacagcagaggcctctaggattttggaacaaggctctgccatctcctgcagataactactctccttttgagagatagctcttgtcccgttactgggctttggtggaaactgaatatttgactatgggtcatcaagtcaccacgtctgcctatcacttgaactgcctatcatgaactgggtgctttctgacccacctactcacaaagtgggtcatgtccacagcattccatcatcaaatggaagtagtatatatgtgattgggtttgagcaggtcctgaagttatatgaggaaatggctcaaatgcccatggtccccagtcctgccaccctgccttctctcacccagcctgcaccaatggcctcatggggagttccc

SEQ ID NO: 95253 - DNA, 565 bp, Homo sapiens
gagtgacccaaaaggctgccagttttgagtggtgtccagaacaggagaaggctctgcaacaggtacaggctgctgtgcaagctgctctgccacttgggccatatgacccaggagatccaatggtgcctgaggtatcaggagaagatacggattgtatttggagcytttggcaggctcccacaggtgaatcacagcagaggcctctaggattttggaacaaggctctgccatctcctgcagataactactctccttttgagagatagctcttgtcccgttactgggctttggtggaaactgaatatttgactatgggtcatcaagtcaccacgtctgcctatcacttgaactgcctatcatgaactgggtgctttctgacccacctactcacaaagtgggtcatgtccacagcattccatcatcaaatggaagtagtatatatgtgattgggtttgagcaggtcctgaagttatatgaggaaatggctcaaatgcccatggtccccagtcctgccaccctgccttctctcacccagcctgcaccaatggcctcatggggagttccc

SEQ ID NO: 95254 - DNA, 565 bp, Homo sapiens
gagtgacccaaaaggctgccagttttgagtggtgtccagaacaggagaaggctctgcaacaggtacaggctgctgtgcaagctgctctgccacttgggccatatgacccaggagatccaatggtgcctgaggtatcaggagaagatacggattgtatttggagcctttggcaggctcccacaggtgaatcacagcagaggcctctaggattttggaacaaggctctgccatctcctgcagataactactctccttttgagagatagctcttgtcccgttactgggctttggtggaaactgaatatttgactatgggtcatcaagtcaccacgtctgcctatcacttgaactgcctatcatgaactgggtgctttctgacccacctactcacaaagtgggtcatgtccacagcattccaycatcaaatggaagtagtatatatgtgattgggtttgagcaggtcctgaagttatatgaggaaatggctcaaatgcccatggtccccagtcctgccaccctgccttctctcacccagcctgcaccaatggcctcatggggagttccc

SEQ ID NO: 95255 - DNA, 588 bp, Homo sapiens
actgctatacactgataacaaccaaaccaaaaacaaatcaagaacccaatcccatttattatagctacaaagaacaaatgaacctaggaatatacttaaccaagggggtgaaagatctctacaaggagactatcacatgctgctgaaataaatcacacaaacacatggaaaaacatcccatgcttatgaatgagaagaattaatattatgaaaatggccatcctgcccaaagcagtctgcagattcaatgcaattcttatcaaaataccaacataatttttcacagaactaaaaaatatcctaaaattcatgtggaaccaaaaaaagagcctgaatagccaaagaaataccaagcaaaaagaacaaaaccagaggaatcacattacctgacttcaaattatactacaaggctatagtaaccaagacagcatggtactggtataaaagtaaatacatagaacaatggaatagaatagagaactcagaaataaagccaaatacttacaaccaactgatcttctacaaagcrgacaaaaacatacactagggaaaggacactctattcaataaatggtgctgggtaaattg

SEQ ID NO: 95256 - DNA, 633 bp, Homo sapiens
gtgatgtctcccctggacgcccagctttaaaatttctctcttttgtactctgtccctttatttctcaatccggccgatgcttagggaaaatagaaaagaacctacatgactatcgggggcaggttccccaataatcagtagccctgagactataagttgaagtctgcttactttgctataattactatctggaaagctgacttgctattcttataaatataatcctagcattgcaggataccatgggccatcttgccaatctccttgctgcacaaacttgctaagcccattacatatgcaagttttatcattayaatcataatcatcaataccattgtggctgaggttgatgttatgattgccatacattgaaaagtagctatgtaagtcactaaacaaacattttatctccacttaaatatatttgtttgtctgaaataattacagagagaatatacatagatctatgtgtggacaagcctatctgtgtacgtgtgtgtacatatatttgtgcacaggcctaaacaaatatatatgtatggacgtatatgaaactaatatgtaatcagttaaaaagttaggttaatatacataggttaacatgtatgtatattaaactaacaggttatcatg

SEQ ID NO: 95257 - DNA, 580 bp, Homo sapiens
ttcttaagtcattgaataacagtccttctcacttgccctaaagttaatgtctgttttgtccatttcagagagaacagatactactagggaaacactgatcaaaagaagaaaagagggaagccctggataaagatatagtttgtgattctgtgattgggaacaaaataaaagcactatccaactccctcctggcctaggaagttatatttttgcaatgaaraaacaagagtttatcaactcccccagaatcctaaactatttgtgaagagtaatgtaaattttcaaggtagattttctcaaagtggcagcatgtacatgacaagcaaacttctgaaaattcctctttaaatatgtcttcctctccaaaaagttgcccaccagttgtagctgcttaaaattacttttaatgtctcccttcttccagcactgctgtctcgtaaaatacgctgttgtgaagtgcactccctccttgcctgtacctggtgagcacacgggtcttacattcagctccttgagaagagcacttcttctgcttggactgtttatctcaggatcatcagtctcctgatggcaaaccact

SEQ ID NO: 95258 - DNA, 309 bp, Homo sapiens
caaacattatcataatatattttttcaccatattaaatgtttaatataatttcaataaactaatttatactatacractgaaaaactacaggcagattattaatgatgataaaagaccagttgtaaaagaacatctgttataaaagttaaaaggcccattaagaaattatgtaattaagtcttctatatccattcggagcaacagcaaatatctctaagtcatttaagaaaaatccaaagtccccaattaacacattctttttattcttttgaattttgcatcttgtgtgaattgtgccttaagagtta

SEQ ID NO: 95259 - DNA, 614 bp, Homo sapiens
acatttctcagacaattatttttgaaatcctcatggaaaagaatactaaaacgcagattgataactcaaagctgctagtgcagtggcagagtttgaacscaggtctccccctattatattgaacataaaattcctattgcctctcgatgtattatttatttctttttcttgtcttctgggcatttctcttgaaccagtgccaatcaggcctcagcctgtggtcctgaagcctcctgtagactctctctctccctgtctcaccccagggcacggggttcagagctggacctgacactccatgtgacctgagcatgattatccaccttgcaagcagatctgctctgtgtaactgaggcccctgcgctgatcgtcccatctcctacctgcctggtctttacgcctcagtcactcatctctacaacaggcataataataacccctatcccaggggcttgtgacaatgatttctaaagtcagtatgtgtagcaagcttagcagagagcctgatatatactgagacccaggagatctggctgctgtggctactgatgttcctaggaacagtattcttggtctgcagcgtgtttgaggaatctgttggttcagcacgagcc

SEQ ID NO: 95260 - DNA, 564 bp, Homo sapiens
atgggagaaatacttgagcagacatatcatatgaatgaacaatatgcacatgaaaagtgttcaatgttagtcatgatgtatatgtaaattaaaatgayaattaggtttttttgtatgctaccagaatgtccaaaactcaaaaaaacaggtaacactaaatgtcatcaaagacgtggagaaacaaaaggtctgatacattactaatagaagtgtaaacacttcaaccattctggtaaaatccttggcaattttgtatcaacttaaacacaaacctatgatgcagcagttctacttgtaggtgtttacacagaaaaataaaaatatatgttcaaaaaatgtcttgtccaaaatattcatagcgaaaaagttaaagcaactcaatatccatcaagagcagaatatcatgttcttggaatggaatactaatcctcagtgtataggaacaaactaccaatacatgtagccacatggatgtatctcccaggcatcatgctaagtaaaagaaactaaagaaaaactgtaaaatgtatgattccacttaaatgaatttcagtaataagaaaa

SEQ ID NO: 95261 - DNA, 564 bp, Homo sapiens
atgggagaaatacttgagcagacatatcatatgaatgaacaatatgcacatgaaaagtgttcaatgttagtcatgatgtatatgtaaattaaaatgataattaggtttttttgtatgctaccagaatgtccaaaactcaaaaaaacaggtaacactaaatgtcatcaaagacgtggagaaacaaaaggtctgatacattactaatagaagtgtaaacacttcaaccattctggtaaaatccttggcaattttgtatcaacttaaacacaaacctatgatgcagcagttctacttgtaggtgtttacacagaaaaataaaaatatatgttcaaaaaatgtcttgtccaaaatattcatagcgaaaaagttaaagcaactcaatatccatcaagagcagaatakcatgttcttggaatggaatactaatcctcagtgtataggaacaaactaccaatacatgtagccacatggatgtatctcccaggcatcatgctaagtaaaagaaactaaagaaaaactgtaaaatgtatgattccacttaaatgaatttcagtaataagaaaa

SEQ ID NO: 95262 - DNA, 595 bp, Homo sapiens
tgatatatcaaggatatatctgcacttccacgtttatcaaatcactcttcataatatttaagaaaaggaatcaatatgttcatgaatggaggaatggataatgaatatgtggtatacatacatgatgaatatatatcattatgtatttatgtatatatgtatttatgtgtatatatgtatttatgtgtatacatatacacatgaatatatatgtatttatcaatgtataaatacgtgtgtatttatgaatatatgaatatgtaggtatttatgttcagccacaaaaaaggaatgatatattgtcatttgcagcaacatggatgagcctggaggayattatgttaaatgaaataagcaaggcacagaaagacacatattgcaggttctcacttatatgtaagtgggagcttaaaaagttgatctcgtagaagtggagagtagaatagaggttaccagaggttgggaagtgtagggggtagatggtagggagaaaatatgcacaggtttgtcaaggggtacaaaattatagttagataggaggaatgagttctaatattctatattatagtagagtgactgcaactaaaattaatgt

SEQ ID NO: 95263 - DNA, 466 bp, Homo sapiens
atttttacatttctagtaatgcaaatttgtaggttaatgtgattaaataaaacttatagtgactgatcatttttgtctttgcttgtttcaatacrtcaggaaaaaaaaacaaaatttgcttagccctatttgaaagaattattttaaacctaagttaagaaaatcaaggcatttctataataaatttgtagtttgcatagtggacagtagaataattatatggaagcagaaataattacacagaacatatgcatagtagttgataattattcttggctctttgaaaaccactatgatagcactcatttactttttcttgataggcttctttttaaaacaataaaaattttattccaaaactgcttttaattgactatgatataatgatagcagaaggtagactccttctgaatgtgcttgcattaaataaaaatgcctcaaaaaatgaaaagctttcagggaccac

SEQ ID NO: 95264 - DNA, 636 bp, Homo sapiens
ttgtgaattgaattgaagtgatattgttcttgttcattgtattaaataaattctaattttaaatatgtgcttccatatgaaagataccattttatggaaatgctgcagaaatgttaagaaattgcaatgcggaatactatcttcaagtttttttcctrtcatttggaatcataatatcttcatgtccatacttttaaaaaaatcaatccaggaccaatcctaatagaagaaaaatgacgttcatctagagagacaaatttgcttagatttgtgagcttacttagaagttttcttagaatgtgagaaatttactgggattctctgttttagccttggtggtgacagaatgaaaactcatcaaaccccacccttttccttgaagtagatgaatgattaaattatctaaatcaactggagtggtgacatgttcctatagtctcagctactcaggaggctgaagcagaaggatcacttgagcacaggaatttgaggccagcctgagtaacttagagagacctggtctttaaaatatataatctgtacgtataatctaagttaaaatgttgtcattctctgcttaatgaactccagtgataaattccttcaagctctctcggtagaacttccaagatttta

SEQ ID NO: 95265 - DNA, 636 bp, Homo sapiens
ttgtgaattgaattgaagtgatattgttcttgttcattgtattaaataaattctaattttaaatatgtgcttccatatgaaagataccattttatggaaatgctgcagaaatgttaagaaattgcaatgcggaatactatcttcaagtttttttcctgtcatttggaatcatartatcttcatgtccatacttttaaaaaaatcaatccaggaccaatcctaatagaagaaaaatgacgttcatctagagagacaaatttgcttagatttgtgagcttacttagaagttttcttagaatgtgagaaatttactgggattctctgttttagccttggtggtgacagaatgaaaactcatcaaaccccacccttttccttgaagtagatgaatgattaaattatctaaatcaactggagtggtgacatgttcctatagtctcagctactcaggaggctgaagcagaaggatcacttgagcacaggaatttgaggccagcctgagtaacttagagagacctggtctttaaaatatataatctgtacgtataatctaagttaaaatgttgtcattctctgcttaatgaactccagtgataaattccttcaagctctctcggtagaacttccaagatttta

SEQ ID NO: 95266 - DNA, 615 bp, Homo sapiens
tttaaatgccaaattcccatatgctcatgaatctgaggtatattcattttcaaacttggaatgaggagtaggaaggcattgaagatgaagagtagcactaaattttctggacaatgtcattattttagaccttgcagcattawcaaaactctttgcaaagtaaggtcttaatgtgtacttatgaggcttataagcactgaaaaaaaacagatgctttatattccttgaataagaggcaatttgaccattacagaaaaataattatctgcaatttactttgtaattacaaaacaagacattcccaatatcttctcttagtattttttgtattaaattttattagcatgtggaagttattttgattattttgcataaaatcattgctagtaattactctcttcagctctttcttccacagaaaaaggaatgacattctgttacacacaatactattggctcacttgattcagtagtaaacactatcgttatataaaaatagagttgaatattattataatgtatttctgaaaagaaacaagtttaaaacttaagttttaagggaaaatgacatttttggaaacaatatggtcttaaaaaaaaaggtatctcccttgg

SEQ ID NO: 95267 - DNA, 606 bp, Homo sapiens
tttgtacaaataatacattaggaatgcaaatgaatagataaaataatttcaattttttaaaaaagcaaagtttgaggagatatcataaaaaggaagtgtacccattttcaactcttagctattttccattctttgtcttaataacacaagatgagtataggttcttattagctttttccttttattcatgctacatttttttgtcagcctattttttttttctcagcaaagtcctgcaacagagcaggaacatgggaatcacttgaagggattcagtgattttttttctttctttcttcacttaacagttatattgaagttccaacattctctgacttcaaagtcagaacaattactgtgttctcaatcctccaagtgcacagattayctttctgcactgtggtggccactgctgtgggataggggaggggaggcattggcaattcaggactgtcttttctgtcctcctcagtgccactttcagtgatatgaagttaaaaccagatactgtgatcactcagttgattttagattcttatgaaagtgcttttttgtgtggataattgttcaatttggtgttcctacagagaggatgattggtagaga

SEQ ID NO: 95268 - DNA, 553 bp, Homo sapiens
ttacaaggaattagcttacctgattattggcatttaaaaatgacaagttcaaaatgtgcagagcttatgtcctagttggagtccgaaggcccacagccagaattcacttttactttggaaaggatcaccctttttatctgttcaggccttcaactgattggacgaggtccaaccatattaggaagggccatctactttactcagtctgcttaattawttaaatcaaattaagtatattgaattagattaatcaattaaattaataaattgattaaattaatattgaattattgatggtttgagcaatagactgattaattgatttaattaataaattaattgggttggttaaattaatctgctttactcagtctactttacacatcagtctcatcagaaaacaccctcaaagaaacactcaaaataatattcacatatgtacatactattttggaaataaacacacatgcaacaacaatgatgtatctcatagatgcatgctgacttggagaaggtagattttaacagcaagttaatgcgattaacctaatat

SEQ ID NO: 95269 - DNA, 684 bp, Homo sapiens
tatttctgtttcacacaattattgtcagaagaggtattttataccatttggtcttcttaaattttctaagacttattttgtggcctaacatatgacctatcctagaaaaggctccatatgtgcttaagaagaatttgtattctgttgttggayggaatgttctccattctgttacatccatttggtctaaagtgttgttcaggtccaatattttcttactaacattctatctggatgatctttccattactgtgcgatagtcaactcatctattattatattacattctatgtctcccttaggatcctttaatatattttggtgttctgaggttgggtgcttatatatttacaattattataactcttaatgaattgacacttttaccattataagatattcttctttgtctctttttacaattttttacagttttacaaaacttaaagtctgttgttttctgatatagctatccctgctctcttatggtttccatttacctggaatgtatcttacattccttcactttcagtcaatgtgtgtctttaaaaggaaggtgaatctcttgtatgaagcacatagtaagaccctgcattttaaaaaatccattcagttattctacaactttttattggaaaacttcattaatttaaatttaaaataattattgattggtaaggactt

SEQ ID NO: 95270 - DNA, 684 bp, Homo sapiens
tatttctgtttcacacaattattgtcagaagaggtattttataccatttggtcttcttaaattttctaagacttattttgtggcctaacatatgacctatcctagaaaaggctccatatgtgcttaagaagaatttgtattctgttgttggatggaatgttctccattctgttacatccatttggtctaaagtgttgttcaggtccaatattttcttactaacattctatctggatgatctttccattactgtgcgatagtcaastcatctattattatattacattctatgtctcccttaggatcctttaatatattttggtgttctgaggttgggtgcttatatatttacaattattataactcttaatgaattgacacttttaccattataagatattcttctttgtctctttttacaattttttacagttttacaaaacttaaagtctgttgttttctgatatagctatccctgctctcttatggtttccatttacctggaatgtatcttacattccttcactttcagtcaatgtgtgtctttaaaaggaaggtgaatctcttgtatgaagcacatagtaagaccctgcattttaaaaaatccattcagttattctacaactttttattggaaaacttcattaatttaaatttaaaataattattgattggtaaggactt

SEQ ID NO: 95271 - DNA, 687 bp, Homo sapiens
tggtggtttggaacaaaattaagtaatatttttaagttttcttcaagtaggtgtattagtgttttcttgcactgctattaaaaaatacctgaaaccgggtaatttataagaaaagaggtttaattggctcacagttctgcaggctatacagcaagcataacagcttctggggaggccttgggaaacttaccaacatggctgaaagtgaaggggaactgagcacttcacatgactgaagtgagaggaagaaagagaargcagatgctacatgcttttaaaacaacaagatttcacgataactcattttcatcataacaacaccaagggggatggtgttaaatcatgaggaatcccccctatgatacaatcatctcccaccaagccccacctccaacactggggattacaattccacataagatccaaaccatatctgtaggcttggctaaccatctctaatattcctgaatcagttaggatgctttcaagtacaataacagaacactccactaaaaaggttaaatccatacatagtttatattatcataactagaaacacaaagaaaagattatggcatggataatttgatgacataatgatactgtcaagggctatcttttgatatcttccatcttttgagtgttattttcttagtgtaaatttcatgcttattcaatataatgcaa

SEQ ID NO: 95272 - DNA, 620 bp, Homo sapiens
gactttcttgttgatcctgccccctcccattactatctctgtgtccagagtatattcccgtccctcctgagagacttccttttccattactccaactgcaatgagtattcccaatgacctaaagatatgagtgtttgctgccttatttgaatagggaaaagggttcagctttggtttcctgtccctcctattcagactgttgctcctctcccacgggcctgcatgctaagagaaaatttctcagggctctcaccaatcttcatcctgtgtgtatgtgagtgcgtgtgtgtctgtctgtcttgtgaagatggtggagaaaagcctataggaggytataaactctcctaatttctgtaacccctaggggcttcacattcttgtaccagttcacccacactcggcctcctccaacttatcaattattcaagctgattcaaactgtctcaggaaagcaagagcttgtcctccatcgttctctgctacatacagccagtctctccatagatttctgagtaggtcattcgttgccctgcgacatcagctctctagcaaattcaaggaaagtcatgaatttacagtttttgcaaatttttgtgttatgataaagctaggaataatgt

SEQ ID NO: 95273 - DNA, 608 bp, Homo sapiens
ttttcactactttttgaaagacgtatacaaaaatcaatttctcaattgatttcaatgtaacaaattttctgtgaacataaaaacatacttaatgtttgatagtgtgttaagcattgtgggattcaaaattatatatcctatagacaatcatttcaaatagtttaacaatgtgtacattaccactgtcyatcaataggaacatattttaaatacatagtaaaattatgtaggcatgtgtgtgttgttatatatatatatttaaatatatatttacatacatttatatagcctattccctctaacaaagacatatcaaccaatcataacataggatttgtaaatattttcaaaatgtaaaagggatttttatgtttatcatttaagctactttaaattctttatatcgtataattgtgaaacagtggcagttatgactaaataaaaaaatttcaatgcttacactattggtctctaaaagtagaacttcatgggtatctttctttattttttgttttaattattgtagaacacttgggatacaatgacctacagcttacaaaatctattctcttaagattcattgttaccacatattactcagctatatt

SEQ ID NO: 95274 - DNA, 594 bp, Homo sapiens
agagggaaacaaaaaaacaaaacaaacaaaaataaataatttaaaaataagggtctctgaagacttcctgctactttctgggtccatgcccctcctctccgtcctccacttcccaccrggctcttcaggctccagcctagataacaccaggttaaattttgatctcccggggactgggtgtcgggagggaaaggcggggggagtgtcagagaggggatggatttctcccaccacacttggggaggcctccggatggatatgtccttccagctgatggacctcaggattgggagaaagatcggggacaagagacgggcacaacagtcacctggtttctttttcttcctttattttttgagactgagtctcgctgtatcacctaggctagagtgcagtgacacgatcttggctcactgcaacctccacttcccaggttcaaatgattctcctgcctcagccttctgagtatctgggattacaggcgtgcactgccatacccgactaatttttggattttagtagagatggggttttgccatgttggccaggctggtcttgaactcctgacctcaagtgatctgcccaccttggcct

SEQ ID NO: 95275 - DNA, 594 bp, Homo sapiens
agagggaaacaaaaaaacaaaacaaacaaaaataaataatttaaaaataagggtctctgaagacttcctgctactttctgggtccatgcccctcctctccgtcctccacttcccaccaggctcttcaggctccagcctagataacaccaggttaaattttgatctcccggggactgggtgtcgggagggaaaggcggggggagtgtcagagaggggatggatttctcccaccacacttggggaggcctccggatggatatgtccttccagctgatggacctcaggattgggagaaagatcggggacaagagacgggcacaacagtcacctggtttctttttcttcctttattttttgagactgagtctcgctktatcacctaggctagagtgcagtgacacgatcttggctcactgcaacctccacttcccaggttcaaatgattctcctgcctcagccttctgagtatctgggattacaggcgtgcactgccatacccgactaatttttggattttagtagagatggggttttgccatgttggccaggctggtcttgaactcctgacctcaagtgatctgcccaccttggcct

SEQ ID NO: 95276 - DNA, 615 bp, Homo sapiens
caaagaaggacagcagaagctggaagaaagtcctctgggcgcctgggctctggcgttgctctcttccacccatcgttcttatctcgcactcagggtagaaaagtctggtggaatggacacaaggaaagggctcagcacaggaggaaacaaggaggtgtaatcatgaccacagacggaggagatggcccaaggagatgataaaggaaaaggaggtgcagagctaaggaaagccccaaggagctgagagaggaaaagagacascagagagacttccacggagatggggaggccttaagtagggcagcagcacatgtgggagagaaaccgagagggtggtgttaaagaaacgtaaaaggagccccactcacttccagtacagaaattcacccacagcagaggccaggcctcaattagaggcctacacaatggggtagacgctctcacagtccacgtccatcagcaccccttccatgttcctgcccacagaaaagcagaaagagtgtgtgaatagggacattgtcttctggcacaatcaaggctagaaagaaaaagaggcaaaagcaacaaggacataactcacaaaaaactcctaagtggagagtggaagacaaggga

SEQ ID NO: 95277 - DNA, 440 bp, Homo sapiens
tgtctcaggccctgcccacatcccatcacagggccgtggacttgaagccggaacgtgaaatccccatagactgaatgcatttccttyctacctgttctccctccccttttatttttatttttatattattttatttttaatttttattttatttttttgtagagacggggatttcgctatgttgcccaagctggtctggaactccggagctcaagcagtccgcccgccttggccccccaaagcgctggaattacaggcgtaatgcactgtgcctggccttttaaaaaaaaattgaggttattttggggacagtagagcatccagacatatcctaatttgcgtagctgctcagttttaaaaaatgcaatgcatttttacctgttagggtatgtgatttctggctggtaagctacaccgaatcttggctagcacagttgaat

SEQ ID NO: 95278 - DNA, 440 bp, Homo sapiens
tgtctcaggccctgcccacatcccatcacagggccgtggacttgaagccggaacgtgaaatccccatagactgaatgcatttcctttctacctgttctccctccccttttatttttatttttatattattttatttttaatttttaytttatttttttgtagagacggggatttcgctatgttgcccaagctggtctggaactccggagctcaagcagtccgcccgccttggccccccaaagcgctggaattacaggcgtaatgcactgtgcctggccttttaaaaaaaaattgaggttattttggggacagtagagcatccagacatatcctaatttgcgtagctgctcagttttaaaaaatgcaatgcatttttacctgttagggtatgtgatttctggctggtaagctacaccgaatcttggctagcacagttgaat

SEQ ID NO: 95279 - DNA, 474 bp, Homo sapiens
gaattctcacatttcaaacatacactaaatatcaaataaaaatttatttttacaagaatttaggggaactaccacatagctataaatgtaatatatatgttaactaagtatcatagataaaaaccatgctccccttcagcagcacgtgtaataatagatacaaagattgaaaggtaaaagatttaggatgaaaagaatcctctcttaaaaaggaaaacaaaattatatgtatgtgtatacaacagttataayacccatcacacagctttgtagaaacagcatctattcaaaaataccagtatttccaaaatatttaaaataatatttaaagtaataataatatttaaataaataaacatatttaataaatatttcaataaataaaataatatttaaataattctatacccatgtttttcaaaataaaccaataaaatagatagtatatattagacgtgttagtatatatatctg

SEQ ID NO: 95280 - DNA, 474 bp, Homo sapiens
gaattctcacatttcaaacatacactaaatatcaaataaaaatttatttttacaagaatttaggggaactaccacatagctataaatgtaatatatatgttaactaagtatcatagataaaaaccatgctccccttcagcagcacgtgtaataatagatacaaagattgaaaggtaaaagatttaggatgaaaagaatcctctcttaaaaaggaaaacaaaattatatgtatgtgtatacaacagttataacacccatcacacagctttrtagaaacagcatctattcaaaaataccagtatttccaaaatatttaaaataatatttaaagtaataataatatttaaataaataaacatatttaataaatatttcaataaataaaataatatttaaataattctatacccatgtttttcaaaataaaccaataaaatagatagtatatattagacgtgttagtatatatatctg

SEQ ID NO: 95281 - DNA, 477 bp, Homo sapiens
ctgaattctcacatttcaaacatacactaaatatcaaataaaaatttatttttacaagaatttaggggaactaccacatagctataaatgtaatatatatgttaactaagtatcatagataaaaaccatgctccccttcagcagcacgtgtaataatagatacaaagattgaaaggtaaaagatttaggatgaaaagaatcctctcttaaaaaggaaaacaaaattatatgtatgtgtatacaacagttataacacccatcacacagctttgtagaaacagcatctattcaaaaataccagtatttccaaaatatttaaaataatatttaaagtaataataatatttaaataaataaayatatttaataaatatttcaataaataaaataatatttaaataattctatacccatgtttttcaaaataaaccaataaaatagatagtatatattagacgtgttagtatatatatctga

SEQ ID NO: 95282 - DNA, 534 bp, Homo sapiens
aggttctctcttttttaaaaaaaacatatgcacgactagttattccaatatcayttgttgtttgtttgtttgttgttgagacagagtcttcctccgtcaaccaggctgaatagagtgcagtggtacaatcacaggtcactgcagcctcaaactcaagcaatcctcccacctcaggctcccaagtagctgggactacaggcacatagcaccacacacagctgctgcttctttttttttagtgacagggtcttgctatgttgtccaggctggtcatgaactcctggcctcaagccatcctcctgcctcagcctcccaaagtgttgggattacaggcgtgagcagccatgcccagctgcaacaccatttgttgacatgactaccatttatccatttgattgtctttgccattttgtaaaaaccagctgaccctgaggtgggcagatcgcttgagcccaagagttcaagaccagcctgggcaacatgttgaaaccctatctctattattaaaaaaaaaaaaaaaaatcaactaaccat

SEQ ID NO: 95283 - DNA, 607 bp, Homo sapiens
cacttcccatggcccaacattgccggaacgttcttctcacctgtagaatactcaccattactgagctcaagccctggaagcggcctgaagagaaagacacattgataaatgtgacaagctcacatttcctcttttgcccacttagttttatttttttttaatttttacttatttatttttttacagaagaatatttatttatttgtttgttttgtttttgttttttttgagacaagagtctcgccgcgtcacccaggctggagtgcagtggckcgatctcggcttagtgcaacctccgcctcctgggttcaagccattctcctgcctcagccgcctgagtagctgggattacaggtgcccgccaccacgcccagctaattttttgtatttttagtttcaccatgttggccaggctactcttgaactcctgacatcaggagatctacctaccttggcctcccaaagtgctgggattacaggcatgagccactgcgttgagccttttgtttttgttttttttgagacggagtctcactccatcacccaggctggagtgcagtggtgtcatctgggctcactgcaacctccacattccaggttcaagtga

SEQ ID NO: 95284 - DNA, 607 bp, Homo sapiens
cacttcccatggcccaacattgccggaacgttcttctcacctgtagaatactcaccattactgagctcaagccctggaagcggcctgaagagaaagacacattgataaatgtgacaagctcacatttcctcttttgcccacttagttttatttttttttaatttttacttatttatttttttacagaagaatatttatttatttgtttgttttgtttttgttttttttgagacaagagtctcgccgcgtcacccaggctggagtgcagtggctcgatctcggcttagygcaacctccgcctcctgggttcaagccattctcctgcctcagccgcctgagtagctgggattacaggtgcccgccaccacgcccagctaattttttgtatttttagtttcaccatgttggccaggctactcttgaactcctgacatcaggagatctacctaccttggcctcccaaagtgctgggattacaggcatgagccactgcgttgagccttttgtttttgttttttttgagacggagtctcactccatcacccaggctggagtgcagtggtgtcatctgggctcactgcaacctccacattccaggttcaagtga

SEQ ID NO: 95285 - DNA, 567 bp, Homo sapiens
taccacacctggctcaatgtttgccattttaactctgtgctttacatgaaagcttgtgactcaytttgagttatttttgtatgaagcatgaggttttggctcaggttattttttttccactgtggttgtccagttgttccatcaccatttgatgggaaagctctccttccttcattgaattgcttttgtgcttttgtaaaagtcagttgagcatgttttgctcatttttagttgagttgctcatcttcttacattgagtttaagaacttttcacatattctggatacatgttcttcatcacagatgtaatttgtgataaattgtgaaatattttctctcaatctacggcttgtcttctcattttctcaatattgtcttttggagcacttaagttttaaattttaactaagcccaatttgtctctcacttttttttcatctgtagatcatgttttttgtattttatgtaagaatcttttgcctaactactcaatgtcacaaaaattttctcctatattttcttttagaaattttatggttttaacttataaattttagctgtttaggt

SEQ ID NO: 95286 - DNA, 567 bp, Homo sapiens
taccacacctggctcaatgtttgccattttaactctgtgctttacatgaaagcttgtgactcattttgagttatttttgtatgaagcatgaggttttggctcaggttattttttttccactgtggttgtccagttgttccatcaccatttgatgggaaagctctccttccttcattgaattgcttttgtgcttttgtaaaagtcagttgagcatgttttgctcatttttagttgagttgctcatcttcttacattgagtttaagaacttttcacatattctggatacatgttcttcatcacagatgtaatttgtgataaattgtgaaatattttctctcaatctacggcttgtcttctcattttctcaatattgtcttttggagcayttaagttttaaattttaactaagcccaatttgtctctcacttttttttcatctgtagatcatgttttttgtattttatgtaagaatcttttgcctaactactcaatgtcacaaaaattttctcctatattttcttttagaaattttatggttttaacttataaattttagctgtttaggt

SEQ ID NO: 95287 - DNA, 599 bp, Homo sapiens
aattgtgacatgaataacataaaaatgtgtagagagaagaagttaaagtgtagggtttttgtatgcagttgaagttaagttattagcagcttcacatagactaaaaactgtaagatattttatgtaagtcttatggcaacaacaaacaaaaacctgtagtaggtacacacaagacaaaaagagtaaaatcaaagcatattaccacacaaaaaaatcattaaattacaaaggaatacagcaagaggaagaaagaacaaaatatctacaaaatagtcagaaacccctgaacaaatggcagtaataggtcctcatctgtcaataatcactttaaatataaatgaattcaattctccatcaaaagacatagagtggctgaatgaatagaaaaagaaaaccaagatccaactatgtgttgcatctgagggattcaatatatctttaaggacacacataggctaaaagtgaagggatggaaraagatgttccatgcagatggtagctagtagagaagaggggtggctatacacacatcagataaaatagactttcagttaaaaactgccacaagattcaaagaagataattttgtaatgatcgaa

SEQ ID NO: 95288 - DNA, 450 bp, Homo sapiens
ttggtttttctgctgggctttaagaccccaaagcccaagaaaatgctatcgtcttatgaaatttccaagaagaagaccatccacctcaccttaaaggtggtgaagcccaagatgcggagctgcccatgtttctggtggaaacatgtgatgaggagcagagaaatctcctcctggcatgacttaatttaaaaaaatatggtagattatggcatcagaaaggacaaattacatttcttgacayaccactccactggaggtgacccaggggtagagagatgcttaaggaaaagcagttcattttcttctggctcatgttcagtaaccagggtgcccaaatactttgaagacggagtcttaatccagaagataggagttctgtgtaacctatactatatggttacttgatagcaacaaagttcttgttgaaatattctgttataactcaaaggt

SEQ ID NO: 95289 - DNA, 437 bp, Homo sapiens
tctctcacaagaaggagctgtttccctttgtctttcttttgcctattaaaccctttgatcctaactcactcctcgtgtgtcagtgtccttaatcttcttggcgtgagatgacgaacacttagtatttacctgagacaatgacacctcttcagcaggtggtcatcagactggtggagcttaaaactcatgtccatgagcaactgcaggggtgactggrgtgttgttgtcctcttccagggagggaggtggtgtctgtctcctctcaacattttacatgttgtaaaccaaaaataaacatcaaagccaccccttcccaatcattttaatggacacccttagccagggtgctcaaaagttaacctgaaagactggctcaggccaccaagggaagcaggtattgaacatgtcttattatgccctcttccctcttggaattc

SEQ ID NO: 95290 - DNA, 549 bp, Homo sapiens
ttgtgctcagcaggtgaggtctacactcctctcagcccggaggggcagcgtgagttatactgctggacaaaggggaaaaagacaaaatgctgggctggggtagaagggaaggacgcgggtgttaaatgtgggcgtggtttcttctgaatgtcccacccactycactatacattgcttaaatgcagtgcaaatttccctacccccagcggaggaggggtgaagattcagcaggttttagggtctaggaccctgagctcctccattcatgaatacccaaacaactgtagcccaccctctcaccactgcctaggcggacgaccagtgtccccagctagatctctacccttaggagcagggcactggctgacccggagaacctgcgccgcctcttctcagcctgctgccagcccagtgcacgagctgaatgccgctgccgcctggctggccgggaaagacggggatcttgacgcggcggcgcctgggacacggcaaccgcagcacagggcatggccctgcggctggaccggacgcggcggctgcaggcagagc

SEQ ID NO: 95291 - DNA, 586 bp, Homo sapiens
tttgttagttcaggtttgcgccatttcctttatctgaattttattaaagacaactttgagactgggaaaagacctgagtcttttctgactatgagtgggcctagaggatacaaacactctccgctgccccatatttctccccttgtttaaaaacagcagcagtggcatcattctctccagctcttcagtcagcaattatggctgcccaaacatggaatgccctaaggtggctcaggacattgatagggaactggggccatggccttggaaatgcaagctgctgagtgaggccaagtggtctatggaaatcacgatctccctgcatggtgggattacaaaggtgaccaagaaacacagacagaaacagaagaaaatggaattaagagttgaaatacccacagaacagaatcatggaatgtaaaacaagtaaactttatttgggagatggggtgaatccatcactggttactggaaccctgmgtctgcattttctcctcaggaaggcggtctgaaatggagtgggctgtgtttggcaagggttgtagtggtttggaatctgagtaaatgagcagaatcagagaaacag

SEQ ID NO: 95292 - DNA, 610 bp, Homo sapiens
tttttcttttaaaaattatttatatttagtaaagacaggggtctaactatgttgctcaagctagtctcaaactcttgaactaaagtgatcctcccaccttggcctcccaaagtgcygagattacaggcatgaggcaccacacttggtcctcttattggtcttttatttcattttcttgccatattgcactagttaggatgctcgtaaggtgttttaaacaaaaatgaggagagccacatctttgctttgttgctaatcttaggaagtaagaatctggcctttcataattgaatatgagggtagctgtaaacttttcgtgggtgtccttaaccacattgaagatattcctttcgattttgtttgctgagctattttgtcatgaaatggtcttgattttgcaagtgctttttctgcattgactataataattgtgcaacatttgttctttgttctattaattgggtgaattgtattgtttaattttcagatgttaaaccaaccttactttccctttaaaaaaaccaatatggcatggcatattattcattttatgtatatcttaattggataacgttttgtattgaattgtgagtctgtgttcaagaagaat

SEQ ID NO: 95293 - DNA, 610 bp, Homo sapiens
tttttcttttaaaaattatttatatttagtaaagacaggggtctaactatgttgctcaagctagtctcaaactcttgaactaaagtgatcctcccaccttggcctcccaaagtgctgagattacaggcatgaggcaccacacttggtcctcttattggtcttttatttcattttcttgccatattgcactagttaggatgctcrtaaggtgttttaaacaaaaatgaggagagccacatctttgctttgttgctaatcttaggaagtaagaatctggcctttcataattgaatatgagggtagctgtaaacttttcgtgggtgtccttaaccacattgaagatattcctttcgattttgtttgctgagctattttgtcatgaaatggtcttgattttgcaagtgctttttctgcattgactataataattgtgcaacatttgttctttgttctattaattgggtgaattgtattgtttaattttcagatgttaaaccaaccttactttccctttaaaaaaaccaatatggcatggcatattattcattttatgtatatcttaattggataacgttttgtattgaattgtgagtctgtgttcaagaagaat

SEQ ID NO: 95294 - DNA, 610 bp, Homo sapiens
tttttcttttaaaaattatttatatttagtaaagacaggggtctaactatgttgctcaagctagtctcaaactcttgaactaaagtgatcctcccaccttggcctcccaaagtgctgagattacaggcatgaggcaccacacttggtcctcttattggtcttttatttcattttcttgccatattgcactagttaggatgctcgtaaggtgttttaaacaaaaatgaggagagccacatctttgctttgttgctaatcttaggaagtaagmatctggcctttcataattgaatatgagggtagctgtaaacttttcgtgggtgtccttaaccacattgaagatattcctttcgattttgtttgctgagctattttgtcatgaaatggtcttgattttgcaagtgctttttctgcattgactataataattgtgcaacatttgttctttgttctattaattgggtgaattgtattgtttaattttcagatgttaaaccaaccttactttccctttaaaaaaaccaatatggcatggcatattattcattttatgtatatcttaattggataacgttttgtattgaattgtgagtctgtgttcaagaagaat

SEQ ID NO: 95295 - DNA, 535 bp, Homo sapiens
ttcttcccattcaggaccagtgggagggcgatattctagcattggtcccattttcctactctcctggtgggaggccagcccgggaaatctacaggagatgagggaggcgccccgtggcccctggtacccgcgcgctgcagcgtctccttcccgttctccaggtgtctgcggagccactccatgcacttgccctcaggtaggccctgacctgctctgagtatttgtccgcttcccacttgtgctgggagatctgagccgctgtgttcgcggcggtccaggagggcaggtcctcgttcagggcgatgtaatccttgccatcgtaggcgaactgttcatacctgcggaggaggcgcctgtcgggcccacgtcgcagycatgcttcctctggatggtgtgagaaccatggcctcgcccccgccgtcagccccgaacaccgagccccgctcccgccccgaccaacccgcggggattttggcctaaactgaaattaaaccgggtaaaggcgcccgagtttcttccctggtcgagggtctgg

SEQ ID NO: 95296 - DNA, 520 bp, Homo sapiens
atgctaaaacattgctgaatcttgaaaacaagacaagtgaaggaagccagtcacaggaggctacgtaacttatgagcccatttttgtgaaatattcataagaggcaagtcgatagagaaagaagtggatttgtggcgacagggtctgctggcaggtggaaatggagggtgactgcttaatgggtgcagagttccccctgaggtgataaaaacactctggaactagagagtgatgatggttacataacattgtgaacatacraattgtcactgcattgtgcactttaaatggttacggtggtatcctttgtgtttatgtgtattttaccacaatgaaaaagaggctgaggaaggtattccaaaatcttttgtatagtaaactcctgagtttgcttgagaatctgcctatctgtcttttcttctcaggacatcatctcctacccagagcaaacctttgttcttctgcaagtagaaagccctctttcagaacattgtccaagatcagccaggcccaaccctca

SEQ ID NO: 95297 - DNA, 575 bp, Homo sapiens
tggtttccacacacacttccgccctcattgtgtgaaagtagccatgccttctcctgaagatgaggatctrttacctgggcctggagaggaggagaatcctcttttcaccaggtggtctctgggcacaaactatcaaaacttctctcgtgacagccataatgtgtagttcagtgggctgtcttttgtctccttttaagggtaccctccttggaaaccaggacctcgtaccctgcacagcccagtgttggaagataaaacgtgcaaaataccccattgagtgaatctaagggattggacgtggagccaaacctgcttccatcttttgatccctggacacacatgttcttcctattgagaacacagcactctagagacatctctgattcaaacaatgcaccgtgtcctaaaagatggcacccacctctcagagtgcttcctccaggctggcactgagttttgcctgtagaagacctgtccagcattccttgtggctggcagcctctggatggtgcagatggtgataggattagtggaacccacagccatggaaacactgaaactttcccagccaagtg

SEQ ID NO: 95298 - DNA, 575 bp, Homo sapiens
tggtttccacacacacttccgccctcattgtgtgaaagtagccatgccttctcctgaagatgaggatctattacctgggcctggagaggaggagaatcctcttttcaccaggtggtctctgggcacaaactatcaaaacttctctcgtgacarccataatgtgtagttcagtgggctgtcttttgtctccttttaagggtaccctccttggaaaccaggacctcgtaccctgcacagcccagtgttggaagataaaacgtgcaaaataccccattgagtgaatctaagggattggacgtggagccaaacctgcttccatcttttgatccctggacacacatgttcttcctattgagaacacagcactctagagacatctctgattcaaacaatgcaccgtgtcctaaaagatggcacccacctctcagagtgcttcctccaggctggcactgagttttgcctgtagaagacctgtccagcattccttgtggctggcagcctctggatggtgcagatggtgataggattagtggaacccacagccatggaaacactgaaactttcccagccaagtg

SEQ ID NO: 95299 - DNA, 575 bp, Homo sapiens
tggtttccacacacacttccgccctcattgtgtgaaagtagccatgccttctcctgaagatgaggatctattacctgggcctggagaggaggagaatcctcttttcaccaggtggtctctgggcacaaactatcaaaacttctctcgtgacagccataatgtgtagttcagtgggctgtcttttgtctccttttaagggtaccctccttggaaaccaggacctcgtaccctgcacagcccagtgttggaagataaaacgtgcaaaataccccattgrgtgaatctaagggattggacgtggagccaaacctgcttccatcttttgatccctggacacacatgttcttcctattgagaacacagcactctagagacatctctgattcaaacaatgcaccgtgtcctaaaagatggcacccacctctcagagtgcttcctccaggctggcactgagttttgcctgtagaagacctgtccagcattccttgtggctggcagcctctggatggtgcagatggtgataggattagtggaacccacagccatggaaacactgaaactttcccagccaagtg

SEQ ID NO: 95300 - DNA, 600 bp, Homo sapiens
atgttttcctttttatctggatgcctttaatttttaattttctgccttattgcactggctacaatctccagtataatattaaataaaagtggtgggattggacatccttgcattgatccccatcttaggagaaaagcattcagtcttcagtctttcttcattaagtttgattttagctgtgggttttttatagatgccctttatcagagtgaagaaggtctcctccattcctattttgttgaaacttatgaacatgagtgatgttaacatttttgtcaactgtttcttctgcatcttttgagataattatgtctttttttccatcaatacagtgcattccatgaattgattttcaaatgttaatccaaccatatgttcctgggatgaatcccattggtcatggagtgtaatccttttttatgtggctttgtattatctgccaatgtttgttaaggatgttttcatttatgtttattggtgacactggtgtatggcactcttttcctgtgagtcttgctgtgactttgatatgagggtratgccagttctgtaaatgggctggaaagtcttccctcctctcttcttgtctgaaagagcttt

SEQ ID NO: 95301 - DNA, 595 bp, Homo sapiens
tggtttcagtatctccagagataaaaccctaagctgttaaaaggaagagaggtgtattcatccaagtgcttgagtggaaggagtgatctggagctgagagacagttcctagctacattgtatttcaactatccttcctgtatttagtcacatgccacacccaaatctttagaggaacccagttgcaattcccgaatctttccaggattccacagaattaataatctaccagtagttgacttactctcacccccaatggaggcctgtatgttgaagctttctctgttgtgttggagagttaccactcatctgcctattaccttcaaaaaaacaaaaatatctyctctgctgttatctctccatcgtttgtccttgtggaggtatgtgttttgttatttctctactttttattcttctatgaaatccgtaagcctccatatatacttattcttttattcattccaattggggtctaccccatcatgcaaatctgttttcaataaactaaactcacttccatattgtctctgaatccaatggacatggcccaggccatatcttacttgatctctctgcaaaaatcaattcagttaact

SEQ ID NO: 95302 - DNA, 654 bp, Homo sapiens
cttcccatctcaagagcctcagcttaatcacatctgaaaatttccttttgccctattaggagacatttttataagttccagggattaggacacagacatatttaggagaccgttattctgcctgtcacatgacttcaccaatatttgctacccgtggtttccaaacattagtgtatgctcttatttctatttattcctgaaataccagagtgagtctgtttttctgaaaacagctcactaatgcccagaggagctcaaaaattttctgtctgttgtctcaaagtctccaaattktactgattcttcaacgtgcatggctgtaaattaggcaataatcttgctggggtgttggaaggagaagaaagggaatgattagacagcccttctgattcgggacagaatctgattcgggacactgtccctgatggctggccatcttgggctgtaatccagtttccctcccacgtagacccggtcatttctgactccccaagaggttttcacagtattcatgtccacttccttcatcagtcgtcttcttgtcttatatctccatgtttacatttttcttctcttctaccactgcagttctgccttgattcttcagccattgccttccttttgcatgcatgtgcttcagccagttctctagga

SEQ ID NO: 95303 - DNA, 654 bp, Homo sapiens
cttcccatctcaagagcctcagcttaatcacatctgaaaatttccttttgccctattaggagacatttttataagttccagggattaggacacagacatatttaggagaccgttattctgcctgtcacatgacttcaccaatatttgctacccgtggtttccaaacattagtgtatgctcttatttctatttattcctgaaataccagagtgagtctgtttttctgaaaacagctcactaatgcccagaggagctcaaaaattttctgtctgttgtctcaaagtctccaaattttactgattcttcaaygtgcatggctgtaaattaggcaataatcttgctggggtgttggaaggagaagaaagggaatgattagacagcccttctgattcgggacagaatctgattcgggacactgtccctgatggctggccatcttgggctgtaatccagtttccctcccacgtagacccggtcatttctgactccccaagaggttttcacagtattcatgtccacttccttcatcagtcgtcttcttgtcttatatctccatgtttacatttttcttctcttctaccactgcagttctgccttgattcttcagccattgccttccttttgcatgcatgtgcttcagccagttctctagga

SEQ ID NO: 95304 - DNA, 654 bp, Homo sapiens
cttcccatctcaagagcctcagcttaatcacatctgaaaatttccttttgccctattaggagacatttttataagttccagggattaggacacagacatatttaggagaccgttattctgcctgtcacatgacttcaccaatatttgctacccgtggtttccaaacattagtgtatgctcttatttctatttattcctgaaataccagagtgagtctgtttttctgaaaacagctcactaatgcccagaggagctcaaaaattttctgtctgttgtctcaaagtctccaaattttactgattcttcaacgtgcatggctgtaaattaggcaataatcttgctggggtgttggaaggagaagaaagggaatgattagacagcccttctgattcgggacagaatctgattcgggacactgtccctgatggctggccatcttgggctgtaatccagtttccctcccacgtagacccggtcatttctgactccccaagaggttttcacagtattcatgtccacttccttcatcagtcrtcttcttgtcttatatctccatgtttacatttttcttctcttctaccactgcagttctgccttgattcttcagccattgccttccttttgcatgcatgtgcttcagccagttctctagga

SEQ ID NO: 95305 - DNA, 603 bp, Homo sapiens
tgataaaaaagtataaaacattctgagggacctgtaaactataaagctaaaatatcagcttctgcatgcaacatatatgtcaaattctatgtccaatactcttctcrtttttagaattaattctgcaaacttgaagattgagctttttatgaactgattggcatctgctatgctcaccagattattcccacttgactgagaggatggtggtagcaagagctccttcctttcagaggcttttaaaaatacttattgggaagaatgtaccacataaggcatttaactaatgaaaccacagatataaccactggcaaaaaaatcaaacaaacatttctttaactgccctgtacttggtacattctcttcctcctgctaaggaagtatctcctctcccttcacttcacagactggaattttccaaattcctagtctcaacaagacaaactgtattttgaaatcactgttttcccagaatacccggagtgttaccatgactccagaagatgccttcaaccaagactcataatctgactgtaagaaaccttcagataaggtattgggaacttctgtaaaattgtagctgggttgtgattagagaatttt

SEQ ID NO: 95306 - DNA, 603 bp, Homo sapiens
tgataaaaaagtataaaacattctgagggacctgtaaactataaagctaaaatatcagcttctgcatgcaacatatatgtcaaattctatgtccaatactcttctcgtttttagaattaattctgcaaacttgaagattgagctttttatgaactgattggcatctgctatgctcaccagattattcccacttgactgagaggatggtggtagcaagagctccttcctttcagaggcttttaaaaatacttattgggaagaatgtaccacataaggcatttaactaatgaaaccacagatataaccactggcaaaaaaatcaaacaaacatttctttaactgccctgtacttggtacattctcttcctcctgctarggaagtatctcctctcccttcacttcacagactggaattttccaaattcctagtctcaacaagacaaactgtattttgaaatcactgttttcccagaatacccggagtgttaccatgactccagaagatgccttcaaccaagactcataatctgactgtaagaaaccttcagataaggtattgggaacttctgtaaaattgtagctgggttgtgattagagaatttt

SEQ ID NO: 95307 - DNA, 542 bp, Homo sapiens
ctaatttatgtcttttttttttaacagaaaagatttaaaagtaaaaaaaaaattaaatagaaataagtttctagaatgaaaatataaggaacaatatttttgtacagctttgtaacatgttggtcttttaagctaagtgctattacaaaagctgaaaagttttaaaaattaaagtttataaagttaaaaaagttacattaagctaaggttaatttattattaaagaaagaaaattatttttaaaatcaatttagtgtarcctaagtgtacagcatttataaaatctacagtagtgcacagtaatggcctaggccttcagttcactcaccactcacttgctgactcacccagagcaacttccagtcctgtaagctccattcatgatgagtaacctatataggtgtgccattgtaaaaatctttttaccatatttttactgtactttttctgtttacatatgtttagatccacaaatacctaccattgtgttacaattgcctacagtactcagtatagtaatgtgctatccaagtttgtagcct

SEQ ID NO: 95308 - DNA, 494 bp, Homo sapiens
gaacatttaaaccagctctaaccagaggggaatcacccatcccagtggtcagaacctgagttctgtcaagccacactgccatgggctaaagtgatctggggtccaaaataaatgtgaaagacattctagactatgaggactgcaatttttagtgctwtgcaggactcagagccagtggatttgggtacatgcaacacagtgagacaacagctgaggtgatcacaggagtgattgcatcacctctctcccaactccagacagtgcagcttgcagctccaggagaaactccttctgctgaggagagcagaggagaaagtaaagaagactttgtcttccaacttagatacctgctcagcaatagtagaataaggcaccaggcagagtcccaggaacacatcctggtctagaagggaacatgctaccttgaaggaaaagacctattcttggaaagactcattatctactgactaaggagcccttgggctctgaatagt

SEQ ID NO: 95309 - DNA, 532 bp, Homo sapiens
tttattttgtagcctattgctctctttagatctagtaaaacttgcttaatgaatctgtatgctctagtgctaggtgcatatctgttttaaagtttttatatcctctcaatgacttttttatcattatgtaatgaccttatttctccctttatgctgtttttgacttaaaatatgatttatctaagtgtagctgctcctcacttttggtatccatttgtgtggaatatctttttctagccctttcctgtcagtctatatatgccttcattaatagagtgagatttttgttagcagcatatagttggattatgttttttttttwaaatctagtttttcattctatatcttttaagtggataatttaatccatttacattgaaggttattattggtatgtgaagttttgttcctgtcatattgttaattgttttccaattgtttgatatatttgagttcctttattcttctcttattgtttgtttttgtggtttggtggatttctataggtgatatttcagtctttttgcttcct

SEQ ID NO: 95310 - DNA, 532 bp, Homo sapiens
tttattttgtagcctattgctctctttagatctagtaaaacttgcttaatgaatctgtatgctctagtgctaggtgcatatctgttttaaagtttttatatcctctcaatgacttttttatcattatgtaatgaccttatttctccctttatgctgtttttgacttaaaatatgatttatctaagtgtagctgctcctcacttttggtatccatttgtgtggaatatctttttctagccctttcctgtcagtctatatatgccttcattaatagagtgagatttttgttagcagcatatagttggattatgtttttttttttaaatctagtttttcattctatatcttttaagtggataatttaatcmatttacattgaaggttattattggtatgtgaagttttgttcctgtcatattgttaattgttttccaattgtttgatatatttgagttcctttattcttctcttattgtttgtttttgtggtttggtggatttctataggtgatatttcagtctttttgcttcct

SEQ ID NO: 95311 - DNA, 532 bp, Homo sapiens
tttattttgtagcctattgctctctttagatctagtaaaacttgcttaatgaatctgtatgctctagtgctaggtgcatatctgttttaaagtttttatatcctctcaatgacttttttatcattatgtaatgaccttatttctccctttatgctgtttttgacttaaaatatgatttatctaagtgtagctgctcctcacttttggtatccatttgtgtggaatatctttttctagccctttcctgtcagtctatatatgccttcattaatagagtgagatttttgttagcagcatatagttggattatgtttttttttttaaatctagtttttcattctatatcttttaagtggataatttaatccatttacattgaaggttattattggtatgtgaagttttgttcctgtcatattgttaattgttttccaattgtttgatatatttgagttcctttrttcttctcttattgtttgtttttgtggtttggtggatttctataggtgatatttcagtctttttgcttcct

SEQ ID NO: 95312 - DNA, 532 bp, Homo sapiens
tttattttgtagcctattgctctctttagatctagtaaaacttgcttaatgaatctgtatgctctagtgctaggtgcatatctgttttaaagtttttatatcctctcaatgacttttttatcattatgtaatgaccttatttctccctttatgctgtttttgacttaaaatatgatttatctaagtgtagctgctcctcacttttggtatccatttgtgtggaatatctttttctagccctttcctgtcagtctatatatgccttcattaatagagtgagatttttgttagcagcatatagttggattatgtttttttttttaaatctagtttttcattctatatcttttaagtggataatttaatccatttacattgaaggttattattggtatgtgaagttttgttcctgtcatattgttaattgttttccaattgtttgatatatttgagttcctttattcttctcttattgtttgtttttgtggtttggtggatttctataggtratatttcagtctttttgcttcct

SEQ ID NO: 95313 - DNA, 545 bp, Homo sapiens
ttgttagtaactgttaattttgtgattaaaattggttccaaattgtggctggtaagtcccatacattacatatggatgttaaaggtgatcgtgttgaagtttcaaaagttaagtgaagagaatggtagagaaagcttttattgttttagtgaatgcatatatcatcataatcagaatgttcatggaaataatcagccttaaaggaaataagaggaagaaacttagtatcatgctattggacactggagataaggtgatccatgtcataaagtgacaaaaatcctggatgaattgtgttctgttgggtggaaaataaaacttttaagcaatgcacttgaatatttaactgtgagggtttccaagcaaagtgtagaaaatgtagtctggtatcttcttgatacttattggagaaaacgagagcaaagagatgaagttcctaatgcaaaaaggaaccagcacttgatggtttgggaaattctcaacctatccagacagtatactttggaaataagwccaagtatgtggtcatctgttaaagagattag

SEQ ID NO: 95314 - DNA, 517 bp, Homo sapiens
attatctagttcaaccttcatcattcttttacagaaattgtcttcataaaataaaaagctatgagacatgcaaagtagcaggaaaatatgacccattatcaagagaaaaaaaacagtcaatggagttaaattccaagataatgtaggtgttggcattagaaaacagactttaaaataactacaataattagattttaaaacgtatagaaaaatattagtgagatgaagaggcaggaaatttcaacagaaaaatggaggctctatggaataaatggaaattctaagaaggaacgaaggaagaaagggaaagagaggaagggagggaaggagggaagaaaggaaggcaagaagggaagaagaragggagggagggagggatggaaatttaccagatagtgataatagcagactgcatgcatcagaataaagcaccgccaactcctatacatggcaagagaaaatacccaaagggaggaatagagagaaaaaaaaaaatgggagaaaaaggaacagtgtc

SEQ ID NO: 95315 - DNA, 627 bp, Homo sapiens
gttattgatacgtgcaagaactagaaggtttaaggagtggccaaagaggcttgaaattgggtttggatcatgaagggctttgtaaaccctgttaaaatctgacttttaccttggagcaatggcaagactttggagacttttgagtaaaggaaataacaggagtatatttgtattttacaacaaatggttaagaggaggctatgtgaggaagccaactaggaggctgtggacctgttcccactaaagcctaaaaactaaagtagtgacagtggggatagagacgcgtacagagttaaaagctttaacaggactgggtaattcattctctctctctctctctctctctctctctctctttctctctctctcactgggtaattctctctctctctctctctctctctstgtgtgtgtgtgtgtgtgtgtgtgtgtacacactttgtggggaaaggacagttagttgatggggaggaagaagactaaagtgactcccagactttcagatggaacccctaggctaggaacagtgctattgggtacagtagccactagccatgtatggccattaaggtatgtctaaactaatttaaataaaataagatttaaaatgcagttattcagttgcac

SEQ ID NO: 95316 - DNA, 551 bp, Homo sapiens
ataagaataattgcggacttcaccaccccactttcaccactgaacagatcatctagacagaaaatcaacaaagaaacactggtcttcagtggaactatggaccaaatggawctaacaggcattcatagaacattccatgcaacagctacagaatatacattctcctcatcagcacatggaacattctctaggataaaccatatgttaggccacgaaacaagtctcaacaaattttgtaaaactaaaatcatatcaagtatcttcccagaccacagtgggataaaactagacatcaaaaacaagaactttggaaactaaacacctgaaaaaccactgggtctatggagaaatttaaaaggaattcaaaagatttgttggaaaaaaaaccgaaatagaaacacaacataatgacaaggtgtggtggctcatgcctgaaatcccagcactttgggagactgaggcacgcagatggcttgagctcaggagttcgacaccagcctgggcaacatggcaaaaccccgtcttcattttcaaaaaaagaaaagaaaagg

SEQ ID NO: 95317 - DNA, 606 bp, Homo sapiens
gcctgagtgtcccctcccccgggtcaccccctttgacctgtcaatcccctccctccgggtccccagcaagcttttcggtttggcttctcygcactctcatgaccgattgccctacatcttggcgctcccagactcgggccttctccagcaccggagtcgtctggtttgctcgctttacactccaagcacctagtaccgagcctgactgggtgccagagggcgcgcctaggctcaggctggctccacccgccccgtgcctcccctcggccttccccttagtcctgagggtgcccgcgctcctgcatttcccgtgcaccgggctgccggtagctccggccgcccagcccccgcggcagcaacagcagcaacagcaccgggggagccccccccaggcggactacaagtcccggcaggccgcgcgcgggccgcgcatgcgcagcggggaccggcgtttgagtggcaagttgtttgttacagcgaacaccagctgctccccgcgccgggcgccgcgcgccgctgctccgccgctcggcccctcggctgctgctctgccggcgctgcctccctcgccccgcggctcccccttgcaacttggcgggcctcctc

SEQ ID NO: 95318 - DNA, 562 bp, Homo sapiens
gactagataggacaaaaagaattactggccaaactaaaacagctaagggcaaggcaaactgaagtgtagcatagccctccaatataaggcatctgagccaggtacttaacatgctatcaggattcttatagggatgtatgtgttaatttttctcagtccaaatcatttatgtccactgacaaatggggaataactgggcttaaaaatctgtaaaattaaatctaaaaatkatttttaaaataatagtattctgtccacaattcaacagcaacaattattttcatcagtctagcaaaagacaatttttttaaaggtactttaggtaaaattttcataaactattttggtttcaatgatgctgtattgataccatcgttggtttctgcaattatttaatctaattaacttgagttctccctaatgccttaaccaaaaatatgtattaagcatagtatatgtacagtattgaactaactttctgatataaataatactaaagaagtttggacaagagaaacatgttccctcttcaggacagggcatttcaaacaggtgaagaatc

SEQ ID NO: 95319 - DNA, 516 bp, Homo sapiens
tataccatatttttctctttggtgataaagtgattttagaagtaatttatatttatttttaagttggcattacatctttttgaagataccaggatatttactgtagaatctccaggctgccatccatataatggatcccaaggaccttatcactttcttgacagtaagaatgtgtgtactttaatgaagttgttatcarttccatcagatgtaatacttactttgataataaataatgtggaatgctccctctactatcctgaaattaaatatacacataatacctacacagataattaaaaaatacagtgccctaaatgtagtataaaggaggagtaaagacaactaataaagttaatatttctctaaaaaactgctcaacgtaacagcactagaagacataatgaaataatcagatacttaaacccctaggtgtaattacaatgaagttgtagctataagtgaaggttatgtaaacttcagaaagccatgtgtttattctacttagttcactgc

SEQ ID NO: 95320 - DNA, 516 bp, Homo sapiens
tataccatatttttctctttggtgataaagtgattttagaagtaatttatatttatttttaagttggcattacatctttttgaagataccaggatatttactgtagaatctccaggctgccatccatataatggatcccaaggaccttatcactttcttgacagtaagaatgtgtgtactttaatgaagttgttatcaattccatcagatgtaatacttactttgataataaataatgtggaatgctccctctactatcctgaaattaaatatacacataatacctacacagataattaaaaaatacagtgccctaaatgtagtataaaggaggagtaaagacawctaataaagttaatatttctctaaaaaactgctcaacgtaacagcactagaagacataatgaaataatcagatacttaaacccctaggtgtaattacaatgaagttgtagctataagtgaaggttatgtaaacttcagaaagccatgtgtttattctacttagttcactgc

SEQ ID NO: 95321 - DNA, 516 bp, Homo sapiens
tataccatatttttctctttggtgataaagtgattttagaagtaatttatatttatttttaagttggcattacatctttttgaagataccaggatatttactgtagaatctccaggctgccatccatataatggatcccaaggaccttatcactttcttgacagtaagaatgtgtgtactttaatgaagttgttatcaattccatcagatgtaatacttactttgataataaataatgtggaatgctccctctactatcctgaaattaaatatacacataatacctacacagataattaaaaaatacagtgccctaaatgtagtataaaggaggagtaaagacaactaataaagttaatatttctctaaaaaactgctcaacgtaacagcactagaagacataatgaaataatcagatacttaaacccctaggtgtaattacaatgaagttgtagctataagtgaaggttatgtaaacttcagaaagscatgtgtttattctacttagttcactgc

SEQ ID NO: 95322 - DNA, 609 bp, Homo sapiens
gaccaaagtcagtcacctgactcaatgggatgaacttacaaaccactcacagaaactaatactgcaaataacatggcaatgagaagtaggatatggaaagacccaagacatttctggattaggtattgttccctgaaagcaaaacatcttcagttctttatttgtcatggatcttggaactgacgtctacaaagaccttctttttccattctcttcctyggccatatctgaagaggttattaaaggatatgcccttcttggtggctcagatggctttgcagcctattttctgcctgtaaaagtttggatctccatatggggttataagataaaatatagtgttcactgttaaatttgaattttgataaactacaaataatattttagcataagtatgtcctaaatattgcatgagatataattatactaaaaatattatttgttatttatttgaaattcaaagttaattaggcattctgtatttttatttattactctggacaccttagtactcaaagggaatttcaagtctcaaataattatagtctgtttaatttagagtgctggcacaactctctcaaaagcatagtaagatttttatttatttga

SEQ ID NO: 95323 - DNA, 609 bp, Homo sapiens
gaccaaagtcagtcacctgactcaatgggatgaacttacaaaccactcacagaaactaatactgcaaataacatggcaatgagaagtaggatatggaaagacccaagacatttctggattaggtattgttccctgaaagcaaaacatcttcagttctttatttgtcatggatcttggaactgacgtctacaaagaccttctttttccattctcttcctcggccatatctgaagaggttattaaaggatatgcccttcttggtggctcagatggctttgcagcctattttctgcctgtaaaagtttggatctcyatatggggttataagataaaatatagtgttcactgttaaatttgaattttgataaactacaaataatattttagcataagtatgtcctaaatattgcatgagatataattatactaaaaatattatttgttatttatttgaaattcaaagttaattaggcattctgtatttttatttattactctggacaccttagtactcaaagggaatttcaagtctcaaataattatagtctgtttaatttagagtgctggcacaactctctcaaaagcatagtaagatttttatttatttga

SEQ ID NO: 95324 - DNA, 609 bp, Homo sapiens
gaccaaagtcagtcacctgactcaatgggatgaacttacaaaccactcacagaaactaatactgcaaataacatggcaatgagaagtaggatatggaaagacccaagacatttctggattaggtattgttccctgaaagcaaaacatcttcagttctttatttgtcatggatcttggaactgacgtctacaaagaccttctttttccattctcttcctcggccatatctgaagaggttattaaaggatatgcccttcttggtggctcagatggctttgcagcctattttctgcctgtaaaagtttggatctccatatggggttayaagataaaatatagtgttcactgttaaatttgaattttgataaactacaaataatattttagcataagtatgtcctaaatattgcatgagatataattatactaaaaatattatttgttatttatttgaaattcaaagttaattaggcattctgtatttttatttattactctggacaccttagtactcaaagggaatttcaagtctcaaataattatagtctgtttaatttagagtgctggcacaactctctcaaaagcatagtaagatttttatttatttga

SEQ ID NO: 95325 - DNA, 597 bp, Homo sapiens
gaataaattattattagcttttctttaaatgcttggtagaattcagccatgaaaccatcgggtcttgagcttttctttggtgggagacttgttttatggcttcagtcctttacttgctattggtttatttaggttttctagttcttcatggttcaatcttggtagttgcatgtatccaggaaattaaccatttcttctaggctttccaatttgttgacttatagttgttcataatagtctctagygattctttgtgctttcagctgttatgtctcctttttcatttctgattttattgggtcttttcactttttttcttagtctagctagagattcgttgattttgtttgtcttttcacaaaaaacaattattaggtgttagtaaagcaacttacttgtatggagaaattttatgtcggagaataacaagagctattatatgtgaaggtaaataataaaaattatttaaagatttcttgtaaatttagacttttttctgcagaatacgtggaggcaagtagtgtcttcatgaaaccaggctcttaagatactgaaatagtatcaacgtgttgagtattaaaaagtgacacaattgag

SEQ ID NO: 95326 - DNA, 470 bp, Homo sapiens
aattttacagctaggcctccagggatgacatcacatattggtaggtccgtgatgtccacccgagccacaaaaccagcaggtttttattaaggacttgaaaaggggagggggtgtacaaacagggagtaggtcacaaagatcacatgctttaaagggcaataaagatcacaatgcaaagggtaaagcaaagatcacaaggcaaagggcaaaatcagaattactgatgagggtctatgttcagctgtgcgcrtattgtcttgataaacatcttaaacaacagaaaacagagttcgagagcagagaaccagtctgacctcaaatttaccagggtgaggtttcttccccaccctaataagcctgagggtactgcaggagaccagggcatatttcagtccttatctcaactgcataagacagacactcccagagcagccatttatagaccaccccccagggattccattcttttc

SEQ ID NO: 95327 - DNA, 580 bp, Homo sapiens
tagtgagttattgaacttgagggcatggtgggaacctccaaatttgcagccagttggtgagaagtacatgtggtctgaggacacccaagcctgcaggtgtgtctaaagcgagggcagcctagtgggggctggtggccttaacctgtggcatttgaggtaacatcagggagttgacatcagaattgcatcacataggctggrcgcggtggctcacgcctgtaatcctagcactttgggaggccaaggcgggcagatcacgaggtcaggagatcgagaccatcctggctaacacagtgaaaccccgtctctactaaaaatacaaaaaattagccaggcatggtggcgggcgcctgtagtcccagctactcgggaggctgaggcaggagaatggcgtgaacccaggaggcggagcttgcattgagccaagatcacgccaccgcactccagcctgggtgacagagcgagactccatccccccacaaaaaaaaaaaaaagacaaaaaacagaattgtgtcacacaggccagatgcagtggctcatgcttataatcccagcaatttgaaaggcaaggtaagaggat

SEQ ID NO: 95328 - DNA, 580 bp, Homo sapiens
tagtgagttattgaacttgagggcatggtgggaacctccaaatttgcagccagttggtgagaagtacatgtggtctgaggacacccaagcctgcaggtgtgtctaaagcgagggcagcctagtgggggctggtggccttaacctgtggcatttgaggtaacatcagggagttgacatcagaattgcatcacataggctgggcgcggtggctcaygcctgtaatcctagcactttgggaggccaaggcgggcagatcacgaggtcaggagatcgagaccatcctggctaacacagtgaaaccccgtctctactaaaaatacaaaaaattagccaggcatggtggcgggcgcctgtagtcccagctactcgggaggctgaggcaggagaatggcgtgaacccaggaggcggagcttgcattgagccaagatcacgccaccgcactccagcctgggtgacagagcgagactccatccccccacaaaaaaaaaaaaaagacaaaaaacagaattgtgtcacacaggccagatgcagtggctcatgcttataatcccagcaatttgaaaggcaaggtaagaggat

SEQ ID NO: 95329 - DNA, 580 bp, Homo sapiens
tagtgagttattgaacttgagggcatggtgggaacctccaaatttgcagccagttggtgagaagtacatgtggtctgaggacacccaagcctgcaggtgtgtctaaagcgagggcagcctagtgggggctggtggccttaacctgtggcatttgaggtaacatcagggagttgacatcagaattgcatcacataggctgggcgcggtggctcacgcctgtaatcctagcactttgggaggccaaggcggrcagatcacgaggtcaggagatcgagaccatcctggctaacacagtgaaaccccgtctctactaaaaatacaaaaaattagccaggcatggtggcgggcgcctgtagtcccagctactcgggaggctgaggcaggagaatggcgtgaacccaggaggcggagcttgcattgagccaagatcacgccaccgcactccagcctgggtgacagagcgagactccatccccccacaaaaaaaaaaaaaagacaaaaaacagaattgtgtcacacaggccagatgcagtggctcatgcttataatcccagcaatttgaaaggcaaggtaagaggat

SEQ ID NO: 95330 - DNA, 580 bp, Homo sapiens
tagtgagttattgaacttgagggcatggtgggaacctccaaatttgcagccagttggtgagaagtacatgtggtctgaggacacccaagcctgcaggtgtgtctaaagcgagggcagcctagtgggggctggtggccttaacctgtggcatttgaggtaacatcagggagttgacatcagaattgcatcacataggctgggcgcggtggctcacgcctgtaatcctagcactttgggaggccaaggcgggsagatcacgaggtcaggagatcgagaccatcctggctaacacagtgaaaccccgtctctactaaaaatacaaaaaattagccaggcatggtggcgggcgcctgtagtcccagctactcgggaggctgaggcaggagaatggcgtgaacccaggaggcggagcttgcattgagccaagatcacgccaccgcactccagcctgggtgacagagcgagactccatccccccacaaaaaaaaaaaaaagacaaaaaacagaattgtgtcacacaggccagatgcagtggctcatgcttataatcccagcaatttgaaaggcaaggtaagaggat

SEQ ID NO: 95331 - DNA, 500 bp, Homo sapiens
tattaatttgcacatattagcacatttacttcaacattcctgcttgcctacatatgactgtttctattcttttttgaatagcttgtaatatcttacagggtccttcattaattaatgagttaaataaaaattttcacatatgctcttttaatatttgtattttgtcattttgaaaatcatcttttaacaagtttattatcctcartaggtattatgtactcagttctctcatcagcttaggtaaacctataatataaacaaaagtttacctttgaacaaattaaattttttccaaatagaaagaaagtcaacatttactaggttttgcctgcttgcttattaataaaatatatgctgattaattttaaaaagcattatttaatgttcccttacctcctctctaccctctaaattctaattgtctgttgcttattcaatctagggctcatttcctttttgacaagattactaggctgatagataaaggaaatgttatagac

SEQ ID NO: 95332 - DNA, 500 bp, Homo sapiens
tattaatttgcacatattagcacatttacttcaacattcctgcttgcctacatatgactgtttctattcttttttgaatagcttgtaatatcttacagggtccttcattaattaatgagttaaataaaaattttcacatatgctcttttaatatttgtattttgtcattttgaaaatcatcttttaacaagtttattatcctcaataggtattatgtactcagttctctcatcagcttaggtaaacctataatataaacaaaagtttacctttgaacaaattaaattttttccaaatagaaagaaagtcaacatttactaggttttgcctgcttgcttattaataaaatatatgctgattaattttaaaaagcattatttaatgttcccttacctcctctctmccctctaaattctaattgtctgttgcttattcaatctagggctcatttcctttttgacaagattactaggctgatagataaaggaaatgttatagac

SEQ ID NO: 95333 - DNA, 567 bp, Homo sapiens
taccattcctatctttctcatgttgtaagtacctggttgctggcttgatgcattggccagcagtggagaggggctagctgggcrgaactgcttctcaactttgaggtcaatggatactcctacaggggtgttattgcatctcacactttgctgaccacttctatgatgattttccatgcttgggtacctagagcctatggtgagccaaagtaatagtgcagagggaaatgaactcacaattgaagagaaggcagatgctatacaaatatatgagccagtgggtcaatgaatatacatcacaaatatagtttgcagaaatattgcaaaacaggtcagtggggagtatcccaaagatgttaccttggttagcatttagcaaagacagacattttatttttcattcctatcttctaactacatttttttgataagacagatttttttttacatcaatctaaaggaagacgacatgcaatatcaattgtgtgggaaagataagttatgcttcagctgtgtttaatactcttgatggttttaggtggtgccacagaaactgcattaagtata

SEQ ID NO: 95334 - DNA, 424 bp, Homo sapiens
ctgtctcaggccctgcccacatcccatcacagggccgtggacttgaagccggaacgtgaaatcccyatagactgaatgcatttccttcctacctgttctctctccccttttatttttatttttatattattttatttttaatttttactttatttttttgtagagacggggatttagctatgttgcccaagctggtctggaactccggagctcaagcagtccgcccgccttggccccccaaagcgctggaattacaggcgtaatgcactgtgcctggcctttaaaaaaaaattgaggttattttggggacagtagagcgtccagacacatcctaatttgcatagctgcgcagttttaaaaaatgcaatgcatttttacctgttagggtatgtgatttctggctagtaagctacaccgaatcttg

SEQ ID NO: 95335 - DNA, 424 bp, Homo sapiens
ctgtctcaggccctgcccacatcccatcacagggccgtggacttgaagccggaacgtgaaatccctatagactgaatgcatttccttcctacctgttctctctccccttttatttttatttttatattattttatttttaatttttaytttatttttttgtagagacggggatttagctatgttgcccaagctggtctggaactccggagctcaagcagtccgcccgccttggccccccaaagcgctggaattacaggcgtaatgcactgtgcctggcctttaaaaaaaaattgaggttattttggggacagtagagcgtccagacacatcctaatttgcatagctgcgcagttttaaaaaatgcaatgcatttttacctgttagggtatgtgatttctggctagtaagctacaccgaatcttg

SEQ ID NO: 95336 - DNA, 450 bp, Homo sapiens
agaattcggccctgtgaagagttgggttcggcctgtctcaggccctgcccacatcccatcacagggccgtggacttgaagccggaacgtgaaatccctatagactgaatgcatttccttcctacctgttctctctccccttttatttttatttttatattattttatttttaatttttactttatttttttgtagagacggggatttmgctatgttgcccaagctggtctggaactccggagctcaagcagtccgcccgccttggccccccaaagcgctggaattacaggcgtaatgcactgtgcctggcctttaaaaaaaaattgaggttattttggggacagtagagcgtccagacacatcctaatttgcatagctgcgcagttttaaaaaatgcaatgcatttttacctgttagggtatgtgatttctggctagtaagctacaccga

SEQ ID NO: 95337 - DNA, 564 bp, Homo sapiens
aagtgatgtataatcttcattttcttggtttcagtgatggcttcctgagcatataacacacatgcatatgtgtaagaatatatccaattsaatattttacacatttgtagctttgtatatattcagcagtatctattcattccttctgcttctttaccttaggtttagtcatgaaaccactgggtttcatgtggtccaggttctatctgaatcaagctatgaacctgctatcagtaagacctcctaattgcaaaccacatggacctttaccggtcatttgacttctctcggtcattaccttctctagtctccactgattcacctccttttgaatctcaacaagctcaatagtatctcaatgttatcttaacaaagctgttagaaataaacaacttgactttgaaacaaaggagagaaatggctcagcagctaggagaagatgcagggttgagttgccaacagttggttttgtttgtattttggccaggggatgtggcttggactggagagaaaggagataaggatgtaaacacatgtagggcatatcaccccctattttttatt

SEQ ID NO: 95338 - DNA, 480 bp, Homo sapiens
gcatattagctggaaaccaagcatattttggaaatacaatttgaaaactattcctctgggcctgttgaagagtaatgtttacaaattacaacatttctctgtgttaaatgtggttgatggaaatcctcaacctttcaggtytgattagaaattaagctgaatctggccaggtgtggtggctcacgcctgtaatcccagcactttgagaggccaaggtgagtagattgcttgaggccaggagctagagaccagcctggccaacattgcgaaactccatctctactgttaaaaaaaaaaaaaaaaaagctgggtgtggtggcatatgcctataatcccagctactcaggaggctgaggtaggaggatggcttgaactcaggcggtggaagttgcagtgagccaagatcatgtcactgccctctagcctgtgcaacagagcgagactctgtgtcaaaaaaaaaaaaaaaaaaaaaagctgaat

SEQ ID NO: 95339 - DNA, 538 bp, Homo sapiens
actcttttgctacgttcttctccaaagattctagggaagaactggactagccagatatggaacgtaaagtagaagtcagagctaagatgcaaaaatcacaaaccacaaagkgtggggcaccattattggtgcagctgcagatgctgaaggtacctacagccactctgatcattattaataaggttctttccagggtgtggtgaattttgtcaggtctgtgcacatctcctctatgtgccaagattatgagtaatactaaaggagaggaacttagatttactgacttgggatggaaatgggatctactgacaattgagataaaggtcagaggtgattgccaaattataatggcaatggcatttaatagttcaacaagtcatgaaaggcttctgtgcacaaacatctggcattcaagtatattcctgaaagacaatcagaataaaattggctctctcttttgttccaaagtttcttttctcagattttaaggaataggcagaagtctgccttgtgcaggctcaagatcttccttttatcc

SEQ ID NO: 95340 - DNA, 615 bp, Homo sapiens
gaggggcctggtgggaggtgattgaatcacgggggcagacgtcccccttgctgttctcatgacagtgagtgagttctcacgagatctggttgttttaaaagtgttgcacttccctcttcgatcaccatctctctctctcctgctctgccatggtaagacattcttgctcaccttcaccttgtgctatgattgtgagtttcttgaggctccctagtcatgcttcctgttaagcctgtgacactgtaaattaattaaacctctcttcttcataaattacccagtctcaggtagttctttagagcagtgtgaaaatggactaatactcatgaacatccctgccttgtggaaatggaacaccacaggtgcactgtagggaaggggctttgtcwcctgctggccagtcagtggttctgcactctaggccaaggcatgcatctggtgtgaaagcacaagggccaccatggctcgttaagcgtgaagtggccctagggacattgctgatttgaagggaagcagagttgatggagtaacactggctgctcaaacctcatcctttccagagcttagttcccgggcaggatcttaagcagatgaagtacagctgtgagcaaccac

SEQ ID NO: 95341 - DNA, 586 bp, Homo sapiens
atttataaggcagtgctatgcggaagcatcatgccaaactagatgttcctcagggtccctttcagagctccataatttagtgatttaattcaagaaacccatgaatttattaatatattgtgggagctttgctatggcaggagaagcaagataactaacagtccttgatctagactttcacatccctggtctatttaatttctctgtgtaaaattaattataaacaatttacctaacactgctaagccagaaaaaaaataaaagattaatgtataactgtcagaagagttatttaggagctttatttcaaggtctgttttgaaaaaaagtctccataatgtataattaaagttattcataggattttcagcctttgaggagagaaatgttatgaatgtaaacgaaaagcctgtttcctttataaatgkagtcataaaaatgttgggtccatcccctcaatggcagaatgaagcgtggacaagattcctgtgggaaaggccacatggatgataaatgagcatcttactgggacaaaagcacagttctttgtattaaaacattctctgcattatcttaactttaacaa

SEQ ID NO: 95342 - DNA, 543 bp, Homo sapiens
aaacaccgtttataaaacaccagctcattccctaactctgcgggtcatacagacttttgaatgtgattgtcaaagtctggcatctgaatcactgagggctaacggctggttaaaatytagatgtcagggcctcagtctatacttaaataaagccccatgaggtacagcccaggaattagcactattaaaaagtgctgcaggtaactgctatgcaaattaaatttgacgaccactgctttagaaaaaacacaattttatttagtcaaggggggactttgatgcggctatcagaaagggacctaggattattttacaaagtatctatctatctatggttccttatctccaaacaaaaacacttaacaataaaatgtaccacttaagctgaaattgtacatgccttcattgtacgtgccttcattgactccagggtgaaaatgtctatcactaatcttatccccaaaacaaatcttaatcactatatgacagtatttaaaatacagtatttttataacctatctgaaaaatgcaaatagctagaac

SEQ ID NO: 95343 - DNA, 647 bp, Homo sapiens
caagctttgagcattagtttactacctcagttcccaaaccatgcactgaggtgcctgggggcaccctgaggaactcaaaggggcatttttgagatattttaaatgtttaaggtaaacacatctgtccaacacaatgtgaactgaactatctcactgctagcttgagatagttaagttacaactgaaattgctgtgttccttttgatgatattgtcagaagcatttgcactagagcaactccatttggaatgagggcgaggaaaacgaggctgggacttgctggggtgcattctcagaaggttatgcattcctggtgyatagatgtttatggtgaaggtgtgtctggaattggtaggttcttggtctcactgacttcaagaatgaagccgcggaccctcgcagtgagtgttacagttattaaagatggtgtgtccggagtttgttccttcagatgttcagatgtgtctggagtttattccttctggtggattcgtggtctcgctgacttcaggagtgaagctgcagaccttcccggtgagtgttacagctgttaaagttggcgcatctggagttgtgtattccttccggtgggcttgtgatctcgctggcctcaggtggcctcaggggtgaagctgcagactgttgca

SEQ ID NO: 95344 - DNA, 673 bp, Homo sapiens
ataaaacaacaaaacacacacttccatagaacttattatgtacctgggcactgttccaaatattttccatgtattcactgacttaatttatatgcatagtgccttttgtatctgacctgtagtaacctgcatagataagctcttgaagttccgtaatttttgtgaagataatctagaataaattaagttcatatatgcacacagatctcttatatgtgtttataattccttacccagctacatagcctattcaaacctctttacaaaccactgaaacctgctactcatattccactgaatccataggctcttttgttttaaagagaaaatttttgttatacaactagaagagcctagtaatagttttttggaaggttttagtatctatttttaaaactgtcttttgcccattcaattctcagaaccccacgtgtgtttgtcctgactctcaatacacagttttaagtagattaagtgttaatccacttaaagaactttcctacctgtagatgctttttaaaaagttgaactttattccttgatatttcttctaatccaaactcaaattaaattaaaatggtgctttaatttttcatgattggcataggatctattaagtktgaaaacttgctctgttatctactaagatataatatattcttgtgcatagttt

SEQ ID NO: 95345 - DNA, 578 bp, Homo sapiens
tacctctctcagagtggtaagataatatcagcaggtactataaggctatcacagtttagagtaaatagaccctttgccctctcaatgcatttgaggaaaactaaagttaattcagagcatggacttggctctacggaaacaggatacatagatgcaaacctcccttctggcacacactctgtaacctcgggcaaattacacctgtgtttcagtttcttcatctgtggaatgcaaatagcagcatctaactcataggctcataggcttgtagtgagagttgaagtttatatcagaatatgcatggtacataattaagtgctatgatgttagccattgatttcaatttaaacacaaagaataaatgacatgctttgcctgtaaaataggtgcctaaaacggcgatacattgggcatactggtatataatttggatcggtttctatttctcaatcaataaagtcaagtttctagcagaggagggtattgagtcagagctaaagcactccagcttgtacaaagggaaagggatactttgttcctttttgagayggaatcatctgggcaaagaaaaagagaga

SEQ ID NO: 95346 - DNA, 635 bp, Homo sapiens
tgtgatttctctctccaaggcaaaggaagaagctccaccttaagatgtcatgaaagaagcttggaagaaagtcaggattatctatttcttaggagcttctttaatctcaagatcaagagatttcactcaattccagcttccttctaagaaagtttcactctctaagtctttcaaacgtggaggacgtctttcaggaactttgaatctatttaaggacatgccaaaatatttctgacccagaacctttttagactaggaaactcacatgcaatacacatacacaaggttctcyatatttatgcgtatatgtgtatctcctctctatacaaatagacaagcaccttttatcttgataaagaaagcacgttctattcataggaaaatggttgggtcaggctttctgggctttttgtttgtgcgccacagggtgcctaatagcactgcaggggcaggcatccagtgtcacgccaaccacctacagcatgcgtggtgccagaggcagcgatgagagcactaattagagggtgtcaggaaacaggagagaaggaagggacacacacacacacaaaagcatgaaactttccatgaagatggaaagtaaagcgggatggggttctcctttttatttttggtgg

SEQ ID NO: 95347 - DNA, 554 bp, Homo sapiens
attccctgtgggtgtcaccatcgggctctatgtgccgcctgtctgtgccttcccatttatggaaatggcagcacccttatcctggcccccaacactgcacttaggacaccactctgactcctctgtctttttgcctatcatctaatcagtctggccaagggatatcaagagttcattctaaaactcttttccgtttttctcattttcactgtcaytacctcaatctaggccttcatagctttggggctgaattattgtattagcttaaattttatttttctcattaccacccctcgcaaacacatgcccacaccttcacctgctcatgcatctgacacacagttgctagattaatactacaaaaataccatttctattaggcttatctcctttaaaaaagaaacctttgattttttttaaattcacagataaacattatatatattcatgtgtacaacatgaagttttcatatatgtatacattgtggaaaggtttaagcaaattaacatattcattacctcacatacttatccttttttttgtagtgagaaca

SEQ ID NO: 95348 - DNA, 610 bp, Homo sapiens
taacactttgcaatgggacctaaagcacacaaaataataaataaccatttgcttttgaaatttccatcaaggggataggagacttgtgaacattgcatcagtcttctttcctcttcagtggcgccactaacagttgttataatggttagaacactatgattcaatataaggcatcatgtgtggtaatgtcatgcaggtattagtctatttgcagatggtgttttattacagtgctcttagagtaataaacaatgctctgtgttatttgtagtattttgaaactgtcagaagctcttatatttgtcaccactgcagagaaaagacaaaaggcagcctgttgtttccaatgagttcacaatgtattggagaacatggggcttgcttgaggcagaaaaaaataaaagtaagttcatttgcagttcagttatgtctgaactgattaacggtaagtataatttgtgaactcttactgtttcctamcacaggcaggttttatgattttccataattatctgaaacatattttacaaacttttgacagcaataaaaatataaaggtctacaatttaagtgacttaagacaagttctgtagaaatttgacaagtttct

SEQ ID NO: 95349 - DNA, 408 bp, Homo sapiens
gaattcttttgtgaaatatcagtgccacagattgtaacagatagcttcatgcacactctgcattttattggtttgtttggaaaatgttggccattgaattattcatagatttatttcaaatagtttggaaattgttgtacytttgaaaacatgctgttcctgtagttttttgatgagagttatagttgttatatatacataaagataattttcttttcatttttaagagacaattctttttatcctaaatattttattatctttaaatttgttcctgtattattatatgtgctcctgaagcgagcactctttttatctatgatacttccataataatctcttctatttatagctattggtagttccctaccagaaaaaaacataattctggtgattgaaatttttatt

SEQ ID NO: 95350 - DNA, 422 bp, Homo sapiens
cagaattcttttgtgaaatatcagtgccacagattgtaacagatagcttcatgcacactctgcattttattggtttgtttggaaaatgttggccattgaattattcatagatttatttcaaatagtttggaaattgttgtacctttgaaaacatgctgttcctgtagttttttgatgagagttatagttgttatatatacataaagataattttcttttcatttttaagagacaattctttttatcctaaatattttattatctttaaatttgttcctgtattattatatgtgctcctgaagcgagcactctttttatctatgatacttccataataatctcttctatttatagctattggtagttccctaccagaaaaaaacataattctggtgatwgaaatttttatttgctatttaggt

SEQ ID NO: 95351 - DNA, 465 bp, Homo sapiens
gttattaaattgctcaatttttctgaagtgaaagaattatatattasaagtgtaatgtcaatatgtgaatttctacaaagcttgcctgcctaaggacaggtggcctgggtaaagagtcaaattggtagaaccaacaaagaataataaaaagacaaaaaaagcatcatgccattcattcaacaacttagtggacaaatctttctatattttcaccataaaggatgggagaatgcctccaacaagaagaaaatagcaactccttccattttgttctcttgtattgtgggtaggaacctatctcctcaacttgtaacatttccagacttatcctttcaatatataacatgtaaacatacagttcatttcttctgtcacccagggtggagtgcaatggggtaatcatggctcactgtaaccttccagggctcaagcgatcctcccacctcagcctcctgagtagttggg

SEQ ID NO: 95352 - DNA, 465 bp, Homo sapiens
gttattaaattgctcaatttttctgaagtgaaagaattatatattacaagtgtaatgtcaatatgtgaatttctacaaagcttgcctgcctaaggacaggtggcctgggtaaagagtcaaattggtagaaccaacaaagaataataaaaagacaaaaaaagcatcatgccattcattcaacaacttagtggacaaatctttctatattttcaccataaaggatgggagaatgcctccaacaagragaaaatagcaactccttccattttgttctcttgtattgtgggtaggaacctatctcctcaacttgtaacatttccagacttatcctttcaatatataacatgtaaacatacagttcatttcttctgtcacccagggtggagtgcaatggggtaatcatggctcactgtaaccttccagggctcaagcgatcctcccacctcagcctcctgagtagttggg

SEQ ID NO: 95353 - DNA, 465 bp, Homo sapiens
gttattaaattgctcaatttttctgaagtgaaagaattatatattacaagtgtaatgtcaatatgtgaatttctacaaagcttgcctgcctaaggacaggtggcctgggtaaagagtcaaattggtagaaccaacaaagaataataaaaagacaaaaaaagcatcatgccattcattcaacaacttagtggacaaatctttctatattttcaccataaaggatgggagaatgcctccaacaagaagaaaatagcaactccttccattttgttctcttgtattgtgkgtaggaacctatctcctcaacttgtaacatttccagacttatcctttcaatatataacatgtaaacatacagttcatttcttctgtcacccagggtggagtgcaatggggtaatcatggctcactgtaaccttccagggctcaagcgatcctcccacctcagcctcctgagtagttggg

SEQ ID NO: 95354 - DNA, 465 bp, Homo sapiens
gttattaaattgctcaatttttctgaagtgaaagaattatatattacaagtgtaatgtcaatatgtgaatttctacaaagcttgcctgcctaaggacaggtggcctgggtaaagagtcaaattggtagaaccaacaaagaataataaaaagacaaaaaaagcatcatgccattcattcaacaacttagtggacaaatctttctatattttcaccataaaggatgggagaatgcctccaacaagaagaaaatagcaactccttccattttgttctcttgtattgtgggtaggaacctayctcctcaacttgtaacatttccagacttatcctttcaatatataacatgtaaacatacagttcatttcttctgtcacccagggtggagtgcaatggggtaatcatggctcactgtaaccttccagggctcaagcgatcctcccacctcagcctcctgagtagttggg

SEQ ID NO: 95355 - DNA, 315 bp, Homo sapiens
tatgaatgttatttttttaagtctcttttctttgacgctctccttttttatcctgtgcttacaccaaaaacaaattatttgaaaatgctaaaataaaatgtggcatgttttcttagctgttwtgtattctgttataacattttacaactattaaagttgaaaaataactttattggttttgctgcatatagctgcctgtctgctataagagaactaatctataaaattaaggcattttgttatttcaagtgtagaggggcaagaatgtaagggaattataaaaaccccaagatgactcatttaaagtagatgcac

SEQ ID NO: 95356 - DNA, 315 bp, Homo sapiens
tatgaatgttatttttttaagtctcttttctttgacgctctccttttttatcctgtgcttacaccaaaaacaaattatttgaaaatgctaaaataaaatgtggcatgttttcttagctgttatgtattctgttataayattttacaactattaaagttgaaaaataactttattggttttgctgcatatagctgcctgtctgctataagagaactaatctataaaattaaggcattttgttatttcaagtgtagaggggcaagaatgtaagggaattataaaaaccccaagatgactcatttaaagtagatgcac

SEQ ID NO: 95357 - DNA, 315 bp, Homo sapiens
tatgaatgttatttttttaagtctcttttctttgacgctctccttttttatcctgtgcttacaccaaaaacaaattatttgaaaatgctaaaataaaatgtggcatgttttcttagctgttatgtattctgttataacattttacaactatkaaagttgaaaaataactttattggttttgctgcatatagctgcctgtctgctataagagaactaatctataaaattaaggcattttgttatttcaagtgtagaggggcaagaatgtaagggaattataaaaaccccaagatgactcatttaaagtagatgcac

SEQ ID NO: 95358 - DNA, 315 bp, Homo sapiens
tatgaatgttatttttttaagtctcttttctttgacgctctccttttttatcctgtgcttacaccaaaaacaaattatttgaaaatgctaaaataaaatgtggcatgttttcttagctgttatgtattctgttataacattttacaactattaaagttgaaaaataactttattggttttgctgcatatagctgcctgtctrctataagagaactaatctataaaattaaggcattttgttatttcaagtgtagaggggcaagaatgtaagggaattataaaaaccccaagatgactcatttaaagtagatgcac

SEQ ID NO: 95359 - DNA, 620 bp, Homo sapiens
cacagcccaagccttcccctggtctgagcttcctcttcctgccttcatagtcatggcagctccttcttgctgggagtgggatagaggagccctagggctgctggcttctggaaggaactggctccagggcaccctggctattccgctgctccatgctgtgtgcaggtggctctggcaccaagaggtggcaccaaacctgctgccagccttggctttctcaccagtcctgctctgatgarttgacaggctgtgtttggaattgagcatggcggtattacaaaggcaagtgggtaccacataacctgcctgcagtgttgctttgttctgatgaattacaccgagtgcctggattcacatttggctggattgtcaggaaaaatatgtgttctgggtgccagctgatcttttcatctagcttctgtcctcaggtaaacattccctgttaaaattctaaatttccatctgcttcctctaaagagattggtaaaaaggcaaaaaacacctaagaatcagtgttacttgtaatgagcccagggctgctgcagggggcaccatatacatagaatagcaggtgagcggggtccccagggctgaagtattatgctctaggccagaaaaag

SEQ ID NO: 95360 - DNA, 534 bp, Homo sapiens
ccacttttcccatactcaggttcttgttttattgttgtgtatatagtatctcatgttagtctttcaccacagacatgctttgtttgcatgtctaatgggtgtatcttttactaccacaattgtttccatgacggagcactggcatacataaatagaccaacagacatatagacttatgcatatatgtactgagttgcattgtggaagtgtgaacaggtttaatataaaatgtattgttacaatgtcagctgtggtcaaaaaagtttgggaaacattgtcaaggttcttactatgtcacagccacctctgcatgaggaagctatcaggttgaaacttctaaaaataaacatgtcaagaacccctctttacaaatattascactaaataagtagcaaataatgccccacaataagaaaaacatatatttatgaaaagagacttttcaacaatgcttaaccctgcccaacagtggaaagaccatgttggaaggcagtgagttcctcatcagtgattagaacctatggaggaaagccc

SEQ ID NO: 95361 - DNA, 587 bp, Homo sapiens
agaataaatatcaggcaataatgtaccacaactgcactgagcacacatcagctccttgaaccatcacaacaaccctaggaagcatgmactataatttccattttacaaaggatccctagagctaagatgactagatatcttgtttgcttaggacaattctggtttactgcatgtaaactacctaaaatacccattttattctcaaatttatgagtctggacaataaattacatgatcaccctattttgagtctaagaactacaggtggtaaactgcagaaccaaaacttattggagaagtctccaaagcctttgttcttaaccattttgttatactaaatctgcagagctaaagtgttcatcacaaagcgacacaacttgtaaaaaataagtgattataccaagaaattctgcatttcaaagataaataaacaactctatatgcattcagtagaagtaagtcatttaaaaaggaaaaagatattaattaatttcataagtaaatgaaaaatagtaccctggatttcttctttacaacattaaatgccagaaaacaatgtctacaaagtcaagttagaattaatggaa

SEQ ID NO: 95362 - DNA, 656 bp, Homo sapiens
cttaacatagcactgttatcctccgcttgtcctggtcatagcaaacattgatagagatatacttaattgaaagaactaaaggctaattaagataaatgtacagacaaagtaaatgaaaattttatggagaaaataaagtaagatttaaacaggaaaatcaaggtcacaatatgagtggctatcactgaatttatactaataaaatgaagaaaggggaaaaatcagataattgaaatgatacatgttttatggggaaaatcacatcacaaggacaacttttggatgatcaccaacaaaggtagggcatatgatagaaaaccttcaaaaatgaaatatttaactcacagaaaacaaactatgtcaagaaaagtcactcatgcaagcagactaaaaaagctaattcaattgtttgaatgattaagaacaattacagacaaaaatacttgctgttgaagaaaacaagaatatttccctcatgttatccaggttgactgcctgcattaatctartttattagattgattaatcacttagctttgtttttatcagcacagccttagtgtcttaaagccttaagccctgtggggtattctttagtctcatcatcttcaaactgaatctttgaatcaattaatcttagaatgcatactgattgt

SEQ ID NO: 95363 - DNA, 582 bp, Homo sapiens
gcacaaattcactgagagtttaaaaaaatgcatgcatattgtggagatagaaatcaaatctatttgtytccatctgctgtattcttcccaaaatattatctcttcttatcccattgtactatattgcatttctttgaccatttattgtgtatctcttaatatttcccacttcatcattactaacctcactcactctgaacttgatgagagcacctgagcattaatttttcttataattatttaatgattaccagaattcgttcagtatggccagctctggtcaaagtgaggcaggcaagatgctttgtcaactgcctggatggaatgtctcaaaaggtttccatttcatggtagcattatgcaaagttcaagacgtttaatcaagacccttcacttacttaactatacctccttgagaatcccatctatgaaaaaattctagtcattataaaaatgattgattaaatgagggaagtagtagagttcttcatttctttagttggtttagtctcctatgagtcaatcctagttttcaaaattcttaataaaccatttattccttcaactttctatgccatttga

SEQ ID NO: 95364 - DNA, 612 bp, Homo sapiens
ttatgaaccccaaaatgtgcatgtttttggtagcagcagcttgggtcattggggtgattcatgctatgtctcagtttgtttttgtcataaatttacccttctgtggccctaataatgtggggagcttttattgtgattttcctcgggttattaaacttgcatgcrtggacacttatgggctagaatttgtggtcactgccaacagtggattcatatcgatgggcaccttctttttcttaattgtatcatacatttttattctggtcactgtccaacgacattcctcaaatgatttatccaaagcattcttcacttcgtaggctcacatcaccgtagtggttttgttttttgctccatgcatgtttctctacgtgtggcctttccctactaagtcattggataaattttttgccatcatgaactttgttgtcacccctgtcttaaatcctgccatctatactttaaggaacaaagatatgaagtttgcaatgagaaggctgaatcaacatattttaaattctatggagatgacataacacatttggttgatgagagcacaggataaatgccatggaccatcaagactcctgtgatcaccatgatcactatgga

SEQ ID NO: 95365 - DNA, 612 bp, Homo sapiens
ttatgaaccccaaaatgtgcatgtttttggtagcagcagcttgggtcattggggtgattcatgctatgtctcagtttgtttttgtcataaatttacccttctgtggccctaataatgtggggagcttttattgtgattttcctcgggttattaaacttgcatgcatggacacttaygggctagaatttgtggtcactgccaacagtggattcatatcgatgggcaccttctttttcttaattgtatcatacatttttattctggtcactgtccaacgacattcctcaaatgatttatccaaagcattcttcacttcgtaggctcacatcaccgtagtggttttgttttttgctccatgcatgtttctctacgtgtggcctttccctactaagtcattggataaattttttgccatcatgaactttgttgtcacccctgtcttaaatcctgccatctatactttaaggaacaaagatatgaagtttgcaatgagaaggctgaatcaacatattttaaattctatggagatgacataacacatttggttgatgagagcacaggataaatgccatggaccatcaagactcctgtgatcaccatgatcactatgga

SEQ ID NO: 95366 - DNA, 612 bp, Homo sapiens
ttatgaaccccaaaatgtgcatgtttttggtagcagcagcttgggtcattggggtgattcatgctatgtctcagtttgtttttgtcataaatttacccttctgtggccctaataatgtggggagcttttattgtgattttcctcgggttattaaacttgcatgcatggacacttatgggctagaatttgtggtcactgccaacagtggattcatatcgatgggcaccttctttttcttaattgtatcatacatttttattctggtcactgtccaacgacattcctcaaatgatttatccaaagcattcttcacttcgtmggctcacatcaccgtagtggttttgttttttgctccatgcatgtttctctacgtgtggcctttccctactaagtcattggataaattttttgccatcatgaactttgttgtcacccctgtcttaaatcctgccatctatactttaaggaacaaagatatgaagtttgcaatgagaaggctgaatcaacatattttaaattctatggagatgacataacacatttggttgatgagagcacaggataaatgccatggaccatcaagactcctgtgatcaccatgatcactatgga

SEQ ID NO: 95367 - DNA, 612 bp, Homo sapiens
ttatgaaccccaaaatgtgcatgtttttggtagcagcagcttgggtcattggggtgattcatgctatgtctcagtttgtttttgtcataaatttacccttctgtggccctaataatgtggggagcttttattgtgattttcctcgggttattaaacttgcatgcatggacacttatgggctagaatttgtggtcactgccaacagtggattcatatcgatgggcaccttctttttcttaattgtatcatacatttttattctggtcactgtccaacgacattcctcaaatgatttatccaaagcattcttcacttcgtaggctcacatcaccgtagtggttttgttttttgctccatgcatgtttctctacgtgtggcctttccctactaagtcattggataaattttttgccatcatgaactttgttgtcacccctgtcttaaatcctgccatctatactttaaggaacaaagatatgaagtttgcaatgagaaggctgaatcaacatattttaaattctatggagaygacataacacatttggttgatgagagcacaggataaatgccatggaccatcaagactcctgtgatcaccatgatcactatgga

SEQ ID NO: 95368 - DNA, 398 bp, Homo sapiens
aaaatataaattgaaaaaaaaaaaaaacyttagcaaatgattctgacaaatatcttctctttccagggagaatcactgagccagaataaaattgaacactaaatattctaagaaaaaaggaatctagtttgtcaaaatgtgacttgaattaatagataaggagagtcagatgataagagggtcaaaattatgtttatcttaggaaaagtagaatagaaaatttataagcagattaaaaacacataataaaagtagtaaataataatgacagtatctcaaatcagtgcaggggggaaaggcctactaatgtgatggtgggataattggatagcaatatgggaaaagatatatttaatttatttgctacaccaaatgccaggacaatctctaagtgaatt

SEQ ID NO: 95369 - DNA, 633 bp, Homo sapiens
atgtgttaattaacttgatttattcattcaacaacatacacatatattaaaacatcacactgtattccacaaatatatataatttttgtcaattaaaaaataatttttaaaaatgagaaacaaaaaagctgacattttcagattaaaaaaattatacagaagaattaattcattaaagtaaaaacaaatgtgggaaaatggtttttaaatataatttaaaccaaatttaaaataagcatawaaagactatggacaaaacaagaaatccaaataaaaaataaacatatgaagaatattcaaactcactttttatcaaagaaatgtaaattttaaaatatagcattgctattgtgttttcataaataataatatatcatggatgagcctgtgaggaaacagacactcatactctgcaaagcaatgactaagataattatgtcagatgatgaattacgttaattagcttgatggtggtcactgtttcacgataaatatacatatgtatcaaaacatcacattacacaccataaagatatataacttgttatcaaaaagaaatatagcagttaaaatttaaaatttttaaaaaacgtctttttgaggttcgtacctcacttaagtcacactgttcaa

SEQ ID NO: 95370 - DNA, 633 bp, Homo sapiens
atgtgttaattaacttgatttattcattcaacaacatacacatatattaaaacatcacactgtattccacaaatatatataatttttgtcaattaaaaaataatttttaaaaatgagaaacaaaaaagctgacattttcagattaaaaaaattatacagaagaattaattcattaaagtaaaaacaaatgtgggaaaatggtttttaaatataatttaaaccaaatttaaaataagcataaaaagactatggacaaaacaagaaatccaaataaaaaataaacatatgaagaatattcaaactcactttttatcaaagaaatgtaaattttaaaatatagcattgctattgtgttttcataaataataatatatcatggatgagcctgtgaggaaacagacactcatactctgcaaagcaatgactaagataattatgtcagatsatgaattacgttaattagcttgatggtggtcactgtttcacgataaatatacatatgtatcaaaacatcacattacacaccataaagatatataacttgttatcaaaaagaaatatagcagttaaaatttaaaatttttaaaaaacgtctttttgaggttcgtacctcacttaagtcacactgttcaa

SEQ ID NO: 95371 - DNA, 632 bp, Homo sapiens
gaagtgaatgttcatgatttattccactattagacttctctttattcttaaaaatatttaagatcactaaatttttataggactttaaaaacagtaatgtgctgcttgagtgtgtaggactaagaaatgggattcagagtagtaaagagaaaagtrgaatttccaagcactatgaattactgttctttaaaaaacagcaaaaatcaaataacagtattcctccaaaaaagatggcaagtgtaaactctataccttcatgtctcccgtggaatgttagtgatcaatttccacttctcccttttacatcttacttgcccattaactcttatacctaatccaaagattgttaatatggctatgcctcactttcaggacaccttttatttgttacttctcttcactgcaaaacttcttgaaacagtacttattttctctcctccatacacaattgaaatggctctcaactcatgcccagaagtcagtgttcagtctctcacctggcagatagcaacttacaaagatgccccaacaatacctccttgtgtctagacagtcatcattatcctttacctttttctgtatttatttctgctcctaaaagggatctctatgtaaagtattgttatactagt

SEQ ID NO: 95372 - DNA, 632 bp, Homo sapiens
gaagtgaatgttcatgatttattccactattagacttctctttattcttaaaaatatttaagatcactaaatttttataggactttaaaaacagtaatgtgctgcttgagtgtgtaggactaagaaatgggattcagagtagtaaagagaaaagtagaatttccaagcactatgaattactgttctttaaaaaacagcaaaaatcaaataacagtattcctccaaaaaagatggcaagtgtaaactctataccttcatgtctcccgtggaatgttagtgatcaatttccacttctcycttttacatcttacttgcccattaactcttatacctaatccaaagattgttaatatggctatgcctcactttcaggacaccttttatttgttacttctcttcactgcaaaacttcttgaaacagtacttattttctctcctccatacacaattgaaatggctctcaactcatgcccagaagtcagtgttcagtctctcacctggcagatagcaacttacaaagatgccccaacaatacctccttgtgtctagacagtcatcattatcctttacctttttctgtatttatttctgctcctaaaagggatctctatgtaaagtattgttatactagt

SEQ ID NO: 95373 - DNA, 481 bp, Homo sapiens
gcactcacttaaaaaaaagaaaatcagatttaaacagctgctaaactccatccagataagggagatgtttactgacctgaaactcttgcctttccccctgttcaacagaccctggtggaccagtatttgcaaaaggggaggggtgcagatgatgtctgagtacaagtggaagggtcaccrccctttcccactgcaggctgcagcctagacctagcctgagctgggggaagcaagaagctttgatatgggaagattagagttgtgatgattatcttggacagggtgtacaaattactgaacactgaccaagtggaatactaaggtcacaaaatacatgttcttatctagcagtgatcaaaaaatgtgtagggctaactctaggattgataatagggagcagagatgaaagaacccagcagaatggacgtggcttggacattgggaggggttatgggacaaaataatttgaatttggcctcta

SEQ ID NO: 95374 - DNA, 481 bp, Homo sapiens
gcactcacttaaaaaaaagaaaatcagatttaaacagctgctaaactccatccagataagggagatgtttactgacctgaaactcttgcctttccccctgttcaacagaccctggtggaccagtatttgcaaaaggggaggggtgcagatgatgtctgagtacaagtggaagggtcaccgccctttcccactgcaggctgcagcctagacctagcctgagctgggggaagcaagaagctttgatatgggaagattagagttgtgatgwttatcttggacagggtgtacaaattactgaacactgaccaagtggaatactaaggtcacaaaatacatgttcttatctagcagtgatcaaaaaatgtgtagggctaactctaggattgataatagggagcagagatgaaagaacccagcagaatggacgtggcttggacattgggaggggttatgggacaaaataatttgaatttggcctcta

SEQ ID NO: 95375 - DNA, 612 bp, Homo sapiens
ttaggactttaacatatgaatttaggggagatgcaattcagcccataacaaatgcctgctagtaactcatgggaactctcttccacatgcaaagagataaaatgtgatttctgcaagttttattagaaatataggaaggaacccttcccagcagggcttgacaagcctgtgcatgtgcctcactgacataactaagttatagggtcatatttgaactaatccatggaacaagacatgcaattacactgatgagcttaggctgaagtcaaatgtctcactcctgaaaattcagacttccccaaaacacatgggctgarcaggtaagatggatacttcaactgaaagccagggtacttaacaaaagcaggagaaatagatgctggggaggtaatcccaacgtccagtgcaaatgctatgagggaaaacgacagagtcccaaacatgctggagcttatagttagaggaaggaaaaattagatttttctcagggctttgggattggggcacctggcagtcagcgcctagattccaaagcaggtcagaagatgcctctgcccaagtattggaaaccttttgaatatctttgagtattaaaaacattttaacactgcc

SEQ ID NO: 95376 - DNA, 412 bp, Homo sapiens
ccaaccatatgctgccactgcagtatgggtgtgtgtgtgtgtgtgtgtgtgggtttgtgtgcmtgtggacattcgagtcacagagccagttaggagtgcctggaagcactggcaccctgaggatgttctagctgtctctggcgccatgcttattcggctgctgtccctaccacaaaattggctttcagtaccataccttgaacatcaggagagggtctttatcctaaaatcctggggccaagatattaagaaagttctttatagtttcataactgtttttagtaggcagtgtggctttattccttctttgattgggaaatggagggggttgttcataggctagaacagaggaaacaacttatccccctgagccctatcaaccatatgagctaatgcactatcatgactatgc

SEQ ID NO: 95377 - DNA, 571 bp, Homo sapiens
tctgcgggctggtgagagatgaagatggtcccaaccaagggatcagctgaaacaatggaaaaaaagagaccatgttcataatacttcccttcattttttatagagaaaatcttatctatatttaggttaaattttgtttttcagcaatcagatgctgggctcttgaaatagggataagaagatttatacagtaagagaaatctgggaagctccatttatccagactgatagactaatttcagaggtcgcactccactaaccwgaaggctcaacatgactcactaatttattttattttatcagcagagtatcaggagcagcttttgataattaaaaaaatacttttttaaaattaaaaatggtagacagtaaatttcagcgtttagatggagcacacattctcctgttcaccataggtcctaacactaatatacctggcctgaccactccatgtatttatttttgctgcttaatatctgaattaatttacatttctgacccctggcacatggattgatagcacttgacgtttcctttcttcacaggaagatatttcaaatcttgctgtatt

SEQ ID NO: 95378 - DNA, 411 bp, Homo sapiens
caaaagttttctcctagtttttttctgtaagtgttatagtgtgaggttttatgtttgtgtctatgattcatcttgagttaattttatatatgaatgagttatgaattgtttatttttgtgcttatgaatatcccattatttcaacattacttgttgagaagactgtcccttctccatcacatacatgtgggtctactcttggactctttattctattgatgtgttcgtggaacttgacaccaaaactatactgtcttgattaytgtagctgaataaaagtgttagaacttttgacattaggtagtattagtactctatcttttttttcaaagttgttttggctattctagttctttgcatttccatatgaaatttaatattactttgtcaatctctacaaaaaagactcct

SEQ ID NO: 95379 - DNA, 509 bp, Homo sapiens
caatccctaatgaattaacagakccagcataaggcactgaaggctagtaccataaagagagacattatgtgccttttaatgaaagaacaatactaaagacttgcaaaagtgatcaagcctgaagcaatccaagtttcagatccaatttctaatagatcaagctataccatgagacaaaggaacatgcttagctataccacaagaactcaaaaagcaaaatctggaccatgaaatcctccacatgttctatgactgtggttcttcaacaaataaacttcatgaggataaaaccaggcagatatgcaggaaacttgtagctaaaaagagaaacttaagtgatgaaactataaaggaatgctggaaagttactatcatagcagtcaagatagtcattatcgttttagggcagtacaagggagtgctttgggacaggtcacatggaggcttctacactcatttagaaagttataattttgatataatggtagtttaagaatgtttgccacata

SEQ ID NO: 95380 - DNA, 529 bp, Homo sapiens
tgacagattagaatgtgaccactttgcaatccctaatgaattaacagatccagcataaggcactgaaggctagtaccataaagagagacattatgtgccttttaatgaaagaacaatactaaagacttgcaaaagtgatcaagcctgaagcaatccaagtttcagatccaatttctaatagatcaagctataccatgagacaaaggaacatgcttagctataccacargaactcaaaaagcaaaatctggaccatgaaatcctccacatgttctatgactgtggttcttcaacaaataaacttcatgaggataaaaccaggcagatatgcaggaaacttgtagctaaaaagagaaacttaagtgatgaaactataaaggaatgctggaaagttactatcatagcagtcaagatagtcattatcgttttagggcagtacaagggagtgctttgggacaggtcacatggaggcttctacactcatttagaaagttataattttgatataatggtagtttaagaatgtttgc

SEQ ID NO: 95381 - DNA, 529 bp, Homo sapiens
tgacagattagaatgtgaccactttgcaatccctaatgaattaacagatccagcataaggcactgaaggctagtaccataaagagagacattatgtgccttttaatgaaagaacaatactaaagacttgcaaaagtgatcaagcctgaagcaatccaagtttcagatccaatttctaatagatcaagctataccatgagacaaaggaacatgcttagctataccacaagaactcaaaaagcaaaatctggaccatgaaatcctccacatgttctatgactgtggttcttcaacaaataaayttcatgaggataaaaccaggcagatatgcaggaaacttgtagctaaaaagagaaacttaagtgatgaaactataaaggaatgctggaaagttactatcatagcagtcaagatagtcattatcgttttagggcagtacaagggagtgctttgggacaggtcacatggaggcttctacactcatttagaaagttataattttgatataatggtagtttaagaatgtttgc

SEQ ID NO: 95382 - DNA, 509 bp, Homo sapiens
caatccctaatgaattaacagatccagcataaggcactgaaggctagtaccataaagagagacattatgtgccttttaatgaaagaacaatactaaagacttgcaaaagtgatcaagcctgaagcaatccaagtttcagatccaatttctaatagatcaagctataccatgagacaaaggaacatgcttagctataccacaagaactcaaaaagcaaaatctggaccatgaaatcctccacatgttctatgactgtggttcttcaacaaataaacttcatgaggataaaaccaggcagatatgcaggaaacttgtagctaaaaagagaaacttaagtgatgaaactataaaggaatgctggaaagttactatcatagcagtcaagatagtcattatcgttttagggcagtacaagggagtgctttgggacaggtcacatggaggcttctacactcatttagaragttataattttgatataatggtagtttaagaatgtttgccacata

SEQ ID NO: 95383 - DNA, 537 bp, Homo sapiens
cctgctcctgaatgactttttgagtcaacaaagaaattaaggtagaaatcaagaaattctttgaaactaatgaaaataaagatacaacataccaggatcgctggaacacagctaaagcagtgttaagaggmaaatttacagagctaaatgcccacttcaaaaagttagaaagatctcaaattaacaacctaacatcacacctagaggaaccagaaaaataagagcaaaacaacccaaaatctagcagaagacaagaaataaccaaatcagagatgaactgaatgaaattgagacacaaaacaccatacaaaagatcaacaaaaccacaagttggttctttgaaagaataaatttaatagaccaccagctagactaataaagaaaaagagagagaagacccaaataaacacaatcagaaatgacaaaagagatattaccattgaccctgtagaaaagcaaaaaactctgagagactattacgaacaactctatggacacaaactggaaaacctagaagaaatggctaaattcctggaa

SEQ ID NO: 95384 - DNA, 537 bp, Homo sapiens
cctgctcctgaatgactttttgagtcaacaaagaaattaaggtagaaatcaagaaattctttgaaactaatgaaaataaagatacaacataccaggatcgctggaacacagctaaagcagtgttaagaggcaaatttacagagctaaatgcccacttcaaaaagttagaaagatctcaaattaacaacctaacatcacacctagaggaaccagaaaaataagagcaaamcaacccaaaatctagcagaagacaagaaataaccaaatcagagatgaactgaatgaaattgagacacaaaacaccatacaaaagatcaacaaaaccacaagttggttctttgaaagaataaatttaatagaccaccagctagactaataaagaaaaagagagagaagacccaaataaacacaatcagaaatgacaaaagagatattaccattgaccctgtagaaaagcaaaaaactctgagagactattacgaacaactctatggacacaaactggaaaacctagaagaaatggctaaattcctggaa

SEQ ID NO: 95385 - DNA, 537 bp, Homo sapiens
cctgctcctgaatgactttttgagtcaacaaagaaattaaggtagaaatcaagaaattctttgaaactaatgaaaataaagatacaacataccaggatcgctggaacacagctaaagcagtgttaagaggcaaatttacagagctaaatgcccacttcaaaaagttagaaagatctcaaattaacaacctaacatcacacctagaggaaccagaaaaataagagcaaaacaacccaaaatctagcagaagacaagaaataaccaaatcagagatgaactgaatgaaattgagacacaaaacaccatacaaaagatcaacaaaaccacaagttggttctttgaaagaataaatttaatagaccacyagctagactaataaagaaaaagagagagaagacccaaataaacacaatcagaaatgacaaaagagatattaccattgaccctgtagaaaagcaaaaaactctgagagactattacgaacaactctatggacacaaactggaaaacctagaagaaatggctaaattcctggaa

SEQ ID NO: 95386 - DNA, 537 bp, Homo sapiens
cctgctcctgaatgactttttgagtcaacaaagaaattaaggtagaaatcaagaaattctttgaaactaatgaaaataaagatacaacataccaggatcgctggaacacagctaaagcagtgttaagaggcaaatttacagagctaaatgcccacttcaaaaagttagaaagatctcaaattaacaacctaacatcacacctagaggaaccagaaaaataagagcaaaacaacccaaaatctagcagaagacaagaaataaccaaatcagagatgaactgaatgaaattgagacacaaaacaccatacaaaagatcaacaaaaccacaagttggttctttgaaagaataaatttaatagaccaccagctagactaataaagaaaaagagagagaagacccaaataaacacaatcagaaatgacaaargagatattaccattgaccctgtagaaaagcaaaaaactctgagagactattacgaacaactctatggacacaaactggaaaacctagaagaaatggctaaattcctggaa

SEQ ID NO: 95387 - DNA, 590 bp, Homo sapiens
tgtgttaaaggatttatgcctccacagaactggttccttgaccgagagtcaaatccaggctgcagcagtacccatttatgagtcctagcacaaattcttataaatgataatgctttataagctgcttttgcatatattatctaactttaatcttcactcactgtaatttttcagtacttccttactttctggcaatacaagatgttccagattcattttgtaaattttctgacctagtcctagaatcagatatttcttcaaggagtctgggtttttgtttgtctgtttgtttgtttgttttttaattgaagaatggtgttagaaatcaagatctgggtgctaggtgtgctcattgctattggagacccattggttctatgccatttcagctggcatatcaaggaaatgtatrtgtgttcactaacctgtgggtgtacaagtctatacgtatttctatgtgtaaacatctatgtacgtaaattcatactaatgtcttcaattcaaaaccattaccacatggttaattttagcctcctcccctagcaaacctgtaattccctagtccagtagtaaaaatctggctaccacca

SEQ ID NO: 95388 - DNA, 631 bp, Homo sapiens
atctacctgtacctgggtttaaacttgggggtgggtcaggagcaaggtcaaactaaagagaggccacttgggctatggaacaaagaacagattggtggatcagggcggtggggcatggggtgggaggaccagctggatcagaggccattgccctctctagtgcaagagaaaacatagcctgagctaagctggaagggagcgaaggagacagaaacaactatctaaaaaggtaggatcatgtaaagaggtggtgtggaaagagcaagaagaggaagttgtggagaattccagcaggtctcattaactccatcctctcgactcactctttccacagcccttttccgtgaagcatccttcaaactcttctccttcagcccctgtccctttgtatctctgctttcattcaagtcttccccataccttcctctcacawccacatgcctcattgcatttcctctctgatatcctaaaacttattctcctccaaatctctgtttcatcttcattctgtccttcatctaattccatgtcttcttccagcttgacaccacatgggagttggggcacgtttcttgaggcagaggaagaactggccctacactcttgcaagggctgcttgggagaaagagtt

SEQ ID NO: 95389 - DNA, 487 bp, Homo sapiens
aacaggagagaaccaggagaagtgtatgggagagaaggagagccccagccctcctagagtaaataacagaggaacctgtccacacaggctgcggggctcggggctggccaggcggcagaccctgkggtaacttgcctatcatcacagagctagtcagtgatgaagagctgggactcaagcgagtgctgttttaagtatgtcaagggcttgctctgggcagcccaaggagagaccagcatcaggaagtccaaggggcagcccagggctgagcctgtgtgaggcagctccaggcagccaggggacgtggggctggctgcccttggagcttcacctaccgcaggaactggggctcctgaaggggatgattcaggttctggtaaccagcccccatccacccagagacaaaccaaaaacaggagtctaggggcaggagtggggctgcatcgtgcccttcagtgaggattgaactgcatggcaaggagaattc

SEQ ID NO: 95390 - DNA, 591 bp, Homo sapiens
gtgtcattcatgattctaactgattcatacatattaaatattttaatattcataatatctctgtgaggtgggctctattattatctgcattttacaggtaaggcaatcgttgttccaagagtgaaagtaatttgcccaaggtcacagctagtaagtgcaggaacaggatttgaacccacacagtctgggtctagctccagcgccctcaaatgctatatagcctgcctctcaatgtggaagtrgtagagccatgggcagtaatatgcatcaacatgaacatatccatattgtatgctgagtgacaaaaacaatatgcacaaaaatccatgtgaacgataacattaaagtcaaaaactcaaaacaatgctagatattgtgtacagaaagacagagaggagcagaaagagagaacacacaaaagaaaactccaggaaaaataaaaaactatttgcaaaaacacacaaaacttgacatttgacctcacttctagttatgggagttagaccagtggtgtgaccaccacaggaacttatatgcaaggtggtaatttttacatgaagaacatatcaatgtgttgtgtgcaattaaaat

SEQ ID NO: 95391 - DNA, 408 bp, Homo sapiens
cagtccagcattacatgaaaacaggaagaggctatcttagctccttgtcccagaagaccattgctaacaacatgctccaattaactatctcttacccattatggagttatgaataacaatggagaaacacagaacatatttttctgctacattagactaayttccaaattcagggtgttagtcgtatatatttaacatacatgttaaccttctggttttataacaacatgaatttagaaggcctgtcattttttatgtctactgaaatttctacttctggtttctattagaaattaagctatacttaaaaaaatcaagtcacaatatgagttgattagaaagaagcaagttcttataatttaaaagattatatattatgcagactcataactttagtctcaatgtaat

SEQ ID NO: 95392 - DNA, 592 bp, Homo sapiens
atgcgtgaaatgatgagcagtccgtagcactcacatgttctgaaggtgagggactcagcattcgacctcaaacaaatgaaagkccccgagcccaccgctgagccagccagggttcctcgatggggagagagtgtgcaggagagggtgagggtgccctcgcggccgctgaccaggggctcctggtgtggggaaggcatgcaggggaggtctggaggcgcccctgtgtgtccttggttgatcagatgaaagggagccagcctctgatgggtgtgaggaagggttggtggaattttcagggagggacaggaagctgttccagtggacaaggtagagatggccgaggctgagggtggtggatggaggggaccagaccccaggactgcaggaggccagccgccatcagcatagggggatggggaataaggtcagataagggatgacccgaaaaaagtaatgggatctgattgtggggaggacaaaagacaaggaagcctcaagcctcaccccaaagatggacattcaggacaggctgtcgtcatggaaactgggaaacccagtggaggaaaagtaactgactctgttgcgaacgtgc

SEQ ID NO: 95393 - DNA, 592 bp, Homo sapiens
atgcgtgaaatgatgagcagtccgtagcactcacatgttctgaaggtgagggactcagcattcgacctcaaacaaatgaaaggccccgagcccaccgctgagccagccagggttcctcgatggggagrgagtgtgcaggagagggtgagggtgccctcgcggccgctgaccaggggctcctggtgtggggaaggcatgcaggggaggtctggaggcgcccctgtgtgtccttggttgatcagatgaaagggagccagcctctgatgggtgtgaggaagggttggtggaattttcagggagggacaggaagctgttccagtggacaaggtagagatggccgaggctgagggtggtggatggaggggaccagaccccaggactgcaggaggccagccgccatcagcatagggggatggggaataaggtcagataagggatgacccgaaaaaagtaatgggatctgattgtggggaggacaaaagacaaggaagcctcaagcctcaccccaaagatggacattcaggacaggctgtcgtcatggaaactgggaaacccagtggaggaaaagtaactgactctgttgcgaacgtgc

SEQ ID NO: 95394 - DNA, 503 bp, Homo sapiens
gcctgggccccccaccccctccagcagagcctgatccactccagctgctgctccagcaactctttggcttgggccagctcagctgtgtggtggggccagggccctggtgaggggagtcagggagggagcatcagccagggcaggrgggctgaggctctggaaagctgtgctgcagcgtctggctgtaagtgggaaattctacctccctttctctgtttctagcccattagtttaagtccacctgtactgagaagcccagggagccctgtatcttaggtacaagcctctggggagcagatagagatccctggcccaggagctatactggaaagcccacagctgcagaaagtcaggttgcacctgtaaaacccccagctggttaaaaaaagataaaatttgactacctgagaggtttcatttatataacaggaacaccttcccagcctctctctgtgggctattaaagatttcagagatttcttattctaaacaattaatggaaa

SEQ ID NO: 95395 - DNA, 503 bp, Homo sapiens
gcctgggccccccaccccctccagcagagcctgatccactccagctgctgctccagcaactctttggcttgggccagctcagctgtgtggtggggccagggccctggtgaggggagtcagggagggagcatcagccagggcaggggggctgaggctctggaaagctgtgctgcagsgtctggctgtaagtgggaaattctacctccctttctctgtttctagcccattagtttaagtccacctgtactgagaagcccagggagccctgtatcttaggtacaagcctctggggagcagatagagatccctggcccaggagctatactggaaagcccacagctgcagaaagtcaggttgcacctgtaaaacccccagctggttaaaaaaagataaaatttgactacctgagaggtttcatttatataacaggaacaccttcccagcctctctctgtgggctattaaagatttcagagatttcttattctaaacaattaatggaaa

SEQ ID NO: 95396 - DNA, 594 bp, Homo sapiens
cttgccagggaaaagctgggagacagcgtatgtgggattggaaccccagaaccttttatatattctctttggagagtaagattcattcattcattcattcattcacttatacatttataaaactgggtgccaattttatgcaaaattctggtccttgccttctgagagcctgaaatctagtgggtgaactaagccagaaacacacacacaatgaactgtaacacaactttttccaaaagttttattgttctgttgtttcttatgctttgaagtatttgaaaaactcttattttaaggaagtgaaaccccttcrgctgggggatcatttagatatagttttagattgaaatgatttcctcaaagcttgttgagaagttgaagcttttcacctgggcctgggaggcattatttttaccaaaaggcaaggttaagagcaaggagtctggagccagttttcctgggttcaaatcctgtcttgcacatttgcaagtggtaacataaattctgtgttttagtttttacctctgaaaaaggataataatattatctgcttcatagtgttgttataagggttaaataagtcaatatgtgtaa

SEQ ID NO: 95397 - DNA, 502 bp, Homo sapiens
gcagaggttgcagtgagctgagattgcaccattgcactccagcctaggtgacaagagggaaactccatctcagaagaacaacaacaacaamaacaacacccaaaaaccaaacaacaacaactacaacaaaaagagagggaatgtcttcagtaatctgtgatatgagaaaggtcctaatgtttgcaacagggactactgctggcatactgatttctacatttttattagtggttaattagtggaagtggtggctggagtagcaagagtcattcatttctcctatcctaggagggcgcttatccagaagttaggaaacagaggttccccttctgccacacaactttctgtgccaggtcaccttaggcaagtcattgacctctgtggaccttcgttttctcatctgtaacatgggatgaaagcagatgtccagcctccctcacaggattattaggaagtttaggtaagataatgataaggtgccttagagactggaaaaccctga

SEQ ID NO: 95398 - DNA, 502 bp, Homo sapiens
gcagaggttgcagtgagctgagattgcaccattgcactccagcctaggtgacaagagggaaactccatctcagaagaacaacaacaacaacaacaacacccaaaaaccaaacaacaacaactacaacaaaaagagagggaatgtcttcagtaatctgtgatatgagaaaggtcctaatgtttgcaacagggactactgctggcatactgatttytacatttttattagtggttaattagtggaagtggtggctggagtagcaagagtcattcatttctcctatcctaggagggcgcttatccagaagttaggaaacagaggttccccttctgccacacaactttctgtgccaggtcaccttaggcaagtcattgacctctgtggaccttcgttttctcatctgtaacatgggatgaaagcagatgtccagcctccctcacaggattattaggaagtttaggtaagataatgataaggtgccttagagactggaaaaccctga

SEQ ID NO: 95399 - DNA, 502 bp, Homo sapiens
gcagaggttgcagtgagctgagattgcaccattgcactccagcctaggtgacaagagggaaactccatctcagaagaacaacaacaacaacaacaacacccaaaaaccaaacaacaacaactacaacaaaaagagagggaatgtcttcagtaatctgtgatatgagaaaggtcctaatgtttgcaacagggactactgctggcatactgatttctacatttttattagtggttaattagtggaagtggtggctggagtagcaagagtcattcatttctcctatcctaggagggcgcttatccagaagttaggaaacagargttccccttctgccacacaactttctgtgccaggtcaccttaggcaagtcattgacctctgtggaccttcgttttctcatctgtaacatgggatgaaagcagatgtccagcctccctcacaggattattaggaagtttaggtaagataatgataaggtgccttagagactggaaaaccctga

SEQ ID NO: 95400 - DNA, 518 bp, Homo sapiens
gtggcagaggcacaagaaaatgaacatataagtggatctgtgtagttcaagcccatgtggttcaagggtcaactgtatttacatccagcctgacactatcagcagagcaaaggccatttagtaccttcttccctttaactcagctgctttgctgagtggggttaaaaaaatctgaatcctccacaacataagaccatgcaaagagcaaaaagaatgtgtcttaatgatatcaccactcttaacccataaccatagttaagacctagcatgatttccagtacttcaaaatttcagtcatatggaagattttggaagagatgaatgtttgtatagctagcagtaaaacatattattttgaaggaaaacctttctaaattgtactgccaactccactgccttcttaaataaagtgcacagtcatgtaayttaatcttttcttgatgactcagaagtcaccattatgaacatcaattgctatatttgattataaatttattcagccagaagaaattacagac

SEQ ID NO: 95401 - DNA, 572 bp, Homo sapiens
ggtaaagtagcaagttgtatgtggcttactctgaatatgtctaaactacatgttctcaatcttttcgagtcttgcatccctttacattttttaactctattgaagctctcttaggactttttctttatataaataattatattaaaattagaaaataacacaaaaattttaaaatattcattacatattaataataaaaccatttcatgttgatataatacagaacaaatttttaaaatatatattcattacacatgaataataaaaccattacaagttgacatacgtaatactttttttttttttttgggaaacagtctgactctttcacccagctgaagtgaagtggcacratcttgacacactgcaacctccgccacctgggttcaagcaattctcctggctcagcttcccaagtagctgggattacaggcgcccaacaccatgcctggctaatttttgtgttttttttagtagagatgtggtttcgacatgttggccaggctggtctcaaaatcctgacctcaggtgatcaccttggtctcccaaagtgctgggattacaggcatgag

SEQ ID NO: 95402 - DNA, 585 bp, Homo sapiens
atgcctcggctggcatttcatcacaatcaacattaagtggtagcttgagtcattgtgaggtcacttcctagaaatcatcagcatcccatgtcccactggcaaatagctcagctctgctccttggataaccaaacctatgcctaaatcccatctgtgtgggtccatctcctggtacccttcccagcatcaattctgtatttctaggagtccaatcaggagatataaaccactcagaagtttaaactaaaatgggcatagtggctcacacctgtaatcccagcactttgggaggccaaggcgggtgatcgctttgagctcaggagtttgagaccagcctgggaaacgtggcgaaacaccgtctctacaaaaaacacaaaaattagccaggcgtggtggcacatatctgtaatcccagctactcaggaggctgaggaaggagaattgcttgagcctgggaagtgsaggtagccatgagcagagatcgtgccactgcactttagcctaggtgatcgagtgagacccagtaccaataaaaaacaaaaaaaaagtaaaaaaaaatatatatatatgtaaatttaatataaa

SEQ ID NO: 95403 - DNA, 585 bp, Homo sapiens
atgcctcggctggcatttcatcacaatcaacattaagtggtagcttgagtcattgtgaggtcacttcctagaaatcatcagcatcccatgtcccactggcaaatagctcagctctgctccttggataaccaaacctatgcctaaatcccatctgtgtgggtccatctcctggtacccttcccagcatcaattctgtatttctaggagtccaatcaggagatataaaccactcagaagtttaaactaaaatgggcatagtggctcacacctgtaatcccagcactttgggaggccaaggcgggtgatcgctttgagctcaggagtttgagaccagcctgggaaacgtggcgaaacaccgtctctacaaaaaacacaaaaattagccaggcgtggtggcacatatctgtaatcccagctactcaggaggctgaggaaggagaattgcttgagcctgggaagtgcaggtagccatgagcagagatcgtgccactgcactttagcctaggtgatcgagtgagacccagtaccaataaaaaacaaaaaaaaagtaaaaaaawatatatatatatgtaaatttaatataaa

SEQ ID NO: 95404 - DNA, 278 bp, Homo sapiens
tagtgagaccccatgccttaagaaaaagttatatgctgatttscgactatgcaggggtcagtgctcaaactccacgctgttcaagggtcaacagtgtattatatgcagaatataagagagttgaactcatcaaaacatagagtaccatggcagttgccagggaatggcggtgggggaaatgggtagattttgaccaaaggggacaaactttcagttataagatgagcaatttctgagaatctaatgtatagcatgggtgataatgtatgtattaatta

SEQ ID NO: 95405 - DNA, 599 bp, Homo sapiens
tgtgcacacgtcaaatggtggataccactactgaggttgtgcacgtgagctgaaagcagcagatatccatctatccatgtgtaatatgacataggtaatctgtaatattacatatatgtgtaacatatagtacatattttatatgtatgagccaaggaataactaaaatgatacattttgataagaatcagagttatgtataatacactgaacacatagctaaaattatacagtatcggggaattgcaaaataatttaagaggcagtagatgatgtgattacttatgcagaaaaatcctaagaaatctacaaaattaccactagaacttacragtgaatttagcaaggtcacaggatacaaggttaatgtatgaaaatccactgtatttttatatgctaacagcaaacaattgggaaatgaaattttataagcaatttcatttatgagagcatcaaaaaataaatacttaggaataaatttaacaaaagatatgtaagacctccatggtgaaaactacaaaagattgctgagagaaatcaaagggctaaacaaatggaaagatatgccatgatcatggattggaacacttaatactgtt

SEQ ID NO: 95406 - DNA, 429 bp, Homo sapiens
ttttctatgaggaaaatattttatcagcccctcttcttttgctctgccagtatgcaatgaaataaagagagtctgcttttccagctggctcaccataatcataccccgtgccccaagccatggtcacgttttagccaagtcttgtgacatcagtggggatttggccaggatggagctttatgtcttcttttcttacttggctttttcacttggaataggaagttaacttttacaagtaattgttagaccaaatktaggcaagtcgaggacagccagcttcatctgctcattgacaaatcaatgggggaaatccttccaagatgcactgcaaagctaccctgcccaactgtgattgaaggaatcagtgttcctcctccccaacgcatgccacccaaaaggtgcctgacaagaataaaggcagagggttga

SEQ ID NO: 95407 - DNA, 590 bp, Homo sapiens
atagaaacccaaactaaactttattctttctgtgaatatgttcaaggaattaggaaaaaatatgcagtcaccaacacctgtcagtgttgtagaaygaggcagtcaacacataaaaagatatctacagttatgaattactttggtggacaagagaagcaaacaaatgttatgtgaacatctccacttacaattttcagtcattcaagcgtatcccctataaatattgccacaccaaactgacctaacaagcattattctctagagagaacactgttttgatggaagagatagcaattgtttgcacaaaaatcaccttgtacaacagaaaaaaaaaggttttttaatctctgccaagtgcaaagctgttcacttgcttctaattataagtggtgtgagaaaagggaaagggacctaggtagagaaggagatgaaggagaaacattctaaataggtgttttgcttaaaattgaaggctatcctaacataaataagaaattggagtaaaagtgacatttcttaaatatctatacattttcatgtcctttacccgccccatacacacaagcacgtataaatacttatttgaattc

SEQ ID NO: 95408 - DNA, 529 bp, Homo sapiens
ttcttttcttttcttttctcttttcttttcttctcttttttttttgagacagagtctcactctgtctcccaggctggagtgcagtgttgcgatctcagctcactgcagcctccacctcccgggttcaagctattctcctgcctcagcctcccaagtagctgggactacaggcatgtgccaccacacctggctaatttttgtatttttagtagagatggggtttyaccacattggccaggcaggtgtcaaacttctgacctcaggtgatccacccatctcagcctcccgaagtgctgggattacaagtgtgagccaccatggccagccacatttttctatgagaacaaagtcatgtgaaaagagtaaagaatctccacatgtgaaaatcaccattttggctaaagtttagaagtattaataattaatttcatagcttaggcaaaatgtccattgttccaaaagtcatcatcaaatattcacactagatacgaatttcagtaattaatcctatttgtaaattaaaaaccaa

SEQ ID NO: 95409 - DNA, 529 bp, Homo sapiens
ttcttttcttttcttttctcttttcttttcttctcttttttttttgagacagagtctcactctgtctcccaggctggagtgcagtgttgcgatctcagctcactgcagcctccacctcccgggttcaagctattctcctgcctcagcctcccaagtagctgggactacaggcatgtgccaccacacctggctaatttttgtatttttagtagagatggggttttaccacattggccaggcaggtgtcaaacttctgacctcaggtgatccacccatctcagcctcccgaagtgctgggattacaagtgtgagccaccatggccagccacatttttctatgagaacaaagtcatgtgaaaagagtaaagaatctccacatgygaaaatcaccattttggctaaagtttagaagtattaataattaatttcatagcttaggcaaaatgtccattgttccaaaagtcatcatcaaatattcacactagatacgaatttcagtaattaatcctatttgtaaattaaaaaccaa

SEQ ID NO: 95410 - DNA, 593 bp, Homo sapiens
tggtgtgtatgtgccacattttctttatccagtctatcattgatgggcatttggattggttccaagtcttggctattgtatatagtgctgcaaacagaaaaccaaacaccatttgttctcactcataagtgggagttaaacagtgagaacacatggacacagggagaggaacaacacactccagggcctgtcagggggtcaggggcaaggggagggagataattaggacaaatacctaatgcatgcagggcttaaaacctagatgacaggttgataggtacagcaaaccaccatggcacatgtatacctatgtaacaaacctgcacgttctgcacatgtatcccagaacttaaagtaaatttttaaaaaaaaattatgaactgtgaacattttgtgtgtgtgtgtgtgtgtgtgtgtgtttgacaatttttgcatttttacaattccccaattataagagaaccatctgtartagggtgaatactggccacccaaagacattacatcctaacccctggaacctataaatgctaccttacaaagaaaaaggctttttgtagatttgataaaatgaaggatcctagatagataga

SEQ ID NO: 95411 - DNA, 541 bp, Homo sapiens
tcaacggaacccaaagatttaggtgtagaaatcagatacatgtgatgctaatttcaaatacacttacattcaaatcaagagtccttatcatgagataagctggatgactggaattcatttctaagactggctgttttatacaagcaccccctgatagtatttaagggttacctgcaaagtcttcagctcagaaacatctcccctcccttctatgaaactgtaatcaatctcttccttcctgagagctaagggactactactgttatacctgaaggcaaggaatctcaaaaaaggcaatataaaaattgttatggtttacagatcattaactccttcttggaaactggtttgtttgacagttaccctcataaatgggaagatgaccgtagcggctttagaytgggcttcacatcaagccaggccaagtgcctcactcaagaggagacaagatttgggtacatggggccaagcacatggtgagcacaggcctaggtgaggggctggtgggactctcggcaaaggacaaaggaacaagcgctgc

SEQ ID NO: 95412 - DNA, 600 bp, Homo sapiens
caatatgtctaattgtgatgttaactcaatccacaagaagccttgaatatatttgagccttataaaataaaaatgttttgatatctgaagttatagacatatttttatggcagaaactctgataagatgatcaataaaacttttaagcataaaaacatattaaataaaattctctgataaaagtggatgaaggctaggcatggtggctcacaccagtaattccagcactttgggaggctgacatgggatgattgcttgagcccaggagtttgagaccagcctgggcaacatggygaaaccttgtctctacaaaaaatgcaaaaattagcctggtgtggtggcaaacacctgtagtttcaagtactcgggagtctgaggcaggaggatagcttgagcctgggatgttgaggctacactgagccatgattgcaccattgcactccagcgtgggtgacagagacactgtcttaaaaaaaaaaaaattaaatgttgaccaaaaatatgcaaaagaatgtatgctttttaaaaattattttaaaaaattattttaggaggtaggcaataaaaaatgtttgagtctataggtttccttatgtttgc

SEQ ID NO: 95413 - DNA, 376 bp, Homo sapiens
agggctcgcatctgacatggtcacgagagctggagttagaagtgcctgcctctgtagacaacaccatgtggcccctactttctcacagttctttttctgctgtggctttaaaccactcactccttttatttatgagatctgcttcgcccatacagccctagggttaggcgctattaagtatctgaatagtactttgtaaaatgtgaagtgtttgatattcgttgatggtgttattacgttcaagattatatacttatttatcaacagagttggatctagagctcaggtctcctracactcagttactatttctattgtaccacgctatacatacaaacaggaaaacaagacaggaatggttatagaacgggaattc

SEQ ID NO: 95414 - DNA, 648 bp, Homo sapiens
atagacttcgttgaaaagcccttgatgttgtcccacagttctgagagttccagtgtgtgtagcctctgttttttgtccccccctccccaccccgaatttaggtgcagctgacccacagttctctgtgacactcctgaacttggtctccctttttagaagcatcatatggactccttagggagtgtgaaacattatttctgttctgcatgttcctgtttgattcccatattgactttccagcatttccagttcctctttttgttttagtgtttctcagttagctggcctgctacatatgcctagtcttggcgagccttccaaactttaggcagagcttttaacttcttcagggaatattccgtatatccttctgcggtatttccaagatagtgagtcattaccgggaccctttttactttctgaagtgtcataaaaatctttcatatgctctattttatgtatttggtgtaacacatccaagttttgattttggagaggccagaatgtgaatttcgtcatcatgctagatgtcttccaagtggagcttttgttgagcatgttatggacrctgaatacaagttggtaatgtttagagtccgatcaaaacgtggctgtgtgctatgttttctttatacatgggggatatca

SEQ ID NO: 95415 - DNA, 553 bp, Homo sapiens
aaaaagagtgtttcaaacctgctctgtgaaagggaatgttcaattctgtgacttgaatgcaatcatcacaaagaagtttctgagmatgctgctgtctgctttttatatgtaatcccgtttccaacgaaatcctcaaatctagccaaatatccacttgcagattccacaaaaagagtgtttcaaaactgttctgtctaaagaaatgttcaactgtgttagttgaggacacacatcagaaactagtttctgggaatgcttctgtctagttgttatgggaagatatttccttttccaacgtaggcctgaaagcgctccaaatgtccacttacacacactacaaaaagagtgtttcaaacctgctctaccaaagggaatgttctactctgtgacttgaatgcaaacatcccaaagaagtttctgagaatgcttctgtctagattttacctgaagacaatcccgtttcccacgaaatcctcaaagctatgcaaatatcctcttgcagattctacaaaaagagtgtttcgaaagtgctctatgaaaagaaaggttcaac

SEQ ID NO: 95416 - DNA, 434 bp, Homo sapiens
gtttcaaacctgctctgtgaaagggaatgttcaattctgtgacttgaatgcaatcatcacaaagaagtttctgagcatgctgctgtctgctttttatatgtaatcccrtttccaacgaaatcctcaaatctagccaaatatccacttgcagattccacaaaaagagtgtttcaaaactgttctgtctaaagaaatgttcaactgtgttagttgaggacacacatcagaaactagtttctgggaatgcttctgtctagttgttatgggaagatatttccttttccaacgtaggcctgaaagcgctccaaatgtccacttacacacactacaaaaagagtgtttcaaacctgctctaccaaagggaatgttctactctgtgacttgaatgcaaacatcccaaagaagtttctgagaatgcttctgtctagatttta

SEQ ID NO: 95417 - DNA, 553 bp, Homo sapiens
aaaaagagtgtttcaaacctgctctgtgaaagggaatgttcaattctgtgacttgaatgcaatcatcacaaagaagtttctgagcatgctgctgtctgctttttatatgtaatcccgtttccaacgaaatcctcaaatctagccaaatakccacttgcagattccacaaaaagagtgtttcaaaactgttctgtctaaagaaatgttcaactgtgttagttgaggacacacatcagaaactagtttctgggaatgcttctgtctagttgttatgggaagatatttccttttccaacgtaggcctgaaagcgctccaaatgtccacttacacacactacaaaaagagtgtttcaaacctgctctaccaaagggaatgttctactctgtgacttgaatgcaaacatcccaaagaagtttctgagaatgcttctgtctagattttacctgaagacaatcccgtttcccacgaaatcctcaaagctatgcaaatatcctcttgcagattctacaaaaagagtgtttcgaaagtgctctatgaaaagaaaggttcaac

SEQ ID NO: 95418 - DNA, 553 bp, Homo sapiens
aaaaagagtgtttcaaacctgctctgtgaaagggaatgttcaattctgtgacttgaatgcaatcatcacaaagaagtttctgagcatgctgctgtctgctttttatatgtaatcccgtttccaacgaaatcctcaaatctagccaaatatccacttgcagattccacaaaaagagtgtttcaaaactgttctgtctaaagaaatgttcaactgtgttagttgaggacacacatcagaaactagtttctgrgaatgcttctgtctagttgttatgggaagatatttccttttccaacgtaggcctgaaagcgctccaaatgtccacttacacacactacaaaaagagtgtttcaaacctgctctaccaaagggaatgttctactctgtgacttgaatgcaaacatcccaaagaagtttctgagaatgcttctgtctagattttacctgaagacaatcccgtttcccacgaaatcctcaaagctatgcaaatatcctcttgcagattctacaaaaagagtgtttcgaaagtgctctatgaaaagaaaggttcaac

SEQ ID NO: 95419 - DNA, 629 bp, Homo sapiens
gagtgattccaacctgctctatgatagggatgtcaactctgtgtcctgaatacaaacatcacaaagatgtttctcagaacgctgcagtctgcaatttgtatgaattcccgcttccaacgaaatcctccaaactagccaaatatccacttgcagattccacaaaaagagcgtttcaaaacttctctatgaaaagaaaggttctactcctttagttgaggacacacatcacgagtaagtttctgagaatgcttctgtctagtttttatgggaagatatttccttgttcaccttaggccggaaagygctccaaatgtccacttacacacactacaaaaagagtgtttcaaacctgctctgtgaaagggaatgttcaattctgtgacttgaatgcaatcatcacaaagaagtttctgagaatgctgctgtctgctttttatatgtaatcccgtttccaacgaaatcctcaaatctagccaaatatccacttgcagattccacaaaaagagtgtttcaaaactgttctgtctaaagaaatgttcaactgtgttagttgaggacacacatcagaaactagtttctgagaatgcttctgtctagttgttatgggaagatatttccttttccaacgt

SEQ ID NO: 95420 - DNA, 606 bp, Homo sapiens
ggataaatatctttgtcctgaaccagatacagcttatgatagggcatcaccctgctccagctgggatgatgtatggtggagtaccaaatttcatggttggacaataaacatggggtgggtaacactgagctggagacccttgaagaataaactacatctgtccaagggctccccaccaaataactgccagaatatagaatgcagtcctacactcatcaccattgacaatccagccgttctagaccaagaaccaaaagtagtgtcttgagtatatggttaggggcagacatcacaggaaaagcccccatagagwgatttgttctcaaactgattaagaacttgacctcccatttgcctgggactactccaaccccagtccctaacacacactttaatccatcaaataatgaccctaaaagagtagaaataattgaagtaaaggatttatggcaaaccttagaaactgagacagggaacagagatgtgaatgcctgggtcaaatggctcaaatttttggtataaacactgaacaagagcaactgctacacgtgtgctgtgggaggacctcaggcacaggtgtttctgtttcccctaggctgggtattg

SEQ ID NO: 95421 - DNA, 325 bp, Homo sapiens
tgcctgcggctcaccttctgctgtgaagcccggttcctaagaggccatagaccagtaccagtactggtgccagtctgtggmccaagggttggggacccctgctcttatgggcttgcttcctaggtcataacctggtcagagaagacagttgtacttctggctttctacctcccagaatgctgggaacccacaccttctacactcctttcttccccttggcaggtcccaggtggttcaagctttgacacttcttgatagtcattgacgttttcttgagttgtccacagtgtagctgcctgggtcatagaccactgaccttgacttc

SEQ ID NO: 95422 - DNA, 648 bp, Homo sapiens
tttattattcaaattaagcagaatttataaactcattggcagttacttgtttgacttgacttttctttctgtgaggataagcctttctgttggaagggaccacctagatcagagtgatgtccacctctaccagctacagaggtacttagcttctgaatgaacacttggctcttagtatgttattaaaggaaaattcaactggaattgttggttatatttctctgtcttatcttccaggaatctttatttgtttgttttttaagagacagggtctggctttgttgcccaggctggagtactgtggcacgatcatagcccactgcagctttgaattcctggactcccacctcagcctccygaaaagctgagaccacaggcatgtgccactgcacctgtccaatttttaattttttttttttgtaaggaagaagtcttgctgtattgcctaggctgaccttgaactcctgggctaaagcgatcctcctgccttggcctcctaaagtgttaggattacaggtgggagccaccctgcctagacttatcttccaagaatcttggagggcaagcattgagttttgaaccactctattttcttccttgcctcgttgtgcaaagcacggtgtcttgaactttggagttctgtaaata

SEQ ID NO: 95423 - DNA, 648 bp, Homo sapiens
tttattattcaaattaagcagaatttataaactcattggcagttacttgtttgacttgacttttctttctgtgaggataagcctttctgttggaagggaccacctagatcagagtgatgtccacctctaccagctacagaggtacttagcttctgaatgaacacttggctcttagtatgttattaaaggaaaattcaactggaattgttggttatatttctctgtcttatcttccaggaatctttatttgtttgttttttaagagacagggtctggctttgttgcccaggctggagtactgtggcacgatcatagcccactgcagctttgaattcctggactcccacctcagcctcccgaaaagctgagaccacaggcatgtgccactgcacctgtccaatttttaattttttttttttgtaaggaagaagtcttgctgtattgcctaggctgaccttgaactcctgggctaaagcgatcctcctgccttggcctcctaaagtgttaggattacaggtgggagccaccctgcctagacttatcttccaagaatcttggagggcaagcattgagttttgaacyactctattttcttccttgcctcgttgtgcaaagcacggtgtcttgaactttggagttctgtaaata

SEQ ID NO: 95424 - DNA, 594 bp, Homo sapiens
tctaggtggggttttgggaaatatacatatttttaaattggtatgccacattagctgttttgtacctttctcttcttgcatgcacacgtgaggctcagaagggcagtaaccatcctgtgaccctgaagcaayaggcgcgtggatgaaggtccacaccctaaagatggcagagcaaaatgatgtgaagagcttgtgttggaactggcttttaccagcttacaagaattgaccaataacttttcaaaaattttgcatgtctcttgattagcacagccatgattaaaattgccttatataaacttacaatgaagtaagttatattaaaacaaagataatagtgaaaacttttttttttaccatgttactactatctaatgcttgtgaggttatttatgtgtgtaatatttatggtggaaatatcttatactgcaatgcaattgagtgtttcttcccagctctgcacttagatgtgtcacattgatagctggaaatcaaaccatggtggaagtacgtgcactatggaaattgacaaacactatggaaattgacaaacactatggaaattgacaaaacataagtactgtcccttcagaa

SEQ ID NO: 95425 - DNA, 557 bp, Homo sapiens
caatgcattgtaaactgaagcctctaggtggggttttgggaaatatacatatttttaaattggtatgccacattagctgttttgtacctttctcttcttgcatgcacacgtgaggctcagaagggcagtaaccatcctgtgaccctgaagcaataggcgcrtggatgaaggtccacaccctaaagatggcagagcaaaatgatgtgaagagcttgtgttggaactggcttttaccagcttacaagaattgaccaataacttttcaaaaattttgcatgtctcttgattagcacagccatgattaaaattgccttatataaacttacaatgaagtaagttatattaaaacaaagataatagtgaaaacttttttttttaccatgttactactatctaatgcttgtgaggttatttatgtgtgtaatatttatggtggaaatatcttatactgcaatgcaattgagtgtttcttcccagctctgcacttagatgtgtcacattgatagctggaaatcaaaccatggtggaagtacgtgcactatggaaattgacaaaca

SEQ ID NO: 95426 - DNA, 608 bp, Homo sapiens
gaaattcaacttacaagaggaggagacatttgcatttgcctgatctgcacattttctccatctaggaaaactacatagagagccaaatcatcagaaggttgcatggattacgagagatctgagcaaggggccttggtggcagatttgaatgtttaatatcatcargcagggatagttggatgcatctatgtctgcagagaaatcaaacaaatcatgtgttcctatgcacttctaggataccaaaagagtgcttagatgggctttgccaaaatacatttctcccatactcccttttctatgttctgtgatcacatttccctttggtctaatacattctttctctggataagttaatacaataaaatcagttaactcccactaggtcttatttttacctaggaaccagttcatcccagtaagggtaatgtacatatttctgatttcattctttatgtgtagaataattcacttagctattagaaagtagattcattttcttcatttcaaattctgtagcctcaaatatctagaataatgttcttcaaataaatatcttatgaaatgtttatcaaatgaatgaatgaatgactggatttacttttgtctcc

SEQ ID NO: 95427 - DNA, 506 bp, Homo sapiens
ttctaaagtcacgtgaatactccctttctttgattatatagtctatcattatgtagacctgccattgcttaagcacataaaaacctgaggacaaaaaaggcactgttgctgccatgggagtttataatcgggttaacaagaaggaaacaacaacaaaaaaaaattaacataaaaatcacttaaaaatatttgtaggcatatatgacatggaaaaaaatcaagaatgaacaggaagtctatgtttggctaattcccttaaygtcaaggacaacataatccctttgctacccaacaggcccctaaggtggaatcttaaaaaatcaatcaataaataaaaggaaaccaaaactattgaagtattgctacacattttcaaaaacacatgagaaacacaatattaaagtacttatcctgctgtctccttttttattgtaataaaagtaacagaaaggaaaactcaaatactttatgtttctagtccatgacattcttgttacttttacatt

SEQ ID NO: 95428 - DNA, 506 bp, Homo sapiens
ttctaaagtcacgtgaatactccctttctttgattatatagtctatcattatgtagacctgccattgcttaagcacataaaaacctgaggacaaaaaaggcactgttgctgccatgggagtttataatcgggttaacaagaaggaaacaacaacaaaaaaaaattaacataaaaatcacttaaaaatatttgtaggcatatatgacatggaaaaaaatcaagaatgaacaggaagtctatgtttggctaattcccttaacgtcaaggacaacataatccctttgctacccaacaggcccctaaggtggaatcttaaaaaatcaatyaataaataaaaggaaaccaaaactattgaagtattgctacacattttcaaaaacacatgagaaacacaatattaaagtacttatcctgctgtctccttttttattgtaataaaagtaacagaaaggaaaactcaaatactttatgtttctagtccatgacattcttgttacttttacatt

SEQ ID NO: 95429 - DNA, 506 bp, Homo sapiens
ttctaaagtcacgtgaatactccctttctttgattatatagtctatcattatgtagacctgccattgcttaagcacataaaaacctgaggacaaaaaaggcactgttgctgccatgggagtttataatcgggttaacaagaaggaaacaacaacaaaaaaaaattaacataaaaatcacttaaaaatatttgtaggcatatatgacatggaaaaaaatcaagaatgaacaggaagtctatgtttggctaattcccttaacgtcaaggacaacataatccctttgctacccaacaggcccctaaggtggaatcttaaaaaatcaatcaataaataaaaggaaaccaaaactattgaagtattrctacacattttcaaaaacacatgagaaacacaatattaaagtacttatcctgctgtctccttttttattgtaataaaagtaacagaaaggaaaactcaaatactttatgtttctagtccatgacattcttgttacttttacatt

SEQ ID NO: 95430 - DNA, 408 bp, Homo sapiens
gttgacctgacagggctgtttctatcctaaatccaggggtagcttgagatgatctaatgagagctccccarctgaggccatatttctcaaagtatgttacggtggtcagaatcacctggggcacatgttaaaaatgcagattactgggcccatccagagcattagaataagagcatctgagaatggggcccaggatttggcttctgaaaaacaccccttatgatagctctgatgctctttgacttccctgtaaaattggtatcttgaggaaacgtgccctatcgaatactgcgctgatctaaacatggacacaactttggatggtgagcatatcggtttgtcaaagacccatcaccaaccaaaatgatgagcaacaaccaagtcatgttcaggaaaaaaaaaaaaaaa

SEQ ID NO: 95431 - DNA, 408 bp, Homo sapiens
gttgacctgacagggctgtttctatcctaaatccaggggtagcttgagatgatctaatgagagctccccagctgaggccatatttctcaaagtatgttacrgtggtcagaatcacctggggcacatgttaaaaatgcagattactgggcccatccagagcattagaataagagcatctgagaatggggcccaggatttggcttctgaaaaacaccccttatgatagctctgatgctctttgacttccctgtaaaattggtatcttgaggaaacgtgccctatcgaatactgcgctgatctaaacatggacacaactttggatggtgagcatatcggtttgtcaaagacccatcaccaaccaaaatgatgagcaacaaccaagtcatgttcaggaaaaaaaaaaaaaaa

SEQ ID NO: 95432 - DNA, 465 bp, Homo sapiens
gaattctcacatttcaaacatacactaaatatcaaataaaaatttatttttacaagaatttaggggaactaccacatagctataaatgtaatatatatgttaactaagtatcatagataaaaaccatgctcccttcagcagcacgtgtaataatagatacaaagattgaaaggtaaaagatttaggatgaaaagaatcctctcttaaaaaggaaaacaaaattatatgtatgtgtatacaacagttataatacccatcacacagctttatagaaacagcatctattcaaaaataccagtatttccaaaatatttaaaataatatttaaagtaataataatatttaaataaataaayatatttaataaatatttcagtaaataaaataatatttaaataattctatacccatgtttttcaaaataaaccaataaaatagatagtatatattagacgtgttagtata

SEQ ID NO: 95433 - DNA, 519 bp, Homo sapiens
cagtaaatttaatgttttctttagagaaaaagacagtgagagacaggcagtgtccatttgaactagcaaatagtctgaccagaygacgagtctactagctcttctagtagctgctgcaaccagcaacttagtgggggcaacatcctcagccatgccacgtgggctttgcctgaagacaatagataacagccaagaggcagacaaagaaaatatgtgtaaaaacaatggtaaataaagtaaataaaattaacgaattagataaatgaataaaaataaagagcaaaagcaaatgtcaacatgcatcaattccccatccaaattacatacctcatgtaatttttgtaaacattttgtaagatttaccttcttgatttatcagcaatcattctggtttgcaataaaataatacctgtaagtggtttaattggaactgctgccactgcttgagatttatgaattggaatattacatgataatccacaggatcaccttgctttcctattgctgaagtttgcctca

SEQ ID NO: 95434 - DNA, 594 bp, Homo sapiens
aattataaatcgaggaaatgtaaaatatgtattattgtcacaatggatgaaaatatcccaaaagagatcatttggttgtgagttaggttttaaagtatacgcaatattagaaatgaataattgaagatagtttcaataattttraaaactactgcccaatggtaaaagatataaaagattatgtaatttacaaggcagatgtcctatatctcttgaattattttagactgggacacaaaaagcccaggcagtcaagatgatattaaatgattcaaaaatagcattatttcaattaaacaaataaatgcccacaagacctatacaacaagctgaaaaagttaggtgcttatcacatcaggattctgtactaccttcctttaggaaaaaaatattattgaaatactaaattgtattgaaacattgtttttaaaagaattaggcaatgcatggaacatacttttgagtctttttccctgagtttcaaaacacaattcagttgtttcctttccaagaagtcaaacaaatattgttatttacaaactaggcaaatagcatcaagagaagaaaatatatttctttttactttttctgcca

SEQ ID NO: 95435 - DNA, 608 bp, Homo sapiens
aaaaatggaaaacaggccctttcctcttaggcactacattctctgggacctttttcaagaccatgtgaggtcagcattactagccccattaacaaatgagagacaaagaatgctaaatatcctgatgtaggcagcaaagcccctacctattccatctggcccagttgcctctataggyttactttgtatcactctctttctcattcattcagctccagccacactggccaccctgctgctcctcaaatgtaccaggcacatttccatggggcctttacactaacagcttcatctgcctgtggtgctcttccctgaagatctacagggttcattgtttttctttaggtgtcttcaaatgtcaccagttcctctctccctcttgatattcctctactccattccctgctttacttctctttaaaacatttctcaccatcatattctacatcacccatctattccaatcctgcccccaacaacaaaataacctgatgtaagagcttgcatgtaggcagtgtattttgcaagtaatgccaaggaacaaaaatgggaaaatgggaagagtgaaaagagaacaaaagcaaagctaatctagcagtgcattatca

SEQ ID NO: 95436 - DNA, 608 bp, Homo sapiens
aaaaatggaaaacaggccctttcctcttaggcactacattctctgggacctttttcaagaccatgtgaggtcagcattactagccccattaacaaatgagagacaaagaatgctaaatatcctgatgtaggcagcaaagcccctacctattccatctggcccagttgcctctataggcttactttgtatcactctctttctcattcattcagctccagccacactggccaccctgctgctcctcaaatgtaccaggcacatttccatggggcctttacactaacagcttcatctgcctgtggtgctcttccctgaagatctacagggttcattgtttttctttaggtgtcttcaaatgtcaccagttcctctctccctcttgatattcctctactccattccctgctttacttctctttaaaacatttctcaccatcatattctacatcacccatctattccaatcctgcccccaacaacaaaataacctgatgtaagagcttgcatgtaggcartgtattttgcaagtaatgccaaggaacaaaaatgggaaaatgggaagagtgaaaagagaacaaaagcaaagctaatctagcagtgcattatca

SEQ ID NO: 95437 - DNA, 609 bp, Homo sapiens
agcagaataagtttgaattctggaagcttctaggtccccttgcctttaaacattatacgcttcagagtccttacattttcaattgacagagaaacagaaaatcattctaacgtttaccgtagcttttccctctaagggcttcttgcaaagaatttgcatgttgcaattatacctcaaattagagatttgagtttccctgcctggtcaattataagacccttggccttaccagagaatgaatacacgctctcaactttgcaaaggtctgagtcaacagcttgttgggctttgaagaacctcagccgtttttgcggctggagctttttctccttttcgtgtttcaggaccactgctggttttcattcatcttcattcagtgggtttcatgtgacattttggggctggaaacataatgtgtcagaagatagctgcagcttcctactgcgttattgtttcctttgtcagaaggtgagtgagcacaaacattttccaattgctctgattttcagacaggtttagatctactgagccatcactgatgcayacgcctataccatttagaaacacttgatatagatttcagaagagatttctaagttcagttctata

SEQ ID NO: 95438 - DNA, 538 bp, Homo sapiens
cttatgccatttaggagtatctctttatactattgttctgtcttaattattattttgcacattgttcaaggtgtgatgggtaaagtgggtagttttctattatcttgacccagcctcacacttacgtaagtcctgggtgtctagaccttgagaatggagctctctcagtgttcctgcccatcctcatggtagccaaatgtttcccttatttctgtaggarggtgggggagctgggtgggagagaatactgttatttccccctgtgcattgtatcatctcaaaatcctgggtcctagcagtgttttttcctctctctcaaggaatatagattttgttttcattcctcttttggttccaatttacccctgcctatttctattggcaggggttttcttagcacttctgcagtagtacactgctattgcttattactcagtacaaaccttctggttggaacaggcagcttttgcttctattccttcctcctttccttttcctgggactggaagtagttgagtttttaactcctcctccagaa

SEQ ID NO: 95439 - DNA, 534 bp, Homo sapiens
agtcggctttatgtttgcttctgccaggcattctagatgccccatgtctaggatctctttaggcaggagagagggtgatggtgtaggaggacccatttcttggcttgcagattccaataatatgtcacagatttaaaccccaaactttgatgaaatgcaggtctagggttttaaaatataatgagagttaaatacgtattttcttcatccagagatggggcaagcttcctcatctgctcgttcatgggtgatttatattttccccactccatccttttcctaaggattttagggacaatggctttttgcagagtactcagttccagctcccaccttgagcccttacctcctgcccctaaacatccagacctcaagttagagagagtaacattttgcccacacctaggaggaccacatccttttggtttccttarggatgcaggaatttcttagtgcttaaaccagtaagtcctgggcaaacgagtatgactgggtggcctacaacccaacccccatattcagggcaggagaaca

SEQ ID NO: 95440 - DNA, 534 bp, Homo sapiens
agtcggctttatgtttgcttctgccaggcattctagatgccccatgtctaggatctctttaggcaggagagagggtgatggtgtaggaggacccatttcttggcttgcagattccaataatatgtcacagatttaaaccccaaactttgatgaaatgcaggtctagggttttaaaatataatgagagttaaatacgtattttcttcatccagagatggggcaagcttcctcatctgctcgttcatgggtgatttatattttccccactccatccttttcctaaggattttagggacaatggctttttgcagagtactcagttccagctcccaccttgagcccttacctcctgcccctaaacatccagacctcaagttagagagagtaacattttgcccacacctaggaggaccacatccttttggtttccttaaggatgcaggaatttcttagtgcttaaaccagtaagtcctgggcaaacgagtatgactgggtggcctacaacccarcccccatattcagggcaggagaaca

SEQ ID NO: 95441 - DNA, 500 bp, Homo sapiens
tgagtaccttgtgctgcctataggacaactgattttgttcaaaagcacctctttttaaatatgacaatgagacatgaaaaagctgtctatttatttatggccaaaaactaataatcaaaaattttttgaatgattaaatttgaaaaacaattctatttttagcagctataaaatcagaatacatgacaaattctaggggagagtgcttgctcatataaaatagtcaattatctctccactgagatattcaacagttttatcatttacttcaacaatttaattgcaaaggataaatacatgtttattgcttttacaagtacatttataacatagttttactttgccagtcagtgaaagtcacaaagaaatattaattttgcagttttttctgacctagaattcctattattgaaaattagtgcaaaatcagagcatatttaatattrtttcaggaaatgctgacattttaagaaatcaccttcataacttaaagaggaagc

SEQ ID NO: 95442 - DNA, 569 bp, Homo sapiens
ataaacgctccaaaagaagatgacgtaagtgtttattctaatggatatccttattgagaataaatatgcattttgactgcattttctttatcaaataaaattttggattaaaaaaataaaattactgacaggctctatgttatgttaccagtagaatagtgtctctctaagaatgcctgtgagctagcgccgggtgtattgttcagcgttaaacagcatcacagaatattttaacttttggatgattctttcccttaaggaagaatgtttagtaactttttaggcaccatggattgggtactggttttctgtttcccataaaattaccaacagaacaggagacagtagcctagtaaaacaagaagtgagcaggcagagtggagagtcagggaaactaagttcaaaacccagttcttccacttcctgcctttgcaacctgggacaagtcatttagcttctcagagcctcagttttacctcggggctacattcaggsacctgctacatattaggtgtgcaataaagtcaaacaaagggagaagtgattcatattcactatttttcagtcaa

SEQ ID NO: 95443 - DNA, 641 bp, Homo sapiens
aattaaattttaaaaaagttttctttgatttccagagcgtttttgcgggaggaatatgttaaaacaaactcaagatacgaaatgagacttttgaagtgcctttgatttctgggtacggaaattcttttgataaagcgtgtgtacgttaagatttaggatgactttttttttcttttttgtaatacaggtctaatggaaatgacattctttatgaattagaacccaattatgttttaaagtttataataagtcaaatgattctctcagtccctatgtccgtattagtgaaattctatctccatattagcgaaatttgcatagatacacacctttttctttttgtcttttagtcttgctgcagtgtatcggacgagyttaaccagatatccagcactagccttctaacagtttctaactcagtggtgacattttttagttcttaactcccccaatccttcttagcctaacaaacctcttaattaaggtccatgaaagaccataaaccaacctgattatgcctttagcaaggctgtgttcacttaatctctaatcccatatcataaaagtccgctagtcactcctgacctccaggaacccacctaaccagggtggacactataagaaaacatgtgttttaatgg

SEQ ID NO: 95444 - DNA, 576 bp, Homo sapiens
ttggtttcctaaaaatcttgaaaactattcatatctactcactcattcattctagtagtcactcagatattaagcacctagtacacatgacataccatattaatcactaaggatagagataaacataaagctcttgccctcaagggaaggtacacgaaacgtaaagttgaaaatggacagataaacagtatttacaattatgcatcaagatagatgtatagggatagagtatttggagtgcccawgaatgtaagaaaccctaacccagaaaatgagacaaagagccagtggcactcagggaaagaatgcctggaggaaggctgcctctgaatcgagagttagaagataagtagacattttcaggccaagatagtagaagggaatggggtgggtccagggagcagcatacataaagacagagaaatgagtacaggctcattacgtgcactgaactgtaaataggctgttcttgaaagagagaaacaaggagtgttcctgagagcagagaggaacaagtcacgttactaagcttggtcataatcctgaaaacacttaaacaggggaaaggcatgacca

SEQ ID NO: 95445 - DNA, 593 bp, Homo sapiens
tttgacaacaacatttaagatattaaattttcagttttatgttctactcttctttcaaaatattaaatattaagattaaaaacattcataaatcttccttgtaggaatcatgatgtcacatgtctatctgttacctatcagatataaaatgtgaatctaaggtcttgtgcaatctttcttggaccagaaaacatcatttgtgcatatgtgatatattttaaggtggtaaatgacctaagggcttctgttgatgtatggattttagaatttccatctggttgtttcatttcaatccaaatagacatgaracatcacaagcaattgaaaattatccataataagactgaaagtacattctagattatgattatgtatttgccttttagaaacatttttcatatatagaacagagttagtcccctctccatccctttcaggaagattaagaataaatgtttgttgatatgtggagtgtttacaatgagccttggcatttggctaagttctgggcatacattctatcatctacctgttgtacaaatttaagggatggtgctatcgtcatccccatcttacagatgaggaaacaggct

SEQ ID NO: 95446 - DNA, 593 bp, Homo sapiens
tttgacaacaacatttaagatattaaattttcagttttatgttctactcttctttcaaaatattaaatattaagattaaaaacattcataaatcttccttgtaggaatcatgatgtcacatgtctatctgttacctatcagatataaaatgtgaatctaaggtcttgtgcaatctttcttggaccagaaaacatcatttgtgcatatgtgatatattttaaggtggtaaatgacctaagggcttctgttgatgtatggattttagaatttccatctggttgtttcatttcaatccaaatagacatgagacatcacaagcaattgaaaattatccataataagactgaaagtacattctagattatgattatgtatttgccttttagaaacatttttcatatatagaacagagttagtcccctctccatccctttcaggaagattaagaataaatgtttgttgatatgtggagtgtttacaatgagccttggcatttggctaagttctgggcatacattcyatcatctacctgttgtacaaatttaagggatggtgctatcgtcatccccatcttacagatgaggaaacaggct

SEQ ID NO: 95447 - DNA, 467 bp, Homo sapiens
aagccaggaatgaccagtccccagctttggtgctagtagaggcagctcctacaattgctctcagagcagctccagccaccatccatcccagaggcatgggcggggggactcacatccaacaacatctcaaatgtgattaagtcagcagtatgtscaatgtgttcactagatttgcatcatggctccagagcctggccaggcattcatctggaacaaaccttgcagaactgggcagccaactaattaattgttgcatcaataaagccagggtttgactatctcatgatgaattaccttgtttaaaagaacttaacagctgtattaaataaagaaaacaatggagatcgatactagagaatttccttagccaaagagtcagcatttctcattaactagaggtcagtggtgagaagagagtttattcgcagagcagagatgatgtttctctctggcaaggctatacttag

SEQ ID NO: 95448 - DNA, 467 bp, Homo sapiens
aagccaggaatgaccagtccccagctttggtgctagtagaggcagctcctacaattgctctcagagcagctccagccaccatccatcccagaggcatgggcggggggactcacatccaacaacatctcaaatgtgattaagtcagcagtatgtccaatgtgttcactagatttgcatcatggctccagagcctggccaggcattcatctggaacaaaccttgcagaactgggcagccaactaattaattgttgcatcaataaarccagggtttgactatctcatgatgaattaccttgtttaaaagaacttaacagctgtattaaataaagaaaacaatggagatcgatactagagaatttccttagccaaagagtcagcatttctcattaactagaggtcagtggtgagaagagagtttattcgcagagcagagatgatgtttctctctggcaaggctatacttag

SEQ ID NO: 95449 - DNA, 505 bp, Homo sapiens
tattttcctctaaaagttttgtagtttttccttttacgtctagatctatagtctatgttgagttcatttttgcattaagtgtgaggtgttgatcaaagttctattttttttkgaatgtggatgtccaattcaacatcatttgttgaaaagaatatctttctcctatgaattgcctttgcacctttccaaaaatcaattgaacacatttatctgggtctatgtctggagtctctgttctccttcatttatctacttatgttgattcgtttggcaatcccatactgtactgattattgtgatttttatagttaaattttaaaactggtatgactcatctaattttattgtttgtttttaaattattttggccattctaggtcccttgactttccacaaaaagtttagaatctggttgagagattatttttgggtggctttaaagtattaattcaatgtattttatagatctaagtctactggggctatttcatcttgatgaatttgg

SEQ ID NO: 95450 - DNA, 505 bp, Homo sapiens
tattttcctctaaaagttttgtagtttttccttttacgtctagatctatagtctatgttgagttcatttttgcattaagtgtgaggtgttgatcaaagttctattttttttggaatgtggatgtccaattcaacatcatttgttgaaaagaatatctttctcctatgaattgcctttgcacctttccaaaaatcaattgaacacatttatctgggtctatgtctggastctctgttctccttcatttatctacttatgttgattcgtttggcaatcccatactgtactgattattgtgatttttatagttaaattttaaaactggtatgactcatctaattttattgtttgtttttaaattattttggccattctaggtcccttgactttccacaaaaagtttagaatctggttgagagattatttttgggtggctttaaagtattaattcaatgtattttatagatctaagtctactggggctatttcatcttgatgaatttgg

SEQ ID NO: 95451 - DNA, 535 bp, Homo sapiens
ctgtttgactctggagactatggtctttatacctcttctctatcaggttttccatgttgtcaggagaactttgcttgtcccataccttgtggccttgattctgaaaacttctcattttggaaggtcaagcaatttctcaagtaatgarcctgactttgtgatgccctagatggcactttatagtcaatcactcatttaataactctttattgaacattgaacatctacaatggggaagaaattgcttaggtcattggggatcttattattttggtcattaagacagggagagccttgagctcatggagctttatattttatcaaaaagacaccaaaaaatgaacagatatctgaaataatttcagagagtgataaatgccatggataaaatacaacagaataatgtgatggagataaactgaagctgagatgccaatatatagagagtagtctaggaagtttgctttggggaagggacactgcacctgagacttgaatggctacatggcagcaaaactttccaggacatgggagc

SEQ ID NO: 95452 - DNA, 535 bp, Homo sapiens
ctgtttgactctggagactatggtctttatacctcttctctatcaggttttccatgttgtcaggagaactttgcttgtcccataccttgtggccttgattctgaaaacttctcattttggaaggtcaagcaatttctcaagtaatgagcctgactttgtgatgccctagatggcactttatagtcaatcactcatttaataactctttattgaacattgaacatctacaatggggaagaaattgcttaggtcattggggatcttattattttggtcattaagacagggagagccttgagctcatggagctttatattttatcaaaaasacaccaaaaaatgaacagatatctgaaataatttcagagagtgataaatgccatggataaaatacaacagaataatgtgatggagataaactgaagctgagatgccaatatatagagagtagtctaggaagtttgctttggggaagggacactgcacctgagacttgaatggctacatggcagcaaaactttccaggacatgggagc

SEQ ID NO: 95453 - DNA, 583 bp, Homo sapiens
ctagcctggactgtttgactctggagactatggtctttatacctcttctctatcaggttttccatgttgtcaggagaactttgcttgtcccataccttgtggccttgattctgaaaacttctcattttggaaggtcaagcaatttctcaagtaatgagcctgactttgtgatgccctagatggcactttatagtcaatcactcatttaataactctttattgaacattgaacatctacaatggggaagaaattgcttaggtcattggggatcttattattttggtcattaagacagggagagccttgagctcatggagctttatattttatcaaaaagacaccaaaaaatgaacagatatctgaaataatttcagagagtgataaatgccatggataaaatacaacagaataatgtgatggagataaactgaagctgagatgccaatatatagagagtagtctaggaagttygctttggggaagggacactgcacctgagacttgaatggctacatggcagcaaaactttccaggacatgggagcagccttcctgattcaagatgaacttggtgtgtttgagg

SEQ ID NO: 95454 - DNA, 579 bp, Homo sapiens
atgacccattctcggagcatatgttgtctwgtagcccttgtcctgcctttctaggagatagagtttctcatggacccaaacagggcttcttaatggagatttataacatcaaaagggattacatgagaacaaagtaattatccttcgtgtatgagtatcaacccaatttacgaaggagtgaaattagacactgcagttaattacagggacagtctcaactttgtggaccaattagggctcattggttgcaagcaacaggaaccaattccccttctacattaagcaaaaagaatacttattagcagtagtcagtgagcttacaaaatttagaggtagttgaaaaagcagtgttggtagcatgacaggcaccaagccactgtgaggtctcctccatgggaagaaatgaattccaactaagtcttccgtccatgtatcattctgctccagttctggatcccagaagagcacatcccattggccagacttaggcaatacctccccttcttgagctcaccctggctgggagagctaagatgtcaaagaaagttcctttaggaaactctttatcttccagagtgg

SEQ ID NO: 95455 - DNA, 593 bp, Homo sapiens
gttgtcctagctacttgggaatgagtcctaagaagattcatcttacttctgatgcatcacatgctctgtgttgcaaagcacacttggcatagccaggagcatcctaggttggcctagtgctagatggcaggcattgaaaactgtcaacaccagtacaggaacaggaaagacaaaccatggaactagatgagaccctgatactgagttgtggacagatcaactatagtgatacaggattcttgattgtctgcaacagagaacttttctaagtaacctatgcacatgataatttgatttgaatgcttttggggagaatgcagtatcatcaggaaaatttgagaacstggctcagaaaatagacaaaagggatgaaggtaccattaggatccctgggtagaaactccctgctaaggatgctgttaccagcactgtgatcactgccacgtggcaccaccagcatccatagtcctgaacacagagcagtggttctggactctacacttgacacagcctccagggatggtgcttgattgatcctgtgcttttacctagccccttaagacccaagacatatggtaacatacagagtcaag

SEQ ID NO: 95456 - DNA, 593 bp, Homo sapiens
gttgtcctagctacttgggaatgagtcctaagaagattcatcttacttctgatgcatcacatgctctgtgttgcaaagcacacttggcatagccaggagcatcctaggttggcctagtgctagatggcaggcattgaaaactgtcaacaccagtacaggaacaggaaagacaaaccatggaactagatgagaccctgatactgagttgtggacagatcaactatagtgatacaggattcttgattgtctgcaacagagaacttttctaagtaacctatgcacatgataatttgatttgaatgcttttggggagaatgcagtatcatcaggaaaatttgagaacctggctcagaaaatagacaaaagggatgaaggtaccattaggatccctgggtagaaactccctgctaaggatgctgttaccagcactgtgatcactgccacgtggcaccaccagcatccatagtcctgaacacagagcagtggttctggactctayacttgacacagcctccagggatggtgcttgattgatcctgtgcttttacctagccccttaagacccaagacatatggtaacatacagagtcaag

SEQ ID NO: 95457 - DNA, 489 bp, Homo sapiens
aggaaaagcaagtcttttcaacaaataatcctggacctactggatgctggaatggaaacatttaactcagatccatgttttccatcgtagacacaaattaactgaagataggttgcagacctgactacaaaagcaaacactcgaaagcccctggaagggaacataaacatctgcctttgaaaactgagcatggtcaacattttcccagataaaacacagtacgtactaaacataaaagagaagtttgacagacttcctcaaaattaaaaactttgtcccataaaaagacattaagagaatgaaaagtcaagctgcaaggaggaaatataacaatgtatattatatatatgtgtgtatatatacacacacacatacacmcatatacatacatacacaaagagctgtggctctggacttaaatattttatcaagagaaatgaaaacatatctgcacataaggcttcttcagagatgctcattgcatgttta

SEQ ID NO: 95458 - DNA, 487 bp, Homo sapiens
gaattctcactaacttttgacgactgaatgtgtttgcctttttccagctgttggttgktttttttcatggcttcttccagggcctctgtcttgtttgctaatatgcggttctttgtcctgtatccattcagtagccaatgtaaaatggtgccaaacttactattttagattgaagggattagctcctctttccagtgattttaccattgtctgttcttagctggtgccaggttggaaagggaagagttgttggctggtttgttggtgtttttacctccaggtactgtgtcattccaatgttatttttactgtctcatgtggagtgtcctatatgatttgaataaaagtcccactccattgctgtctctgcaaggctgactcctttgaccctggcagaaagaacagttgatgatatttggtgaaaaaaaaaaagaaaatttgcccatggtatgactgttcttctccttggcgggaaacttctacttga

SEQ ID NO: 95459 - DNA, 614 bp, Homo sapiens
tacattcaaaggcatcttgggccacatgtgacctgtgggccatgggttggacaagcttggcctaaaaacgtattgtttgtctaggtagggtcatgattcatgaagctattgagcaagcattttcatggcactcatatcgcctgtcagactttgtcccaagtgcattgtaagctcttccttgcctaatctgcacaaagaccttgtaagatagggtattagttagtatcacaaactgggtggctaaaaatgacagacatttattgcctcaccattctgggccaaggagcccaaagtcagggtgtcagctgggtcatgctccctctgaaacctgtaagggaattctgccttgcttcttttgactcctggagtratggcactctctggcatattgtgattggcagctccatagcacctctgtctgcttctactttcatgtggcattctccctggctcttttcacatcatcttccttctgtctgtgtctgtctttgtgtccacatttctccttcttataaggacacatccaccttactgacctcatcttaatttgattcctttctgtagattctttttgcaaacaaggtcacattaccaggtacctgaggttaagggtt

SEQ ID NO: 95460 - DNA, 620 bp, Homo sapiens
ggggaccttgaactcaagtctagtcagggatcactctattaagagatcaagtcaacactcaattctcctacagactcagataggatagtattttaatttctcsttgatctgctccctcagaccctagaccatgggcactgcagatttttgcaccttttgtagaggcagggtttcaccactaccagagactttaccatcatttctatgtgaagggaaacagtgccctttcagtagacaacgttaaatcagccatcagacgtgggtcatggtgggtttgccgtgactgccacaaacacgcctcaccgaagtctgccaggggacgccataccctcccctagaaagtaagaaacagagaaaggctttctcctgccccggactgtctttctctcagctctaagaaatttctttacagctgttactttatcctggcctgtctcttgagtaagaaaactgctggaaagagtctgccattcactcagatcataatcagggagcctgctgtcactcaggaagggctttaaaaaattcttctgatttactgtgagtgcaaatctctgatattcctgcatctccccatccatcttattttgattttacacatagtgcgattttgaaaggaa

SEQ ID NO: 95461 - DNA, 620 bp, Homo sapiens
ggggaccttgaactcaagtctagtcagggatcactctattaagagatcaagtcaacactcaattctcctacagactcagataggatagtattttaatttctcgttgatctgctccctyagaccctagaccatgggcactgcagatttttgcaccttttgtagaggcagggtttcaccactaccagagactttaccatcatttctatgtgaagggaaacagtgccctttcagtagacaacgttaaatcagccatcagacgtgggtcatggtgggtttgccgtgactgccacaaacacgcctcaccgaagtctgccaggggacgccataccctcccctagaaagtaagaaacagagaaaggctttctcctgccccggactgtctttctctcagctctaagaaatttctttacagctgttactttatcctggcctgtctcttgagtaagaaaactgctggaaagagtctgccattcactcagatcataatcagggagcctgctgtcactcaggaagggctttaaaaaattcttctgatttactgtgagtgcaaatctctgatattcctgcatctccccatccatcttattttgattttacacatagtgcgattttgaaaggaa

SEQ ID NO: 95462 - DNA, 620 bp, Homo sapiens
ggggaccttgaactcaagtctagtcagggatcactctattaagagatcaagtcaacactcaattctcctacagactcagataggatagtattttaatttctcgttgatctgctccctcagaccctagaccatgggcactgcagatttttgcaccttttgtagaggcagggtttcaccactaccagagactttaccatcatttctatgtgaagggaaacagtgccctttcagtagacaacgttaaatcagccatcagacgtgggtcatggtgggtttgccgtgactgccacaaacacgcctcaccgaagtctgccagkggacgccataccctcccctagaaagtaagaaacagagaaaggctttctcctgccccggactgtctttctctcagctctaagaaatttctttacagctgttactttatcctggcctgtctcttgagtaagaaaactgctggaaagagtctgccattcactcagatcataatcagggagcctgctgtcactcaggaagggctttaaaaaattcttctgatttactgtgagtgcaaatctctgatattcctgcatctccccatccatcttattttgattttacacatagtgcgattttgaaaggaa

SEQ ID NO: 95463 - DNA, 620 bp, Homo sapiens
ggggaccttgaactcaagtctagtcagggatcactctattaagagatcaagtcaacactcaattctcctacagactcagataggatagtattttaatttctcgttgatctgctccctcagaccctagaccatgggcactgcagatttttgcaccttttgtagaggcagggtttcaccactaccagagactttaccatcatttctatgtgaagggaaacagtgccctttcagtagacaacgttaaatcagccatcagacgtgggtcatggtgggtttgccgtgactgccacaaacacgcctcaccgaagtctgccaggkgacgccataccctcccctagaaagtaagaaacagagaaaggctttctcctgccccggactgtctttctctcagctctaagaaatttctttacagctgttactttatcctggcctgtctcttgagtaagaaaactgctggaaagagtctgccattcactcagatcataatcagggagcctgctgtcactcaggaagggctttaaaaaattcttctgatttactgtgagtgcaaatctctgatattcctgcatctccccatccatcttattttgattttacacatagtgcgattttgaaaggaa

SEQ ID NO: 95464 - DNA, 541 bp, Homo sapiens
tctggctctggacaagttattcctcctctctgggcctcagtctcctcttctgtacaatgggctgctgatctctaagagtctctcctgtggagacaactggtacccttggagcctcattcacccttgcctttgttttcatttctcctctccagagtgcagtgggggccctcccagctacagctgcgcttctggaaggagcttattgataggcacagagtatgggtgagtcttcatcccaggcctcagccaaactctgggaaacactctgcattccctggcagacagctgcaaccccaagcagctccataggaaaactgcagaatggcagaaaatgcaagggaagccaatatggaaagggctttttccacatgctgacagytttcttcacaagtatcacaatgaagctatttgagaatcagcttgcaaagcacctggctctaaatagccttctctccctagtccttaagtagagacaaagcagctccttttatcctctagaagtgccctttcctagggcctgacccacaaatgggtgctcaaa

SEQ ID NO: 95465 - DNA, 294 bp, Homo sapiens
taagagacactaaaacacaattttacacaaaaatcaaccctgatggtaccagtcaaataactgggtctttttgtgaaaaagaaatgaaaatacctcccagtagccacaaaatactgtaatcttgtggttctaagaacctttagtgaataacagtaagacatggttggattttgtgttgatttcaggttacatttatttcagytaaagaaaaggtgtaaacttgtgagatatatcatttctccagacttgagcacatggagaggattacctgcatgtgtgtttggtgagaggaag

SEQ ID NO: 95466 - DNA, 553 bp, Homo sapiens
agtacccttaccagcccctaagcgcggaggggcaaagggtgagacaggctaatggtgaagatcccttttacatttgctctctggcaacagcacattaactgcagtcctcaattatgtccccgtcatgcttggctcaacattgtcccgtacagttaacaattggtgagtaaagaaatgtgagaatgtggaaactggacactaaagttataataggaaaattatcatcttgcttctaatgccagtagaagtacagtagttatgccaagaggttacttaacattatattaygattggtaaagactctgttttctgattaccatgaaatatagctagaaataattaacaatgttacatgcaaacaaactgaaccgctaggaaaaaagaaaggcaacaacattgtttaaaatgaaactcaaaaatcaaaaatcaaaacttaagtatctcaatattaataaaatacccagaagaacgctgcatagcaaacttctggaatacagccaaagctgtactgggagggcaattgtttaattcttaaaaaaaaaaaataaagtat

SEQ ID NO: 95467 - DNA, 593 bp, Homo sapiens
catcaagtttttagagttcaaaagcagtcacagagtctgaagcagcactaaatggggtgggacattctccctggagatcctagaggcatgtcaaactaggatttttctcttctgcaagccctattccttaccctctcatcttctcaacctctttgagttctcaaggcatacagattcacttcctggggacaagcttcttccatcccaaagccagaggccatgtctagcctccgcagtgggagaattctgaaatgtgctgtgctgtgcaagttaacttgttctcagttgggatggaggcactaattggccagtctatctgttcctacagcattacctctctttataatgattatcaatgagagttctgcttgtaaggagataatcagggaatgacaatgttctcttcctctggcwatcagtctattgcagaggaaggcttgtgaacctaggcacagatttaggacccatgggaagctctttcaatgggaaaaagtccaaggctgtagccacagatcaccccttagtcagcagcctgcttttcccctcagtctctcagggaagtggtaagtgtggatgacaagttcactaaatcc

SEQ ID NO: 95468 - DNA, 462 bp, Homo sapiens
gtcatgtctaaaaactctttgcaaaactcaggattttgaagatgttctcttacattttcttccaacagtttttaaatgttatattgtatccttagatctacgcactattttaagttaatttttgtatatagtaaaaagtatagattaattttttatatgtatattcagttgttttatcaccatttgttgaaaaacctrtgcttcctccattgaattatcttcgcacctttgtcaaaaaataaattggacacatttgtataggtctacttctagactcaattctgtgtctatcattttgcaaatgccacactatcttgatcactgtgactttatcataagtcttaagttaggcagtatgaatctcccagcttcatttttctttttcaaattattttgtctattctagtttctttgactttccataaaaattttagaatcattttgtcaataaataaagagaat

SEQ ID NO: 95469 - DNA, 598 bp, Homo sapiens
tcatcagtgagctgtgggacaacttcagacagtctgatatatgtctaactggagtccccacacagatgagagagaaagggaggacacaaaaatatatgaagaaataatggcctcaaattttctaaatttgatgaaagctgtaaacccagagatccaagaatcttagcaagtcccaggcactaaaatctatacccagcacatcataatcaggtacctcaaaaccagtggtaggagggaggggtttcaaaggagcacaaggacagtttttggtgagagggatatgttaattttcttgaatgtggtggtagttttccaggtatatagataacatgatatgtgatatgagtgacaagtgaaaacatttcaagttgtgcacttaaaatatgtgctrtttattgtatgtcagtcataaccccaataaaactgatctattaacaaacagtaacaaccctgggtgcatattagaatcactgggagaactttgcaaaaaaatagaaatttccgtcttcaaaggttctggtttagatagtctgggatgaggcccaagcatccgtatttttaagagcttggcaattctatttggcaagtttgtttgaaa

SEQ ID NO: 95470 - DNA, 543 bp, Homo sapiens
atcattaaatgttcttttaattgtctttgttaatgtctacataataccctattacattttatgccataatttatttaacttttcccctatattgactgtttaggctttttcacatttcttgatattgttttgatgaatatctgtatctctatatctatccatctatctagatcttagtctgaagaccttttcaagagaatcctagaaatagaataattggatcaatgcacatgaacttttccmggcttttgatccatctccaactttttttttccagacacaggccagttcacacaaacaccagtgggatattaaagaactctcctcaccacaccctcatcatcattcgtaatattgattttcatttcatgcactgccatgaagcagagaaggctgcaacagcaggacagtgtttggaataggagtatagctcgggcagtcaacacctaaggaagattcagactcaataaacagaactgtagagctatcagcagcacagacactgtggttggaatacagggagacatacaggaccaatgatga

SEQ ID NO: 95471 - DNA, 640 bp, Homo sapiens
ctccctctcttcctccttccctccctcctttcttctttttctccttctaactccctccctctttctctccccctccctccttcctttccctccctactttcattatctcttccttcctctgtctctccttctccctctccttcctccagaggcatccagtagaggccasgtgtgctactaaacgtccaggacaggccaccacaacaaagagttgtgcagccctaaatgccagtagtgctgagactgagaaacctcactactggcaatggggagccactcgaggtttttgagcagggaagtgtcaaaaggatgtgggtgtcgatgtgctcataaacctgatcaaagttaagtagcatgaggacatcttactttatgcagtggggagactcccagaaagctttgagacaatcaatattttagaaatgcaatcctatcttaaactagggcagctgctaatgagaagtccagggatctgtggtgcccggtttgagaaactcagctctcctgccccatctccttggccagcctttcagagggaactcagagtgtctgtcatagattgattcacctctgctgtgttttcgtacatctgaaaagggtcacttcaaggttaggacttcatctggtcttgcaaaagggg

SEQ ID NO: 95472 - DNA, 454 bp, Homo sapiens
gtgtgtgttctttgaatggctggatatgagatccctttygtattcatagatcaactttagctatttgatctactagtttctgtgaaagatgtcaaaatcattatgattgtggatttgtcaatttatctttgtaagtctttcaatttcgctttatatttttgagaccatattgtcatataaaagctcaaaattatatacttctggtaaaaataaatctctattatctctatcactaataatgcaaatatatatatttgctctattttgggtttctattggctagtttgctgggtatggctttctttcttacatttctctcatgttatgttttagttgtgtttcttgaaaggatttttaaaatgttatctaaaaatctttttttgtgatgaattagagccacttattctgattagagttgtataaggattttttctacaatcactgtacttttcta

SEQ ID NO: 95473 - DNA, 600 bp, Homo sapiens
atcaatttctctcttaatacttctttagctgtgtcctagagattctggtaggttgtgtctttgttctcattgattttaaacaacttatttctttctttatttattttattatttacccagtggacattcaggagcaggttttagagttttcttttagttgtgcagttttgaatgagattctgaatcctgagttctaatcttattccactttggcataagggactgttttgatttcmgttcttttgcacttgctgaggagtgttttacctccaattatgtggtcaattttagaataagtgctatgtggtgctgagaagaatgtatattctgttgatttggggtggatagttctgtagatgtctattagctctgcttggtcaatagctgggttcaagtcctaagtattcttgttaatatgctgtctcatttatctgcataatatatctgactgttaaaatctccttttatgattgggtagtagtctaagtctgtgtaggtctctaagaacttgctttataaatctgtgtgctcctgtattaagttcatatatttttaggatcattagttcttctcgttgcactgatccctttaccgttatgt
